United States Patent Application Publication US 2011/0183924 A1 - sequence listing, part 202

SEQ ID NO: 478056 - DNA, 992 bp, Homo sapiens
acaccaagtgggtcatcgtggcggggcaggaccagtgctatgaactcgctgcgcggcgcgggggggctcctgctctccagccccctccctatgcggacacccagggcgggccccagcggggtctgtgctctgtctgggagcagggatgtggccagtccaggccctgtgtccgcagatcccaaagggtccagggagcctggccgggggcagaccagggcatctccatcctgcttcaggcgctgggggagcacgggcagggcggggtcgccgtcccacgccatcgcccctgagccaggcttccttctgcgccctgactctgcagggactgggcgggagaggtgcgcccgcctcccttccctagttctgggtgattcacatcaaacaggaggcgtctttgttcctccctggctcttcgctcccacgcgggcctttccttgctcctcggaggccgcgaggcgtgagcaggcccaccagaaagcctcgccaactgaacgtcggcttcctttccctaacgagctaagaaaactcggtcgaatgcttgcaccgatgcagatgttggtggaaatctgtatggtggtgtctggtccaggggaaaaacagaatatctaagggcttggtaaaacataattttaacatacatctagaaaacttgggtattcaaaagactcatagataaactcatgagaaaaggaagaaggacagaacacaaaaatatgcaacattaaatatgagaaaacagaattgcagatgcagaagagatttattttaaggacattttatgttaattatttgttaataaatttgaaaatttggaggaagtaggtgattttccagaaaactatgtcatcactattatctcatgaaagagtaaaaaaccagaataaaccaataatcataacagaaatatgaaagtttaaagcatttaccacctgaagagtccccagctggaattgaaatgtagagtgtatattagctatttttatgggatcaac

SEQ ID NO: 478057 - DNA, 803 bp, Homo sapiens
gtgtgagcatgagtgcacgtgcatgtgttttcaagtgtaaaacacgaggagatgtcagtcgggtgccactgctaatgaggcagcccacaactggtctcgacgtgcgtctgtgcctgtaaaagatgaaagtgcagcagcaccctgagaaatcacacatcttcgccgtcagtaccgctcagggccccagctacctgttctgcgtgtctgtggctgggctgtgtagtagaatcccgtgtcaaagcacccaccctcagaggctcctgggggaggcccggttctgtccagcagcatgggagagagatggtgctgatgaagaggacaacacggggctgtctgcagagcacctgccacgcgccaggctctgtgtccacaagcacggcggctgctcccacatgacggagctcgtgcggcagctccaggactgtctggtgccagagccccagctctccgccagccccaggccactgtgcgaggccctcagtgaagagggggccgtggctttgactgcaggatgcacgggctcggggtcggtttcagtcaatccttgatttctcatcgttgcagcttctcagaggagtcagttcacaacgagcagaacagcttcctggagaatcctccacacaggaggtaaccatggaaaaagtgtctacatatggctctgatatgaaaaactaagctctggacttaaaacagtgtagcagtccataaaccagagaggtgaagtgaagagacccacctgagtgtgtgcagcagcagcccaggccgtctgtgccctcctcatgctgaagacctttccagagctc

SEQ ID NO: 478058 - DNA, 995 bp, Homo sapiens
tggacccctctggagtgggctgaatggtgacccctcaagatgtccacaccgtaaccctggaacctgtcaatgtggcttatttggaaatagggtttttgcagaggcacctccagaagccagaagaggcaggcggcccctccacaggaccctgtgacccccagacagacggtccctccgcaggaccctgtgacccccagacagacggtccctctgcaggacgctgtgacccccagacagacggtcactcctcaggacgctgtgacccccagacagacggtccctccgcaggacgctgtgacccccagacagacggtcactccgcaggacgctgtgacccccagacagacggtccctcctcaggaccctgtgacccccagacagacggtccctccgcaggacgctgtgacccccagacagacggtcactccgcaggacgctgtgacccccagacagacggtcactccgcaggacgctgtgacccccagacagacggtccctccgcaggacgctgtgacccccagacagacggtcactccgcaggacgctgtgacccccagacagacggtccctcctcaggaccctgtgacccccagacagacggtccctccgcaggacgctgtgacccccagacagacggtcactccgcaggacgctgtgacccccagacagacggacgctgtgacccccagacagacggtccctccgcaggacgctgtgacccccagacagacggtccctccgcaggaccctgtgacccccagacagacggtccctcctcaggaccctgtgacccccagacagacggtccctccgcaggacgctgtgacccccagacagacgggggcaaggaccctccacaaagatgaggtgaggtgttgacacagtattaggggcacatatcttaatggataggtatcccaggccttgtacagtgtggactagaatgatgacagtgggcaccctgccttgctcctgatcttaaggggaatgcttct

SEQ ID NO: 478059 - DNA, 732 bp, Homo sapiens
tgggcctcaccccacagcagcagcagcagcatggctggcactgaagggtccacagaggacggtggcccccccgccaccctctctcctgcctgtagccatagccccatgcctgtgcctgaccttggcctaagggggccctcaggggcactccaggaactcccagcgggagcaacctccagatgcccccaggagcgtctctgggagcacccctctcaagagaaccccacagagtgtcctcccatcatcccccaagagcatcccccactcatggccttccctgtgcagagcccagcatcgcccagggaccccccaggcccccaggacactgcccccagcacacccagggctacagggctcctgcatgaggtggaccatcctggggcacagaaggtcccttcccagtcaccaaggccccatgaacccttcaggggcacaggcacccctgggggcttcccccagcccctgataacaacggaccctctgcccacccgccagattttgtctgtcttcccaggggaactgtgtgcacgcgtctcttccctcttttcttgggtgctggccctgggcatttggcggtttccagccagcctcacaggcacatctggtgggctctgcagcaaagacccttagaaggccacactcgaggtccagggttctgtgttgggggatgtcgatgtcttccatggggcagatgtgtccctgtcattgtctttctccctcttcccattggtc

SEQ ID NO: 478060 - DNA, 535 bp, Homo sapiens
agcttttggatacaaaattaaaaagaccagcctggaagggatgatgtctatactggcaatatttcttactgtcatcacgttttgtgtaaaacaaatacctactattttgagaacaactttggatatgtttattttggttacaaaatttaaacgatcgttttctgagtttgatgctgttttattctcctatttactgagccccatctttacccagtcacccactgaagaatatcttgcttgcttccaagttttggcaactataaataaagctgctataaatgttagtgtcgacatacgtgttcagctcatctgggtaaatgccaaggagtgtgattgctggatcctatgcagcaatgatgagcgttcctgttgctccacaccctggccagcatttggtggtgttggtggccgtgttttggccattctaataggtgtgtagtggtatctattgttgtttaatttgcatttccctaatgatgtataatgtgtcttcagagagcaaaagtttttaactttaatattctgctgatctatg

SEQ ID NO: 478061 - DNA, 892 bp, Homo sapiens
ttggaatcaaccacattagaaactaatggaatggaatggaatggaatggaatggaatggaatggaatggaatggaatctacccgagtggaacggaatagaatggaatttaatggaatggaatggaatggaatggaatggaataaaatggaatgcaatggaatggaaaaaaaaccgagtggaatggaacggaattgaatggaataaccggagaggaatggaatggaatggagtggaatggaatggaatagaatggaatggaatggaatggaatggaatggaatggaatggaatggaaaggaatggaatggaaacaacacgagtggaatggaatggaatggaatggaaaggaatggaatggaatggaatggaatggaatggaatggaatggaatggaatcaacccgagtggaatggaatggattggaatggaatggaatggaatggaatataatggaatgcaatggaatcatcccgagtggaatggaatggtatggaatgcaatggaatggaatggaacagaacggaatgaaatgcaatggaatagattgaatgcgagtggatttgaatggaatggaatggattggaatggaatggaatggattgcagtggaatggaatagaatcatcacgaatggaatggaacggaatggaatggaatggaatggaatggaatggcaaggaacggaatggaatcaaccggagaggaatggaatggaatggaatggaatggaatccacctgataggaatgaagtggaatgtaatccaatgtaacggagtggaatcaactcgagtggaatggaatggaatggaacggaattgaatccaatggattcaactggaaagcaatgcaatgaatttaaatggaatggaatggaaaggaatggaatcatcc

SEQ ID NO: 478062 - DNA, 2206 bp, Homo sapiens
aaaccattttgctggtgaggatgaaagctgtgtggaagagggcaataagatcagctggagcattagattctcatagcagtgcgaaccctattgtgaactgtgcatgcaaggaatttaggttatgcactccttatgagagtctaattcttgatgatgtaaagtgtaacagttttatcccaaaaccagccccccaggaccccccaccacttcatcccccggcacggtccttggaaaaattgtcttccatgaaactggtccctggtcccaaaaagaaagttctagctcatgtaaaggtcccagaggaatttcttgacttttgtatggaagccatacaggagagactcatgaggggaatggaaaggagttgtaagggccctgatgtttggagcctaacaaatttcctggtggctgagtggacttggaaggagagaattctatgaacaacaaagctacttattctccaaaatacctagacttgggcaaggttcatctccttagtagtcattatagaagcagggacagaatttgtttccaattttcatgacttttaagcccctagacctctaaaataatctaaggaaagaagaggaaaactcaaaatattactgagactgaactttctaccaggcagaagagaaaaagaaagaaagaaagtttcattgcctccactgttgtgaaacaaattcattcctgttcccaaaatgatttattatatgtatgtgtgtgtgtatgcatgtgtgtttatagaaatggtattctatttactgaataacataacattttcttctatgccttttttttttaacttaacaaaatatattggacatcttgcattttttcaacacttgcaaagtgtttaactatatggatatatgctgtcttgttcttgataaggtgcttttggaaaaaataagtactaagagatccagaaagtattacattgactttctagaagcagagtttgcagctggttatgctgttctaagaaagttttagctctaggaaagtgtgcattcatgtttttcataaagaaaataattgcacagtattctttgtattttttcaacactgacagatggtaagtgaacagcctgggaggaggagaagtgacccaacttgcttctgcagtattagaaaagatatcaaagtaagaggcagacactcccagtgccaaagattttgttttctttcttactcatctcattcaaactgatcacaaattgctttattgcattctactgtgtcacttcataataaagtaattcctttctacctttacataaaggagtgtcttagcctatgatgaaatgattttctcagttcacctgaggttgagagtaattggtaatgaaaattattcagaaatctgtcataatcatagcaatagtatatagaaacacagaatatataaatttattattcggcatgaaaagacaaaaggaaactttctaatgagcattatcctgtgggttgcaggaagcacaagaagtcaggacaaattttgatgctattccctcccaccaaatgtttatgagaattgtaatgctttgcacaatgctagacttaggttgtcagttgaataaacaataatattgagagtattttctgtattgcaggtgaaaattactttatcaacttttcctttgtgtttagcatatttgtagaatcggcctaacagtctctaaagtaaaactctgagacatccaatttgcatatattcttgaaaaaaaaaaaggtttgttaactcatcgaaaaaggcttttgtctaatgaggctgggggtggtggggaaatatgaataaaaaatagtccatatgcttaatttatgttttcaaatatatcgcatatccaaaatagcagattatatattaatgtatgtgattattgggttaaaatttatctttcctctaataataatgataataatgatgatggtgatataatatatattgagacctaaccatgcttcaggcattgctctacttgcttgtactgaacataaactcttctcacacctgaaaactgagaagcaaaggtatagatgttcctacctcagaccaacagggaaatgctaatcaacagtggaaattggattgggggatggaaaaataaatcgtcaattcattcacaacgtaagatatgagaatgggactgagaatctaaaagtggatgttaggaacacaggcaaaggcaaatacaaagtatac

SEQ ID NO: 478063 - DNA, 572 bp, Homo sapiens
aaaaagaaacaaatgggagcagtgagggaagcatttcatgtatttttagagctactagggaaacatacacctctacacaaatctgcacacttaaacagcaatgcacacacagtacaaatacagatgtcattcctttcctttttaaatgcagagacttctctgttctctcatctgaaagaaaaagatgaggagttacttcttgtaaatgaacaaagaaagtggtttcttgaaatggaatctactcctggcaaagatgctgtgaacactgttgagatgacagcaaaggactcaaaatattatataaactcagttgaaaaagcagtagctggatttgagaggattgactccagttttgtgagaagttctactgtggaagttgtcaccaccactccaaccttcagcaaccaccaccctgatcagtcagcagccatcagtattgaggcaagaccctccaccagcaaaatgactatgactcactgaaggctcagatgattgttagcattttttagcaataagatatttgtaaacaatgtatgcattatttttagacataatgctattgcacacttaat

SEQ ID NO: 478064 - DNA, 699 bp, Homo sapiens
gaaatacactctaaaatggctttgaacggttggggacggtcctttaatcttcctctggatcaccatttctgtgcaagaatgggaccccaacatcagcctattgttacagtaggtagtcaggcccacctgagcagggcgggaaagggcacccgccacacaccaagaatgtcaggccaggttctgagaaaagtgaccatgaacacagtaggcaaaggcctgaccttatacggaaatgaaaaggataatgaaacggcccctctgattaagtgctgtaaagtaatgaatgacagcagacatacaggtgcagtgggaatcatggcaagaactcctgaactggactggaggaatggttgggatccagaaggacttcctggaggaaggggaatgaaagagcagtttgagtttggcatgtggataagctttgtgcatgttgaactggagatacctgtgagccttctaagtagtgatgtacagaaacagctgaatctgtggatctggagctcaggagcagaacccaaaggagatgaagatatgggcatcatcagattatggttggtgattgaaatctcaggcatgagtgatgctcccaagaaaaatgtgtgctgtgagaagatagctgaccttggaataaccctacagagcactgtaaatgtgtgatgatcagagaaagatggtcctgtgtctaagcccagacttcct

SEQ ID NO: 478065 - DNA, 766 bp, Homo sapiens
aaccttgctatggccactgttgagtgcccagtctaccagcagaagagaccaacactgagtgctttatatggactcattcgttaagaagagtgaacatcacccgaggactttgcattgtcttctggggaaagggccttcagggcagagttgaggctttccagaaggagaagagattctgccagtgggcagccattcaattcatgcccaagaggtccagcctgcccttcattagggcttgccctgcagacttcagacttgtccaaccaaccccacaattgtgtaagccagtcatttgcaataaatctaaaggtgcccaaaaatacagtgttgtcatagagaagaggaacccaggcttccacagatcttccatttatggagttggagatgatctgaagagagctaatttggccttaaaagctggccctggtgcagacaagttcaagtccctaggtgtccgaagggccccaggattcccagttccatttctagagtttgtcagctttaggacttccaaccaagtagctaccatcacgctgctgaaccctggagagtctggtcatttggcatctcacaccccactgagcactggctctctgaaagataccacatcagggcctatgagcagggcaggagaggacaaaatatataatattgttgttcaaagagctaaaatcaatttacaccaataaaatgtgcacacaaataacagtacggatcagcttgtaaaatttgccatgtccaaatttaactgatgaatttggttaca

SEQ ID NO: 478066 - DNA, 978 bp, Homo sapiens
ctagaggtttagattttgctcatagataagaaatgaattttcagcctcaaccaaggaaaatgttttaattctgagtccacagtatctcccaggccttcattgatgacaggtcagagaaaaatggccagaggctttgtgactgtcccagccactccagctgtggctgaaaggctccaacgtacagctcagactgtggcttcagaaggtggaagctccaagccttggcaacttccacgtggtgttgagcctataggtgcacagaagtcaagaattgaggtttgggaacctccgcctagatttcagaagatgtatggaaacgcctggatgcccaggcaaaagtttgctgcagggacagggccctcatggagaacctctgctagggcagtgcagaagggaaatgtggggtcagagcccccacacagagtccatactgggtcactgcctagtggagctgtgagaagactgctaccatcctctagaccccagaatggtagatccactgacagcttgcactgtgcacctggaaaagccgcagacactcaatatcagcccgtgaaagcagctgggagggaggctgtaccctgcaaagccacagggatgcagctgcccaaaaccatgggaacccacctcttgcatcagagtgacctggatatgagacctggagtcaaaggagataattctggagctttaaaatttgactgccccactcgaattcagacttgcatgggccctgtaaccccgctgttttggccaatttctcccatttgaaatggctgtatttacccaatacctgtaccctcattgtatctaagaagtaactagcttacttttgattttacaggctcttaggtagaagggacttgccttgtctcagatgagactttggactgtggacttttgggttaatgctgaaatgagttaaggctttgggggactgttgggaaaacatgattggttctgaaatgtgagggcatgaaa

SEQ ID NO: 478067 - DNA, 860 bp, Homo sapiens
ctcagatgtttatcatagataaggaatgactctctggaaacctacccatcacgtgagtgcttctgagggtcgtcaaggaggcgtctgcttaagcggtacctcagtgtgctcacagcagcagagggctactgttcagaaggcattgctccattatccactagcttcaagaatttctgttgagaagcccaatgccattaagatttccagtcatggagagacatctttcaatattctgcctgagcaggggcaagggatgggtataaacctgaccattagtgtccttgaagccaacagacagatgaaaaacaaatggtccgtgctttcatcattcaatatacagattttcacatccttttccttctttcacaggggaatttccagatgtgccagcaacttgattttgggcttctcagacttcagagatgtgagaaataaatttctgtcgtttaagccacccaatctatggcaatttgttacaacagcctgaactaaggtactgttaggcctctgactttgttcctctcctttggtattggtttggctcttctggtctttcatttttccatataaacttgagaatcagttaatatccacaaaataacttgctgggattttgattgatttgatttgattgtatcaaatctatagattaagttgggcagaactgacagttaaatatcaagtactcctatccatgaaaatggaatatctttaaatttatttagatctcctttgaactttgtagtttttctcattggaagttttttttatttagaattttgtagtttttcttgtataaaccttttacatattttgttagatttatacctaaatatttcattttattttggtgctaatgt

SEQ ID NO: 478068 - DNA, 557 bp, Homo sapiens
gagttaatgggcgcagcacaccagcatggcacatgtatacatatgcagcgaagcaatgatgacttccctagagctaactggccacattgcacatggtaggatggtcagctctaaggagagtgtggaaattaggggatggtcgtgttccaaagtcatagctcacaggagcctctctgagcttccgggttgtgaatcaccagaagacattaaaagaaacaaaacacccaagagtgactctttagtcgtggatttccagaatctacttttggaagataaagctaaattgctgagagctgtggaagacagcacgcaaggcagagtgcagactatagacaccgcaggggttgaagaagaaaataacgagtgttggtgtgccatggagaaattggaacccttgtgcactgttggcaggaatgtgaggtggtgcagctgctatgggaaacagtatggaggttcctcaaaaaattaaaaataaaattactacattatctagcatttccacttctgggtgtatctccaaaaggattgaaggaagggtcctgagaagatatttgtaa

SEQ ID NO: 478069 - DNA, 575 bp, Homo sapiens
ctcccaggtgctccctcacctccatggcctctgcagatccccacccagtatatccaaggtgctccctcacctccatggcctctgcagcccctcccccagagtctcacaggtgttccctcacctccacagcctctgcagatcctcccccagaatctcccgggtgctccctcacctctgtggcctctgcagatcctcccccagagccttccaggtgcttcctcacctccacggcctctgcagatcctcacccagagatcccaggtgtttcctcacctccacagcctctgcagatcctcatccagagccatcaaggccacccgctccactcatggaaatgtaacatgtggaaagaacaggggctaataaagtgtgctggtcaagagcacgggctctacagcctcacagagctggattcaaaccctacttccttcacctactagctgtatgacctcggaaaagacaattaccctccctggccctcagttttcccatcaataatatggggacatactattttctcaccagattgttctaggaaataagagaggcaacatttgtgaggtgcttgaaatagc

SEQ ID NO: 478070 - DNA, 685 bp, Homo sapiens
ctcaagctgctagatatgattcagtctaaagtttgttggaagtatggagcccctcggtattggcgaggaacaggtgctcaggctcaggtggacggccgtctttttcctcattgctcgcagcactcccttggaggagttgctcctcaccccattcagctataattgtctgaatacttatttctcggtgttcactgcagaccaacctgcaagtggtgaccctgacatgattgcctttaagttaaacgcatggagtaggatgactcaccagtcttcggggaataccgggaattcagaagatttacagggaaaggaaacacaggaaccagaacaacagggaggggctcctccccccactttattcccttcagtgcagcataaagaagagactttttctcgcaatgatgaggacggaccagagccttttcctcccccaagagaaaagccattgccctcttttcctccacccttaagaagaccttcattcattggccccgagtcaaaaaaaagtatctgcgaaaatggtgtacattcatcctttactcgggatggttgaggctctgggaaatggttatgagatgattctgcatgattggaaaactctggtaaaagttttggtctcagctgctgaatatactgtgtagtggactcaggctcaggtgcacagtcatctatttcctcaatgctc

SEQ ID NO: 478071 - DNA, 611 bp, Homo sapiens
ctcagaagttgtatgagaacgcctggatgtccaggcagaggtggcctgcagtggcaaagccctcatggaaagcctctgctagggcagtgcagaagtttgcaagccacacaaaagcagatggcagaccagatctggttcccagaccatggcttgccaacctgtgcttgtgaccttttaagctctaagggagaatcttctagactcagggaggctcttaaaagaattcagttccctgcaattgtaggactgaagttcttatttccctcatggccgatggcctgggattattctctgctcctaaatgctgcatcattccttgacctgtggacatttgccttcaaagcttctggagatattggtgcaaaagaagacttcaaagatcctgagtcaaatgggaaaaaccatgcaacatgatgactagaatgaacatggtatcctcagagtgttataaaaacccagagaacagaacaatctaattttcaactttatgttaaaaacagaaattttgatttaactaagagctatattattagtataagctctagaatagccaaaccttacagagttcacttttatttatttcaaagtctgtgtcttgttcactcttacct

SEQ ID NO: 478072 - DNA, 2308 bp, Homo sapiens
tgccaggttcatccggtgaagcccaggatccctcttctctgagtgtgatgaaggaggccccacccacactcatagccagtgaggcagtggccactctctggggccatggccctgcaggcgaggctgtggtactggtgcggcagctatcgaggcatgacgcaggccactgactcaccacgccaggctgactcacctcccaggtaccccggccctcctcagtggaaggagggctttgagcttggggctggggtgccgggagagaacgtggcgccggaaacggaaacgtctgtgcagaccaatggggtgccgagagagaacgctgactccggaaacgtcctggctgtctggggaggccctgaacccaccccgaggccccacagctttttctccagctcagacactttctggggctcagtcttgctgcggcccttgtggcatttggcaggcagtgggtggaccatgagtgagttaggaggccgaactgcccacctctacaatgggttcccaggagagcgaacacgggacccgctcctccaggcctcagccccactctggaatgagttcaacagcaaggtacggtgagagctggcggcttcatttttggaaccagggagagagagagagagagaggtttatgagagacctcatgagacagctcatgatggaagtgagactgagttgcagtgaaccctgtcactgaagagacagccttcacactgtgtcttgcaggggaaaatacaactctttattaaaatttattgccctgaaaaatgggcagtgttacttacttattctgggtgcacaggtcctactcaagacatggcgaaaaggaagcccagaggcttagttcactgagaaatgaaagggtccataccaggtttccttggctactccatcagctgtacagttggaaggacttgtctctagaataaaaccttttgcttctcctgatggacgacaggcctgcttggagaaaacagtctactcccgtaaacctatagaggacctcaagtatttgttcaagaagctgcctctggaagacagcaatagttaagtaacatccttatataaatgatatataccaggggatatgcagactatcttcaggaccctggcttgatacccccaactgcacaattcataacctgaacctctccattctcaatgacaccaggggatatgcagactatcttcaggaccctggcttgctacccaccaactgcacaattcataacctaaatctctccattctcaatgacaccaggggacattcgaatttgggctcctcttggaattgttttccctcgaggccacgctaatgacctcctcaaccaccctgcttgcctagctctttccccctgcatggctctgtgggcttggacaccccaagcccaggccaaggaagggccaggtctggcacccagaagtcccccacttgaccttgactccttcaagtcccccaataaactgccagtgaaccaccacaagctgcccaaatccattgcattagactgatgcaactgagtgatggggaaggtgtgggtccctccagctttcgtgggtgctaagactgctgggtgtctggcactgctctggccctgggacacagcagttaggaggccaaccaggccctggccttctggcttcagagtccaagagggacagaagtattccttgcttatgtattccctgtgtaagattgcagcaacgctatacaccctgggagaggttcactgtgcaaggagagccctggggatcttgcccagtctctgggcccaggaagcggaagatggaagaggagggaacagcatgtgggtgggaggggagctgggagagcagaagttgggaatgaatgggcaggggcaggagcagaggaggtctggagggtgggtagagagaccttggaagctccaactggtttctcattcatccatcttcaccggtatctccagggctaagcctccagctctgggtccctcccctggcaggagaggacacagtggtgtaaaccaaaaatgaaattctaagcacccccaccatctgaatgcacccctgttcttgaccaagggcagtccagggttaacctgaaacaatagttcagaccacgacaggaaatgggtgttggatatgcctcactgtaccctcctccctttggatttcaggcccagctgaccagcagtaacatcaacacaccccttaaagactgagagaacagactctttaagtctgatgagaaacatttacaatctattctctctgaagcctgctacctggaggcttcatctgatgatgaaacactggtttccac

SEQ ID NO: 478073 - DNA, 778 bp, Homo sapiens
agccaatgggcggagggcatccctgtcctgtcctctagccaatggcggagggcatccctgtcctgtcctctagccaacaggcggagggcatccctgtcctgtcctctaaccaatgggcggagggcatccctgtcctggcctcacagtgaggaagcgcttcatagatcacagctcaaggcccactcgggccactcctcctccacctgatgcctgcagagccccacaacacctccttgaggctgcccagggccccttacgccctctggggccccccagtcactggcccagagtgggtggaggagtcaggatttcaactaaggcccctaagccggcagcaagcgcaggaaaggagctgtgctggggactcagatgctggcgtggggctcccgtgcccatgtgccccatgagggcccctgtgccaggggaatgtggggtcactcgggagttcacggcctgggctcgaaccagagagaggacgcaaggaatcccagttccttccgcagggagagatggggccaccttgaaaggtatctacacccaccagccccagttcaggtctcagccccactcatgcccatgctgtggggtgttgggccagcccctcaatctctccaagcctgcaattggttgtctgaagaaaaagagtgacagcaatgctgaccagcacagaaggctgctctggggtgggcttagcggtggatggggaggcccaaaacccagccagcaaccagcagtgcccacccagcacccgtatcttgactcctgacatccttcttca

SEQ ID NO: 478074 - DNA, 918 bp, Homo sapiens
gcagtggaaggccacccccaatgtgctgagtccactcagcagaagggaagcgctttccctgagcttgcaggactcagcccagagcccggtgcttagagggctctgtgagcctttgggcccagggggcctgtagacgcctctggaggctggaatgtctgtggaaagcaccaccttgctgattctgccgcagaggctgggctggcatgtgggctggggcttgtcctaacactgggaccctggcaggtctctggggttgcaggcaggaagcagtggtggattctaatgttctttatgtgtttctctctgttcttctctgcctgctttggatcggctgttactaagctgctgccgagtggcaactctgcttatctcacggtgttgagcctccttaacaactctcatcccatacaggtttgcacccccagtggatacctatggtcatgtggtcacctattcaatcagcatataaatagcttatctctcatttgggaccatgaactcaatggttaccagcatattgataacatttggttcaggggtcaatgtacaacaccctataatgtacaattatataccatcacttacctgagagctaagtgggcaattcgccttatattggctggggttgaggctgccattggcttacccaccccatggggaaaatttgcctattatgaggcaactcttcaaaactttacttcttcattctacgcactgtctcataaaacaggagacactttagaaacattaaaactctcccttgattcctttgcagatataataattgatgacagattagcacgagagtattatacttattggttgaacaaggagtatgcactataagtaataaaacctgctgcacttacgtaaacacctcaggtcaaatagaagaagatgaacgtaaaatatatgagc

SEQ ID NO: 478075 - DNA, 548 bp, Homo sapiens
gaaaagagttgaaggacacgctgcaaagtgtgaaaaaaacagggcctgagcttgccaagagggccaagtggttactttaatcatgtggaacagccactttttcatggaaaattttctactccaacacctgtggccattaaaggcgccctcggctcttttctaccctgggtcccaggggtcactctccagccaaggctggctgccagctctggaggacctgagaacaaagcctgggcccaaactggacatgaggagcttcaccacccaggtccctcgtggggctcaggcattgacacggagaacagggataccgggctgggcacaggagtggggcctcgacaagcaagagaagccccctccagaagcagccccgggagccgtcctctggggaagcagatggtccaggaagcaagaggagggaacagggcctcatacacaggtgtcagaggatcctaagaacattctggactggcagctttctctgtgggttttcatgggctcagcggctgcctgggtgggacgctgatcctggctcactttcaggcatc

SEQ ID NO: 478076 - DNA, 982 bp, Homo sapiens
ctcagacgttccctgagcacttcctatgctgctgctggagcccagggatcagccaactatgacctctggccccaaacggcagatcctctgtggagatgtacagaccctgcttgctggtccccctgagtgcctgctggccccacccccaccctgcaagacactggccatggggtctggcacatccatgctgactgcctgcaaggcagctcctgccactgagtgggcacagacaccaacaagacaggggggtaccactccttttctcagagaggagaggctttccctgagcaccctatttgaaatcgcaagctcacctccatcctggaaccccaagttgttctcttcctgctttattttccttcaaagcatttaccaccacctggcaaggaggggtactctcatctgtgaagcagaggactgtgctaatgattcctgcactgggttggatgacagcctccaagaagatatgttcatgtcctaagccccagaacccatgaatgtgaccttatttggaaaaagggcctttgcagatgtaattaagtgagggatcttgagacaagatcatcctgttcttccaaggtggactttaaatctaatgccaggtatctttataacagacagaagagaagcagatgtggacacagagttctagagaagccatgtgaagacggaggcacaggttggagtgaggaagccacaagccaagaaacacctggaaccaccagaagctggaaaaatcagggaaggaatctttggccagtcttttctcaaggtgtcagaaggcctcaaggcccttgttttgacactcaggcctctggaatgtgagagagtaaatgtctgttgttttgagccacccggtttgtgatcatttgttatgacggccacaggaaacaaataaaatctctcggtcatctctgcagttgtcttccagccaaacaggccgaaacctcaataatgagttaggactgggaataatcttgag

SEQ ID NO: 478077 - DNA, 597 bp, Homo sapiens
ggctggctctggcgaggatgaactggggaaggactaaagtgtccaaagcatgggcagtgcctggcccatgggaggcgctgggggtgaccgtcctccttctggaactccttcctgacaagtcgtctggaggcaccctcgtgcactgggatacgactgatgcaggttggaaggcagagctccctgcagtgggagaaggatggcagggagcaatggtccgggtctcagaagctgattccaaaccagaagggtgggagaaaaatattagtttggagacctgtagccagacatttctggaaacgagaagaattcaggatccagtccagattgtaggttgggatttccagttccttgatgaagagaagttacgagactgggcatccttgctttgttcctaaacaggaggtgaaaacattcagtcttctgccattaggtatgatgttagctctggattttttacacatttattcatttatttattaggttaaagatgtcttctactcttagtttgctaagagtttttttaaacatcaatgggaatgttttcagaatctttttaattttttttctacatctatggagataattttttatagtgtt

SEQ ID NO: 478078 - DNA, 1050 bp, Homo sapiens
gtgggggcctgcctgctggcttcgtgggccccctttctcgtatggcttaccagggttccaacctgccctcgctggagctgctcatctgtcgatgcctcttccacctccctattgccctgctacttaaactgcgtggcgacccccttctgggacctcctgacatccgaggctgggcctgcttctgtgccctgctcaacgtcctcagcattggatgtgcctacagtgcagttcaggtggtgcccgctggcaacgctgccactgttcgcaaaggttcttccaccgtatgctccgctgtcctcaccctctgccttgagagccagggtctcggtggctacgagtggtgtggactgttgggcagcatcctaggactaatcatcattctgggacctggactctggacactacaggaggggaccacaggtgtctacaccaccctgggctatgtgcaggctttcctgggaggcctggcgctgtccctggggcttctggtctatcgttctctgcactttccctcctgcctcccaacagtggccttcctatctggcttggtggggctgctgggctgtgtgccaggcctctttgtgctgcagacccccgtgttgcccagtgacctcctgagttggagttgtgtgggggcagaggggatcctcgccttggtctccttcacatgtgtgggctatgcggtcaccaaggcccaccctgccctggtgtgcgctgtcctgcattccgaggtggttgtggcccttatactgcagtattatatgctccatgagactgtggcactttctgacatcatgggggcaggggttgtgctgggcagcattgccatcattacagcccggaacctcagctgtgagaggacagggaaggtggaggaactttggacttactagacaaagactaaacaattgtcttaaatatgcacaagagttaaaagacaactaaatgaaatcagagaaatgatgtttgaacaaaatgagaatatcaataaaaatataaaaattatagaaaggaaccaggtagaaattttgtagctgaaacgtgcgacaa

SEQ ID NO: 478079 - DNA, 651 bp, Homo sapiens
ccagccagaccttcttgctaccgtggaggcactcgtggcgagcctcttccgaagcctgaatatcctcatggcttcggccacagcagtgacaaaggacagtgttggtttacgcttgtggtcccagtgcagctattcatactcaccctctcccgcttccctcactctctaaggggttggagacagttgtcgctcaaggtgcaaactccgggctggcgctgtgtgtgaacagataacaacaaaatgtatgtggctgagtccactaggaagacgcttctgtaccacatggagttctctgaattaacttccagatatattaaaattattaatggacaggtcacacaaggagaaattgacccaggactggtaagactttccatcatcctaccggacatgctgagacagaaggcaggcttcaacttgtggtgggatttcaagttcagagacacatttgctgtgatgtgtcattattactgccacatcccatgtcgtaacagcagcccctttggggagtgtcctacactttcttgggcagcacgtgtcagtcaacagctgcaagtcattctggctccttgcccaacggaagagagagcattgcttaaaacagtctctgccctacctccagagaatgtgatagaaagcgagtgacagact

SEQ ID NO: 478080 - DNA, 1212 bp, Homo sapiens
tgctgttcttgtgatgctgggacatccatcttctcccgctgctgtggttctcaagccctcagactcggactgggagactgggatttacaccactgcccgccttccctcagttctcaagaaagaacagattaaaccactggctttcctgcagtgataggtgtctctctctctctctcaagaaagaactgattaaaccactggctttcctgcagtgataggtctctctctctctctctctctctctctctctctctctcattctgaattgagactgggggctgtgtgcgtgcttatgcatcatgcatatgctgtgctgaaaggcaaaagcccacaagaagcctacgcagcgacatcatcacacaatgctggaaaaccaggaaaaaatgtgtatgtgtacaaatcaatggaccagggagttggcaatggggaagaccttcaagtgaatggccaggaccaactgtgtatcagtagcaggtgctttttccacgtgctatttcatgaaacactcacaaaacaccctgcaagcacaattggaatgcctctttcttccatctcagtctcccttggatcccctctcctttttgcctatgatgtcacatactggcctccctcaggtcgaggagctcacagctcaggccctgacatgggtatttttctgcatttggaccctgccatcaccaaaaatagtccctcctatttcaattacagcttaaatgtcaccttagagttggcttcctgattcctcatgtttcagtagatcccattttgtttaaacctcttggtttttaaaaaaccttttataaatgctttcttgttttcatctttataattattcatttgtatgtttagttgatcactatctgccacttccgctagagtcagctccatgtacaatgtgttttgttttcagcacctagcatgatgcctgacatgtagtaggtgcttacatacttgttcacaaatgaatctcttatgttaaactctctaatcactaattgttctgtaaatctgagcgtcacttcatgacttatctataatgctattttgttgactcatattggtgggcgtctatttcatgtcttcaataggactgtacattgcagaaatgatctcttatatttctttgtaccaaaagaagttagatgcaaagaatcaatgaagttagacttaatttggtgtctgtcacattctgaattactataaccaggatac

SEQ ID NO: 478081 - DNA, 2508 bp, Homo sapiens
tcccagcaaggtttcaccgctagttcattgattcactcactcatttatgctccatcatatgctagaccctatcctgggggccaggaggtactggggggcctgtggacctgcagagggcatccacggccaagcatacactctgcaggtggaaggtgtggggccactgggaccaaggaaggcaccgcgacatcaggagaggaagaaacagaacccacccgagctgggggtgctgagattgaaggagagagtggaggaattgagactgggggctgtgtgcgtgcttatgcatcatgcatatgctgtgctgaaaggcaaaagcccacaagaagcctacgcagcgacatcatcacacaatgctggaaaaccaggaaaaaatgtgtatgtgtacaaatcaatggaccagggagttggcaatggggaagaccttcaagtgaatggccaggaccaactgtgtatcagtagcaggtgctttttccacgtgctatttcatgaaacactcacaaaacaccctgcaaggtaaattttattctgcttctttttatggttaacaaagggaggcttcaattaagaaagcaccttgccccaaatactatagctagttaatgccggagctaagatttaaatatagagcctgcctcctgtgattaagaaaaacaaaacatttttattttaaaaaaggaagacccagagaagggcataatttaaccatcacttggcagtatatgaccccaccacacagaaaggatcaaagttagctttgtggcatgaatgtttatataattatttgttctccaggtgtttagctcagtcctggacatattataggcacccaatggatacttgtgtagtgaaatctgacagtgggacagaggcgcttctgtgtaaggttaactaaaaaggctgaaacccttaaagtctagatgatgaaggctgagatctgatggggctcaagtataacaaagtccattctctctttgaagcatttcagcaggatgaatgaatcaccagtctcctccctttctccccttcctgactgcccaaagcacatacccataacaccgtgcccttgggcccttagcactttacttcaccctgctgtcttgactgtaggggctcccactgcctccagcatcaagcataactttctagggtgccctagccttctccctacctgcatcttccctctctagcctcatcccttgtccatgcaaatctttgtctccggtcagcctgatgccctgatgggagcccgtggaatccttatctcacacccatccctccccttgcctacatctctgtccagagctccagcattttggtgaactcgccccgcaccccgtaatgccttctttaactcttcctgctcctctccctaattattttgttactattgccagtgccactccatttgcacttagaataaaataaaaattccttagcacaattggaatgcctctttcttccatctcagtctcccttggatcccctctcctttttgcctatgatgtcacatactggcctccctcaggtcgaggagctcacagctcaggccctgacatgggtatttttctgcatttggaccctgccatcaccaaaaatagtccctcctatttcaattacagcttaaatgtcaccttagagttggcttcctgattcctcatgtttcagtagatcccattttgtttaaacctcttggtttttaaaaaaccttttataaatgctttcttgttttcatctttataattattcatttgtatgtttagttgatcactatctgccacttccgctagagtcagctccatgtacaatgtgttttgttttcagcacctagcatgatgcctgacatgtagtaggtgcttacatacttgttcacaaatgaatctcttatgttaaactctctaatcactaattgttctgtaaatctgagcgtcacttcatgacttatctataatgctattttgttgactcatattggtgggcgtctatttcatgtcttcaataggactgtacattgcagaaatgatctcttatatttctttgtaccaaaagaagttagatgcaaagaatcaatgaagttagacttaatttggtgtctgtcacattctgaattactataaccaggatacgtgtctaaacttgaaggagacatcacagtggggtttcatgttacttagggtcctggtagtattggttgggatctaaggtctgcactgagcctaagaactgtgtataccccaaattttctttgcactggagacatcatatcacttggccaaaaggccaactgagccagcatcagatacaatcttgtatctttggttgaggaccagagaaaagacttggcttgaattgggagggcatgtgggaagacaaacacaaggctttaagtcctagaatcccactttgtctgggaaggcaatcatattaggaactaaggaacagaggtctacagtgttctatttcccatctcacactcaatctggggacatgtgctctatgctcattctc

SEQ ID NO: 478082 - DNA, 820 bp, Homo sapiens
cacacctaactgctacttctgactctgatgtttattctggaattatctacagctcatccctggtttctgttgttgaccattctgagattacaacaagaagcaacaggcaaagcacctgactcaccaagcttacatgtgagtggggcagacatgcatgcaagggagtacatgggcaacagcagttctgtgaagaaagctgaagtggtggaaggactctccgatgagaatccttttagtggagatctgaaagctgtgaggaagtgtaccaagagactgcatgacaatctatgcatgcagcgtgtatctggctacccagttacaagtgggctagatcctatgcccaatactagatgtataaggaaagtaaatgacacctttgctctgaagaagttcactattgaacgtgagttacagaaaaggctgggtacaaatgtgagggagatggtaatagactcccaaggtgaaatacgctgtaaagttctcttcgaaagctggagaagcactgacttcttgtccttttttttacctggcctgattttcatctttttcttcatctcaacagttgtcatatggaacttgccattttgtgtgaggctcaggttagagtctgggatgacagcgtcctgtgcttatgatgcgatagtgaatggccatgatgaaagggagtcatgaagagcaatcttttagtgactgcttcagtttctaggttttatatagagtcagagaaagagcagcctttcttagtttatcctcacttctcgggcacataacagccttcaatcgtgttgattaatgccgccttcttggaactactctcttc

SEQ ID NO: 478083 - DNA, 579 bp, Homo sapiens
gtgtgcgcgcgtgtgtgtgtgtgtgtgtgtgtgtacacatcatatgagtgtatatctacggtcaaaagtggaatttggacccatggactatctggctacctggccagctcagtttcagatatggcagctgaactacctacactcccacttccaggtctgggtctcccgggcttcccacatctgtgttttttacccagggaagataggccatggtgtagacacaaggctggtgatagaccctcatgttggtgccaaggatgcctctacaatattgttccaggaagtactagcagctttgaagagagtactgggctttcgttgtgatactgccacagtgaaagcaaaaggctgtgtttttgagtgggctgtttgtcagatttcagagaagacatgtcaaaccaccgtaaattacaagctagatgaagttggagagctggttcagaaatctttgaaccaaaccgaaacaaaacacagccctaatgacatgagtttcttgtaaactgttttaccaggttgtttactgcagaacagagagaaccttgactaatacacttgcagaagtccacagaaagtccatta

SEQ ID NO: 478084 - DNA, 612 bp, Homo sapiens
ctccttcaaggcagtcccttgaagggtccctttcaagggaggcatggcaagcaggccgaagaaagatccatgggaaaaccttgagctgacactgctctctgctgggaatctagcgccatgcaccgctttggtttgcatctgggctccgcggacccagataggcttgagaggaatcccttctccagtgccagaaaggcagttttctgcactcagcagcgctccaaattgtcagatggatgcccagagctgggcttgggggtcagatgtggctaaatgtctccgatctaggttcctgccatcctggcccaaggcagagctgctggcatctcagcagcttcaaaaggcccaagttagctgctgttgtctcactggaaagtttcagttgtcagactcggggagtgacgtcagaagtgatttctgctggaaacagtcccctcctctggattctttacagaattaggatctatatttttttggttacatagcagaagcccacagaattactctgtgttgatgaattgagcaaaacctccagaacctttttaagatccagggaatgacgattggttggtccaatttcaggttctgggatagaagcagcggagactccta

SEQ ID NO: 478085 - DNA, 911 bp, Homo sapiens
gcggcgccttccttctcccactggaaaccaaatcctgggagcgtctcttctgcggcagcagtggacgccgccgaggagggacccgaggccggacccgaggccggctccaggaactgagcccaaggccgcggtagcgatccggacagggaagacaccttcggtgggcttcatgccttcctccatcgcagctaaccaccttgccctcaagaactccaggattgtgaacagaagggcgcaggagcccggcctgaacgcggcctcgcccctcggcggcgggaccagggtgccagagcgcggcgttggcaacagcggcgacagcgtgcggggtggccgctcggagcagcccaaggcgcggcaacgacggaagccgcgcgtgctcttttcgcaggcgcaggtgctggccctggagcggcgcttcaagcagcagcggtacctgtcagcgcccgagcgcgagcacctggccagcgcgctgcagctcacgtccacgcaggtcaagatctggttccagaaccgacgctacaaatgcaagagacagcgccaggacaagtcgctggaactggctggccaccctctaacgccgcgccgagtagctgtgcccgtcctggtgcgcgatggcaagccctgcctgggccccgggcccggcgcacctgccttccccagcccctacagtgcagcagtgtcgccctactcttgctacggaggctacagcggagcaccctacggcgcaggctacggcacctgctacgcgggcgcgccctcgggtcctgcgccacacacaccactggccagcgcgggcttcggacacggtggccagaatgccaccccgcagggccatctggcagccacgctgcagggtgtcagggcctggtgaggctcctcggcttgactctgccaaccagggccagatgctc

SEQ ID NO: 478086 - DNA, 1647 bp, Homo sapiens
gtatagttcaaagagctctgatgggtattggccgaaacctccaaatggaagctaaggaggccactgtactgagaaaattcctgagtagaaaagtgcagtgggcacagctgtggcccatcctgtcggtgatcattccctctctgagagctgctcccttcctgatggcagtgtggcccaagcactgggttatgctgtctgggatgccaccctctcgcagcatgccttccctagaggtctgggagctggaccggctgctgccttgtgacatccgggatggcgccttcattactatgccctttcactgctatgcacaaaaccgtggggaggggtttaggcacagatccacactgccaaactggcttcccaagggactggctacctctgccatggcctcaaaggcaaggaatcagaaggccacctacaaagtcacggtgcggggatcgggaggctgccacttatcactgctgcaccccctcattccataaatacctctcagcatccatgaatctggtgaccaaacactgccatgctgttgcagtggggaacccactgcccgccccaactgttcctgcctcaagtgtctgtgaccttgctaggcagcagaaaacaccaaagaacaggaagggagcttcagctcatgttcactttccagatctttccaattcatctattgccagaatataattcatggctagacccttggctgcaagaaagtctgagaaatgtggctttacatgttctggccactgcagtccaaggaggagtgcaagatgctaagtgccaaaccaccatatctaccataggtggggagaaaaaaatattgaattctgttaaataatcaatattccaaagattttcaactgtttctaacatttatttaatgaaattaaacaaaaatcacgtctgtgaagattatgggcatattcacatttgctaagaattctcttaaccatcaaaaggcaacttctttccactggtatcaccattgcaaagttcagggggtttctcatccattaggaggtgtgtgtgtgtgtgtgtgtgtatatatatataaaatatatcttatacatatgtattatatataatataggtatacatataatatacatacatatataacaggtgtatatatgtacatagatgtatatatgtatacataggtgtatatatcatatatacataggtatatattaaatatgtgtaaaatatatagacgtgtatatatcttatatataaaatataaaatttatataaattataaaatatatataaaataaaatttatataaattataaaatatatataaaatataaaatatatataaatatatataaatataaaaaatatataaatatatataaatataaaatctatataaaatatataatataaaatttatataaaatatatataacataaaatttatataaaacatacataaaatataaaatttatatatataaaatgtacatatttatacataaaatgtatatatattttatatatacacatggatatgaatgctgagaggctaagtaaaaaaatacatttatatatacacatatatctatatatatttatatacacaaatcaacatattttatatatgtacatatgtgtatattctatatcctatctatatatctt

SEQ ID NO: 478087 - DNA, 640 bp, Homo sapiens
agtgtgtgtgtgtgtgtatgcccatgcacagtaaacatttctatggtgttgtgctgggcaccagcgataccagtaggaggaggaagacccagtccatgcctacagaagttgcagaccagtgtgggaagaagcaagccacaaagagtagtccaggaaaggatgaaaatatctcagaaagagaaatgagcccgtgcaaggccctgagaaaggagcttgctgagtgtattcaagaaagagcagacagcaaggagggaaaggccacattcagaaaagaggatgaagatgcaggggactgggatgagttccaaagagcacaatggatggatttcaggagttggggaggagtgagagatgatgtcaaattaaaggaagtgtggagccacatggagatgagagtccaggcaagaaggaatgatctgggtcctagtctgcctgaggtgactgacatcaacagggacttcgtttttgatgaccttcgtagttttaagaagtactgatcaggaaaaaatatcccttcctattacttcatcttagtcaccttaagcaagcacatagtctcatctagtagcacatctaaattcagccccaaattagatccagatgcataactcagactaacctgatagatgacagctcacaa

SEQ ID NO: 478088 - DNA, 652 bp, Homo sapiens
tcctttggtggtaggctttagagttgtcaagagaccccaaagccataaggacagtggtggctgctgcccttcctgctgggccgacctcctggggtccaggaagctggtgagtatgagtgcttctgggcacagtcaggagccttgctggtcgagcctgggcttctggaagcccttggagatgccactcttctgcttgtccttagaaacctgggccatcatggatgaggatgcagacagagggcaaaggggctgggcttgggtgtcagactgctgtgtggctctaggcaagttccctaacctctccgaggtgaggtgttctgcatttgacattcaaaaccaattgagaaagaaacccagacatcaaatagggatcaaaatactacctcaattgctggtgaagctcaattggaggaagctgtttggactagagtccagattgattttcaaatacttccctctgaatcatatggacttgcccactcagctgcagggaggagaagctctgctcagtggttacttccacttgcacatcagagcagaaagaagaatacaaatgttctgtgggcaggtagacccaaaggaagaaagaccacatgggaataagagctttggaccttagcccttcccaagtgaggaatgtaaacatgatgcc

SEQ ID NO: 478089 - DNA, 688 bp, Homo sapiens
cctctgtcttgataaatcggctctatgtgggcagcagataaggaaaacctgttgggtggttacaaatccataaaatggaggctaatcagaacttcagagcagaggtactttggatttatggctgaggagtcacttttccacattgagctctggtcttggggccctggagaggccaggctaaggctctgggaggacagattgtcctggttcttttgggctgtggagaggctgccagccagaggagaagaaacagatatgttcagacaattagagaacttggtcaacaccgaagaagaagcaaattgttttttatcttcttgtactgttacactgttacacatccaaaggttttttatggaattgttttattctgaaagtggaggccatggccatagctctggcagttgtggggcgctgactgagagtcaggcaggcctgggtgtgaattctggtttggctacctgcaagctctgtggcctcgttcccagccgaacacctaatcaagcccaggtcatctggtcatctacctagtgcgttctcttcttgtaccaccaatttcctggttacagggcttcttagatgctgtaggtggggtctaggatggtgagaggagggcttgagaggagaactacttgatctaggctttgcatttatgtaactgacaaacagtattgaatttagacttttg

SEQ ID NO: 478090 - DNA, 739 bp, Homo sapiens
ttattttatttgcattggattgggaaaatgggtattatttattcagaggagagtcccttggagacctcaacagaagacacaagctgttgtgggaattgtacctgtggcaagacaacatttttggaaatgtttagtgatggtatcacctccatccacatccttataccccttgaacttcttcttcacctcatccaagtagagataagaatttttgatgcttttcccctcagagaaggaatgagaagattctgcagcagatccctccctgtggcactgagtttgggcacgatgttcaccagggatgttgtggccgggtacaatggcagccagaagatcctcttcaactggtcatcgacgtcattgcctggaaaaagaggccatccagcattggccagctctgcaaagatgcagccagctgaccacaagtcaatggacgtggagtacagcttggccccaaagaagacatctggtgggtggtaccacagtgtgctggtgacagaatttgaaaaccaaagtcagcttcttgtcgctgtgcaggaggtcatgaagcctgacgatgttcttgtgcttcagctccttgagtgtgggtctatttctgaattctctgttctgttccattattctatgtgtgtatccctataccagtaccatacagtttggattaccatagctctatataagtcttgaaactgaataagtcttgtaacttattgctcccactttattcttctttttcaag

SEQ ID NO: 478091 - DNA, 1270 bp, Homo sapiens
ttgctcacagcctaaaggaggagattcccgcttaaaccagcagttacagacaaacgcaatccaggctctgtcatggggcccttaaggaatttacttaacctccctgtgcctcagtttcctcatctagaaaaacattaccgggctgcgccaggatgcagagtatatgcaacaggactatccgtccctgctgctgccctttctacccgccctgcccgttgtcttgtagattgtcccatgttctggatttttctgattgtttccttctcatgggatgacctaaaaaacatttttttttttgagacggagtcttgctctgttccccaggctggagtgcagtggcacgatctcggctcactgcgagctctgcctcccgggttcacgccattctcctgcctcagcctcccgagtagctggactacaggcgcccgccaccacacctggctaattttttgtatttttagtagagacggagtttcaccgtattagccaggatgccggcaagaacgaggacacttcacagggctgggctgccgaggaaagatgagagactaaactgatgagaatcaccaaccagtttgatgacttggagaacagtcacttcctctttctgggctacagttttctcatcagtaactgaagagcttgcagtaccttcaacattccttcagagctgctctgtgagaagacaaggagaaaatggtccctacaggatactcacctctgtctcagggagacactcaagcatttattcaaccaagaaagagaattagttccagtacagacagccagcatgcagtgagcactcagcgatggccaagtatgggagaagccatgctggaatgaacatgtgggaccattttgtgcagtttctcagaggaagataacaaccatcttcaatggcacatggcagttgccaaattgccatgaagcaatatctaaagccacctcatgctcaggagaaaacgctcaccttcccctcctggctccccgtgctctacacgttcagagaaacttctctagtaatgaactcaggaactggtcactgagagtatagtctctatggacagcttcggagccatggagtgaagccgagcaaatccatggaccactgccctgcccccggtctatctcgctagactagggacaggacttgggtgatgcaggaacagagaatggcctgaggaggacacagaccagaccagagaggaaggaagatgagaggaggatgcgggaaaggggcttacatcaatctccagaagcaagagttggc

SEQ ID NO: 478092 - DNA, 466 bp, Homo sapiens
gagggaagcgggtccgcctgccggatctaacccaagtttcctcaccatgggcatgtggtccctcggtgcaagagccctgggggctgctgccttggcattgttgctggccaacacagacatgtttctctctaagccccagaaagcggcactggagtacctggaggatatagacctgaaaatgctggagaaggaaccaaggactttgaaagcaaagcagctatgggaaaagaaaatggacctgggaagctgcggatctgtcctccctaaaacccatgtggacgagctgggtgtccccctctatgcagtggtaaaggagcacatcaggaatgaagtgaaggatttccagccttattttaaaagagaaaccttcctggatgaaaagaaaaagttctatggtccacaaaggcagaagatgatgtttatgggatttatctgtctgggagtgtggtacttctgagcctggaat

SEQ ID NO: 478093 - DNA, 641 bp, Homo sapiens
agcacaaccataaaaagctataaaatggtacgtgtgccagctggacacaccaacagcagctcccccatgatgccccacctggggctaaggcttaccagtctggatagaagatcaaaccagctgcaacattctcttaagccaaagcctaacccagagcaaggcccaactctcttcaattccatgagggctgagagaggtgaggaaactgcagaagaaaagtgtgaagctagcagaggttgtttgttcatgaaatttaaggaaagaaaccatctccatagcataaaagtgcaaggtgaagcagcaagtgatgatggagaagtggcagcaggttatccagaagatctagctaagatcattgatgaaggtggctacactaaacaacaaattttcagtgtagatgaaacaaccatatgttgtgagaagatgccatctaggactttcatagctacaaatgagaaggtgatgtctgaaatggaacaacaaagtctggatgacagcgcgtgtttactgcatggtttggtgaatattttaagttcactattgagacctactccacaggaaaaaaatagagatttctttcaaaatattactgcttattgaccatgcacctagttacccaagagttctgatggagatgtacc

SEQ ID NO: 478094 - DNA, 659 bp, Homo sapiens
cctactagcaacatggcgggcatcttcaccaagcatgtcttggctcaggctattgccagaacccatatccatccccctgctccctgcctgccccctgtggagttcctagaaatgtcaaccttaaaagcacatcaatttaaacaccaagatgtcttcagtgtttgccctggagctccagaagcttttggtgaagggagagaggccgacatatatgaagaagagatgctcaatatcaacatcactaatcatcaggaaaatagaaatcaaaaccacaatgagagcatctcacacctgttaagatggctattatcagaaagacaagagataacaagtgttggaaagaatgtggaggaaggggaaccttgcagaccgttggtggaagttcagattggtacagccatcatgaaaacattacaaatagaactacaaatagaactaccgtatgatccagcaatcccgctaccagggagctatgctctcttacgcattctaagtggaagcaggatgatgcactgaaaagaggggaaggagataaagggaggaattcaggatggctgctaggcttagtttgagcagtggaataaatgttgacgccacttactaatagtaaaatggatctggggggaaagtcgagaggtccgtgttgcacatgtgaagcc

SEQ ID NO: 478095 - DNA, 821 bp, Homo sapiens
aacaacccagagtttgcatttcaggggttggtgcatttcagggtgggaagagctgcaccaccagggcggctggcagctgcaggggcgggcacctcaaaggactgtctagagcagccgaccacccagcacgtgctcagtgaggcacatgcaatcaacctgaaatatggtaggcctggtcctgtggccctgtggccctgaaacagacctttcccgcttaaatcgtcttcttgatttggaattggtttttcatcaaaaattttcattcctttcttctctgtctggctttgccaagacggttttgccagaggatgaagaggctgaactcatcagtagagctgtcggcttacaagagggattcccggtgtcccagacgattagtgctgatgatgcacatcaagaggatggtgttatgagatcatccgggaactggccggacggatcaggacagcccacaccagggggacgtctgggaaagcagggagccgaggatgaactcaccgaagctctctccgctgctggctctatttctctaagtctccatatacatgccaagttaatatcatatagaaaacttcagtgagtaacagtagaactgagcaaaagatccagtgtttccaggattcttttgttctgttttttcttgtgcccaaagtcccatgcaccttttatactcaatgttcttcccaagggaccctacattttccattttcacaaggccctgcagattatgtagctagcactagttacatgctatactttaggtgcaagtgaagctggaaaaacgtagtttcagcggattctaccttgggaaggaggatttc

SEQ ID NO: 478096 - DNA, 1541 bp, Homo sapiens
gaagagagaatacacaaagccgctctgtccattctgttctggctgacatggcccagccttttatttgtgtcagtcatgttgcttgccaaaaatcagaaattcttgaccctctggacagctctgtgaggagggaatgggagacatcacactttctaagtgaggaagcacagaagggagatgactttcatgaggttcgaagacagaggtggattcagagcttgaatctacgtcttctgcctcagagcccctcgcgtgtttaccacatgctgccagagactagaaattccatgaaatctgtcagagatagaaagaggcggcacaactttctggaaaattattggcttcgaaatgttggattggctcacagttgttcagcccttctgtttatcacgaagatttgtttatctatttgctcatctgggtatcccacaggcatttccaacccatcgtgtccaaatcttttttaacattatatttgattatagatttagggggtacatgtgtaggtttgttaccattatatttgattatagatttagggggtacatgtgtaggtttgttaccattatatttgattgtagatttagggggtacatgagtaggtttgttaccattatatttgattatagatttagggggtacatgtgtaggtttgttaccattatatttgattgtagatttagggggtacatgagtaggtttgttaccattatatttgattgtagatttagggggtacacgagtaggtttgttaccattatatttgattgtagatttagggggtacatgtgtaggtttgttatcattatatttgattgtagatttagggggtacatgagtaggtttgttaccattatatttgattatagatttagggggtacatgtgtaggtttgttaccattatatttgattgtagatttagggggtacatgtgtaggtttgttaccattatatttgattgtagatttagggggtacatgtgtaggtttgttaccattatatttgattgtagatttagggggtacacgagtaggtttgttaccattatatttgattgtagatttagggggtacatgtgtaggtttgttaccatcatatttgattgtagatttagggggtacatgtgtaggtttgttaccatcatatttgattgtagatttagggggtacatgtgtaggtttgttatcattatatttgattgtagatttagggggtacatgtgtaggtttgttaccattatatttgattgtagatttagggggtacatgtgtaggtttgttatcattatatatgattgtagatttagggggtacatgtgtaggtttgttaccattatatttgattgtagatttagggggtacatgagtaggtttgttaccattatatttgattgtagatttagggggtacatgagtaggtttgttaccattatatttgattgcagatttagggggtacatgagtaggtttgttaccattacatttgattgtagatttagggggtacatgtgtaggtttgttacatgggtaggttgtgtaac

SEQ ID NO: 478097 - DNA, 1103 bp, Homo sapiens
gctcatcaaagtgtgtctagaggagatacccaggcagacagcaggctgctggtcaggaatatcccaagtcctataagcttggccaggcccggtgcctccgtgttttggtcccaggagctccgcctgccagcctcctccagctgctgcccgtgtgttctccctgaagagcatccaaagcccatgccttttcccaactcctcctctctcctgctgactgcacatgccagagcgaaggccgatgccgccgaccaggccgcgctggccgctcgccaggagtgcgacatcgcgagagctgtggccagggagctgtcacctgatttctaccaaccaggccctgattacgtcaaacagagatttcaggaaggtgtagatgctaaagaaaatccagaagaaaaggtaccagaaaagccacctacaccaaaggagtctcctcatttttatcgcaaaggcacgacacccccaagatctcctgaggcaagtcccaaacacagccactctcctgcttcctccccaaagcccctgaagaagcaaaaccccagctcaggggcgagactcaaccaagacaaaaggagtgtggctgatgagcaggtgacggccattgtcaataagcccttgattaacggggaactgcattctcagtatcacggctactacgtgaagctgaacgccccccagcaccctccagtagaagtggaggacggcgatggatccagccattcttcctcagcactggtgcacaagccatccgctaacaagtggagtccctccaaatctgtgacaaaaccagttgccaaagaaagcaaagctgagccaaaagctaagaagtctgaacttgctataccaaagaatccagcaagcaacgattcatgccctgctttggaaaaagaagccaattcaggtacccctctacaccccaagggggaagggaagccccagcagctccgcagctaccctgagctttagactgcctctgcaaaattcaagaccgacttgacaccttcacgcgaagattctaataattaacattgtcttcccaatagtaacagaacgctgccatatgaaattgcacctcattctttaagatttgcacactcaaatacttc

SEQ ID NO: 478098 - DNA, 573 bp, Homo sapiens
ccaccgacagcttgcaccgcacacctggaaaagccgcaaacactcaacgccagcccatgaaagcagccaggagggaggctgtaccctgcaaagccacaggggtggagctgtccaagaccatgggaacctacctcttgcagctggatatgagacctggagtcaaaggagatcattttggagctttaagatttgactgccccactggatttcagactggcatggaattcccacgtgttgtgggaggaatccagagggagcttaatcatgaagggcgaggagggtttttccttaccagaaggaacctgggccttgccatcaggcctgagggcacaagaggagcagctgctgatcactactgcacaggccccttcctgcatgaggggacacaggcatctttttcctccttcctgttgtttcagctcccagtgcaactgagtctactgctgaactcagaaataaatttgaaaaccaaccacaaagtttaatcttgaagtccaccaatattttttagttatctaattggaagaggtcttctatttacttattgaaatatgaaaagaaaagaaaaaaaaa

SEQ ID NO: 478099 - DNA, 1342 bp, Homo sapiens
ctgctgtcgccgccggagaacaggttgttcctgcctctgaacttgctgccgccatgaagcagattaaagaactccagcgcctgctcggcaagaaaacgatggaaaatgaactcctcaaagaagccgttgaatatggacgggcaaaaaagtggatagcgcacgcgcccttattgcccggggatggggatcgtcacactgatgatacggatgtgcttctccgtatacaccatgttatcggagagctgccaacgtatggttatcgtcgggtatgggcgctgcttcccagacaggcagaacttgatggtatgcctgcgatcaatgccaaacgtgtttaccggatcatgcgccagaatgcgctgttgcttgagcgaaaacctgctgtaccgccatcgaaacgggcacatacaggcagagtggccgtgaaagaaagcaatcagcgatggtgctctgacgggttcgagttctgctgtgataacggagagagactgcgtgtcacgttcgcgctggactgctgtgatcgtgaggcactgcactgggcggtcactaccggcggcttcaacagtgaaacagtacaggacgtcatgctgggagcggtggaacgccgcttcggcaacgatcttccgtcgtctccagtggagtggctgacggataatggttcatgctaccgggctaatgaaacacgccagttcgcccggatgttgggacttgaaccgaagaacacggcggtgcggagtccggagagtaacggaatagcagagagcttcgtgaaaacgataaagcgtgactacatcagtatcatgcccaaaccagacgggttaacggcagcaaagaaccttgcagaggcgttcgagcattataacgaatggcatccgcatagtgcgctgggttatcgctcgccacgggaatatctgcggcagcgggcttgtaatgggttaagtgataacagatgtctggaaatataggggcaaatccaatatcctagggggatgtttcttttaatgtcacaaagagtgtacaaaacgtcataggaggtgtacacattgtgacgttatctgtaataccctagaaagatgttactcctaatatgtcacaggggcgtacacagtttgatgttacttataatctcatagagagatattacttcaaatgtcacagtggatgtacacacacagtgtataccctgtgatagtattcataatatcctagggagatacaactcctgatgtcacagtgcgtgtacctcgtgtgtgtacacccttgatattagtcgtaatatccagggtaaatattactcctcatatcacacagagtgcacactctgtgatatttttcatcatacttt

SEQ ID NO: 478100 - DNA, 1503 bp, Homo sapiens
cggctctttgctgctaaagttacctggaacgggagtcgttatgacccttatagtctcccgagaggaggaatggagacttttcttcattgagctggaccaagagataagaccagctctggctaagcgatggccaagagtacgggcggaagacaaccctccagggctggcagtcaaccaagcccctgtactcatagaagtgaagcctggggcccagccggttagtcgggtgcgccaagggaacagatgccctacaccagcacctggaggactgtgggtagaaggtgtccaagaagaaagctcagatctgccaacagcagtacaagaagcacataagctgactcttggccaaaacctgaacataaaggcctcccgtgttgtggtgactttaatgaatactaaaggacgtcattgggtaacgaatgccagactcaccaagtaccaaactttgctccgtgaaaatctccgtataaccattgaagtttgtaacaccctaaaccctgccaccttgctcccggtatcagagagccctgtggatgggagcagcttcttcaacccccaaagagagagaggtgcagggtatgcagtggtaaccctggacactgttgttaaagccagatctttgccccagggcacttcagctcagaaagctgaactcattgttttaatttgggctttagaactcagtgaagcccttgtcaaaacggtgccccagtggtgtgttacctgccgacagcataatgcgaggcaaggtccagctgttccgtccggcatacaagcttatggagcagccccctttgaagatctccaggtagacttcacagaggtgccaaagtgtggagatctgattcctacatttggactgcccttacggatcggctcagataacgggcctgcgtttgtggctgacttggtacagaagacggcaaaggtattggggatcacacggaaactgcatgccgcctcctggcctcagagttctggaaaggtggagcagtgcgtgtacgtctgtcgcgacattcaatggaatgtcatcctgtgcctccctggatatgacgaacaatatcacggaggatgtacaacttctgagatattgggagtgatatcaatttctcccttctggaagttagggacaacatcacaggggaacaatatcacagggttgcataagcccccttcgatattggaagtcatatcatcctctttccctgtggatattaggaagagtatcacagggctgtgtaaaccccctgcagtactgggagtaatattatcctctctccctctggatattagggagattttcacaaggaattacttcgatattgggagtaatatcatcctctatttccctggatattgggcgcaataacacaaaaagttgtacaacccctgccatattgggagtaatatcatactctccttccctggatgttagaaaacaatatcagcagggctgaacaccccctgcgataatgggagtaatatttactctttcacaggcca

SEQ ID NO: 478101 - DNA, 718 bp, Homo sapiens
atcaaccaggacgtagaaatgatgaagtactcaggcccctgtgctgcaggtctgctggagtttgctggaggtccactccagaccctgtttgcctgggtatcaccagtggaggctgcaaaacagcaaagattgatgcctgttccttcctctgaaagctttgtcccagatagccactcaccagatgacagccagagctctcctggctgctgcctttctttcggagatgccctgcccagagaggaggaatctagagaggcagtttggcttcagcagctttgccaagctgtggtgggctccacccagttcaaacttccatgcagctttgtttacactgtgaggggaaaacagtctattcaagcctcagttgtggtggacgctcctcccactaccaagctcgatagtcctagatcaagctcaggctgctgtgctggcagcgagaatggcaagccagtggatcttagcttgctgggttctgtggggatgggatctgctgagctagaccacttgactccctggcttcagccccctttccaggggagtgaatggttctgtctcactggcattccaagagccactagggtatgaaaaaaaaactcctgcagctagctcagtgtctgtccaaacagccaccagttttgtgcttgaaacccagggccctggtggtgtaggcacctgaaggaatctcctggtctatgggttgtgaagaccgtgagaaaac

SEQ ID NO: 478102 - DNA, 654 bp, Homo sapiens
gacttaggaaaagcaggtgggagtcatgtttggagcaatcccagatggagttcccagtgggtttttttgtctggacaggaatctgagtcaattttggtcactggcagctgggacacactcagcttttttggtttatatattaaggtgcaccaagaacagccaagttatgtgtcacgggctggttttccaggaagcaggctctgggatgaagtttcgtgagcagagagtttattgggaagtgccctggagaatagcacctgtggaggaaaacaggcttgggcagaaggagaaaatgagttgcaatgcgtgcctgccagcttccgctgatctcaccagggctttgacattggaatggcccatcagagtcgccctgtgttgggcccagatggcctggcctttattctcttttcctgcttcattggtcactggatgtgggctgcccggaagggtgtgacttggggaggcagctctctgcagatgaggcaaaccctgaaggagctcacagctgtttgggaagagggaggcaaatttacatatactccttatgttaccctttatgtttaagatcaaagggcatatgcctttcatttttgttttaaaatatatgtttgaatgatacatgcatcatagtatgaaatatttaacatacaaaat

SEQ ID NO: 478103 - DNA, 571 bp, Homo sapiens
taggcagaggaataagatgaaatttattcctggtgaagagggtgtgaacactgttgaaatgacaacaaagtgtttggaatattccgtaagcttaattggtaaagtagcagtagaacttgggggaagactgactacaatttttaaagagattctaaggtgggtaaaatactatcaagcagaaacacatgctacagagaaatcttttatgaaagaaagaatcaattgtgcagtaatcttcaatgttgtcttattttacaaaattgctacagccaccccaaccttgatcaaccaccaccttgattacttagcagccatcaacactgaggcaagacctttcaccagtaaaaaaagattaccactcactgatagctcaaataatcattacgattttttagcaataaagtaattttaaatcaaggtttaagacatgttataagctgctcaacaaaacgctgttattatggaccatctgcatgaaaatggaaatatctgttagagtcacttattttaatgatacttggtgttgtgaaatttcactgttattctgcttctttgctttgatatatctttc

SEQ ID NO: 478104 - DNA, 744 bp, Homo sapiens
cggctgggaagatacgatattatgacaggccatgttgagaaaggtctctgcagcatgtgtagcagtgcacaaagcttccaaggtctccacattctcaccaacatttattttccatttttcgatactagccttcctaatgagtgtgagaagaaggaatctgctgatcttcagttacctggggcatctctgttaatacgaaaaagaagaggggagatgaatgaagccttgagtctttctcaaatgggaagttggaaccaaggggcctacataaagtcagcactttcaaagtactgctccctattaagagcaaagactagaaacaaatccactccaacagaaagacaacaaagagacagggcatctaggaaacttttatgtggatttctaaagcaccattacccagtcttatttgaatatggagtcctttcttcccgcaaaagtaacaatctgcagggcacatttagggaaatagtgggttaccctccatcggagcaataaatccttcaaccatggctgcttttcttgtatctataccccacagttttgtgatgggactggttctcatatgttttaaagaattttaaatgatttttaaaagaaatgttaatatatttgaaggaaaaagacaatggtttgttataaacaatagatatgtttcttctgttattaaaacagagcctagatttggtacataagtatgtgatgtactgacacattttcagagtttctaaaaatgttaaaaac

SEQ ID NO: 478105 - DNA, 1277 bp, Homo sapiens
gccagaatccaaacacttcctatctggccccccgtccaacattgcggatcaaattgtgacatgagatttgatcgggcctaacaaatcatatccaaaccatagcaatagatatagtggtgactgaaaccacacgccatgttgggagacttccaaacaagtctagagagttggcacttagggatgaagaaatcatcttctgggtacacttggtctttcctgatgacgcttttaagagaaaggcagagttgaccctgggctttcaaaaaactgttctttcaggcaaaacctcagagagaactggctgctagtgatcctctgcagagaccttgaagagcacggcaattatgaaacttcaacaagaaaagatttaagctgatcttttaaaaaaatatatactgtcaggaattttgtagaaatgactttaatgtaataactgcttctttgacttatgttttgtcttgtggtgaaaagaaaaatatttataaaagcatgcctgtgtcctaaaattggggacacaaacttaaatgactgaaggcacttgaggagtggaggcaaggatggtgaaaccaggccctgtaccaagcaggagagcgtgaacctgctaaagagagtgactgcttctcatttccagtcaatgcgactggtgtcgcattccagtcaaatggagttgcgacaccatttcagccacagcgattgatctggattttctgtaaaattccctgatttttacatattgccaattaattaattaattaaaaagaaatgtagatgttcaaccatgctgtgaatctcaggcagccgccaacgttaaaggaaccttatgtagcatctatggatctctccaccttctccaaaactctgccactcaagctcacacggttccctgacttacctgcaggattagtcctaggctcgaccttggaagaaagaatgactgagctcctgctgcagaagataaactgtgaagcctctaacctcttctgcagtgctctctctctcgccagccccctagtgaaggttgacaagcccttgaggttcttggacacagacaccaaactgtggcataggagaaagggcaggaacctgagtttggatgtcaatttcctcacatacccttcaacaaatcccttggttattcagcagataatttatactccatgggaaagttggcagaatgtttcaaattatttaaaagaaactgtgagtggatgagaaaaagaaacttgagttctcctatttaatgttttcacattttctctattttgatataaaataaa

SEQ ID NO: 478106 - DNA, 535 bp, Homo sapiens
tgccctattcttttcagtctcacggcggcctgcagtagggctatggatggggaccttcccatgggtgcatgggagcaggtgatctccgctttccctccttggaggagtgcagcagcagtactgtgtctgcagatccccattctatgcccaggtctaatgacgactctggtggcctgtgtggaaatgcaccatggcatcctgagccatcctggggagcatgtctctaaaatccaaaggtcaatttcattgattgatgtctgtgccacctgcaccgcaaagagcgaccttctaacctgtgtcctcttttcacctctccctggggacaaaagccactaccttatgggcaccacctgcgtaccaagcaacgactgtgccacagctggaaacaaagccttcccagcttgtgcagccatcctgaggagtaaagtgaatgctatgaagtactgatccaacatatgatggtgttttactcacagctaaaacatatggttcacagaattgaaagatggaaatagatttggtgctttcctaggtt

SEQ ID NO: 478107 - DNA, 1247 bp, Homo sapiens
ggaggcctggtttgaaggacacaaggacactaagacctgttctttagactcaagcgccatcttgctttctgggaaagggctctctaacaacccccgactcttcagagttgggagcgttggtttgcctggaacgaacttccacttttcctgtacttctcgactgagctgagggtcagcagagaggaaagccattcagctccagggtcccaacaagatgttggttgaccttgcagccatgagcagaactctcaaaaaggaagtaagcaaagaaatctccaaaggaccacaaaaccccccaggctatcggttatgtccccttcaagctgtagggggaggggaatttcgcctaaccccggtacatgtccccttctccctctctgatttaaagcagatgaaggcagacctggggaagttttcagttgatcttgataggtatatagatgtcctacagggtctagggcaaaccttcaatatcatttggagagatgtcatgctattgttaggtcaaaccctggcctttaatgaaaagaatgaggctttagctgcagcccgagagtttggagatacctggtatcttagtcaagtaaatgatagaatgacagctgaagaaagggacaaattccctaccggtcagcaagccatccccattatggatccccactgggacctcgactcagatcatggggactggagttgcaaacatctgttgacctgtgttctagaaggactaaggagaattaggaaaaagaccatgaattattcaatgatgtctaccataactcagggaaaggaagaaaatccttctgccttcctcgagcagctactggaggccttaagaaaatatactcccctgtcacatgactcactcaagggtcagttgattctaaaagataagtttattacccaatcagctgcagataacagaagaaagctccaaaagcgagccctgggccctgaacaaaatctggaggcattattaaaccaggcaacctcagtgttctataatagggaccaacaggaacaggcccaaaaggaaaagcaagatcagagaaaggccacagccttagtcatggccctcagacaaacaaaccttggtggttcagaagggacagaaaatggagcaggccaatcacccagtaaggcttgttatcagtgtggtttacaaggacaccttaaaaaagattgtttaatgagaaacaagctgccccctctcccatgtccactatgctgaggcaatcactggaagg

SEQ ID NO: 478108 - DNA, 1421 bp, Homo sapiens
tgaaggcacaacctaatttctccttactacttatagcaaaatgggagaggagagagataagttgaaagaattgttacacaaacagaaactggaacttgaagatttgaaaaattctcgggctgtccacgttgcaatagatgaaaaattacattctgggaagaaaaatcaagaatgttgctgtttgataaagagattacaggtgtgtgacttatggatccaatcagccatatcagcagaggcaaggaatagagatggggttgtaccggcaaaaatgctgttttggactgaaggaaacgaggatgagacagttaaagaagactatctgacttctgggattctacagaatgatccagtagagatatttggcagtgaacatgtatttgataactttacttattttatcttgaagcttgctgattttttcttctgcctgctcaactttgctactgaacacctctagtgaattttttatttcagttattgcacttttcagctccagaatttctgtttccttcctttttataatttcactttattgatatgttcagtttgttcatacattattttcctaatttccctttgtttatacatggttttcattagattttttatcatatttaatacagttgttttaaagtatttttctatgttctgacaatgttggttctgtcaattctgccggtttttcaatgtttcagtttgaggatgagagcttataattggttactttgcaattttgttaacatcactaccgtttgtttttataaccagtatttacaactttgattgtctttgtaacacaacatgaacatctcaacttttatttgaagatattaacacattaggtatactgacaaacaatatattgtcctaaatttccttgattctgtcataattttagtgcttcatcacttcatttttcttttagcctttttctgtatgagctttgggctattattttttagttctttttttcttgttattttataaattatacattttatttgaatactactatttattacttttgaattttcaaaaaacattccttaactttcttttatgtacttatgaaggtaaaactggaatgatatcttttgaacttcctcaatataaaacaagtatgtttcattgtttccttgttctccaataccaagtataatataaagggttttttagggggaaaaaacaccttttttgctagtataacatgaaattccaaaaccagagaattgttattgaattatttcaaagcatatacatattatttttaataataatttatacaatgacgttaattcttagaacccataattacaactttttagacttgactctggactgcagtttccagtttccaccatcaatctttacatactgccttagtcagtttgggctgctgtaacagaataccatagcat

SEQ ID NO: 478109 - DNA, 1416 bp, Homo sapiens
gtgtgtgaaagacatgagggagtttagcacataccaattctgtgacctggggcaacttacacaacccttctctgtgcttcagtttcctcttttgaaaaaaggagatagagatacttcctacttcagggacgtgatgagatgtgagtttatacacacacagggccttggccatcgcctgacacatgagcgtgatccttgtacttgtatgaaaaaagttaactgtgaaacagcctcaggcaggtcctccaggcagtatccagaggaaggcattgctatcacagagatgacagctccatgcctgttattgcccctgaagactttccagtgggacaggatgtggtggtggaagacagtgatattgatgatcctgaccctgtgttggcctatgataatggatctcaatatgttggccaagctggtctcgaaatcctagcctcaagcaatcctctagcctcggcctccaaaagcggtggaattacaggcatgggacaccatgccttgcctttaccttttctacatttagatatgtttggacacaaaaatgcccctgggttacaatggcctactgtattcagtacagtaacatgctgtgcaggtttgtggcataggagcaataggttatactacagctataggctataggcctaggtgtgtagtgtggctttgccatttgggtttgtgtaagtgcattctatgatgtttgcacaataaccacaaaatcactaaatgatgcatttcggagactgtatccccaccattgagtgatgcatgactttgtgtgtgtgtgtgcgtgtgtgtgtatatgtgtatatatctcacttattaggcataaaaatgttacaaatttagatgctatagataacagtatatctgatactgtatattactacagatgctgtggggattagaaagataagaatgtcatgaccaactttttataccactaaatatgaaaataggtgtaatatacaaattcctagagaaatatgttaccaaatccgactaatatatgaatgcaatttaccacattaagaaataaagaaagcaaagttttatgatcatcttataagcttcagaaaaatcactggtcacattcaacaatcattcagtatacaaacttacagcaaattagaaatggaaaagaactttcaaaacctgatgaatgacatctacagaaacctacagcaatatcatactcagtgataagattttaaaatgaggaacaagctgaggatagccaccatcactacttctaatagacattattctgaaacttttatttattgtcataagacaagaaggcagaaataaagccatggagaagaaaagaaacccattgtctttatttgcagatggcatgattatctacatagaaaaccccaaatctatgaataaatgattagtataagagtgttt

SEQ ID NO: 478110 - DNA, 484 bp, Homo sapiens
cttcacagtggggattgtggtaggttatgactcacatagcaaaataatggtcccaaactctggaggaaaactagaggggatgcttcccaggtatttgaatctggagctttgggcctctgaaagctccatgggcccaggcccaccagggagttggaggcctgtctgcagaagccggtgccaggaccacagagctctcagccacactgccctcctactcctccccatcttctctgggcttgcaccaggccctgccctggtcagatatcctccaaaacgccccagcctggaggctacaacttgggagcctcagttgccccctgcgctgaggaagcagggaactgtggggccctgtgactcttcttccctgacttccctggatgtcccacaccatctctgctctcccctgcctcctggagcccttgggctgctggccctgccagagcagagaagctaagctagaggatgttctgtactagcagtttac

SEQ ID NO: 478111 - DNA, 580 bp, Homo sapiens
gttttgtccctgccctagagatttatgctgatgacacccggagccccctgctatcagccatggtcaactccactgtattatctaacatcttgggtcatgccttttttgagctgtttgcagacagagttccaaagacagcagaaaactttcatgctctgagcactggagagaaaggatttgggtataagggttcctgtttttacagaattattccagggtttatgtgtcaaggtggtgacttcacatgccataatggcactggtggtaagtccatctacagggagaaatttgatgacaagaactacatcctgaagcatgcaggtcctgtgttgttcatggcaaatgctgaacccaacacaaacggtttccagtttttcatctgcactgccaaggctgacagtggagacaatgtgagcaagaaagccctgagccctggccctgtggagtttccactgcgtcaggagaaagcgtaagtgccctgacaaagaaaagaggtgttacattggataactcaacccacaacaatagctaagtattgaagacttcaatacatttattgcattgtgagctgtatttgggg

SEQ ID NO: 478112 - DNA, 569 bp, Homo sapiens
aaatgtcacgtattattaccgctgccgccacggtttctaatcgcgttaaacatgggtaatgaagccttctctggccagcgcttgacaaagccatcgctgagcagctgccaccagggctccacacacgctctgggcaggatctgctcccaacccgtccaggtccacaaaggctcctgtttgaagctgcaggcctgcaggcagcccaaatatacctgcgagctggactgggcctgctggccacacgtctgggattcccgtcgtttggttggaacacatcatcatcagttcccctcacccctgtcttacaggatccgccacggcctccaccctcagacacaaggagcgcagacagagaaacagggaagacatcagatactgaagtttgtgttaattggggagtttttgctatgctctattccaacaaatattatcatcgtcatcatcttcattttcaatttcatactgtgaaaaacctcatagtgccagaaggaatgaaatgaaacataatgaaatgggggggattttaaaaattgaaaagcaaatgaatcagacacatagctagagtatat

SEQ ID NO: 478113 - DNA, 503 bp, Homo sapiens
cacaagaatggcaaggctggctgaaggcagcgattacagccacagttgtaatactacaacatacagtggcaatggtggcagtgatgggggtggctactatctcttaaatacgtggaccctggcatttggagcaagaggtcaatccataatgatgatgacaatagtagttcctatcattattgccactatagagaacatttccaaggtgcttgctgtgaaggatgccctggtgaccacctatgcaaggccacagtttatcagcgaatgtccacccacacaagcttgtgtccgggaagatttactgagcacctactctctacctggcactggaggaagccacgcttcctcggagcagcggtcttatgtgtgtgttcagcccacaaagattacacagcacactcaactcagagccacattcgagcttcatacccgccacatgtgagatgcagaggatgtggctcttctgtgaaggggaaactgaggtttacaaaagttgcatatgt

SEQ ID NO: 478114 - DNA, 1225 bp, Homo sapiens
ccacctgggcatgtgtggttcctgagctcacagaaggccttgggagtcccgaaacttgtctctcacttgagagggaatggtcctgttccccagaccactgggaccacaggaaatgtgttaatggggaagacccctgaacctcagcgctgttcatctcccatactctctcatgcacgtgtcttaccaagggatgtcctcgatgcagtggaccagtgagaaacactatggcaatgaagccctgatggagaagtgtgagctagagccgtcagaggcagcttcatgcaggaaggagcggcagaggatcctggggtctggttatgggcacgctgcacctggcaccgatgcgggcaaggccttctgcatgttctacgccgtgctgggcatcccgctgacactggtcatgttccagagcctgggcgagcgcatgaacaccttcgtgcgctacctgctgaagcgcattaagaagtgctgtggcatgcgcaacactgacgtgtctatggagaacatggtgactgtgggcttcttctcctgcatggggacgctgtgcatcggggcggccgccttctcccagtgtgaggagtggagcttcttccacgcctactactactgcttcatcacgttgactaccattgggttcggggactacgtggccctgcagaccaagggcgccctgcagaagaagccgctctacgtggcctttagctttatgtatatcctggtggggctgacggtcatcggggccttcctcaacctggtcgtcctcaggttcttgaccatgaacagtgaggatgagcggcgggatgctgaagagagggcatccctcgccggaaaccgcaacagcatggtcattcacatccctgaggagccgcggcccagccggcccaggtacaaggcggacgtcccggacctgcagtctgtgtgctcctgcacctgctaccgctcgcaggactatggcggccgctcggtggcaccgcagaactccttcagcgccaagcttgccccccactacttccactccatctcttacaagatcgaggagatctcaccaagcacattaaaaaacagcctcttcccatcgcctattagctccatctctcctgggttacacagctttaccgaccaccagaggctgatgaaacgccggaagtccgtttaggtgtggggagggaaatgggacagaaaagtcatttgtcatagttggtgttaatttccattggtccaactc

SEQ ID NO: 478115 - DNA, 811 bp, Homo sapiens
atcccagaggtgcagaggctagggatggctgctaatagaccctttgtgggaagtcttcccatgtctgggcccctcaaggctggctccctgggttgggtgaacacacagtgcctgtccccacacctgggagtgtctggaatcctgccaggccacaccatctttcctttggccagcatcacttactcttccctcgtgggccctccagggcttcttagtttgaagggtctggtggtccacatgcacctggttatcttgtctcccttgcgagctgttccttggctggtcctcatcgccccagctgaggctgctttggggacacctgtaccccacggcttcatctggtatctgtgctcctgttccctcttcctgtctgcacctctagtagagcttctaaacttcaactgggcatcctccaatacctgctacctgtccctattgggagtctcataggtgtttcaaatgcaggtgattctaaatggagttcaactcccctacaccatctgcatgtctgcgattccatctcactctgctgtttagaatgagagtaaggcattactttttagtttcccattgttccgctgacttattgatgcctcagggacttaagcaactatgcaaagctaatggtaaggaggggcttgagggcaaagatggtgaccccttcctgttgggctttaatcaggcaatgctgcactgctgccccaaccctaccacccttttcatcagatctgaaatctatgcctggtgactgaggcagccctgagttaagggatcatgttccaaggggtcagacaaagctttgcagggctct

SEQ ID NO: 478116 - DNA, 1071 bp, Homo sapiens
tgggctcctgggaatgcagggaagaggcacaccattttcaagacagaggaagcattctcatgaaagatgaagaagaaacggagaaagaaggggcctttctaagaggagaaatcctcatcttcatgcaagggctgtggcttcatctcacccccttccctcccagctggactggaaacgagattggcacagacactgagctcaaggagtgtttccccagcactgtagttcagaggaaagggactcctgggggtgccgcactcaggactcagtgtggagagtcagtctgtggctgccaacattcagcccagtgcttctctgagtcacccaggaagagggtgccttgtgggagggtccacacccctccccaggtgcagctcacagcccatgactcgtccaccagggggccaaatcctgtcaccttgctggatgtcacctacgaagtggagacagtaacaacactgttcttcctcctttccttgtaggtttcttgtgaggattaaacggaagaatgtttatgaagtaagtggaaaataaagttaaaagaagagaaaagattgatttgcaacctctgggctttacttccgtcatctgaagttgggatctactcaggtttcccatcctgaagtccacatttcactgggaaatagggtcgtgttctcagcagcgcttgacactaacagaacaaatacccagtgtggatttatacgtgagcgtcaattttatgtgtggattttggtgaaaaaaaaattaagtgatttaaaaatattacctggatatgccaaatgaaggttgatatattttgagtgaaatatcaaatatgtatgtgtttttcaaataacagcatactctgcttaaaaataatttacttttctgggtggtcctcttaggtcccccaacccagatgcaggggagggtgtgacctccccctgcacttctctctcagggctttggaggaggctgtgggaagcagcggagggagcggacatggattccagcttctatgttccgggattcttccagcaggtctttcccatctgtctctgattgctcccaacccagccttgtgtctgt

SEQ ID NO: 478117 - DNA, 3748 bp, Homo sapiens
ccgaggagatttgaatgcaaagccaggcggggcttgcacctatggtaaatgttgaacaacagctctttagaagagagctatttgtagcatttgccaatgtctataaggcaaatgttcccaccatggacaaattcaagctcctaaaagctgttgtcactgaatatggaagtttggaagagatgcatccaatggccctttctgagacagtgtctccagctcgccgtgggttccacagttccatccctcttattctccattctctaaatgttttcaagagcctttccttctcctggcaaaggtgcacatattggcctctggacagcaaccctatcatgggcactgatatggaaaaagcacacagttctttattgattgaactctaccagcgaagacattcagggggaaaaagtcttgttgaagttgaagctgtgtttaccctctgagcaaataatgtcatttctaggactttatctcagagacatacaacgaagcaatacatgcatggttgactgctgtggtattgtttctaacaggaaaagaaaattcatcaatggggaatagagaactaaatagcaacatattaaactgtctgagaatagctttctggtgctcagtgtggcccctggcaagaaattggcaatattccataaatgttggataaatacatctataaacatataaagtgcaatgtggccacttcaaataataaggtagatctaaattagctgaaactggtgcccaagatgcttaagtggaaaaggcgagtggcagaacagtgtgtatataatctgttcctgtttgatagtttctctctttatttctcctgtgtctgtgtctaaatactttcaaacatgctgaaaggacctgtatagctatagaagatacacgtcggtgttaatttctagagaacaatatggagggacttgttctgtaattggtcttttacattcagcagtatgcattagacaaattcacatggaaatcagcacagcactgcatcattagtcctgatgattgctcaatatatcattatagagagttttcattatttgtgttgatgtttagcacctttggtgattccagataatctgcagccccacacctcactgtttgaaccaaatgttgtctttgttttttaaaacatgaaaataaactcatggggaaattgcacatatgttctttatgtttgtaatcatttcacgtatattttttctttttcactgacaagatgacaagaatccaaagaagaggtcccacatgaattgacaaactcatggaatttctggttcctaactctagaaatatgtatacccttttactatggaaatttccaaacatgaacaaaagcagagctaataggacagtgttcccaataccaagcttcagtgattatcattactcattttgtcccatcgtccccctgatttttttttgtggggggcaggtgtggggctgtactgagaggccaatcctagacattgtgtcctttcacctgcgtgtttctccagtagacaaccagtccatggcatttcaaaacttagatttcttattagatgcagagtcctcctcctttcctttacccccagagtaggagagtgtggttctctgctggggtctgtcccacagaccctgacccaacagcggatgaataacatacactgacacagatactatgcttgtcagtccagctgagggtccaggccacttacagactccaaggagagtactgtaaagagttgcagctgctgccctgactagctggccctgctggcatttattcagcacacattaaatgacaaagactttgagtcaacaccattagagggtaatcagccttcaacctggtcgccccccaaccccaacagcgagagagccatcctgcccgtgaatgatcaaaggttagttttaggaccaccagagtaaacaatttatttagataaactcctctacattcctatgtatctactctaagttatttactcaaggtaaggattaggctactttcagccataaccctatcctgagacttctgcagaaaccttctggccttccaagaagatttgtgtctatatcctataacttcaccttaaaatttttcccatcagcctgactgaactcccacaggtctccagcaatttggcttgggaaggaagaacatgccccccaaccctccaccaccgaccccacgaacacctcttgtgtccttcttccctgtgtgaatccatgtggactgcaggagtggggcaggaaagagggagggggaaagtcaggtgacttcttgcatggtcacccttgacaaaggcatcttttctctgctgcttgtccctgctccttcttgttggcaccgagggccctctgttctctcctcatcatgggcatctgaatgctgtctcaacagggacagttaccaaatctgttttctattgatgctgtaacaaatcacagactcagtgacttaagccaatacatatgtagtatttttcagctctggaggtcagaagtcctaaacaggtgtcactggactgaaatcaaggtgttggcagggctgcattctttccagaggtgtgagatggtagtttgtgactttcaagaggccaggtggaccctccagtctcaggctgccccatgcccctctctaccttctgtcacactgcagctctcaacaccagctgaaattaatcttgttcacatctctgcttccttgcttattgtctgtccacccagatttccacatttgaatatgaacaccttgaaagctgggtcccttttcatctggttcacaattctattccttgcacctggaatagtgcaggcacatggtagctgttcagtacttattgctgtggcctgaatgctcgtgtcccccaagaattcctatgttgaaacctaatccccaatgtattggtattagaaggtgggactttggaagctgattcggtcatgaaggctctgttctcctgaatgggattaggacctataaaagaggtcccagagagctagctagccccttccaccacatgaggatgcagcaagaaggcatctttgagccagagagcaggccctgcacagaaaccaaatctgctggcaccttgaccttggactttcccagcctccagaagtgaggcaatgcatttgttctttagaggccacccagttggtggtatttaagacacttattatttgttgaatgaatggattttacaaagactgatttaatcttgccccatagtgttttaggctctttgatgggtacattagtacaatgtttatgtttaaaaagtcatcatctgaccaggctccccaagcagatattcttcactggcaacttatagagacctgctcatcttcctcctccccacagaggcccacccctgcccctgagcggtttcaggaccagccaccagccttctgcagggctcagtggctctcttctcccagccccttcccacctcctctgctttctccagatccttctgaggatggactcagctttgctctctggagggtggtagctgctgctgttgctgcagctgcatttcctctcaagggaaaggttttcctctttttgcttaaatgtgtatgttttggtacctggtgctcctgctctgtgtctctgaatccttttcctgcattttaaactactttctgtgcttagttattaggtttctaagctatttctctctatgcaccctgttttagggagtacttactagaaattctcttgaaaggtggagtttgcaaatttgaa

SEQ ID NO: 478118 - DNA, 602 bp, Homo sapiens
gctgtccttggtgctgggttacatctgacaaagccaatgtagggatgcagatcctcgtccttgagatgcgtttctggcgtggccaaggcagtgtttccctgacatcaccaaagtggtgccctcatttgtctgtgccccagcctggctttgttcttgggatttccagctcagactgcatgaaggaccaggatggaggcttttactgctccagggagctccttagagactgtgggcttcctgaggcctccccagaagcagaggcctatgttatcatctttgacagccgcaggactgtccacaagggattggatgacaccccccttctccccatgtttcagggctatctgctctactcagtccaccaaaacaaatgggaatctcttccagaaacaccctcacagacatacccagaaataatgtttaaccagatatccgggcatcctgtgacccaatcaagtttatccataaaattaaccatcatagatgccaatcctgtcttcctgccaaatattcaatgaaaaaaactaatacctacccaaataaaatctcatgttttatattaaatatcaaatacccacccaactgaaacccaaatgcatacc

SEQ ID NO: 478119 - DNA, 731 bp, Homo sapiens
aggtttgttagaaagatcaaataagaagatgtggaggtgtcatcaaagagtctgattgttccgaaatggagcagatgtgctgggggtccaagctggggggcaggggagggatggggcctgatgacaagcagaaaatgcgagcccccagcacagcacaagtgccttatggaaaaggagccagactgttttccaagaaggttcctgctcctgcaactcctccctggctacagtctatcgacctgggatcccagccaccccaccctcacctgatcacttgggccggaagaagctctgtacttcctgagatggagctcccagaggtaggagggaggaccaccatttttgctgctccacagcctcagcccctgctgccctcagactcaggagggagcaaagatattaagaacgaacatgggccccaagcacagtgcagctgccttatggaagagcagccagaatgttttccacatgaatccctgcccctgttactcctcactgggcagagtctcttgacttgggccaacacaaccacccttccccccccatacacttttgccagtggcagctctgcgattttctgggaaggaaatcccagagacaatccacagcccctcttccatggcaactgtggtggtacagcccttactgcttttgagctcgggaaggaatacagggcctggttgcattactggcacctccaacgtgctgcagccaccatatggagatgagcc

SEQ ID NO: 478120 - DNA, 688 bp, Homo sapiens
cttggtgtctgaggggttttgtctgtggctcctttcggactcttggactcatgccagtgatttgcccaaggctcttgggccttcgacaacagactgaaggctgcgctgtcggcttccctacttttgagattttaggacttggactggctttcttgctcctcagcttgcagacggcctattttgggacttcgcttgtgattgtggaaaacattactgtttgtttacaaggtgcaagttttaaaggaaatgaccataaaaactttttaaaagatatcttgatgaacatcatcaaaaccaccatttctattaaaaatgtcatacaactggaatcatataaaatgcagcctattcagaccaacttctttcagggggaaatcattgagttttccaccatgttccttgaatttcctgaatctatagtttggtgtcctgaaattaattcagggacattcttatgaacgccatggaaaggcatttggataaattattttgaaaatagtcattgacattaaaaacatattatactaagactactgtcagagactgcaagatgttgtaaatattctttgctaacccaattagaatttaagttatttgaaacttgtactcttgtccatgaataaatagtggtttacttttaacacatgcatttatttgagtttatctatttaaaagaaataatatgtga

SEQ ID NO: 478121 - DNA, 817 bp, Homo sapiens
acccgtggccacccatggaccaatcagcatgcacttcctaccctctgaagcccataaaaatcccagactcagccagactggggcagatgaggggatgacctgcctgcagagaggagctgtccactgtgggtctctctttgctgagagatgggcagataatgggacaacctgtctgtggagaggagctacccactgcaggtctcttctgagctgttccactgctcaagaaagcacctcttcacctagctccacctccacttgtctgtgtacttccttcttcctggatgcagggcaacaacttgggacccatagaatgatgggaagcccagacctaggagctccccaagccagggttgtgacaccgtctttggggatctctggttctggtgattccaagcttccagtgccaccgtgttccctgatgccagtcatggaagctgcttgcagtatgcctggtccagctgcagccttgcagggagccagcgcctgtgccggtacttggagctgcctgccccaccacagccagcaagcctggctgtgtgcagtggctggaccccacacttgctcactcacatactcctcactgctctgcgcctggctcgcccttggcaggcatgggactcaggtcagtagcacgagccaagtgcagcctgccaggccaagtggacagaatgagctcagtgggcctgaccgaaacttgggcaaaggcaccaccagccacagaggtttccagccggaaaacaacaccccaacgatcctgtgacattatgtgcaaagacagctaatatcagattttcagaaatgaattgctgatatt

SEQ ID NO: 478122 - DNA, 858 bp, Homo sapiens
gagcagtgtaggcctcaagggatgacggtttgcagcagggagaaagcagtgggaacggcatggtcagaagccagaagttatgtctgtttcagagtttttcttctgcttcttctttcattcaagaaatcaaaagatacttggtatgatttcaatcttaaatttgttagacttgttttaaaaccgatcctgagatctatcatggagaatgttctatgtgcaattgagaagattgtgtattctcctgctattgggtggaatgttccgtgtatgttggctaggcccatttggtctatatgtttttcaagtcctctgtttccttatcagtcttctatctggatgttctatctatggggaatatccgatgggggatatccagtatccaatggggtactgaaatctctttctattattgtgttgctgtttaattcttccttccgttttgccagtgtttgcttcatttctttagctgattgatgttggatttataactgttatatctgcttggtggattgactcttttatcattatgtaatgtcctttgttacttaggacaggtgtttacttaaagtctattttgtgtgatggacatcacaatgttaaatgtcagaggagggtatttatttttatgattattttaatttgctcaaggcagcactaaattatttctaacatcattaggctattaatattataaatgaagacagtgttttccctgaatttatgcagagttgcttcaaatacttcactttatgtctcttaagaaaaagcctaagggaatcatcatattctttatttttcaaaaattattaatgtgtcagagttttatttagtttttcacattagccaccattaatcttt

SEQ ID NO: 478123 - DNA, 1194 bp, Homo sapiens
cagagccagacttcaataggctctgcgtcctgggaacccaaacagaaacaccaggatggctacagttccgggatcagaagaccgatatgcgggaagctgtgaaatagagatagtgcatccatgtaaaaagaggaacaaaaactacaaacagaccattctcaaaagctataacgtctctattgcaattgtgttcagagtttgttccttccggtgggttcgtggtcttgcagacttcaagaatgaagccgcagaccctcccaataggataaaagccacatggctctttatggagactgaattgcgaacagaagtgatatgcctcacttgccctggaagacccactcctgatggcaaatataaaaatggaaaagagttgtctgagctgtaccagacttcatacaagcaaaacaatcaagtcactgatgtcactgatagttttgtgtttttcaatattaattgccttgactacacccactactggggcaatatcaatgagacaagcttccaaaatgttcatctcttctcggcccaagatttctttgtcaacaccatcaccctatctttggcatcaaaaatagaagaagaaggaggagaagaagaagaagaaaaaggggaaagaggagatgaggaggaggatagagttcttgacctcctatatattatagtctgttaagaataatatatctgcaaataaaataatataataatatataatattatataaagattataagtaaaagagataaaacgattcattttatgtgagataaggagaaaaaggggaacagtaaaatgttctaaaggtgtctcaaaacaataatttgaaaaaatccattaatatgcaaagtggtaagcacatgtgtgtatgtaaaggtttttgattgtgaaaccaaatgacatgttggtgacactacaaatagctcagtaaaataaagttggaaaatacacgaagaacctcatattcatgtaaatgaccttgagttgtatcatagacaagatggggaacataataccttgttattcaaaattaagtcaaaattccttcatttaaagtttaaactcttaagtctaatagtcaaagctttgaagaaactggcccatattgacctttaaacctttatatttaactacgtctacaaatatttttctccaaaaataccggtctattctttctttcacaaaatatgcaatgaa

SEQ ID NO: 478124 - DNA, 1545 bp, Homo sapiens
agttcagatggaaccactcgaattccatgaatgtttttgtttaatcaagtgaacacttcagtagctcccagcatgaatgacgcagaagacgggtgatttctgcatttccaactgtggtaccgggttcatctcactggggcttgccagacaagtgggtgcagccctcggagcagggcggggcattgcctcacccgggaagtgtaaggggtcagggaattccctttcctagcaaagggaagccgccatgacagacggcacctggaaaatcgggacactcccaccctaatactgcgcttttccaacggccttagcaaatggcacactgggagattataccccgcacctggcttggagggtcccacacccacagagccttgctcactgctaacccagcagtctgagattgaactgcaaagtggcagtgaggctgggggagaggagtccgccattgctgaggcttgagtaggtaaacaaagcggccaggaagctggaacggggtggagcccaccacagcatgaggaggcctgcctgtctctgtagactccacctctaggggcaggacatacctgaacaaaaggcagcagaaacttctgcagacttaaacgtccctgggtgacagctttgaagagagtagtggttctcccagcacagagtttgagatctaagaacggacagactgcctcctcaagtggctccctgaccccggggaagcctaatttggagacacctcccagtagggggcgactgacacctcataaggctgggtgcccctctgagatgacgcttccagaggaaggattaagcagcaacatctgccgttctgcagcctccgctggtgatatccaggcaaacagggtctggagtggacctccagcaaactccaacagacctgcagctgagcgtcctgactgttagaaggaaagctaacaaacagaaaggacatccacaccaaaaccccatctgtacgtcaccatcatcaaagaccaaaggtagataaaaccacaaagatggggagaaaccagagcagaaaagctgaaaattctaaaaatcagagcgcctcttctccaaaggaatgcagctccttgccagcaacggaacaaagatggatggagaatgactttgacaagtcaagagaagaaggcttcagacaatcggtaataacaaacttctccaagctaaaggaggatgttcgaacccatcgcaaagatgctaaaaaccttgaaaaaagagtagatgaatggctaactggaataaccagtgtagagaagtccttaaatgacctgatggagctgaaaaccatggcacgagaactacttgatgcatgcacaagcttcagtagcccatttgatcaaatggaagaaagggtatcagtgatggacgatcaaatgaatgaaatgaagaaatacagagaacgccaaaaagatactcctcgagaagagcaactccaagacacataattgtgagattcaccaaagttgaaatgaaggaaaaaatgttaagggcagccagagagaaaggtcaggttacccacaaagggaagcccat

SEQ ID NO: 478125 - DNA, 669 bp, Homo sapiens
tgtaatctaatgcatccagttaaaactttaaataggtggatgttgttcaattcagattttcaactaattagtgtaataaaggcttccaggatgaagaggaccaaatgtaatgaaaaagatgaggaggtgctagcccaggggaaagtagtggaggcaaaggtgacagacatggaggctgagaatatgtcgggtattggcaggcctttaagtagtttggtacagctgctggaagctggtagagatattccagcaccagaccttaataaggagttattactacaagagagaagtgaagaagaacattctttctttcttgatggcagcaacagtggtggcagctgcatggccaagtttctggaggtcaataatcctttagacttcaaaactcacaacatgtatgatgtgtgtaatcatcatttgcctacttaggctaacacaaaatgtctaaacttttgatggaacaggttttaatctgtgcttcgtcatttaatgaacactaatcacttcctatgaaatcttcatttctacatagatctgaattccttgatcgtcttcatatggagcctttcaaataccaaggatttatcgatacattgtgataaatgttttgacccgttagcctattatttttttcagttcattttaaagggtatttacaaaacaccagcc

SEQ ID NO: 478126 - DNA, 686 bp, Homo sapiens
ctggtagatttggtgtctgttgctcatcaccaggtccgatcacacagtcttctgagagtaatggcttctgcttcactcccatcttccaaatttctcagaggctccacttttagccaactcaacatggatgaagtcggaaaccatcattctcagcaagctaacacaggaacagaaaaacaaacaccatatgttctcactcataagtgggagttgaacaatgagaacacatggacacaggaaggggaacatcacataccagggccttttgtaaaagccctgaagattctgagatggaaagttcgagcaaaagtgagagtctctaacttttatgtcatatcttatgaactattggaggaagatggccagtggttatgggaattttcacttatagagaaaacagaaccaagcatagaatttggcaatttagaccatgacagtcctttgcaattgcaaaaaaagccccaaaagtcttccatattgagaaggagagttcgctggaaagataaaaataagaaactgattaactgaaatgaaaacagaaaaaaatccaaagaaccagccaacacactaataaaagaaacccagaagcaatcaaaaagcataatttgacttgtataggcttataagagtgctgatggtgaacggtacatttttaataagaaaaccagatgtgacatacattttat

SEQ ID NO: 478127 - DNA, 2296 bp, Homo sapiens
gaaggcagcaagatgttgcgagccacagctccctgctggttcccccctggatacccagaagctaagaaggtggccgaggaggcggccctggaggcaagccgccatctgggaggggagcagagccaggccggtgctcccgaaggcagcaagatgttgcgagccacagctccctgctggttcccccctggatacccagaagctaagaaggtggccaaggaggcggccccggaggcaagccgccatttgggagcggagcagagcccggccggtgctcccgaaggcagcaagatgttgcgagccacagctccctgctggttcccacctggatacccagaagctaagaaggtggtcgaggaggcggccctcgaggctccagaattcccactgccctctcatcagcctgcccagagcttcgggctctgggtgccccagatgcacaagcaggcctcagcatttgtggacatccaggcggagccccagaacaggggtccggcggtgcccccagcgtggcccaagatggtgacggagtcgtgctacttccctgcgcagaggggatcggcctgccgcttgccagccgccccaaggctgacagagaggccctcgggagtccgcatctcagcccccaggaagaggaagacgatcgcccactcttccagcccttgcttggtcacaggttacacagatgccaagagaacccgggtggccagcagcagccaacgctcccgtggctccaaggtcggcagacagccagggaagacgcgcaacaggtcagggatggcatgcaagaccaccgccaccaccagctctaagcgaatcgtccgtcagtgtctcaagttctgcgcctccaagcaggaggccgaggagaaggcgctgaacgaggagaaggtggcctacgactgcagccccaacaagaacaggtacctgaacgtggtcctgaacaccctcaagagactgaagggcctgacccccagctccatgcccggcctcagcagggccgccctgtacagccgcctccaggagttcctgctcacccaggaccagctcaaggagaacggctaccccttcccgcaccccgagcggcccggaggcgccgtcctcttcactggccaggggaaggggcccggcgactcctcctgcagggtctgctgccgttgtggcaccgagtacctggtgtcctcctcgggccgctgtgtacgcgaccagttgtgttattatcactgggggcggctccgctcgagccaggtggctggaggccgggttagccagtacacctgctgtgcagctgctcctggctctgtgggctgccaggtggcaaagcagcacgtgcgggacggccgcaaggagagcctcgatggcttcgtggagaccttcaagaaagagttgtccagagacgcttatccaggaatctacgccttggactgtgagatgtgctacaccacgcatggcctagagctgacccgcgtcaccgtggtggacgccgacatgcgagtggtgtacgacaccttcgtcaagcccgacaacgagatcgtggactacaacaccaggttttccggagtcaccgaggccgacgtcgccaagacgagcatcacgttgccccaagtccaagccatcctgctgagctttttcagcgcccaaaccatcctcatcgggcacagcctggagagcgacctgctggccctgaagctcatccacagcaccgtggtggacacggccgtgctcttcccgcactacctgggtttcccctacaagcgctccctcaggaatctcgcggccgactacctggcacagatcatccaggacagccaggacggccacaactccagcgaggacgcaaacgcctgcctgcagctggtgatgtggaagccccaggcctcttccaaaaccgccatcagtcccgagagctcaccctgcccacctcgccgcaaagcgaaagaaactggagcagccggcggcaggagagggcaaaaagccaagagtaaccccaaccccccactcccggtcccccggaatccctgccgcggcccctcgggcctgtccacatccctctgcccctcccagacctctgtccttccaccaatcgcctcccgcagccccgagccgccactcccagtcccccgagtccctgccgcgcgccctcgcgcctataacgtctttgcgcttctaccttttggtctttaaagtgtgatcaaaagagacttagactcccacatagtaataataataataatggcaaacttaacaccccactgtcaacattagacacaccaacgagacagaaagttaaaaaaggatatcc

SEQ ID NO: 478128 - DNA, 702 bp, Homo sapiens
tcctgccagagttatatcaaaagaacatgactggctctaggcaagactgtgaagaagctatggctagtgcaaatcttcaggggccgtccaggactacagagctgtttcaccctaccttggcttcaatctcttcccccatgctcgaaggtgcggagctgtacttcaacgtggaccatggctacctggagggcctggttcgaggatgcaaggccagcctcctgacccagcaagactatatcaacctggtccagtgtgagaccctagaaggacaggacaggacaggacaggactggcatcataagacctccgccaggcagactccaccatttcaaaagaaggaggaggaggaggaggaggaggaggaggaggaggaggagaaggagaaagaaggaaaaggagaaggagaaggagaaggaggaaagaaaaaagaatatacaaatggtggaaaggtggacatggctggagagaggcaaacagcagagagaacagaaaacacaggccccaccactactgttgttgggttgctgatgccacatgtcagcaaaatcagcgtctgaggttgaggatgttaagataataatggctctactctaaccaagtgccatgggaaaaactgcaaccccacccctgtcagcaaatgctcgatggggacccagatgtctacccttacccggctgtaagtggggtcagagagggctgagc

SEQ ID NO: 478129 - DNA, 619 bp, Homo sapiens
ctcactgcaataacattctaggacattgcctctgttcagagctctcctaagcaggcagtaattatgggcagtggaactaatcactgtacatatacctttaaagatgagtgtgggttcttcaagcacacatgtacagtgcatataaaacttagaagcatgtcagagagaagttttgacaaaaatcctactggacaagatgaatctgctgatgagtggacagagagaatagttcagaggagccacaatgacaaggcagcaatacctaaagaccgccaaatgaaaacgttaagtcttttaaccttgggaaacgcgactttatttggaaaactgaagaagaagatgttgaaagtgaagataatctcacttaggcatgtcagccaggaaatccagtcagagaactgggtttttgatatcagtgaaatccaaacagaaatagaaaaattacctatggtcgatcatagtgttatcatcattggccagagaaggaatttccagcctcctccatgtgaagatgacaaggatgaagatctttaagatgatccacttccacttaatgaatagcagccctgctagttagtgttaatggagatacaaatatgaaaagctatgggttatgcct

SEQ ID NO: 478130 - DNA, 677 bp, Homo sapiens
tcctttgcttaggttctgccctaggaggaacccgaagtgtgatgctgaattttagaacagagcaaagctttgcattgcctggtttaacttatatttccatgatgattagtgatgttgagtatcttcatggaattgcaggtcaaaactacaatgagagatcaccttgcacctgtaggccattattaaaaaaagagagagagagaaggagagagataacaagtgttgctgtgtggacctccagtagttctcagtactcatggaaggattcacaaggccagagcggactgagactgaagtgtggttttgatattagcagcaccccacttcacaggccacaatgcaggccagaccgggccccagaaagctgcccactttcacttttccgcttcatcttgagagataatgcaggtgacctttaaaaaattgttgctatggttaaaataacatcataacagtgaaacatcaatagtaaaaaacatcacaataatgtgatgtttatttagcatttctgaaattgtggaagtctgggatgggagagagaatagccatcagttatttaggaagacctttgcaggggaatttgctaagggtctacggatccctagtaataaagtcgcggcttgcgtttttatggtgctttcaaagtactttcctatataccatttcattttcacttt

SEQ ID NO: 478131 - DNA, 1526 bp, Homo sapiens
cattcactttccctgtaagattttctgtgctgggcccatcccatgactcggagcacaaggccagatcccaccttccccatgtcgagtccccaacctgctggagaggccacagtgattgctacatggagtcaggggagaggatggctgagagcccatccaagggaggaaaggaggttccaagacttcaggtcttacaaagaccgtagaagacaaatgggagcccttccaatgagctcctgttgttcatctttctacccagccataagtttcctgaagtacctaggagtcatccctaatgcagctgtgaaatgcctgcgtatggagcaggaagacccagatcttttgccagataaggaatgctccaacagccatagtgctccccgatcctcctgttacaaaaaagaggcagccaacatgagaaaaacagataaggtgattgaaaacttgaaagttatttcagtctaacagatctgtaagccacttaagcattaatgccaatatcaaatagtcaattggctatgcgtgtctaaaacaagtatgttgacaagagtattaatacagtttagaaaacccattttagtcctgatcttatacatacatatcatatgatttaattacttatattgtgattaagtggtatgttcgcattcatttgaagatatttgagtcccctgataacttctcacaagtatttataaagtagaaagtcataaaatctaatctaagatttcaaaataattttgtgaggcaatatcctttatttaatcttgatcatatgaaggaatcacaaaagtaatttgagatatcaggagctttttttatgcagatgaagaagaaaatactggatttcactggggttaaccagctggaacgggtgaagatgttaattgtactctttgcctgtcgttttatctgttatctatcattcctggtgtcttgaaataactcagggaagaaatgagataactttttttggcacagttataaataatagctgttttgcaagaatgttcatttttgacagctgctcattttttctagaagatcctttgacttcaaaaagctgcaaagtattcactcttgttttagtgaatgtgacaattggcatattaaaattttctcaaaactggaccttaaatttgagcaaataaataaataagtcattctgaaatatcaattggaagtcaggaactaaagaaagatgaattagttgcaatcattttgttcagtgttgactttaagattgtcagtgtactttgattgctcgacagtttaattttatactacaaattattagaaagtacaatgatgaaaaattggactctgctgtacttccagaaaacccataaaaattatcaagctcattcaaataagctggaaggtaacactacagaaaagggaaaactgattaattttctctcgaaaagtagtgctttgaaagtaactaactttgcaaatatttaataaaattgtacatatttagtaaaagaaaagcatgtattacatagagataaagcagttgcaca

SEQ ID NO: 478132 - DNA, 565 bp, Homo sapiens
gaaaaaccatggattaatcttcaaagaatccagaaaggactgagtagaggatgggccatgaggaaggcacacaatttgaaatcagcagtgaagtgataggagaggctactcttgttaaagaattctgcaggtctgttggagtttgctggaggtccactccagaccctgtttgcctgggtatcagcagcggaggctgcaggacagcaaatattggtgaacagcaaatgtttctgcctgatccttcctctggaagcttcatctcagaggggtacccggccatgcgaggtgtcagtctgcccctgctggggggtgcctcccagttaggctactcgggggtcagggacccacttgaggaggcagtctgtctgttctcagatctcaagttgcgtgctgggagaaccactactctcttccaagctgtcagacagggacatttaagtctgcagaggtttctgctgcctttttaatggtgggcgcccctcccccagcttcgttgctgccttgcagttcaatctcagattgctgtgctagcaatgagagaggctccgtggctgtgggaccctcc

SEQ ID NO: 478133 - DNA, 705 bp, Homo sapiens
ggtggaaaggagaaaaacaataatgaaggaaaggacaattctggaaaatcaatgtaggtcacattattctgaagtccatacatcagtagaatcaagcaggaaacacatagagagcttgagggaaatttatgacaaacttctatctgtaaaagtgcatacaagatgcagtattttctttgggaacagaagcagagaacaccagtcagcttacctgatcagcaactctgtagacctcttgtctgttgctacagtcacacgtgtagggaaacactttcttaccacccttttctttggccaccctggagtaggaatgcagaagattaaacatcagaggcagaaacattcaatgaaaggaggaatccaaacccagatgaggttgcctcctgtccaaagaggagccagcatcctcagcaaagcttttagttccagagaatatagagcttttgacccagacccagatgcatttcagtggctggaaatgacaatccttcctccacctcaaccctgaccctgccatcaacttctcatctcacctcactcctggcgcctctgaggggagggagaggaagaagaagaagaaaaagaagaaggagaaggaggagagaaaggaggaggaggaagaggaggaggaggcagagggggaaggggtggagggggaggaggaggaggaggaggaaagtcttgtaagctttggaaatgaccttg

SEQ ID NO: 478134 - DNA, 520 bp, Homo sapiens
ctggcatgtcagctctgccctgagcatgtgcacaccccatggggctgtcacagtgcccaagatcagccctgactttgctctgacatcagaacaggtgctgacagcagggagaagccaggcagtgggaacaggcatttctgagccagcgagggcagggggtccttcccgagctcccaagacaggaggcctgggtctgcagctgaggttcgggcagctgcagcagtcctgccagctctacggagtgggaggcctgggtcagcagctgtgtttggagcggctgcggctgcaccttgggagctcctgctccaccaacttggaaggggtggggctcccacttgttgccagctccacggagtgtgcagccccagctgtgcctccttgctacagctggcatgatggcaaggagagaatgcctgatgtggctcacctgtgatctcaggctttgcactgccctggtattactctatgaacaccaggtttgattttcaaatagagaaccaacagttcatactgattttaa

SEQ ID NO: 478135 - DNA, 684 bp, Homo sapiens
aagacggacacaaaagttttcactatgtttgtggacactatctggaaccagcagcttggttttcaggctttaaactgtctttggcttgaagtaaattgttttaaaagtgctttgcaaggtatcatatcagagcatgaatcagtggacaagtatgagatttggattcaaatacctcttgagagccagtggttttatgtaagcacacttgcttctctgagctctaatcttcttaccaacaaacttattttaatacctagctcacaatcaattttagaaattttagaatacattaaagcctctttatggtcctgtagtatcctgagccctaagcactgtgtctcagagcctgggggagagccacccctgcctgcttcattttcttcagatccctcatcagctggacacagtgctctccacttgtttgctacctgccttcccctcatgaaaggccgcaatttctccagaaagtgtgaagaatacaatcaataactaaacagcaatcgtccatttagactcaccttgtaattatttccatattctcaccaaattttgttttagaacttaatcccatttacattaaatacattgattaaaatagatatggagtgctcgcttcggcagcacatatactaaaattggaacgatacagagaagattagcatggcccctgtgcaaggatgacac

SEQ ID NO: 478136 - DNA, 775 bp, Homo sapiens
gatgccctcatgccagccggggaagaggccttgctgaccccaacccagccatgtatgaagctccacatgcatcaactcagaccccctccctcccctgcaggtctccctgtcctccaagggtcatgggctgcagagccatccccaaatggccctgctggaacccagaacccatcggcagatgcccccttctgtgaggacacccatcgcaagtcagtcttgtgcctgcccccctccctcggtgcccttcagtcttgcctgtcattcaccaatcactcctggagcccctgccaggtgccaggcaccaactgggctctgagtttgttgtcccactcaaccgccacagccagcgggtctcaggaggcacgctgcagagcacagtcctaatcttgtctcataggacaccagtcctattgcattaggacctaccctaataatgccatttaatcgaatcacctccttaaaggccttgtgtgcaaatacagtcacattctgacgggtaggggcttgtaggagattttccttcccttccatcttgtcccctttccctgacttggagatatccaggtctctcctgctgtccatgcccctcagcctccaccctccccccataatcctatttatcacccagagccccaagcacattcacattatagtcagaagacttactctgtgtgatttcaatcttttcatatttgttgaaatatgttttattgctgtatgtatggtcaatttttaaagatattgcatattttgttatgttttatatttgtccatt

SEQ ID NO: 478137 - DNA, 1082 bp, Homo sapiens
ttccaagatggccaaataggaacagctccagtctgcagcttccagcatgagcgacacagaagacggtgatttctgcatttccaactgaggtactgggttcatctcactggggcttgtcagacagtgggtgcagagtggggcattgcctcaccagggaagcacagggggagattatatcccacgcatggcttggagggtcccacgcccacggagccttgctcattgctagcacagcagtctgagattgaactgccaggtggcagcaaggctgggggaggggtgtccgccattgctgaggcttgagtaagtaaaccaagcggcctggaagcttgaactgggtggagcccaccacagctcaaggaagcctgcctgcctctgtagactccacctctgggggcagggcatagctgaacaaaaggcagcagaaacttctgcagacttaaatgtccctgtctgacagctttgaagagagtagtccttctcccagcatggagtttgagatctgagaacagacagactgcctcctcaagtggtgcctgtcccccaagtagcctaactggaattcacctcccagtaggggccatctgacatctcatacagccaggtgcccctctgagatgaagcttcctgaagaaggatcagacagcaacatttgctgttctacaatatttgccgttctgcagcctctgctggtgatgcccaggcaaacagtgtctggagtggacctccagcaaattccaacagacctgcagctgagagaaggaaaactaacaaacagaaaggacatccacaccaaaaccccatctgtacgtcaccatcatcaaagaccaaaggtggataaaaccacaaagatggggagaaaccagagcagaaaagctgaacattctaaaattcagagcgcctcttctcctccaaaggaacacagctcctcaccagcaatggaacaaagctggatggagaatgactttgatgagttgagagaaaaaggcttcagacaataggtaataacaaacttctccaagctaaaggaggatgttcgaacccattgcaaagaagctaaaaaccttgaaaaaagattagac

SEQ ID NO: 478138 - DNA, 1627 bp, Homo sapiens
gcagaggatttttttcaaacagggccatacatggcattgctggtagatcaagtctttatgggggggaccgccccaagccttgcagatgtttagcatccttcactcgctgaaagccagctctgaggagaaggagccaaagacagattcccttccccagttctggataactctaaatttataccccataccacgacatgtggaaagaaaagaagaccaaccaaatgagaaaaacaaagacaatttgttcttcacttgttgtagcaagggagtcagctaccttcacttgcatttaggcagactcattgcaggcagaggagtggaaaagcttcatagtggaaaaagggaaggctccagtcctgatcattttgggtcaactgccacagaagttattgttgagtttcctgaattgtcactagagagagcagtctggccccctgcaagtctgatttatggcaggctggctgcctgggttgttatagatcagaaggttggcttcctggaggttgctgcagattgtgggtcacagttctgttttatatgtaacatgaccattgtccatttgtatcttcaatctctcactacaaatagaaacagcaatttccccaagggaaataacactcaaaatgatgacaaaagtaacatagtgattgaaatggacaagaaaagaattttatgaatctttcttagtcatatgtgttacagtagaggttatttacttttgatgtaattattgatatttaaggcaaagtctgccattttttaaaatttttggttctgtttttcctttcctggttttcattttcctgccatcctatggacaacacaagcagtgtttagcatttaatgttaatttatctataatttttaagtgtatctctttgtaaagcagttgtactggttgctctaggcgttacattatgaataacttattgcaatccactggtgccaatattttaccaattcgagtgtggaaaacttccttgcttttatatcctttagtatccccaatttataatataatccattttaaatatttcccctacatacatcgacaacaacactacatggttttataatttttacttcaaccatcaaacataacttagaaagctcaggaggagaaggacaacatattgtgtttactcatatttttgttctttcttctaaatttgtatttttccttctttacgacattccaagatttctttttaaaaaaatttaattttaggttcaggggtatatatgcagagtttccatgaatcattcacttaaggtaggtcagctggcaacgaattttcttagctttctttcatttcagattgtcttgagagccctacaatcctgaaggatatattttggaaattatttttcttaagcacttgaaaactgttctgctacttcctctgacctccatgatttctgatgagaaattcactgtccctagaattgattttcttcttagggttttcataaagaaaatggaaacaataatggtccaaacagagtagagctgtcagaaagaaatcatgcatcaaaaatgcagctcagtcctttaaacagattagatgctgattttcacagtgttgaaaatagttcttatatatttttaatttttttattatacttt

SEQ ID NO: 478139 - DNA, 527 bp, Homo sapiens
aggagtgtggataaatggttgagcttttcaaagaggtgaacgtgaatgtatttatattccacatatctgaaaatcacacacacaaagactcttggaaaagccgaccactttcttctggcaatgacacggtgtcccagaaaggatccaggtggaagtggggcccatgaggatgtcaatgggcagccctccaatctcaatggccctggggagaccacaagaaagaattacactggtggccatgcaggatcatggtcatttaagaacatctcagtaggaagggggtgtagcacggagagtaatgaagaatctggaaatgtgaagtggctgtactttaggcagctggtaagcaggactgagaacttgccctgggctataagcctcccaggtgagaaagcaagcaaactcacagcttcttggctgtctcatggagcctgcagcagcaatccacctccttcaaagcatctgtggattctcttgtttttcctgctatgttcctatggtagttcttggagcaaaagtttatgatg

SEQ ID NO: 478140 - DNA, 673 bp, Homo sapiens
cgggttttcaaattccacacattctagcacagtactcagaaatgaagttttctgggtttgggaaaatgaaatatggagctgcatgggacccttaaacattgcttggagaagagccacacaagagagccactagaactgcacctgccagtgatgcaagcaaggaaagcactgctccagcagtgggtcccaaggctgggtttatttgtagcagctggctcgtcttgtgtcttccaatcccctgtggctaaggtcctgcatactgatgaaactacagactcagccgatgtgacggaacccactgatgctagctggtctcacaaggagctgactcatcaaagaatgcgttcattatcagcaccaataagcaaagatgctggcaaagtgcacagtttgcacctcttctccttggtggtcttaagccacagacccttttacacaacagtctccatgctgtctgccctgcacagctcaacctctgcagagaagttccctttaccacctccacctcctgcctcaccgagggctgctgcagaccactgggtcacctgccatccaaaggggctgggtgggattgtaccagctggacactccacctactccccaccacctgcaaatacacaaggaatgcaggacccactctgccaaggctgtcacatcccttctctctgaagaa

SEQ ID NO: 478141 - DNA, 563 bp, Homo sapiens
ccctgcattgccagaaagttaggagaggagaaagttaacataaacattacctcgcacatgtagtttttatgcatgaagctgttaaagataatagacctgtgttaaaacccacaaatgaatggaggcattctctggcctgcagaagagcgctcattgtcctctgcggtccattttccacacgtacaatgtgttcacagctggctgttctttctcttttggggacacttgtgaatatgcatgtcccaaatcataggcacagcttaagggccaggaactcacgtccataccctcctcctgctcagcctcaccctgactccattcagcctcctttagaggatgagaaacatctccccaaccagagccggcttaggctccttttaattgcatcattggcctggtgggaggatagagagaaaggagaacaagagttcagcagagccctgaaaaggggggatggtaatggaaggaggacaggactctgagctcctcgatggctaaagcaaagaaatggaattctgacacttgttgcctatatccgctctacacagagctccctgagaagc

SEQ ID NO: 478142 - DNA, 740 bp, Homo sapiens
taggagccagacaaaggcacaattacccccacatgactgcctactaagaattctggctgcagaaaaggcttttctgcagtttgtttttgctagttctgctccaagaacccaagaggcagcatgccatccgtgacccaggctgaagggaaggactttccagcagcctcaatgcttgaggaatggggggcactgtggactgctcaaggggaaggggccggtgggatgctagacggtggcaggtggctattttcacgtagcagtcagcagcaaatgaaagaggtgtgtggagatcattctccccagaggccattcatttctctacagctgaaagagcaatgggtgcttgaaggagaagagaaagagaggaaatgctctgctccctcccagcactgggaggagcacagggctgcccatgagtgggcccgaggccatgccggagccatctgcgaggattttgatctggaactagacagcagtgatggtttcacagtatcgtgaatgtgctaaatgttactaatggtaaattttgtgtaatgtctatttcatcacaataaaaagaagtcagtagaaaaagtttaccttaccctagtggctaagaatattgatgctgattattattgaagctgtgttgtttctaaagaggtggaggaagaaatgaatggatgcatgggggtaatacttcaaactcagaataatttattgtgggcactaaattttatctatggaaagtagcaaatatc

SEQ ID NO: 478143 - DNA, 505 bp, Homo sapiens
caccgacaccaggtggaacctcacggctgccggaaagccaagtgatggtgacaaataaacctgggccagaggaagctccagcagacagtaagaatatggcagcagacagcaaggataagaagatccaccaaaggagttggctctctgtgctccaagcagaacctcagctggagaatctttgcaagttctttgttcaccgagtcctagtggaatgtgcgagagcagagaaaggctttgagtcatgcaggaatggcttcccagatacgccgggacacagcagtttaattggatgtctgggcttttataaagaagaacgggaggcgcggaacaccaccaccacacgtgtcagctttgcagcagaagaaaaactcctccagcctcagcagccagtctctccggcttctccctgcgacttcaggcggacccccagtgaccgagaccaaagaagctgtgagcacagcggctgagagctctgtcctgtctctgatgttttcagggccagcgc

SEQ ID NO: 478144 - DNA, 871 bp, Homo sapiens
gctgatcaacttgttactcccatcaccatgggctacgtggaaactcctcctttctactctgcaccccatacctgctttaatgagcatgtctccaaatggcaaggacaagaaggccaatggccacaatgacccagaagtgttagaaataccaaatctgccagtggcaattgccaggctgagacccaaggtctttttggtcccaaaaagcatggaagaagctgatccaaactacctcatccactctgagtcatgtgttctttcttctgtgacagcagcaacaggacagatcttagatttctggaagagcttcaccatcctgaacacacgtgggagaaaagaaagctgccacaaggactggtgctggcctccaggtccagggacaaagaggccagctgaaaagtatccccagaaaggccattcaggctccagtttgcaacctttagaagcagggcagaaagatgaaaaacctgtttttgcctttggagggaagatgaaaaaaggaaggggagaggactggttattgactgtgagtcaggcagagtgtgggagctttattcgtcaatctcacatcattggcaagaattttctaacgtatgcattatcacccctatttgatgaatggaattttactgagtcaggagggaagtctgattccaaggagttgtagatgattgcttcattttgggagctggtatagtttaacgagcagcttatgccacactgatctctagcatatttgtatcgacaaggagacacaagcctgcatgattgtggttttttccctaggttcctaatagacctttgttatttatatttttaattgtgtgaaagtacctgaaagcttagtggcaaagaagacagttgtaaaaaa

SEQ ID NO: 478145 - DNA, 568 bp, Homo sapiens
cggcagtttcagtgtccgaccaagactcgttgagaaaaggtgatgacaatggagctaaatttcctgaatttcctgctggctgtggccgctaagcccaccatttgctactcgcttttatctacctgcaataatcaggcccatgcacctttgcacatccctggagcccatgcaccgctgcacatcccctggagcccatgcaccactgcacatccctggagcccatgcaccgctgcaaatccctggagcccatgcacctctgcacattcctggagcccatgcacctctgcacatcactggagcccgtgcatctctgaacttcacttgagcccatgcacctctgaacttcacttaagcccatgcacagcatggctcagaagcaacttcactgttgagtcttcagattccctccctctgcagttagaattactttttccttctctttgcttctacagtggtttgtttatattaatatttgcgatgctaaggcattttgtatctcccctattagacagcaggctccctcagtacaaagatgcttcgtgagctctttcattcattcatcaaatgt

SEQ ID NO: 478146 - DNA, 616 bp, Homo sapiens
cgccatttccctgcctgtccagaaggcaacatgtttttgtcatttgcatcctttctgaatgaaagctgccacaaggactggtgctggcctccaggtccagggacaaagaggccagctgaaaagtatccccagaaaggccattcaggctccagtttgcaacctttagaagcagggcagaaagatgaaaaacctgtttttgcctttggagggaagatgaaaaaaggaaggggagaggactggttattgactgtgagtcaggcagagtgtgggagctttattcgtcaatctcacatcattggcaagaattttctaacgtatgcattatcacccctatttgatgaatggaattttactgagtcaggagggagggacaattttcccaaacatatcatcatccatgtagacatggaaccttttgggaccctctctaaggtctttacatcatcctgcaattgtaccttccaagcagaacaccaatacaagcttaactggagtgggatgatgtggttgggttcctaatagacctttgttatttatatttttaattgtgtgaaagtacctgaaagcttagtggcaaagaagacagttgtaaaaaattgaataaataaatacattt

SEQ ID NO: 478147 - DNA, 586 bp, Homo sapiens
cgtaagggtagtaggttaggcgactgcaaatgggaatcaccagcacgtcgtggtctctctggcgccccctcttggcagagcctaatggagcctctggcaaagcggaaacgacgtggtctgcagagttccagagttgcagccccagtatctttaacatagacatgaaaatgtactctcccaagatgacacaactggcagatagagacctgatctataaactgttgagtccagagcctggtcttgtaatgactgtgccacatggcatctcaggagaaaagacaatgatgaatacctatctgaatcaagggaaaagttttacaaaaattgttattaagaatttgaagtgtgtactgatcaaatgtgcaagaatgaatatcagctctaagttatccattaatagtttatctgctacaactggaaccctgtctgccatgtctgtcctgattccttgctgatcaaggcaatcagcttgattctaagctgggaacctgtcaggacaagatctggaaaagcatatgtggctcagtaagctgcaggtaggtgtgtgcgtgtgtgtgtgcacgtgcgcatgtgtgtgtgtgaatgt

SEQ ID NO: 478148 - DNA, 875 bp, Homo sapiens
agaccactatggacaactttccatacattccacctaattcttcacttggctgcatcctcaacaattggaatcaatttaaccctgataatctaaggagaaaacatctgattttttactgtgatgatgccagccctggccctcaagaagtcaccttgtccccagtagaaagagtaccattgtccccaataaatgtgattggagaggaaactatccccaattctctcttcattgacatttggaggagcggaaagtgtccaggtggcaatcttaacttccagtttaatggaatcattgtgtctcctggtggcagcattccgccatctggaactaacacctctaggccagcagaaactaatgccatgggaacaggaatcaaaaattttgctagtggaaactgcagaggagaatatgttgttctggacatctgtgtgtttctggagaaatataaaaatatgtgtacacggatattagaggaaattaaatgtaataaatacacactcttctaaggaggagcttttcaaatggaattctttgagtctgagttacaaggtagaagtcagcctttaaaggtactcagtacaactaaattatgccaatttcttgtgcattactttatgatacaatatctaatttacaggaaatatatattttctgtaatttcatttcatcataagttgaaatttatattctacttgtattatgaggattgacttaagcatatgtggaaagtatgtttgtatatgaagcttgtatttacattttattaatctttttgaaagaaaatgatagtactaatcagtatacatatgataaattgtccagttattttttacagaatttactcatggttttcagtgactttttttgattgtaac

SEQ ID NO: 478149 - DNA, 1798 bp, Homo sapiens
cctttgaatttgatcattcacttatcaggatttgagtagtactatggatttggaagaggaagaccacagagggtccctgacttcccgcaacacattctcggaggatcaacttgttttactaatcagttccaatggagttagatataagatgccatctggtcgtggcatcaagcctttaagtagccacttcttcaatagaaatcctaaactccaaatcctgacgtccaagctgatgaccacatcacggtgttctcctgcacagtatagacatctgctttcccacactgctaaagctctgctcccatgggcagcttcctcctgccccaacctgccagaaggcaattacaatctcagaccctcaacttccttcctcttcatacctctcacaccagtagaaaacacctatgcagaatattttgagagttttaataagcattctgcgtatgagttcttacatatgtgatttgcacatatattcttcttatctatgtcttttcattctcttaacagtgtcttttgaaaagcagaagttcttaattttgatgaaatgtatttataatattatcttctatggatcacattttggtgtcatttctaaaaaaagttctgcctaacttaaggtcataaaggttttcttttatgttttcttttagaagttttatgtttttaaagtttatatttaggtctatgattttttatattaagcaatttttatacagattgagaggtatcaatcaaattattatttttggcatagggatagccaattttccagcactatttgttgaaaagataatcctttctctattgaattcctctggtaattttgtcaaaaatcaactaaccatatgtatgtctatttctaaactctcatttctcttcaattcatctatttttctgctttatgccaatactattcttgactatcataataacttaatagtaagactttaagtgagcatgagtcttccaaatttgatccatttttggcttttcacatttctttgtaaattttagaattaagtaaggaggattttattattctgtttttgcctcagagatttttagtgtgcacatttaaaataattggaaatttctaacactaatgcatcacaatgagatctgcttattgattactggttctacattctctaaaggagttactaatgaccctttttaaaatttaaaagagtcttaatttctgtcttcatccaccagtaattttatatcctcatattctccctatttaataaaaaatctgatttcttcagatattatcttaaatagagaaatataggaagtggtaaatacttctcatactcagttacctcaccttaggcgtgaataaatacatgaaagcaagcattgagcagctcaattggcttccaaatgtgtcatctcataggcaaagaaatgtatctctggaaacttctctaaaaagtattcccattttgtctgaatgttagaaccatctgaggaccttttaaaaagcctgatgactatgcacttaccagacaaatacatcatgatttttaaggatagaatccaggcatcactgctttgtttgtttgttaatttgtttataaagccccaagtgtgactataactggcaatcaagactgagactaattgctccaaaaggacactcaaaaaaaatctgcagaatgataagaatgttaaatgtcatatttgctacttttaaggtctttgattttgtaaattagttatttatttttattatttatttatttatttatttattttgagacaagatctcactctgtctcctagtcttgaa

SEQ ID NO: 478150 - DNA, 609 bp, Homo sapiens
tcaatgattttcagacttaaaatgcagcaccatctcctccccaaggctccatctccactaccttcagatttgaacagcgattggatttgcaattgtgccagttttgagttatgtcaagtcttcagaagtacatccctttcatgggttccactgggtttcagggatggcaacttgaaacatgcaatcattgtcattggggggccccttagtccagtgagggagatgaagaaatatataggaggcccccaagtacaagtaatcaattgggtgaatggtggtgccattcatggagctagggaatatgtgaagagaatcagatttggaggaaaagatgagctcaactttgaacataatgggttgaggtgcttggggaacatcaagtggagatgtctgactgccccaacaacaaagaattatctggtcccaaatgtcaatggtgctgaagttgaaaaaccctgagttcatgttttagtttcaaacatggacacttacctttacagattaaaattcactttagatttggtctatttttcatatgtcaagattctgcctctgttcacagaacagagcctcgcatatattttagggtacatgtgcacattgtgcagg

SEQ ID NO: 478151 - DNA, 697 bp, Homo sapiens
aggggttggagtgcgcatacaacaatcatgaaccagggaaagctcagccgactgcaggcaccagtgtgcattggtgagaaagcaactgcttgcggaaggaagaaggtggttgaagctcaacctggagccaaagctctgagtcttggggttcagccaggaggctctgagacttgttcacgggctctgcagcctctgagacagtgcttcagctccgtccctgtcactatctggaagagccacggatatcctggggccgtggtgggacagctttgggaggaaaatgagattttctttgcatgcgatcgagcgtctgtgtcagcctgtggagttccctctgttgtgcctggaagtactgaacacttgctcttatcttgccttcaccggcctaggcaggagcctgcacagggccagtggggagctggcagcaagagggaaaagcgccgtgaccactagccgactgtgtgaatatgctctttattctgctgtaaaggtgatggtgttggtgtcctagatgcttcaccaaaatatccagctaggaagtgagaaatatatctaattttcaagagtttattaaattaatctgataaacttgaatttagggattattcaagtgagacttcatctatatgctgctcagaaaatacccaaaatatttacagaatatcaggatagcacatttctttttaaaattttggtt

SEQ ID NO: 478152 - DNA, 669 bp, Homo sapiens
cagcaacagacagatgtgtccccttttatctgccaggtgtagcaaggctgccagaaatgcaatggctccaagaaggctgcacagcgcccatggggtagtcacttttgctgccgtgatgggtatggcaggaccaggagccaaatctctgacgctcaggtccatgctcctcagcacagcaagctgccccaatagccacaccaatgccacttggaatttcggagaaaggaagggtaaatttgaaatccacattccagtgtggcagccagtcctggcattggcagcaagaggcacccgagcagatggtgcagctggcagggcagctgccaccatctgtgcgtctcctgacctcctgtgcgggtgctcccaggagatgtggtgccctcgacttcaccatggatgtaggaaggagagaagaaaggcaagggcattccaggaagaggaaccacatgtgcacctgcatagagctggaaaacagtatgaccaggctgtgatgagcaggttcaatgcttttaatgatctggagaaggtggccgcatacccctgtcaacgctgacttgccttgaactggttaacaccttccattaactcggtcaatgtcagttcattagaggaaataaagggtgtttgtaagctgtaaccacataatccctgaaaaagaagggatttaac

SEQ ID NO: 478153 - DNA, 617 bp, Homo sapiens
tgacagctccattacaactgcaactccctcgcaagtccatgactcttggtgtcacatccacccactataaagcctgcaaaaacctttgtctcttccccaccccattgaagagctcagtgatttgtcaggcctcgcccctccctgcctgcctgcaccatccgctggagcttctgtgctcatttctgcacttcatgttcaccctccaccccagattttgttcaggaaagttcatgctcagttgcaattattaccaagttcaactaggagcttcctttaccctgtggcccctccccaattctgctagctgccttcccttccccaaggacctctgtgagctccctaaatcccatccaagtactaaccaggctggatcttgcttagcttttgagatcaaacaagatcaggcactttcagggtggtatggctatagactcagctccttaaatccatttcaggtatagggcattaattccatcacaaggaccctaccctcgtgatctaatctaattctattacctctcaaaggccctatctccaaatactattatatttggggttaagatttcaacatatgaattgtatggaacataaacattcagtccataatattcaataaa

SEQ ID NO: 478154 - DNA, 850 bp, Homo sapiens
ccaccgggccaacgagcatctggctctggccgccatgcacaccctgtggttccgggaacacaacaggatggccacggagctgtccgccctgaacccccactgggagggaaacacggtttaccaggaagccaggaagatcgtgggcgcggagctgcagcacatcacctacagccactggctgcctaaggtcctgggggaccctggcactaggatgctgaggggttaccgaggctacaaccccaacgtgaatgcaggcatcattaactcttttgctactgcagcctttagatttggccacacattaatcaatcctattctttaccgactgaatgccaccttaggtgaaatttccgaaggccaccttccgttccataaagcgctcttttcaccgtccagaataatcaaggaaggtgggatagacccggttctccgggggctgtttggcgtggctgctaaatggcgggcaccctcctaccttctcagtcctgagctgacccagaggctcttctccgcggcttattctgcggccgtggattcggctgccaccatcattcaaaggggtagagaccacgggatcccaccatatgttgacttcagagttttctgtaatttgacttcagttaagaactttgaggatcttcaaaatgaaattaaagattcagagattagacaaaaactgagaaagtaagtatgcaaatgctgcctggatttaaacatttcttaggagaggtaaaagtgttaaaggtcattttgtgtggctggaatttggttccctgggggtgctgcagagcttttagtacttgttattgttggagaggtttaatattaaaggaaggattcaccagaaacc

SEQ ID NO: 478155 - DNA, 612 bp, Homo sapiens
ccctgtcaaaccagaccaatcagctctctgtaaaatggaccaatcagcaggatgtgggtggagccagataagggaataaaagcaggctgcctgagccaacagaagaatgaacaagcccagacaggaggatctagtaactccagacatgtggccttaagagctgtaacactcactgcgaaggtctgcaatttcactcttgaagccagtgagaccacgaacccaccagaaggaagaaactctgaacacgtccgaacatcagaaggaacaaactccggacacaccacctttaagacctgtaacactcaccgtgaggggagtttggctctatcgcctaggctgaagtgcagtggcgatctcagcttactgcaagctccacctcccgggttcacgccattctcctgcctcagcctccccagtagctgggactataggcgccggccacctcgcccggctaattttgtgtgaaaactagatttttacacttattcctaccaatttattttttcatcaactattgagtggcatcaatgaactatgatgtattataatcttttgtacaaaggaatgagaagttacaacagagaacaacacatttgattcttacatgacctt

SEQ ID NO: 478156 - DNA, 694 bp, Homo sapiens
cgcagggctgtggaggcctcaggaaacttattaatataataatggacggaagcccaggctccccttatgaccccaagtttttgcatgcaatcatctggcatgatgaccccctagtttcctacttggctttctcggacagcagcctcaaggtgtccttaggtgcctcagtataccctggggagagtgaaagccacctcctcacttggcctttgctggtcttgctggaggaaggtatactccatttagagatgctccttcctctgggttggaagattgaaaaactgtggaggacagacacagctgaaccccaaagagcaagcaacaccaagccgctgtataaaacgccagtgaaagaaaaaactctcatcacaacaacaagaattaccaagttatcttcttcagtgatggccctgatacaatcatgtaagtgtcttttcactgggagctgtacggaaacagttacggaaaatttagaagagctttcttattaaccaattcatgttgctgaaaaccttttgtatgcaaaattaaaagggtaatggaaagtactgcagaattgtaactacataagcttgaactataaagtcaagagcactccaagactcaatgttgtaaagttcaatacttttgctcagtgtacttaagatgcatctccaaatgttttatgcaagagcatggcccataaacctgaaga

SEQ ID NO: 478157 - DNA, 865 bp, Homo sapiens
actgaaaacgtctgtgagttttcaagtctcaaactgatatttatgctctcaaacttatccagtctattaattttgtatgcctgccttaacaagttaccacagattgagtggcttaaaaaatatattttctcatatttctggagaccagaagtccaaaatcaaggtgttggcaaggccatgctacctctgaaggctctagggagaaacttccatgaagatggatttgagactgagctcgcgtcttccctgctgcagcaccagattaaagccttctcccttggtaatacttgtcatctcagtgattggctttctgtgcggaaacggataataatatctgacttctcaattttcatgagaagcaaaacggaatgtgctattaaaagccttaatgctgcatgtgttgcagctgccaaattctaaaatttcaaattaatgactgtacaataaacattaaaataataagcaaaataattaagagtgaagcttacatatggcttatatgcttttaactaggcttttagagtttgcaaagaccaagagctgcagcactaatttcattgagagattttttaaaaattagtgttcttcagagaatctagatgaatattcagaaacagttaagcatgctaagtaaactttcatataagaatgttttttaaaattgtgtttgaaatgtagccaacactttggtgttgattctcccttagacagtgtcaatattttttaaataaacctaaaatgtttgaaatttatctatttgtatactttgtaatgaaattaaacttactgctaagtttctttatcaaagtttttagaactctttttaaatgttcatattataatatttttgataaatatacctgaa

SEQ ID NO: 478158 - DNA, 442 bp, Homo sapiens
aaggctctctgtaaagcgtctgccaccatgtttggtgcattagaagtccttcctgcacagtggccctccccacactggactaaggtccaatgtcacctgccaattaatagtgcctgtcaggtgaagatggcactcagagagaggagtgtgccccaaggtccccgcagaggcccactgctgcatctgaagctgtgctatgctcaggccagccaacttgtcatcttccatgtggccttgtgggatgaagacgttgaagaaccccaaagatttcaaatgaccacaagagattccaaagctgaatatgatcctgaccacaagaagacccagggtacattctatataaggtgtttctcagaagtctcatatggagccttctccctccatggccttctgccttgtggagacctccttgtgtccccaggaggactctgctagactaaat

SEQ ID NO: 478159 - DNA, 585 bp, Homo sapiens
tcctctgtgagataaggtgggagggtgataaagggctgagataaatccatgggttatgcagcccgtgggtctacagtcagtgtgttccgtattggagcctaatatgttgctgcactcattttgtgatggggaagaagggtcgggacttgtgctgggacctttctccgggagagggacccttctctcacccctcaagcccctctttgtcttctggcagccaacacaggcttatcctgtagaagcctggcacaggctgagcacagggcatcagaagggccattcaagctcggggcacctgagtgagagtaataagactccaagtgtaaatagaccacagtcagaccctacctgggtccggctaaaccccttaagcttcacgtgtaaggacagaagccaaggtcagatactgatattatctacctacctttggctacctacttttggctgcctttggctgaggagttgctagaagcagagacggatgacaggactggggtggagatttgaagtgtaggctatgggacattatgcaaatgcaagctgagtgaattaagaggtgtttgcctgttgggtttggacagattc

SEQ ID NO: 478160 - DNA, 585 bp, Homo sapiens
cactgtgcatgcatctttgccagtatgcgtacttcatcacgctgtttctgcactcacaaatctctgactctcagctttctgcttctctgcttagctagaggcctgccttcatctttccctctccacctaactcagctctccattggagtcagcagagacctgggcaccatgttcttgcccttggagagctctgaccctcagaaagatagagccgtgcacttcctgggtcctgacctccaacttccaggtcacggagcaggagctcatgctgtcggtcccccccacactctcaggcctcctctgtgtgagggagtaagtagggatgacacaaagaacaggagctctgatgctggtccagtcctgattcaccttctcactaaccctgcgactacagtggccctctgttatctcatctgtagaatgggaataacatcagccacctgagagttgctgtgagactttgatgagatttcataaaatagctagtcaggtgcatagcatataacaggtgcttagtcactttttattgtcttcctgttttccactgtcttcccttctaaagtaaatggagaggcaacgcctttt

SEQ ID NO: 478161 - DNA, 604 bp, Homo sapiens
actggttttgtttctctggagaatcctgacgcatacaggctttaaatgaacttgctcacagaagcatgtttcttgctccatcagaaggacgtccctgggaccagcctgcgcactctaagacgtttagcggcacccctggcctctcacccactagatgccagtagcacctcccctgcaagtggtgaccaccaaaagctgtctcctgacattgtcaaatgtttcctgagacccaatgttctggaagtatcaaggaaggcttcaagcaggacgcaggctttgagaggtcctgggatgaatgaagccaacttgatcatggtgggtaagtttttcaatctgctgctggattcggtttgccagtatttttttgagcattttcacatcgatgttcatcagggatattggcctgaagttttctttttgttgttgtgtctcctcccagttttggtatcataattatgccggcttcataaagtgagttgggggggggggtctctccttttcaattgtttggaatagtttcagaagaagggataccagctcctctttgtatttctgctagagttcagtcgtgaatccgtctggtcctggggtttttttggttggt

SEQ ID NO: 478162 - DNA, 599 bp, Homo sapiens
tggaaaactatacctctaaatatcaattgctcagagcatgaaggtttttggctgactttgaaaacatgtctgcaaacagctccaaggaggcatggcccaagggctcgccattgacggcaatgtggaagaacatggtggggttgaccatggctgatagtttggggctcctggtggtggcagcagctgctgcaaagccgagagtgacattttcaatcatgttttggatttgtaaatatagaaacaatgttcataacatggtttgttacatgggtgtaatgtgtgacgttgacgtttggagtatgaatgatcctgtcacccacatagtgaatataatacccaacgtatccagtggcttctgctgcagacatgagctgcccattaggagcagcccattaggagcagcccatgaggagattatgatgccaattatgtctgtaccaatatcagctggctctagggagtccgaagtgactaaggactggagcagtcccccagcacagcacagaagctctatggaaaaacagtcagactgctttttcactcaggtcctggatcctgtttctattcactgggtggaatctccagactgagttctgaaa

SEQ ID NO: 478163 - DNA, 900 bp, Homo sapiens
agccctatacctcttaactcagagacaagactttctagcccaaatggtattagacaatcacctagccttagagtacttattagctgcccaaggaggagtatgctcattgcagggaacttcttgtatgtggatcaatactgggcaagtgcaacagctcctcaaggaaataaaaattgaccttacagcaatgcataatgttatacaagtattcaaaaacatacataccaatagtcctggaaactgcagatctgttctgtatagagccaatgactctgcacaggattccaaaccccagtaccaccctcacacagacacccttctgccttcactttgcctgggtgtcacctgtgagggtgctttcctcacccagtgccacgtgctgtaccatggacctctaacacagatgccgtctcgccctcctgggcccagacactgcactggctgctgcccctgccccttgcctgtggggtgcacccccacctcactggagttccagcatctgcaggacgcctccgctctccacgctgactcacacactgttctgcactgctctactttctgttcatcccacttgggccctgatgctctgctctccatggataccctcctcaccttgctgggctccagcacctggtgcttggccactgtggcctgtttcctacttcacccactgctggtgcctaccttgtaaatgtatagcttcgtgcctgaactaatgtttttatccagtttttttcctcttggtgtttgggaaatatgatcacagagctttgtaaaatggaagtctcatgtgacataataatataataataataatgcagaattcaaaacaagtttctgggtggcagaaatgatgagggaaccaataacattcagaaggaattgaggctgcgtggctta

SEQ ID NO: 478164 - DNA, 860 bp, Homo sapiens
agcgaataaagagcacctgcaagtttggctatatgataaggcatagcccggcaggggtgttcaaagctcatgtggcttaggagggtcactcagttgccccccgccccacaaccactggaagagactttttactctttgccaataagagctatttggctgcctcacctccagaagctatgtggtttcaggcactccagcatacagatgactgctctatcagttcagtggatgaaggagataaaattgcacaggggtcttaaaaataagaaaatctctgatgacttgttttgcaatttgaaaatgacaggagatgtggggtttgctggggatgaggattctgaaatgtttgtggtggtagccagggatataaacaatgggcaactgacctatgctggctgcagggacagaagtgaagattgcaaagtgtcgtctcattctggcagctctttagagacaagcatcccagacttctacaacccagggcctgggagctaatctggatccctcctttcctgtgacttggttgtttaactcttccttcaattcttttctttaagtggctcctcttgttagttgggatagactacattgtgccctggtcacaaaaatgtcagtggcttaacagaacagatatttatttccagctcacactaccagtgccatgtgggttgacaggagactgtgtgacacacagtcactggggtcccaagctcagagagactccctcaccttgtggttgaatgactgaaacacatggtcacttcagttgccacagcaggaaagaatatctggagaatcatttgtgctgttcttctcagcctgaaggtgacatgtgccatttgtattcatagtctattagc

SEQ ID NO: 478165 - DNA, 1037 bp, Homo sapiens
tgtcttaaagtgacaatggttaaatacaatggatttcaagacaaaaatgaagaagctgctttcttatgaagctgggacgcctgaagaaatggaagacgcactgagtgaagtagattttcaactcaaggtggatctgcactttacggacagtgaacagcagttgagggatgtggctggggcaccgatggtcagcagccgaacgcttggcctgcacttccacccccggaatggtctgcaccaccaggtcccggtcatgttcgactatttccacctgtctgtgatctcggtgaccgtccatgctgccctggtggctctgcagcagccattgatcagtgtcccagtggggactctgtgtgggggttctgaccctatatttcccttctgcactgccctagcagagattctccatgaggggtctgctcctgcagcaaacttctgcctggacatccaggagtttccgtatagcctctgaaatctaggtggattcccaaacctcaattcttgacttctgtgcacctgcaggctcaacatcaagtagaggcttccaaggcttgaggctcgcaccctctgaagccgtgggctgagctataccttggccccttttagccacaactggagcagctggaacacagggcaccaagtccctaggctgtgcacagcaagggggccctggtcccaggccctcaaaaccactctttcttcctgggcctctgggcctgtgatgggaggggcttccatgaaggtctctgacatgccctagagacattttccccatttccttggtgattaacattgggtccctcattacttatgcaaatttctgcagcaggcttgagtttctttccagaaaatggatttttcttttttattgcatcatcaggctgcaaattttccaaacttttgtgctctgctccctcttgaaagctttgctgcttagaaatttcttccaccagataccctaaatcatctctctcaagttcaaaattccacagatctctagggaaggggcaaaatgttgtctttgctaaagcatagca

SEQ ID NO: 478166 - DNA, 717 bp, Homo sapiens
cagttcctgcagcttcagttcagccatccatggctaaggctctctctagcagtgacagtggggaacatgaattatgatggggctttcagaaatccagggtgcagagatgttctggatacagctgagtcgtgtgcttcgggaaggactgcagtcctgccagatgatgacaaaggagttcttgcagctcccaacccatcccgggatgatgaaccaggcctggcgtccagggatcacaaattagatatgaggaattcagatggaggggctgtgcccactgcaggctggaccggatggggaaggaatggtagcagctcctccttgtacctctggtggaatttggctgtgaatccatctggtcctggactttttttggttggggagtggcatgtgcaaagatgtggaaatgtggaagggcatgatgcatttgcacaccagcaacacagcatacctggtacaaaggcagatgcctgaggagtaggaagcagtgagccacgatgctatcagaaaataggatgaaagccccaacctcagagacagagcctagtaaacagcagatgccactgtgtgagcaaacaggatagtcaattctcaatatttacagtagtatgttctgtaaagtcaccgtgaacactgaattaacaaatgctgaaccactgttcctgggggaaatagagggttaggttcctgtgagcctctggtcacatttctgccaaactg

SEQ ID NO: 478167 - DNA, 594 bp, Homo sapiens
ctttagcccatgatggcagggcttgcccaaactcaagttccactcactggcatggatgatttgcctccgactaggactggtctaaatgttctgtcagccaccaaccgagttcttcactgtattgctttccactgttacacaatagctgagctccgaggcaacatcatcaaccagccactctgtgaacacagatgtgagggtgggaatatacaatccaggaatgatcgcagatgtgagggtgggaatatacaatccaggaatgaacacagatgtgagggtgggaatatacaatccaggaatgaacacagatgtgagggtgggaatatacaatccaggaatgaacacagatgtgagggtgggaatatacagtccaggaatgaacacagatgtgagggtgggaatatacaatccagggagggggctcccttcaggtccctacttcctcattatgcttcccaggatcaccttcgctaagatctacatgtacacaaactctggtcctggggtccgatttttaaagaccctaaattaaagcatttcttaaattggtattattttaatgtattttatattttatataattttttgctgtgc

SEQ ID NO: 478168 - DNA, 692 bp, Homo sapiens
agattttatgggcatggggacttgctttggtccagaaatatatggaaagcatagattggcagaggaagccatcagacatgtgtttgtctcaggtgagcagtgggatgaccttctgtcttgtgaagataagctatcagtttacattgccagggtgaaattccacagaactgtttttggggtaaagatcttgaggctcacaaggaattccttgtgggcaaattgtgagggagggctaaactcattctatactcaatatagacttaagaatgagtggattttcagaaggcatttgaaagcacacttgaccctgaatttcattgtcaaatatcaaccaggtgagatctttacggccacttcatacgaaaacactgacaccactaactcttctttagtgtctatgtggagagtctacatggtagtgacagatggtacgaaagtggactggggggttcgatgacttacgggaggcacccagaacagtattcagtatagtaacatgctctatgtaactaacctgcacgttgtgcacatgtaccctaaaacttaaagtaaaaaaaaaaaaaaaagagcagtaggctatactgcatagcctaggtgtgtagcaagctacaccatctaggtttgtatttttgtaccctgactcgtcactttattctaagaactatccattttgtactcatcctttctccttc

SEQ ID NO: 478169 - DNA, 558 bp, Homo sapiens
accaatttctcttttccattacttcaggctgatgtgatttacctaggaggcatggggttcagggaccctctggaggagacagtctgtcccttagcagagtttgagtgctgcgctaggagatccactgctctcttcagagctggcaggcaggaacgtttaagtctactgaagctgcgtccacagccaccccttcccccaggtgctctgtcccagggagatgggagttttatctgtaagcctctcactgggactgctgcctttctttcagagatgccctgcccagagaggaggaatctagagagggagtctggctacagcagctttgctgagctgcagtgggctctgcccattgtgcactcccagcagttttatttacactgtgaggggaaaaccacctactcaagcctcagtaatggtggacgaccctccttccaccaagctggagcatcaacttcggactgctgtgctggcagcaagaatttcaagccagtagatcttagcttgctgggctgtgtgcagggggacccactgagctaaaccacttgtctccctggcttt

SEQ ID NO: 478170 - DNA, 928 bp, Homo sapiens
tggcttcaagggagaggtagtcttcaccatcttgataaatggcacactgttaattgttaacaagtcacaagctatacttattttatttatgtatgtgtttggttactggtatattttcagtctagttccctatgtcttctacgaggagtgggatcttgtttgttatgtttactgttgtcataaaatagatatcagaacatcttcactaaataggaaagtcaataaggttttggtttcgtgggcacccaatatctcttttcttatcttatttctggtactggggagggggttggagcagtcttcacacagctttcctatgcagttattggacgatttcccccaaatttcttcctactcattgctaaggctatgtctgatcatctccatccagatagaatggactatccacgaagtttcaggaggcttacaactcatgtcatgttccctgaaaagggcactcagacatggagatttatatgaaagaagtttagtgggtcattcgctacagagcaacaggtctgaagaaatgaaggagacctgctagcataggtctaaaacaatgtttttcaacattgttcttttagattttctttgatactgttaaacctttggatttctatatattggaaatgaacttagttttctaatttccattaaaagagacataatgggatttatatttagagttgtattgattctataaatcaatttggggagaactgacatctttaaaatatttactttgttatcccccaaagaggcaaaaacgtatgcttcataagattcaacaattcattcccacttggtgacttttcccagggtttaggcaaaatggggagatatcttggctttgtcaagaaattggtccttgctgaacactgtcgagtcctagatgaaaatgctttctttcttgcatgcttgaggcaag

SEQ ID NO: 478171 - DNA, 778 bp, Homo sapiens
ccaacagacctgcagctgagcgacctgactgttagaaggaaaactaacaaacagaaagcaatagcatcaacatcaacaaaaaggtcatctacaccaaaaccccatctgtaggttaccaacatcaaagaccaaaggtagacaaaactgcaaagatggggagtaaccagagcagaaaagctgaaaattctaaaaatcagagcagctcttctcctccaaaggattgtagctccttgccagcaacaggacaaagctgaatggagaatgactttgacaagttgacagaagtaggcttcagaaggtcggtaataacaaacttctctgagctaaaggaggatattcgaacctatcgcaaggaagctaaaaattttgaaaaaagattagctgaatggataactagaataaacagtgtagagaagaccataaatgacctgatggagctgaaaaccatggcacaagaacttcgtaactcaggcacaagcttcaatagccaattcaatcaaatggaagaaatgatatcagtgattgaaaatcaaataaatgaaataaagcaagaagacaagaaaccctacaagccagaagagagtgggggccaatattcaacattcttaaagaaaagaattttcaacccagaatttcatattcagccaaactaagcttcataagtgaaggagaaataaaatcctttacagacaagcaaatgctgagagactttgtcaccaccaggcctgccttacaagagagctcctgaaggaagcactaaatatggaaagaaacaacc

SEQ ID NO: 478172 - DNA, 491 bp, Homo sapiens
agtgggatctgaatgagtaagatattcatcagtgtacatgttctttcaggtatttttcatgtaggttctttacaaacttgcagaattcattccacggaagacaggttctgcattaggcttaattctaagaaatttgaacttcctgtgtttataagtaaacactgggaatttgagatgacagggctctttgccaatctcctgatgagtgactttgaaaaggtgaaaggatccaaatataagataaagccaggagaactggattgtgttttcaagttgcctacattttgtccatttgtgacatttaactgtaaagtttattcacagttaattaaacacatcaagatattcacagcaacaggatctgctatgtatagtattaaaattcctaagaagacaactgtgttcacaggaaaaaacaaggttcttgtcacacaaccaggaagagacacaaagacactttgaagggtgagggggaatggaatttattgggc

SEQ ID NO: 478173 - DNA, 565 bp, Homo sapiens
gagggctgccagcatgctgcctatgaaaatgaggacagaaagtttccctggatacaatgaggattcaggcccctttgctgctggtctactgcagtttgctggaggcccactccagaacctgttcacctgggtatcactagtggaggctgcagaacagcaaagattgctgcctgccccttcctctgaaagcttcatcccagagggcaccagcctgatgccagccagagctctcctgtatgaggtgtctgttgatccctgttgtgaggtctcttccagtcaggagccacagggctcgatcatcccagggccacttcagactgctgtgctagcagcgagaatttcaaaccagtgtttcttagcttgctgggctgcatgggagtgggacccgctgagcgaggccacttggctccctggcttcagtcccctttccaggggagtgaacagttctgtctcgctggggttccaggtgccactggggtatgaagaaaaaactcctgcagctagcttggtgtctgcccaaacagctgcccagttttgtgcttgaaacccagggctttggtggtgt

SEQ ID NO: 478174 - DNA, 496 bp, Homo sapiens
gaaatgaactgccaactgtctgctatgattgacttaaccttttgtttgccactttaccctctttgccgagctttctctgcttttgttctgactctgcgtcatataagattaagaactagtctaaccaagattaaatcttctaggttgaaaagagggggcagcaggagaaatgttggccctgataagggagacaagggacgatactccaaaagagcttcaggactcagccagcgtgcattggcagaagctgggagaggattcgtggaagtagattctgaaggccttcgatcaaggaagctggaacataattattcacatgaatgttcatttttatatgtggttctcaaatctactcttttcttctttctttacatgactctctctttcaaatttaattatggctactctgaaattcctgcagataatatgctatagtaaaaaagcctcacctttggatttatgtttgccctaggtttgaatattaatgacccttttc

SEQ ID NO: 478175 - DNA, 919 bp, Homo sapiens
caggtgaaggtttgagccagacctgagagcagcaggtaggagctgatggtagcagaaaagcggaccctcatatgcactggctcactttcagtttttcccagacctaccagaggaaggtgggaattgaagagagttgtgctatgacaggggagggaaacgcgggtgtgaaagtctacaacacttgggttacaggaggagctggtggtattgctgtcagagacaacacctatatgaaaggaaatttcaaattcttcaggtttcagactgtgatggttaatattgagtgtcaacttgaccggattgaaggatgcaaagtattattccaggatgcgtctactcttcctgccctcaaacatcacactccaacttcttcagcttttggacttttggacttacaccagtggtttgccacggggcttttgggcctttggccacagactgaaagctgcgctggcggcttccctacttctgaggttttgggactcggactgatcaccactggcttccttgcacctcaacttgcagacagcctactgtgagactttaccttgcgattgtttaattttaatatggcaataaatttacattgttattaatatccaatgtctactctgaactttgttctactctgactcttaacagtacgtttttgcatgtatctcctattttaaacagatgtatttgacatttagttgctaattaaaccaatcattatcagaattcacaatcatttcttaaacatcattaaaaaagcaatttgtgaggtataaaatgtaaagaacaccccagaacatcatattctgccattttgtctcttaatgtgtatgcccaggaagtttcttctccctggtgtctgcgttcaattaacgctttagtgtaacagctgtggactgtcaggaaatggcccctccctggtgcc

SEQ ID NO: 478176 - DNA, 1207 bp, Homo sapiens
ctggattttgaggaagtgtcatttacctctgggggcagggcacacacaaatgaaaagacagcagtaacctctgcagacttaaatgtccctgtctgacagctttgaagagagcagtggttctcccagcacgcagctggagatctgagaacgggcagactgcctcctcaagtgggtccctgacccctgacccccgagcagcctaactgggaggcaccccccagtaggggcagactgacacctcacacggccaggtactcctctgagacaaaacttctagaggaacgatcagacagcagcattcgcggttcatgaaaatccgctgttctgcagtcaccgctgctgatacccaggaaaacagggtctggagtggacctctagcaaactccaacagacctgcagctgagggtcctctctgttagaaggaaaactaacaaacagaaaggacatccacaccaaaaacccatctgtaaatcaccatcataaaagaccaaaagtagataaaaccacaaagatggggaaaaaacagagcagaaaaactggaaactctaaaaagcagagcgcctctcctcctccaaaggaacgcatgatggaagatgaaatgaatgaaatgaagcgagaagagaagtttagagaaaaaagaataaaaagaaatgaacaaagcctccaagaaatatgggactatgtgaaaagaccaaatctacatctgattggtgtacctgaaagtgatggggagaatggaaccaagttggaaaacactctgcaggatattatccaggagaacttcccccatccagcaaggcaggccaacattcagattcaggaaatacagagaacgccacaaagatactccttgagaagagcaacaccaagacacataattgtcagattcaccaaagttgaaatgaaggaaaaaatgttaagggcaaccagagagaaaggtcgggttacccacaaagggaagcccatcagactaagagcagatctctcggcagaaactctacaagacagaagagagtgggggccatattcaacattcttaaagaaaagaattttcaacccagaatttcatatccaggcaaactaagcttcataagtgaaggagaaataaaatactttacagacaagcaaatgctgagagattttgtcaccaccaggcctgccctaaaagagctcctgaaggaagcactaaacatggaaaggaacaacc

SEQ ID NO: 478177 - DNA, 1443 bp, Homo sapiens
tggtccctgacattcactcgggggcgtctgtgtttccaagggaagctgtgaaggactgtgccatgaggaactgtgcattccaccccagttcctacacttttcccaaggtcttctcaacccgcagaccaggagattcccttgggtgcctgtaccaccagggccctgggtttcaagcacaaaactgggcggccatttgggcagacaccgagctagctgcaggaccactgcgggtgaggcaaacagcgtctggagtggacctccagcaaattccaccagacctgcagcagaggggcctgactgttagaaggaaaactaacaaacagaaaggaatagcatcaacatcaacaaaaaggatgtccacacagaaaccgcattcgaaggtcaccaacatcaaagaccaaagcacagattcttacagtttggaagcagaatgtctaacggcaaatgtggtcacactagcggagcttgagcgctgtgctgggagatctgctgttgtcttcagagctggcaggcaggaatgtttaagtctgctgaagctgcgcccacagccaccccaacagccacccccacagccgccccttcccccagcaagctctagtgccccaggtcgacttcagactgctgtgctggcagcgagaatttcaacccagtcaatcttagcttgctgggctccatcgggatgggatctgctgagctggaccacttggctccctggcttcagccctctttccagggcagtgaatggctctgtctcgctggcattccaggagccactgggaatcgaatatgttacaagtcctacttaaaattgaaaatcttcaatgcattgaatataaaatttatatttgtttgcatggaagtccagttcacttatctactttgccaatctaaactttcatcttccctccttcactctgtgccacacccaaatagcacattggtcggttagacaactatttgactttatagctctctgttttccctcttctatcacttttgacttaaatgccctttctaacttctctgataaaatcctactcagccttcaagaccaagctcatatatcatcctgcaatgcttttcttgacacttacacaaaagaagtaatggctctttatatttatttccagttcacatttgtcactgttgcagaggtagttacaaatatgggaagcggaaaggctagaataagcttagtgttggattggaataggagagtacataaagaattcatgtttttaactctgacactgaaaagagctagaagctatgacactacagcagcaatgtatacactcagcatccagcttttcatttcataatataattctccactaaaagaagccaagactgcctggagaaaagatgcattccaaggcttgaagaaggaaaatacaagatgagtctggaagttatggttgtaaaaaaagtaaaaatgaattc

SEQ ID NO: 478178 - DNA, 580 bp, Homo sapiens
tctaaaggacatgcagtatgcagagaaaaaaatacacagtatctgtgtccttttcaattttgctgaccactgaacctattatgagggatatgagcttcctacacagaatgggcaggtctcagtttaaacagtcaacatccaggaagactctagacattgtaaatcaggacccagaagaagaaaggaaaatgtgggaaagtttggaacttcatagagacttgttgaatggctttgaccaaaatgctgatagcgatatggacaatgaaatccagcctgaggtggtctcagatagagatgaggaacttgttgaaaactggagcaaaggtcacttttcctgtgctttggcaaagagactggaggctttttgcccctgccctggagatctggcagtgtggaagggaaatgtgttgtcagagcccccacacagagtccccactaaggcactggctggtggagctgtgagaagagggccaccaactttgagccccagaatggtagattcacttccagcttacactgtgcacctgaaaaagctgcagacagtcaatggcagcccatgaaagcaaccaggaggggagct

SEQ ID NO: 478179 - DNA, 441 bp, Homo sapiens
aactgagccaattaaacccaatgatagggaaactgccagaaacaccctctgtgaatattctgatcatgactactgccaacaggactgaagcatgcctgacctgcaagcaatggagatgctcagcccccagtggggcaccttccctaggggaccagtcagccacttggtggcaagttgattacactggaccttccaaacatgggcgggggcggacatatgccattactggaatagacacgtatcctgggtacagaattgcctctccagtcctcaatgattctgccaacaacaccatccatgcatttaggaatgcctcattcaccatcaaagaattccacatgaaactacttctgatgaaatcatttgtcccctaaatgcttactctggacctgggtataaatctacctctcagaggagccagtgagacagatctttgtagcc

SEQ ID NO: 478180 - DNA, 499 bp, Homo sapiens
tctctccagcgcaccctcctcctctctggtcagctcatgataacgtctgattctttttgatgaatgtcttcatctctaaaatgggaatggtcatatctaactttggaggttgtagtaacagttactgatgttgttaccatcatcacaaccaccaccaccaccaccatcactatcaccaccaacaccaccaccaccatcaccaccaccaccaccgccaccatcactatcaccaccaccaccaccatcactaccaccaccaccaccacaatcaccaccaccaccaccaccaccatcactatcaccaccaccgccaccaccatcactatcactaccaccatcatcactaccaccaccaccaccatcatcactatcaccaccatcaccaccaccaccaccactatcatcacaaccatcataatcaccaccaccaccaccactatcatcacaaccatcatcatcaccaccaccaccaccatcatcatcgtcaactgagaagata

SEQ ID NO: 478181 - DNA, 588 bp, Homo sapiens
cgagtatacaataagacttagccatgggtctgaagcttcatgtaagatctgcctgcttctacttcccctctgccatgattgtaagtttcctgaggtctccccagaagctgagcagaagcactcatgcttcctttatgctgacttctctggtcctcatgctgctgcttaggcctttgtctggaccactgtccccaggaacaaccacagggctggcccctcacatcctgaaggtcacccctcaaccctcacttcatttggagaagactttcctgaccaccctacacacagcaatatcccccaccgtgacttttcccttcggctttcccctgcttcatggttcccatggtcaggctgtcagcccacacaccatgtacttgcagtacatttatttactctctgctccccgctgggaatctatgtcccacgggagcaggaggaaaaacaaaaacttatctaaaaggacacaagcaaaattggaaaagctgcaagcctcatggtaagctgtacccacctgataagtcattggtccgattgtttaaacagtagcaataccttgtggggaatttggcggggtccactgtcttcagg

SEQ ID NO: 478182 - DNA, 951 bp, Homo sapiens
cagatgcctaccgtgaaggctccactggagtgcagctggatgaatgatgctagggtttgaacaggtgcagactgagtcctttataccccaaggaaagacccttagccatgtgatgcctctccccactcctcacatcaagaaggaagcctttcatgaatgttggcagcaccaaagacccaccatctctaaaatgactaagcccgtgggcatctatggctcagtgcagcaaaatccatcttttcagcatctcaagagcatagctgagattgttattatgctcaagagcataactgagattgttattatgcctgagcaatacaaaggcataacaatctacatagctggtcttctgggcatgaatgaaataaacagaaatgtgcctgcacctttgctacctggaagaatgaagtttaatgacacgtactccacagatgagctcaaatcctgcacctttcagaggaacatctggtccttgaccagctcctggggaatcccctgtaaatccttggaatatcctgcctgatgagtgtctcttgtacctggggcttcgtgccatgacagatagtttatgttaacaatgtgatttatggtggggccttaggtcgtgcagtatcagcttgacctctagagggactggagactgaataactaagtttagccatgcaggccatgaaggcactccatacctactccatacccccaaacatcccctggacaccaaaacttggatgagctttcctggctgacaatactccacgtgttgttaaacattatttctgggaggattagatgctgactgtgcaaccccactggaagcttgtgcctgggctctcttggactctctctagaggtgcctttcacatttgctgcttttcatctgcatccttttgttgtaataaatgctaaatgtgcatataacagttttccctacctctgagttctactcatgaa

SEQ ID NO: 478183 - DNA, 535 bp, Homo sapiens
agattgagaagaagtctgtgtccagttggaaaatgtcaaagccccaagcaaggctccctcatgcctctcctcgatatcacaggcctggacttggagccgactggtgagaggctcctggtgctgcccttgtcagtgctgagcgaacacaggccgagtgctccattctgcaggctcagtgggacagaccaaggcagaccctcggcagggactccaggggacaggagtgctgcaggctcagtggggtggacagaccagggcaggccctcggcagggactccaggggacagatgtgctgggatcaaggctggtgcatggctgagcagccatcgccgcgaatgtgaacccggcagtcaggctcaaagcttgagttccaaaccgtaccattgcagcatccctgaaacagccattacacatgccttcaagacacctgatgctgtgttagcaccagcagagatcgagctcctggagagaaaatgtgcctgaaatgatatgagccctggctagtgatgattcgcactccatccccctcaaggtc

SEQ ID NO: 478184 - DNA, 513 bp, Homo sapiens
gattgtctccatttctgctactggactagttcgtccaggatgggagcagccttccggtctatgagaaaatcatcccctgcccgttccagccttggctggagcatcagtcgcctctttctatcccttatcaggcttccagagctgccaggaccactattgctctcatttgatcagaactgtttctctgtttctgtctacctcccaaaaattgacaaagatggccaccttcagtggcctgagatccaactgagccacagggagctaccaggatactccagggcagctgaccactggggagccaggagccatgagggcaagagagcagtggagctgatgggtcacaaggactcacagcttattctccaggtccagaagtttgaaaacatcaaggacatttctgctgatggcttccttgtgaggaaggaaggagaagagaagatgaaaaaatgtggaagaggaggaagagattcttgcttctggggcctggattaaggaaggtcctaggagcattct

SEQ ID NO: 478185 - DNA, 816 bp, Homo sapiens
cagactggatggtggaaagagcaggttggatggtggaaaatgcaggtcagatggtggaaagagcgggttggatggtagaaagtgcaggtcggatggtggaaagagcaggccggatggtggaaagagcaggtcagatggtggaaagagcaggtcagatggtggaaagcgcaggtccgatggtggaaagcacaggttggatggtggaaaacacaggtcagatggtagaaagagcaggtcagatggtggaaagagcaggtcagatgttggaaagcgcaggtcggatggtgggaaaagcaggtcggatggtgggaaaagcaggtcggatggtggaaagcgcaggtccgttggtggaaagcacaggtcggatggtggaaagcacaggtcagatggtagaaagcacaggtcagatggtagaaagcacaggtcagatggtggaaagcgcaggtgggatggtggaaagcgcaggtgggatggtggaaaaagcaggtcagatggtggaaagagcaggtcaggtggcggaaagcgcaggaattctagaaagcagacaatggagaacatgcatgcttcatccaagtgctaacacagagtaaaagacccagagcggcttgttctgccttttcgtttttaaagcatggtgcatacgggagtgaggagtggggatcaacatagccataagtcatctgttttacaatgtgggggaattaggttgtttctagcatagctcatttctaacacttaactcagcaaactgtaatttgtggttcgtacatctgtttcttgcattagattaagattttgaggtggaaaccatagctt

SEQ ID NO: 478186 - DNA, 1412 bp, Homo sapiens
tgacagctagtccaggcttcctcagggcagggcagagtgctgtggatggtcagtggccatcacctagccagtggtgcataatgagattcctgacagtgtggatcccttgtcattgttctcacctgtcgtcaaagtacaaacagatactggatctccaagaaagctttgggtattctttccaaaaagctccgataattgacccaactttgtacaccactggtgaaagaactgccagccccttcactgtcattccagaagcaaagcctcgcactctaggacttgagttgattttgttctcccacccctgtgagtctttcctcaatcgccctaccattccctggagacatccagatacacctggtgatatggtttggctgtgtcctcacccaaatctcatctggaattgtagctcccataatccccatgtgtcatgggagggacctggtgagagatatgagatcagcagacgaagtctcacagtgtccctctacatcagtaatcttgaattaaaagtgtagtagaatattagctgccatttacaaacaaaaatttgccattcagaaacaaaattcataaagtacctaaggattaaccaaagactgcaaaaatattgagaaaaatttagattctattacaggacatgaagaagtccttctaaatggttgtacataccattgtgcgtggatagggtgattaaatattaaaactttgtcaaatctttgataattaatatataagttcaattaatttccaataaaaacaatagcatttgggagctcagcaaatagctaagacaaattttaaaatgaaaacgaaaatgaactgcagattcaacttactacatacaaaggtcttcccttggtccattaccataaatgcatactaaataatacaaacgaaggtattgtgataatgacaaaataataaataaaaaaggacagaaattaaaaatagacctttggaaattgtatgatagatgatagaaatatcatcattagtaaagggctgacaggtgaattacttagtaaatcatattgggaaagagaaaaaataagcatccctacttcccaactaagcaaacataaagttcaaatagattaaaaatgcaaatttaaaagacacatttatgaagctaatagaaaataaatatatgaatatgttaagatcttgggggagggggaagatattttcagcaaggcccctaatatcaaaacttatgtgcaaatgtctaaaacaagaggtaagtgtcaaaaacacctgagagattcagagatcagaaaaagaaggaaaaaaaaaaggagtaggaaattgacaaaaggcaaaatctaattggctaattcgtatatttcactggcaatcagaaaagacaaagatagtcaaacttaatgttattaagtactgagaagacgtgg

SEQ ID NO: 478187 - DNA, 2152 bp, Homo sapiens
ggctggcagccgagcgggtgtttatgttgggtcgccgggtctctggcagcctgacagactacctgatgagccagggcaccggctgcgtgcccgaggacgggctcaccacgcagcagctcttcgccagagccgacagcctcacctacaacgagttcctgattctcccaggattcatagacttcatagctgatgaggcggacctcacctcagcccttacctggaagatcacgctgaagacgccgctgatctcctcctccatggacactgtgacagagggcaacatggccatcacgatggctctggtgggaggtattggtttcattcaccacaactgcaccccagagttccaggccaaggaggtgcggaaggtcaagaagtttgaacatggcttcatcacggaccccatggtgctgagcccctcgcaccctgtgggtgatgtgctggaggccacgatgcggcatggcttctctggtatccccatcactgagacaggcaccatgggcagcaagccggtgggcatcgtcacttcccgagacatcgactttcttgctgagaaggaccacaccaccctcctcagtgaggtgatgatgccaaggattgagctggtggtggctccagcaggagtgatgttgaaagaggcaaatgagatcctgcagcaaagcaagaaagtgaagctgcctatcgtcaatgacgatgatgagctggtggccatcattgccctcaccgacctgaagaaccgagactaccctgtggcctccaaggattcccatgagcagctgctgtgtggggcagctgtgggcacctgtgaggatgacaaataccgcctggacctgctcacccaggcgggtgtcgacgtcatagtgattggggggaacgtggtgacagcagcccaggccaagaacctgattgatgctggtgtggacgggctgtgtgtgggcataggctgcggctccctctgcatcacccaggaagtgatggcatgtggttgcccccagggcactgtgtgtacaaggtggctgaatggggtgcggctcaagaaatactggggcacaggcttgctggatgccatggagaagagcagcagcagccaggcacgatacttcagtgaggaggataagattccattccttggaatccatgaggccaagaaccccaggtcagagaacaggaggcttgccaccatcttggaagcggcttgccaccatcttggaaactttgtgaacaaggacccctggaaatttcaactgcacaacccctactacgccccaattcagcaagaagcagttagagcagtcgtcggcgaacctccccaacagcacttgggttttcctgatgagagggcggactgagagacaggactagctggatttcctaggccgactaagaatccgtaagcctagctgggaaggtgaccgcatccacctttaaacacggggcttgcaacttagctcaaacccaaccaatcagagagctcactaaaatgctaattaggaaaaaataggaggtaaagaaatagccaatctattgcctgagagcacagcgggagggacaaggatcgggatataaacccaggcatttgagctggcaacggcaaccccctttgggtcccctccctttgtatgggagctctgttttcactctatttcaatctattaaatcttgcaactgcaaaaataaataaataaataaacaaataaaaagtaattcctgcttataatagaaagtttagaaacagaaaaaaaaaagcacaatatggcagattagaaactgctggctatctctcagtatgcattctccccttcttgcttgagacactcaaataatacctgcactgctcagaataaactgtatgtttcctgatctcctttacacctggatgtgatcctgtgagcatcttttggtcagtggaatgtgagcagagtgatgtgcataacctgcagattttgtccttgaacctcccactactccttttccctggtcttaccagtcagaatgcaatcagcagctctttcccctactgtcaatagttgctgaataaaatctgttttcatcgctttgactgatggtcaacggctatgtttatttttgacagtacctatgttctgccaggcactatgctaagtgttttgcagagattagtttatttaatttt

SEQ ID NO: 478188 - DNA, 497 bp, Homo sapiens
gcctgccaggccgagtgggtgaaatgagcccaggcattcaccatttcctgtgctgtctccatgatgccttccctgcacccctttccaattcttgccactccacacatcccaagaggcattaacagtggagcaccccccaacccccgccgccctccaccaaccagcaaagctcacgatgacaaagtccacagggtggagcaagtcataagtggaaattgcatgagtgcgcgagcagatattgaatgttgggtacctgcaggggagtgggacaccgttggcttgaggactggacaattctttgctgtgtgggactgtcccatgcagtgcaggatttttcttatccctaggctgggctccagttcccactccaccactcattatggccactcaaatactcccacacacattaccagctgccctatcggtgggcaacatcatgactttgagaaccaaaatccaagagatgtaaaaagcagatgtagcccagttgactagag

SEQ ID NO: 478189 - DNA, 593 bp, Homo sapiens
tatgataccgggctggagggcgctgaaacgttaggttcaggggtacatgagcagatttgtcatactggtaaattgtgtgtcatgggggtttggtgtacagattatttgtcacacagtagcgcagggaagactatggtgggaagaaggtgcaagtggactaatgctcatgggcaggggcccctctgctggagctctcaggcaggagcagtctgccagcgaaggagctatgatgagggcccgaggaagcaccctgtttaggcaagcaccaggtccagcagctggggccccgggagacagggtggcactcagattggactggcttcatctcacaggcaagacagccctgctctgtacagatccaacaaggccaatagaagatatcagacatgataaatgtcagaaaacagtcaaactcttgggtcaaatacacaattcacagatgttctatagtccatcagcatatttcaaggaaattaaagattatgttagtaggacaccagcctaattacataccagttggtatacagcagtggataaacagaacaaaattgaagtaatattaatttactctcctatgaaattcataagcagtg

SEQ ID NO: 478190 - DNA, 674 bp, Homo sapiens
gtaatatccagggagggagaggatgatgttactccccatatcgcaggggtacaagtacacaatgtgcagtatatattttctatattcctctttaccccagaacaacgcaacatgcattaactatatctatattatatctctatctagatctacatctgtatctatatctgtatctgtatttatctgtatctgtatctatatcggcacctgtccactccaatacaaagtaaaattcttgaaacactttacatttgatcatcccctgctatcttccaggatatttgaataccatattttatgtataccttgtatttactcgctccaaattaaacacctcattacttttttatatagtgaatattactatagatttacattaaaactataccttctgttagttcagacttcattttggaatcttcctcagaagttcctttttgaggattattagagataagttttcatgtggaaatgcttctttttcatggtgttcctttgcgtgatcatttagctgttcctttgcatgcttcgttgttttgtattacctcctcttatgtgatatttgggatagctatcacgtcgtgtattttttatttctatgtgttaggaatattcaagtcctctccatatattttaaaatataaaatacattgttgttaaatatggtcacccta

SEQ ID NO: 478191 - DNA, 1491 bp, Homo sapiens
tgaagacctctaacagcagccctcgctggctctcggcacctcctcaggccaaggcgtccactcttgccgtgcttgaggagcccttcagcccgccgctgcactgtgggagcgcctctctgtgctagccgaggcgggagtctgccccctctgcttgctgggaggtgtggagggagaggcgccggcgggaaccggggctgcacggggcgctcgcaggccagcgcaagttctgggtgggcgcgggctgggcggccccacactcggagcggccggcgggtgccgccagccccagggagttagaggcttagcacccgggccagcagctgcggagtgtgcgctgggtgccccagcactgcctgcccgcccgcgctgtgctcaaattctcgtggggcctcagccaccctgtggggcaaggctcatgacctgcagcccgccatgcccgagcccctccacatcctgggctgccgagtggcccgagcctccccgactggtgccacccccttctccgcagtgtccagcctcatccactgcccaagggctgaggagtgtgagcacacggcgcaagactggcaggcagctctgcctgcctccccggtgcaggatccactagggtctgcagcttcactcctgaagccagcgagaccacaaacccaccagaaggaagaaactccgaacacgtctgaacgtcagaaggaacaaactccggacacaccacctttaagaactgtaacaccgcgagtgtccacggcttcattcttgaaatcagtaagaccaagaacccacaaatttgggacacaaaagcataaaaataactgttatatgtcacaagtggaagaccactgagacagaggatcaccaggaaacagagacagttcttaatgtatttgttatttcaaggtttgatttgaatggtggtagaagggatctaaaagtgaccagtgggctgatcagacagagaaatagagaaataaaatattttggacacaatgtttggttacaaaggcagtattaataattcattactctgaaaatggaaaatcggttatcaaagagaaaaatatattaaacatttacattgtctctctaatatgaaacatatttaaggatactcagataggccaaatgaatgatgaagagttactttacaaaaccactaggaacagttaactggtgagaagtagtaggatagcagtagggatgtttagaagtccaaatcctctcataaatgtttttaatattttatattcaacaagctcatgaattatcacacattcattctctcacattttataggcctttgaaaacaataatttacttggaattcggaaaaattttagcacaaaatgtctaatatgaaatatgtaattatactgctttgtatatcacttctgaagttgcatcctagatatatatttctacatattcaactatatatacatgtatccatattcgaatgattgtacataaattttcaatcttattttaagcatgtgt

SEQ ID NO: 478192 - DNA, 545 bp, Homo sapiens
ggtgatcagcactgaacacagaactcaccatggagtttggactgagctgggttttccttgttgctattttaaaaggtgattcatggataaatagagatgttgagtgtgtccagtgtgaagtgcagctggtggagtctgggggagtcgtggtacagcctggggggtccctgagactctcctgtgcagcctctggattcacctttgatgattatgccatgcactgggtccgtcaagctccggggaagggtctggagtgggtctctcttattagttgggatggtggtagcacatactatgcagactctgtgaagggtcgattcaccatctccagagacaacagcaaaaactccctgtatctgcaaatgaacagtctgagagctgaggacaccgccttgtattactgtgcaaaagatacacagtgaggagaagtcagtgagagcccagacaaaaacctccctgcaggaagacaggaggggcctgggctgcagaggccgctcaagacacactgagcatagggttaactctgggacaagttgctcatgaag

SEQ ID NO: 478193 - DNA, 2686 bp, Homo sapiens
cgccatgccctccgtcgagtgtaatggctacagagggcattctagagctttcaggagctcagcatgcagcccctcttgcctgcccccgtggagccctctccccagatgggagctgggctcagggtcctgctggatgggcacatggaccgaggtcctgggaagccgcctgctcccacttgcatcctgcctgttactctcgtcacccagacgctgttcacccaggctctgcagcaggcgctgggctggatggcttccggtctgtttggtgccctggtcgcgtgtcttccgaactctgctgcttcgccccggcaagagcacttccttccgcggctgctaaaactggtgcgcgggttcccaacttcgcagaagagcttcatcggccccccgctagagacctcagaccgcagccatcgacgcctcgcctcggggatctgtccccaccctcggggccaggtcagggaccagagacctgcgaagccctctccttaggggtttagttcccaggctttctgaccccagtaattccaaacgcttccctttgtttccacagccctagcgtagcaggtgctccctgcagtttttgcttctgagatagagttctcttttcagctccttcggtagtcacttcgtacatagtgattcatgatgcgaaatcctctctgttgaaataactgacgaggcctctgtcttctgactggaccctgacttccatgccctttccactctcactccagtacatgcccaaaccccaatctttgttgctccaggcattgcctctgtggcgctgtgtcccctcctttgaactctgatccttctgctcaggccctttctcccagtctgaactcaccatgagtcaggccctgtgctaggtgctgggatgaagcagtgactgacacaggcctggacctgtccttgggaagagtgcgtctgtgacacagatactgtgccatgtggcaaagtaagcgcgtgggacagcagagccttgtttgccattaaagtaatatcacaagtctgttaaggttggagaatcaagtgaacatgctgaaaagttatggggaatgtagtctcatagctgggggagctgggggccttgtcaattggttcccccagtctggagagcaatctgagagtaagtagtgacactgtgtgtgctgagtgtgtctgtgggggtgtttttggataaaattaacatttgaatttgtgaactgagtgaagcagagtgcccttcataatgtgggtgggcctcattcaattagttcaaggcccgcataggaaccacctcctgcctgactgaaccgggacctacgtcttttcttgccttcagacttgaatggagacatcagctctttgtgggtctcaagtctactggctttcaatcagctcttctgcttgacagctgcaggtcttgggactgcccagcccccataaccctgtgagtgcattcctgataataaccctctttctcttgtcctcccccaccccacatcattggttctgtttctctggagaaccataatacatcatttactaatcaggaaatagattcagagacattaataactcatccaacctcacagttaactgtagagttgggcttgaaattccaaggtcgattttcttagccaatacaccatgctacatatatgtatgtaaaaataaaaacgcttgtgaactgaaaagggtccaaacttaagctcattttggtccttaattgctaatccataggcatgttttggtccttaattgctaatccataagcatgtttcggtccttatttgctaatccataggcctgcacacctgcccccaaggccatggttaggtcagcacttggccctccccttgtctggggctgccagaagctgcctcagaagacctctccctgcagctccagtgctttagggttcagcgcccctccagggcctttatttccttctgggctcaaaagcagatactgtgccagatacagatgatcactttctgggttccagaactcacatgcaccccttttcctggtctctcacatttgctgtgaccaacccaagcctcaggtggtcctctgctgagactgtccactcacgctgttgacagagcccttccaggagctctttttgtggggatttgctatgtacctggcactgtgcaaagaaccccacccatgccgtccttgcagccgccatgtgcggtgcggagcgggctgcgctaaccaccattgtcagaggcagaaacaggctccgtgaggaaggataagtgtgggttatggaatcagggctggcagatcccaaaccttggctcccagataccatgggatctttaggaagatccctggtcacttcggggaggagagagagggcgaaggctgagaatcggggtcctgggtcggaggagggagaggggtggtggtgtgggcttggaggtggtgtgggttggagattggccgttgagctggagatgctccaggtggtctgcgtccaggttcctctggtggcgggggatggggcagagccggcaggggtgggacggggctccgagccagccccgggggcggccacccggacaagcggccctcgtgtgacgcaaatcgaaggaggatggggagaggcgtgaccaagaggccgagcacagctcagggtcgcaggcgtcccgggagggctcaggaatatcacgtccggttcaactgcacgctg

SEQ ID NO: 478194 - DNA, 1654 bp, Homo sapiens
ctagcttctcaggacagaggacgagaggcccagagaccagcagcacaggcccgaggggctcagctcccactgcccctctgtggaggctcggccccactgggccccacgcgacaccaccactccccggactgtccaccatggccctgcataagcagtcctcgcctgccatgtccctcctggccagggaggtcctgcagggctgctgtggggcaggcgaggcagccgctacaccaggccaggggacagcgcgagacgctcagtaaggtcccatggcctcccgtgggcagcccccacagacacagctagaacctctgtccctgtggaagctccagtaccgctttggagaaacaggctttgaacaaaacattgcatcaaaggagctcagcaaactcagctgtctccacttcaccccgtcttcgtgcttctccttctcccacctaaagacggagacaggacgtgtcactctcctgggccaggccctgcatgagcctcttccccgctcccacagtggctcctccctgtggctcctagcagctcttcggaaacctccagcatttcatgcgcagagacccatccccatgcggctaccccaggcccagtatgcgccggcagggcttctcacatgtcctccaggaaagcgcctgggaccaccaacggccaccagggccactggatccatgcggcttgtgcctggtgatgtagatatgacaggccctcgccgcctgctcactgggccaccttacctggctccactgcccttctgcgtcctgcgcgagcggacatcccgggaggcgggcggcggggacctccccgagcacgtcagagccgcccggagccgcagcagccgcaccacgcgcatctgccagcctccgggaaagggcgacaaagctggcccgccccagcgccagccccgcccgcccccagcgccagccccgccccgcccccagcgccagccccgccccgcccccagcggccagccccgcccccgagcgcggcctcccccccagcggcgctcatcccaaggctgggcgtacacgctccgctgctctggagaagggacctcacaggctcagatggccccctacctcatcccctacaaacagcagcacttccaggacacagaaaccggcagaagcacctgctgtccagcccacagcagcccctcagaggtggtgcctctggacaaaggtcacaggaagtcctgcgaaatcatccctgccaaccagcctctcactcccaaggagaccagagaccaggcacagctggagcctccttcctgcgctcagtccccagcgtgactgctgaccctgaccagggtttaacccagtgtcttcactggggagcatggccaaggggcaaaacctctagatcagcacttggcggtaggccctgagccacaacaggccacaccgctcacctctggcagcaccgcagccttggtcttccccgggcccaggcagacctggttggtgtcccatcaattcagaatgagcagctcagcagctgaaggtacacacacaccaggacacagcagctgactctccaggtgggccacctcctcccaggggctgcggaacagtgatgcatattttttcaggtaaccctttctacaaaccagaagagggccttggcccaggcccaccattccttcaac

SEQ ID NO: 478195 - DNA, 816 bp, Homo sapiens
gtcttctgcgttgctcacactgggagctgtagaccggagctgttcctattcggccatcttggctcctcagtaataaaagtgaattatgtaggtacagtatgggagaagcatgacttgggagaattttgaattaaaatcctgcggccgggatgctctgagagcaggctgcctgatgggggcagcagagagcagggtgcgggaggggcccgcaggaggggagtggagccagcagctgagaccccggcaagggcaaccatggatctggagttggaacgggacaatgcgccatcaggccggcagaagctggcagatgagggccgagttgcggcacacaggtgccaggactgcctgctttgttcagctgggatctacccggtctccaaggtggtttcggatggccacacgcttcagaaatccttcctgagggctgaccatgggcattgcgctaccccagactgtgctgaactcttttctgggctggcagcatgtctggggtcaaagctagaactcaaacccttgtccaagcctctttccataatgctgggtgggatgttctcccaggagtcagtatcttctcatagctacacgcttgactctataaatgctttcaggggaggggcagtcttgctgtattccccacagccgttggccctgctggggccagagaagtcgttcaataagtctgtgctgatggattgattgtggggtgccctggatcaggctctgtcccatggcagaggacacttccaccttgccagttctgtggctcctgacagtattagctggatgtgaggcaccttcttttcactcctggtc

SEQ ID NO: 478196 - DNA, 551 bp, Homo sapiens
ttttttttgtttgtttgtttttttttttttttttttttttttttttttggagagatagggacatggatgaagctggaaaccatcattctcagcaaactatcacaaggacgggaaaccacactctgcatgttctccctcatagaactccaaattctccagctttggactctgggacttggaccagcaaacatctagattttcagctcttaggccttggactgagtcacaccatcagcttccctgattcacaggacttcagactaggactaagcagcaccagcttccctggttctccagcttgcagatgccatactgaacagtcacatctaaatccataccgaaggagagaaacatttccgactctacaaggctctaacctgttacaagaggctcctagttacaatcccattcaattcgtatttaacttctcagtcagtcagaagtatctgctttttttcattggtggtttcatagttttctaagaataatgggtagaatcttgtgttacacttatataactaaaggatactttcttgtaattttatcaaaac

SEQ ID NO: 478197 - DNA, 933 bp, Homo sapiens
ggacaggatgctgaagttttacaacggcctctcggaagtggaggcggtgggactccccgcggggaccgaacccctggaccccactgatctgaacggggtgcacttcgacccggaagtttacctagacaagcttcctagagagtgccctctggcccagctgatggatagtgagacggacatggtgcagcagatcagggctctagacagcaacatgcaaaccctgacctcccagtgccaagtgtataagtgtgtccagaattggtgggttcttggtctcactgacttcaagaatgaagctgtggaccctcctggtggggctcgtggtctcgctggctcaggagtgaagctgcagatcttcacgtgggttcatggtcttgctggcttcaggagagaagctgcagaccttctcgggaggcagctaaggcccagtgagaagtcgagcacagcagctgctggcccaggtgctaagcccctcacggcccgggccggcaaggccagccggcagctcctagtgcaaggccgccaagcccacgcccatccagaactccagccggcaggcaagcagcacacccgtgggctgaagggctcctcaagtgctgccaaagtgggagcccaggcagaggaggtgccgagagtgaacgagggctgtgagggctgccagcacgctgttacctctcataaggagtgattaatctgagcttctccagaaagtccattcctggtaggcactgggaataagaaatctcagagtataaaaaaacatcaagtggtaacactttttgtttcctgagcacctactatgtgctgcccactgtgagagctgttagggttgaaatagggagcacagcaggataggagctgccattaggagcttagtggggaaaccgttgtgcaacatggttacagtgcttggggtggggaaggtcagggagt

SEQ ID NO: 478198 - DNA, 1101 bp, Homo sapiens
ctgccagttccctggagtgtaggacactgtgtaggctagagtgatggggaccaagctacactgtgccctctttcgtgccctcttcaaggagaaagtgacttttgaagatgtagctattgacttcacccaggaagagtgggacatgatggacacatccaaaagaaagctgtacagagatgtgatgctggaaaatatcagtcacctggtgtccctcgacagggaaagtgcccttaagaaaaaacacatgatatccatgcatcctatcatcagaaaagacacatccaccagtatgacaatggatccttttgaatataatgattcgggagaagattgcactcacagttccacaataactcagtgtttgttaactcacagtggaaagaaaccctgtgtcagcaaacagtgtggaaaatcccttcgtaatcttttgtcccctaaaccacgtaaacaaattcatactaaaggtaaatcatatcaatgtaatctatgtgaaaaggcctatactaattgcttttaccttagacggcacaagatgactcacactggagagaggccatatgcatgtcatctatgtggaaaagccttcactcagtgttctcaccttagaagacatgagaaaactcacacgggagagagaccatataagtgtcatcaatgtgggaaagcctttattcaatcctttaaccttcgaagacatgagagaactcaccttggacaaaagtgttatgaatgtgataaaagtgggaaagcctttagtcaaagctctggctttagaggaaacaaaataattcacattggagagaaaccacatgcttgtcttctatgtgggaaggccttcagtctgtcttccgaccttagatgacatgagagaacacgcactggagaaaagccatatgaatgccatttatgtgggaaagccttcagtcaatgtactaatcttaaaaagcatcagaaaattcaccctggagagaaaattataaacttcttcagaacatattctgactttagatgacacagtgttaggaatgacgaaggtaaggaatgtggaagagacttcagctgtagttgtagcatctaaacatgccaaaggactcacatttt

SEQ ID NO: 478199 - DNA, 658 bp, Homo sapiens
agcgcccagaggccggcgggagctccaggttcacctcctcctcctccaggtgtttacttttcctttatttctaataaaatctgatggctctaaagggccatggctgcccttcctgggacttcctgggaacctttaaaccttctgtggttcctggaatggggaagcttagggctacatcttgaaatatattctgtgaaggcaaagaagagtggcagtacggagaattattctgagccacatgagagcatgggcaaaagtggagatacctgtgccatgtggaaatacattacaaatggactatggcaaagggaaatcccacttccagctagatgtctgcatgaactactgaaagctgctgagtgtcttgcagcagtccccgtgagtgtgttgtgtgcagtggggccgggctgcttcatccactgcacattaaatgtttccaatactttccggccaaagcttaagcttagagttgtcagaccactgaatttgaatgttgacctggttccttgtggaacagactgatttatagagtaaaagcattgtcaaaccaaatgagcttggatagaaactgtatagagtctgagatgttgtctgaacttccagtcactcattgtgaagtggaactgcagtaactacatttggtgcaaaatttcatgtc

SEQ ID NO: 478200 - DNA, 460 bp, Homo sapiens
gtgacgatgacatgtttgagagtgctcccgggacagcatgtagttggcaaggggcggtgtgtatgtcagacactgctgggaagcgttcacgtagcaggtatttcccatattctggagcccagcccccaccgcagcaggtctcctgctactcagaggaagcttctccctgggagcaagctgtcttgccacaggcgccaaatcatcgcagaagtcgacgcgggtctcagttgagagttgtgacttctcagggagagaagtccgctggatttcagcaaaggctgcatctggccgagaagatagagtcttcaaatgacgagctctctggccgcatcagcccttatataactcacccccaccaacggcgaacacctcacccactcatcagcgacggaaagagaagaagtcggaagtgcgctttctgacctgagaatagtcaatgaagtatagtatttagcacagc

SEQ ID NO: 478201 - DNA, 784 bp, Homo sapiens
gccttctgcctccccccagccatgtggaactttactggcagcatagctgcatgggtccataagcaacttcagtccttgcctcctagaagaaagaattcgaccgaagggcatacagtggaaaaagagactgagcgaacaggaaggagaggaaaattctcttggaagagacccgagcagatgcctgaaggtccaagaaagaaaagagaagagcctttaaccttgatcctgcgttgggttttcctctttcccgtgattcgtcctttagggagaaagaaagtgacttttgaagatgtagctattgacttcacccaggaagagtgggccatgatggacacatccaagagaaagctgtacagagatgtgatgctggaaaatatcagtcacctggtgtccctcaggtaccagataagcaaagcctatataattttgcagctggagcaaggaaaagagctgtggcgggaaggaagagtatttcttcaagaccagaatccaagtaagcaacagggtcctgtgctctaataggaggaggtgctttgtcaatgaataatatcagttgaatattaattagtggttttattaaatgagtgataatttctaaaatgtaggttaggctactggagcagaattccttagatgttattatcattttgttcatgtgtcagatgctactcttgtgtcctcttttttttcttttctttcacttttgggaaaaggataattcatgtacttggctggggttaaactttcatatgctgactcttttcctgatacccctgtgaagact

SEQ ID NO: 478202 - DNA, 660 bp, Homo sapiens
aactgctaaaggaatctgaatccagggctacagctgactcagcagggagtcactcccttttgaagcccactgagacaatggagcaggcacatgagcagagtggctatgaggggggacaaggtgggcaggctcaggcccagggacatgaaggccacatgctggagcttgctgccctgagcacgggtgccttggagcggcccaggcacatctcgactgggaaggaagatggcaacggaccaggatgggaggtggcagcagcagcagcaggtgtcctcagccctggggtgaaaggagggtctctgtgtggacgcagcactgacacctctgtgcctgtgcattctcagagcgccctgcatttccactttgcactgagccttgggaattttgcagccggccctgccgtggccatttttatacaagttatctcatttaatcctcagaagcaaacatgccagggggttattacccaagtttacagaggcaggtcctggggcctagaaagatgatgtcaccatgctactcatacagcctacagaatagggagccaaaataaacttcttttccttatgaattacccagcattaggtattcctttataggagtaaaaacaaactgacacagaaaattgatactgtgcaggggacattgctgtaaagacag

SEQ ID NO: 478203 - DNA, 1589 bp, Homo sapiens
gggcgacatggaggacgactcactctacttgggagatgcagcttttgctgaaatccagcggacttctctccctgagaagtcaccactctcatctgaggcccgtgtcgacctctgtgatgatttggctcctgtggcaagacagcttgctcccaggaagaagcttcctctgagtagcaggagacctgctgcggtgggggctgggctccagaatatgggaaatacctgctacgagaacgcttccctgcagtgcctgacatacacaccgccccttgccaactacatgctgtcccgggagcactctcaaacatgtcagcgtcccaagtgctgcatgctctgtactatgcaagctcacatcacatgggccctccacagtcctggtcatgtcatccagccctcacaggcattggctgctggcttccatagaggcaagcaggaagatgcccatgaatttctcatgttcactgtggatgccatgaaaaaggcatgccttcccggccacaagcaggtagatcatcactctaaggacaccaccctcatccaccaaatatttggaggctgctggagatctcaaatcaagtgtctccactgccacgggatttcagacacttttgacccttacctggacatcgccctggatatccaggcagctcagagtgtcaagcaagctttggaacagttggtgaagcccgaagaactcaatggagagaatgcctatcattgcggtctttgtctccagagggcgccagcctccaagacgttaactttacacacttctgccaaggtcctcatccttgtcttgaagagattctccgatgtcacaggcaacaaacttgccaagaatgtgcaatatcctgagtgccttgacatgcagccatacatgtctcagcagaacacaggacctcttgtctatgtcctctatgctgtgctggtccacgctgggtggagttgtcacgatggacattacttctcttatgtcaaagctcaagaaggccagtggtataaaatggatgatgccaaggtcactgcctgtagcatcacttctgtcctgagtcaacaggcctatgtcctcttttacatccagaagagtgaatgggaaagacacagtgagagtgtgtcaagaggcagggaaccaagagccctcggcgctgaagacacagacaggcgagcaacgcaaggagagctcaagagagaccacccctgcctccaggcacccgagttggacgagcgcttggtggaaagagccactcaggaaagcaccttagaccactggagattcccccaagagcaaaacaaaacgaagcctgagttcaacgtcagaaaagtcgaaggtaccctgcctcccaacgtacttgtgattcatcaatcgaaatacaagtgtgggatgaaaaaccatcatcctgaacagcaaagctccctgctaaacctctcttcgacgacccggacagatcaggagtccgtgaacactggcaccctcgcttctctgcaagggaggaccaggagatccaaagggaagaacaaacacagcaagagggctctgcttgtgtgccagtgatctcagtggaagtgccgacccacacgtaggggtgaac

SEQ ID NO: 478204 - DNA, 648 bp, Homo sapiens
acttaaatattgctccataaggctagtagttgattcacggactgcatgaggcttgcacgaccccgtggagggtccagaaagggaaggacagctctgccccgagctcaccctgcagactgggcttcagcgtgctctgggcaccctcagctgccatggctctccaaacgccgcgtgcttctcaaattctgagcctttctgccagtcttctctttggacgtacctcaaaggaaaggaactcagcaagtcataccttctcagagacttctgcagagcagcaagacaaagcttactcagaggcgcccacagaccaggaagggcccctgtgtgctgaaaacgggccgccaaaggagcctctgccttcagccaggcttggaagaacaccaggaaagcaaaaggtggtggtggggaccttctccatgtttatggagtggaagcaacctgagaccctcaccgatgcagatgcccaaacttggactttttcagacaccagcattgtaagccaaataaacatgtttctctatctaaattacccagtctcaggcctcccttcagagcaatactaaatagactgagataacccgatatatatttcagaaggatggtggtaagaagaacatgacagagactcttcagtaatcttgattgctg

SEQ ID NO: 478205 - DNA, 763 bp, Homo sapiens
tgaccaccacttatgtctgctgttccgcagagtccacccttcgggagaaatgggagggaggggcccctccttgggctcccatctgctctctgctttgtttgaggactgctccccagatattcaagtcaagtacctgcgaatggctgtgatggcaacagtaccattattaccattttgggtcacccatgactcagggggtgaggtctatgttcagacatctgaagagatccagaaacctgctggaggacggcgaagtggagcagagccaagtcagcccactgggcctagccaagtccccagatttgaaagggagctcaaccaagatcaccaaaaccacctagactgccaccaccaaccacagatgcgtaagtgtgccctgctgagtccagttcagatcaacacatccagagcagtgagcaaaaatccgtgtttattacattatacatctgaggaagaactcactgaccaagcccatggttcccaacttttgttccagtaacaaaaactttatgtataactttgtgctatacctttaacgcttgggagttgaaaaaacaaaccatcatgatcacctgaattcatttccataattaaaaaatttaaaaaaaacctgcatgtaccctgttaagagggctaaacaaagagatttcattgtcttctaagataatgtattatattgtctctgaacacttgcttttagttaaatgtttccttttacttattcttacatgagtctattcttcacctaaggttcatttctcac

SEQ ID NO: 478206 - DNA, 602 bp, Homo sapiens
agaatttgaatggatctccttgtgcagtctgggatttgctcctgctaaactgaaatcttctctcagggggtgccagtaaactacttgtaaaatgcaatgcctcttcaaaactcatccattccagtgtctgcatccagagaaatgcaatgcctcttcaaaactctcatccattccagtgtctgcatccagaaaaatgcaatgcctcttcaaaactcatccattccagtgtctgcatccagagaaatgcaatgcctcttcaaaactctcatccattccagtgtctgcatccagaaactaccccttgtgactcctctcaccttacacatgccgattctccttgtcgtgctcccacaaggccgtgtcgcctgcttctgttccttgcccagtccttggtctccttctagccccactctgttcctcttgcagtgtcatggccttcagctgcagctccgttcagttggctcccagatctacagcttcatccctgaactctctgctgagttttctatccacgtttccaaacaacaaatggaacagctccacatgggaaaattcaaagatcctcaaactcattttgcccaaaactaagttcatcattatta

SEQ ID NO: 478207 - DNA, 1596 bp, Homo sapiens
gccaacagcgaaagcaaaagtggttcggcacagacattgtttaaaatggctgcgttaaaaataccatctcggcttcacagatttctggagctgtttacctccaaatcagataatcgactcagcaggctacatgacctctggtgtggaaccacactcttcctgctctttctgggagttggttatccaattaaagaagcagtcctcatgctgctggagggctcagaagaagacaagaaaatgtgggaaagtttggaacttactagagacttgttgaatggctttgcccataatgctgatagtgacatggacattaaggttcgggctgaggtggtctcagatggagatgagaaacttgttggaaattggagtaaaggtgactcttccatggctgaaaggggccaatgtacagcttgggatgtggcttcagagggtggaagccccagcccttggcagcttccacatagtattgagcctgcaggtgcacagaagtcaagaattgaggtttgggaacctctgcctagatttcagaagatgtatggaaacacctggatgtccaggcaaaagtttgctgcaggggcggggccctcatggagaacctctgctaaagcagtgcggaagggtaatgtggggtcagagcccccacacagagtccctactggggcactgcctagtggagctatgagaagagggcccccatcttccagaccccagaatggtagatccactgacagcttgcactgtgatcctggaaaagctgcagacactcaatgccagtccatgaaagcagccagaaagaaggctgtaccctgcaaagccacaggggcagagctgcccaacaccatgggaacccacctcttgcatcagcgtgatgtggatttgagacctggagtcaaaggagaacattttggagctttaaagtttgactaccccgctgggttttggacttgcatgggccctggaccgggggaggaattatatggtttggccacgtccccacccaagtctcaacttgaattgtatcccccagaattcccacttgttgtgggaaggacccaggaggaggtatttcctgtcacttttctgtggaattccagtgttctttcttgcatgatctatttgaaaggtgattactcactatttcagttcttcttcattgaggaggttattggagtacaggtggtatttggttacgtgagactcccagtacccctgcttctggtgacagcccatggcaggtggggaggacttgcagatggaaagaatgagaagggcagcctggctcgcagggagtctgatcaaccctgactgtgaagatacaggttgtaagctgagatcatattggagagtttcttttgtgactaagggatagagaatctgaatttaccttcattccaaagaaaataaataatcttaaaacaagctttaagcatgcatatggctgtcccctcaagtgatgtgtagattaatctttctccttctaatgatgattgccttatgtgtgcaggcagccatatttctctgatttcctggaatagtcttgatttaaatgtctaccttactgtcccactaagaacacctagatttgtcagaccgcac

SEQ ID NO: 478208 - DNA, 3449 bp, Homo sapiens
aaacaactttctcattgcctaagtgggatgcgggtgggaggggccccgcccctctgctctgaccgcttctgtagcggctgaatttctgccggagtcgcagatggcgggtaggttggtgagcccagcgcctcacacatttcctgtcgacttctgctctctcagacagaaatgggatccactcctaccgaggaatggctttggcagaaagagacccatcggttgcaggagctgaggcgattgcttaaactgccacctggaggaggattgagagaggtagaggctgatgttcccagagaagaactttctgtggattttgtccaagtgccccaggaggagagtcaggaggcctggcagtgccacaggaggcaaggcgcagatattagagaggtttctcctggtcttcttgcaaagataagtttgcagcttcccaataatgggccacagctgggaccctgtgctagtctgcaggcaccatggcaagcccagactaccacttggtacaggaaaggccaaatggcaccagagagaaaccccctagagaccattactcctccttatgggagtcttatggaatgctaaagcaatattctttggaatgtagcaagctgtacagattattgtaacatacatacttatcgtgaatagaagatgttgtctgtttaagtgaaaccttcacttcctcacttaggaatgctgacccattctttgaagtctgtattttctgcatggtcattcccaagctttgaaatggagtaaatgctatactcaaccatattttctgaatctcattatttaagattgacatttgagatcagcagtttatgagcgttccatttgttatacattcttgcctaaacttgttatcacttactatcagtgtttttgagtcattctaaacagtgtgtacttatatctcattgtttaatttgtatttccttgacgaataataatatagtttctttttacatgtttattggccatttggatatccacttttgtactgtttattaaagacttttgtctatttttccgttcagttatctctgttttttaaaaatttatttgtaaaacttatttatagatatttgatataagtcctttgtcagctacatgtattgcaaatgccttcttgcagtctgctttttcactctcttaatggtgctttttaaataacagaagttgtagtattttaactagtccattttatcaacctccttcataatggttaatgtttcttggatccacttaagaaatctttgtctaccccaaagtcataaagatattttcatatgttattttctagcagttttattgttttacctttcacatttatatcaacaatcctccttgaattaagttttgtttgtggggtgacataggaatatcatgttttttcaatctgtatgaataccaaattcactcagagccatttattgaaaagaccatcctttcgatagtgcattgctgtctcgcctttgtcataacgtgaatgtttctatcaggtagagtatgttcctggattctctgttcagttccatttatctatcaatgcttgcaccaaatatcatactatttgaattactgtggctttatatatagtaagttatgatatccagaagtataagtactctaatttcattctcatacttaaaattatctttgttattcttggctgttccatttcatatgaacttaccccacacaggtgaaagccctgctgggttattagctaggattgtatttaatttattgacgattttgggaagaactgtccaggtaacaaaattgaatctctagaatcataaatatgttttattctttcatttattaaggttttaaaaaatatttcttaagaaagttatgtagttttcattagactatatgttatgtatatacgaatgattgatttttgatgtgaatcttgtaaccagtgacctagctgagttcactcattagttctaataatatgtctccatattcttatggattgctttcatttacatgatttactacatatacacaatatggtatctgtgataacataatttttattctatcatttttcatttctccttttccagtagttctttttcttgcttcattgtactcgctaaaactcccagaacaatgctgaagagaaataaatgatgatggcaggcatcttaccttgtttctgatctccaggggaaagcttttcctgtttcagtgttgtgtataatcttagccataggttttccgtagtcttcttatagcaatagagctttcttctatttacagatttctaagatgttttaatttattgagtttaacttatgattttctattttatcctataaaagtaaattaattactttttgaatgttaaaccaacttttctggaataaagttctcttggttgctgaattcaattgctaatattttattagaattactaaatttatatttgtaaagaatgtcagattttttttttctttctaacaatatcttaccaggatttgatatcaacatcatgcttgtcttataaaatgggttatgaagcacttttctttttgctgttttctcgaattgtttttaatatattggtgttatttcttccttaaatatttagcagaatttaccaaaatgtctttcttgatctgagatttcatatcagaattatttttcatagattcagtttctataatcaatacagatcttttcagattttctatttcttgtgttaattttagtaaattttgtttttctagcagtttgtcacttcacttaaatattcaaatttattgacagaaagttattcataatatcctatttatttattgaagtctgttgaatccgtaatgtgattcctttttatttctagtattggtaatttgtgccttttctctttttaaaaaactcaatgttactaggggcttataaattttattaggtttttcaaagaaccaacttttgaccttgctgattaactctatttttttatttcattagtatctgttcttatttaacatgtttcctttcttcttttggtttaatttgctcttattctatacttttttgagactaatatttcacttacttattttcagtctttcttatttcttaaaacatgcatttaaggctatagattacttttgaatagtgactctacatgtatcccccaagatctgacatgttatatttttattatttcagtctaacatttttaaacatttccattgagattcttccttaatcctgtgttatgtcaaagagtacttcttaatttccatacatttggagattttatgggttctttgtaactaatttctggcttgattccactgtgatcagagaacatattcggcttgattatagtacagcatatggtcattttgggatcgtgatggctgtctgttattcagaaaatagctcacaatcttttttcaaatatgagaagctcctttttatgt

SEQ ID NO: 478209 - DNA, 685 bp, Homo sapiens
agtgggtgcagcgcaccagcatcgaatcctggtttgcgtgctgaagtcaaaatgtggtgctgtttggcccagagtttcctagcccctcccatttctcctttcgcaatcctggcgctcctggctgagatgagactccagcgtggacgcaatttttctgaacgatataagataggaccaggacaaatggacttaggcgttgtaaacatttggatttctaatattaaaataaagtacacagaagcttcaaaagaagcagaaaaccaatgtggaagaaaagaacaagaaccagaacataatgggtgcaaaggtaagataaatgcaggacagacaaaaggaaccattgtttatgaaatccagagtctgtcttctacattcccgcgttacatttctaaagcagtggttctcaacgtgcagtccctgagccaacagcatatgcttctgcctgaacgctggttagaatgcttattctctaaccccacgctagacccacttaatcagaaacatctgcagaacttttccagaatccgcaagtgttgctggcacgagcttcattgtcagtaggtaatgtgaaaattgaatttgttgttggtgataaagttcacgtgtgctttctttggggggacattgatttgggattatagtttactgtaacctggtaatttcagtaatgcaaatgcaacaaaac

SEQ ID NO: 478210 - DNA, 584 bp, Homo sapiens
tgacagctataattcttgcaagtttacttcaacaggtttagagtaatgaatgctgcagttttctgggggtctgctccaggccctgcttgcctcagattttctagtacctggaagtatcaccagtgaaggctgcaaaacagcaaagatggcagcctgccccttctcctggaagctccctcccagggagaagcagtctggccacattgttgtagagcagctgtgccatgctagggtatcacttccacctggtcagcttgggctctccaaagcccacaggctggaacagctgaattgcacaaattccccaaagagcaacaatggtggcccatttcatcccagatacttctctacattttatttgactttgacactgcctatcacctatagctcagatgctgttgtttactacaagtatgctctaagatcttcagaaagatgtgggaattccgctctaatctattaacaaatgcttaaggagcacctctagaaaaagcacatgaagttcttgaactttcactgatgcagtggctcttcgctttgctgacaatgaactgtttaaactgttgtttaaaaacaaacagttt

SEQ ID NO: 478211 - DNA, 916 bp, Homo sapiens
tgtcatcatgtcttcaatgtaatggaccagtgtgatatcttgtggaagcaaaaagcgatcaaggtctctctgaataagattatgacacaaagctggagagttgatatacccctgaggcaagacagtaaaggtatattgctggccttgccagctgaaggcaaattgcttctggtgggccttatggacaggaatggagaaaaaggcatttgccaagttagtggctgcatatcagaggactacaatgacattttgggtcccttggaatcaacgtcagctcagagccagtgtccagtagtccccaaaaagcctaattattttcctttccagaatgcacagaaagagaaagacgggctggtgaaggacaaactaagattggctaacggtgaccccaagaaaccaaagggcaagatgtctgcttatgccttctatgtgcagacgtgcagagaagaacataggaagaaaaacccagaggtccctgtcaattttgcagaattttccaagaagtgctctgagaggtggaagacaatgtctgggaaagataaatctaaatttgatgaaataacaaaggcggataaaatgcgctatgatcaggaaatgaaggattatggaccagctaagggagccaagaagaagaaggatcctaatgcctccaaaaggccactgtctggattcttcctgttctgttcagaattaggccccaagatcaaatctacaaaccccaccatctctattagagacatggcgaaaaagctgggtgagatgtggaataacttaaatgacagtgaaaagcagccctacatcactaaggcggcaaagctgaaggagaaaggaagatgaagaaggcgaagaggaagaagaggaggaggaggaggaggatgaataaagaaactgtttatctgtctccatgtgaatactt

SEQ ID NO: 478212 - DNA, 576 bp, Homo sapiens
attgtgagtcgtgctgcaataagcatacgtgtgcatgtgtctttatagcagcatgatttatattcctctggggatatacccatcaggaccctcagctgcaggtctgttggagtttgctggaggtccactccagaccctgtttgcctgggtatcagcagcagcagaggctgcagaacagcgaatattgctgaacagcaaatgttgctgtctgatcattcctctggaggtttcatctcagaggggtatccagccgtgtgaggtgtcagtgccatctgccacagctttgcttggctatgaaggggaattccctgaccccttgcacttcctggatgaggtgatgcctggccctgcttcggctcacgctcagtgtgctgcacccactgtcctgaacccactgtccaacaagccccaggaggaagtagagcaagatggtggaataaaaggctccacagatcatctcctccacaagaacaccaactgaacaactatctacacagaaaaaaaaaaaaaacaccttcataaaagccaaaaatcaggtaagcactcatagtacctggttttaacttcatatcattg

SEQ ID NO: 478213 - DNA, 795 bp, Homo sapiens
acaaatccagttataaacagaagccacgtctgtgtcttcagtggcacctgctgcaggggcggagccctcatggagaacctctacttaagggtagtatggagaggaaatgtagggttagagccctcacacagagtccccactggggcactgcctagtggaactgtgagaatagggtcaccatcctccagaccctggaatggtagggctgccaacagcttgcactatgcacctggaaaagctgcaggcactgaatgccaggccatgagagtagctataggggctgaaccctgcaaagtcaaaggggcggagctgtccaaggctttggcagcccaccctttgccccagcatcccctggatgagataattgaacgaaatgtgtttgtcaaatatcaaagggtccagcagaaagggagaagtgcctctgtgactcacagaggggctagattatgtttatttagcataaaccttataagctattgtgggtgaaggttttcagtagtattgtttttctcatgcaatcattttttttttttaggtctccagtgtataagctcatagatgtgttgtaacataggaaattgaaatcccataggcaaatggacatggtatcattctgtctaccaggtgtaaagctctgctcttttatgaattgtgttacctgatctccttgtcttttgagtgtaccagacattacttcgtaatgtgagggagaacttgacctttctgtatgtgatggctgtcttatttgtaggaatgagaaataggagacaaatgaattgtgataagtagattaac

SEQ ID NO: 478214 - DNA, 1043 bp, Homo sapiens
agagagagagaggtataggtatgagggaacaggagccaaaaagaaaaaagttttgcaaaggagaaaagagccttgaagataaggagcatagttgtcggccattggaagttgacaatgaccaactgagagcaatcatcgaagttgatcctcttacagctatgagagaagtggcagaagaactcaacgtcaaccgttctacagtctttcagcatttgaagcaaattggaaaggtgaaaaagctcaataggtcagtgcctcaggagctgagcaaaaattttaaaaattgtcgttttaaagtgtcatcttctcttattctacacgacaacaagaaatcatttcttgattggattccaaacttgcaccaaaaaaaggtcatggtcactgtttggtggtctgctgcaggtctgatccactacagctttctgattcccagtgaaaccagtccatctgagaagtatgctcagcaaatcaatgagatgcaccaaaaactgcaacacctgcagctggcattgatcaacagaaagggcccaattctgcacaacacgcgaccacacatggcacaaccaatgcttcaaaagtggaacaaattgggctataaagttttgcctcacccgccatattcacctgacctctcaccaactgactaccacttcttccagcatcttgacaactcttgtagggaaaacacttctacaaccagcaggatgcagaaaatgctttccaagagtttggtggggggtaggaagggtgggaaggggtgtgggacacaaacattcagaccatggcattttgcccctggtccccgaaaatccatatccttctcgcatgtgaaatacatgcattctatcccagtcactaacgtcttagtttgttccagcatcaactcaaaagtctaaaatccagagtcttagctaaatttcatctatattagatatgggtgagactcaaggtatgattcatcctgaggcaaatttctctccccagctgcgaacctgtgaaatcaaatgttatgtgcttctaaaatatagtgaggctctaagcat

SEQ ID NO: 478215 - DNA, 704 bp, Homo sapiens
tcacccgtcttctgcatcgctcatgctgggagctgtagactggagttgttcctattcggccgtcttggctccatcccccaaatttctccacattcttgccaacaattgtcattctctgtttttttcaatagtagccatccttatggttgcaaggtactatctcattgtagttttgattttcatttccctaaagattattgatgttaagcatcttttcatgcacttattggccatttgtatggcaaccaacagagctggagtctgcaggagaggaccattgagatttagagaggggaaactgactctgaaaagtcagaggccagtgcaaaggaggacaatagggagaggaatgggactgaaagcaaaagctaattttgatgggcagcaacgtttaggaacttaagtagtaaaatcaaaataaacaatttgagaatattgtctatgatgaggtttggattgatggcattctgtgttgccaactacggactggtccaacaatgtctgaggacaattagccatatcagtctagttaagaactagttccccttactggagaagtagcatggtcatttggataaaagactggttttttgagttgacagaagttcttgcactggttctttctcatctttgtgggctgatgtttcttcagtgcttgaagtttctaccctttgggttttttttaattctatttgatgacccta

SEQ ID NO: 478216 - DNA, 452 bp, Homo sapiens
taagtgacagctgcaatctagtcctgcctcctgtccaccatgaagtctccccattccttcttcctgtttgaaacactagttgtcccattgggaatccctcatccccaaggccttctgctcatgatgaataatcaatcagagagagaccttaaccctaaggcagacactgaagaggatttggggcatgaaataggagctgcaggttggagaacatcacaagcaagggcatctgtaacccaccctacccactttctcaagagacagtccagagagcgagtaaggcacaggggccctcttctgcatattgaaagtgagaagaaatgcctatgcgagtgtctaggcagagagcttgaaacagccacttgtgggtctctgcacctgcagcctggtgcagggatcagaagaatgtacttattctgtgcaacaagagccatgcctttgtgacaaagccc

SEQ ID NO: 478217 - DNA, 1239 bp, Homo sapiens
tctcccacaatgctccccactttcctgttgatgaacctcttgtccctggctggggatgtggctctgcagcagctggtccacttggagcaggcagtgagtggagagctctgtcagcgccgagttctccgggaagaacaggagcacaagaccaaagatcccaaggagaagaatacaagtttcgagaccactatggaggaggagctggggctggttggggcagcagatgacacggaggcagaactaatccgcggcttctgcaagatggaactgttggatggcaaacagacactggctgcctttgttccactcttgcttaaagtctacaacaactcaggcctctatagcaacccagacctctctgcagctgcttcacctacccttggcaagttctgcatgatcagtaccactttctgcaactcccagcctcatcttctgttcaccatgctagaaaagtctccacttcccattgtccggtctaatctcatcgttgccactggggatctggccatccactttcccaatctggtggacccctggactcctcatctatatgctcaccttcaggaccctgctcagccagtgtggaaaacagtggggctggtgatgactccacctgatcctcaaggacatggtgaagatatcatcagccacctgtcagaccccgagctgggggtggaggaagtgccttttcacaccattatgaagcagttcttctcctacatcatcaccaaagacaagcagacaaagcctgttatgggcaagctacaacatggggccaagcctgagggcaaggctataatagatgaatttgagcaaaagcttcaggcctgtcatgccagaggtttggatgggattgaggagcttgagattaaccaagcaggtagccagagagccccaacagccaagaaaccatccactgtttgtaggcaccagcctctggcttctgcagcctcagacaatgacttcgtcacaccagagccccgtcgtactacccatcggcatccgaacacccagcagcgagcttccgaaaagaaaccaaaagttgtcttctcaagtgatgacctaactgaactgcattgagctgctttcactttggaatatatgtttgccagtctccttgttttctaatgaataaatgtttttatatacttaaaaaaaaaactctcttcctccccagttcatctgcatctcattattgggctacaagaaacagcagcccgaccctatttggtccaggaa

SEQ ID NO: 478218 - DNA, 867 bp, Homo sapiens
gggagcacaatggagtctgctatagaaaaggatcactgtggggcagccaccctggacctcaaagaacctcccagagcctcagtttccttctctgtaaacagggatacagtatctccatacattgtcaatgtgaagattacaaagggaagcttgaacagaagccagcacattgcctggcctaagcctcaggcaaacttcatgatgcaggttttacatcagccccctgggctaggaccacagcgccagccagcttctcttcaacattctcaggacagtatgaaaggtgagagactgagaatagtgtcaacatcttcactggatgagggccatggccatatgggcacagacatatggggaggtgttgtagaaggtctccgaagatgtttccccaaaggcccagcagggtataggcttggagctgtttttctcttactggtgctggggctacactgtgaaagccccactctcttaggctgtgacgcagctgccacagcagggagactgatggccttccaggcagctgagcccatttgccatgaagagtgacttctcagggctgaaggatccaggatcgaacagatgaaatgcagctgagccgcataaactccgaaccctgcctctcagctgcccttaaattctgacaagctgcggtactaaaatgactcccgcgttgggcttcctggaacctctcgtgtcgcgttctcaccggctgccctcaccctataaacttaagctactgatgatgaggattttccaagcaccttatgttgagcctctcttaattttgtagtgagggaataagttgttttacatctttagaaaagcactataatattaattgctgcctttctgataatttaggacact

SEQ ID NO: 478219 - DNA, 783 bp, Homo sapiens
gacagcattaccaggtatccgaaacagagcaacatggcagacatgtggactgggcataggaggcagctgtggttgggattttggtttcaattccaggaaataaaaatgtatttgtgcagaaatgatgcctataaccaaattttcttccccccttgcctttcttccttttccctttatttactcttcttttctctccctctcttccttcctcttttcctctttcttctctcttccctccttctctttctccatccctccatctctctctcttcctctcttcctccttttcttcctccctcttttcctcttcctcccttccactctttctccccttcatttcttctctcccctttcctccctccctgccttcatttttttttcctgttaacataccaacatttaatgatgttcacaatgtataaaacactaggtgaggtgctaggcatacaaagatagtaacagtgcttgtcctcaagggaattatagctacagagacaaaaggaacatgtaaattgatgtatgtaaaacatgtgtgatagaatacaatggtagaaataagtgtaatctatttatatttgttgttataattcatatattttaatctgaaatctgttttattcttttgtggtttctaattttcatacttccttgattttcctttattttttatttttaaataaagaatatatatttttttcttttattattcttggtatatgttcccttttaaattccaatacctagtaccattaaattgttcagaagcattactcattttcaaaa

SEQ ID NO: 478220 - DNA, 753 bp, Homo sapiens
ggacatcctcatcacagtgcttacctcatcaatccagcaaggagagtctctagtgtaggtccacaggcaagatggagtctttaaagtataacataattatgggagtgacatccttttatctttgctatattctattggttggaagcaagtcacaggtcaggcctacgcacaggtgctcctcaaggggagaaggttacacaggtatgaacaccgggggtggaggtcctggggccaccttacatcctgtccaccactgtgacctacatatttcaaattttcccacaggtgttctagtggcaaagaacagtcagaagctcccacctcagagtgtctgctgcaaagctagccccttcgacttggagtcctcatctgttctcagcacttttctcccagacctgaacccgagtcccaccgctcatgtctcgaccttcgagaaaggagaagtgggaagagactcagtgctcatggaggaccgatcacgtgccagaaggttttcaatttattttgcccagacccatcagaggaatcacaatctaaggcagctatagctttaaaacatgcatgtcttaaatactatgagttgaaaatcaaaatgaatctttgatccatgggctacagaatgggtgctatattagcagacatgaaaacaactttcatctccttgtacatctccattagagttcttgggtgaccaggtgcagtgtcaatgagctgtaatgttttcaaaggaatctttttttctaagcagtaggt

SEQ ID NO: 478221 - DNA, 813 bp, Homo sapiens
tgttgacaagatgaatatcagttcaaatgaacatcttggaaagagacacagagaggccacagactgtggggagagagagaatcctattttatccacagtccctataccaaatactactctcacaaatccagaatgcgaatgggggcaaagtttgccttgtccaagcagaagctccaagagcctctgtatgtttcagccacaggaacagcatgtcccagagaggaggccgtttgttcagcctggatctcagaatgaagacactagagaaaatgctgccagaaagaagggatcggcagggccaggattaggtgaagggaatgagctgaatgcatttcaggcttataagcagttcccccggatctacaggcaaaaaagcttttcaccatccccacctcccccacgagtgaccaatttctcagcattaatgcatctgatggcaccgagccttagtggcctgagggaggacatggaacatggtcaactgagcatggtcgagtacgttccatctgcagatgagaatgtatattctgtggtcgttggatggagaattctgtagatgtgttttaggtccagttggtcatgttttaagtttaagatcagaatttctttgttcattttctgccttgatctgttttaatgctgttagtggagcgttgaatttccccatattgtgtggctgtctaagacgttttgagcagtccaagtcaaaagttaggtcaccaggagacccacaactccctggggacctgctggtcctctggacttgtcagagtcagagctggttgtggggtatgtctgtggttggactggtga

SEQ ID NO: 478222 - DNA, 829 bp, Homo sapiens
agtctgagtttgcacctggcccctattcacaaactgactatccatggcaagcattgagtgtggagcacccactccacagcccccaaagagctcagtgggcagagggaaccggacgtgcaaaggcacggaggcaggagagaacacagagaaatctgccaacaagtcccagtggctggaatatggagtccaaagtactgatggcagcagggattccactagaagtaaagatcagtttgcgagagggaaaggacccgaaaagcactctgagaaatttggctttgattcaggaagcaaaaaagaagtagcaagaattcttcattctgagcgttttagggagaaacgctggcacaataaagtgtgcaattttttcttgcacagacacaagcctccaggggtcccacagagccatgttctcacagtccggccacctccccaggggctgccatagggtgggactggatcccacactatttgtgccattcactgaccagagacctctccccaggatggggagtcatctttcattttcctgatttagctcttttgtcatgtaagatttcgaattgttttgtcatgttgcctgcaaaacatcctgtatatgttttattggaactgcatcttgccaatctatgaatgggaaaggataaactattcatgatacattatcttttatttaaaaatatggtatgtcttgccatttattcaagtcatcttttatatctgtttataaccttttgtaatcttatttatatagactgaagactaaacaaatatacatttaaataatgatgtaaattaactacatgtatttaaaggacagagaatttaa

SEQ ID NO: 478223 - DNA, 678 bp, Homo sapiens
aaaatcagaggcatgggtgtatgctgaataatctttcctgcttctatcaaagggcagtgaaagacgttgaagatcaatacaattttttttttatcatgagtgttatttttcagttgtctcaggacagttggataggacatctattgctgttgctttatcatctgccaacaatcccctcaattggattgcatggtcctgcaatgctgctgaccagaaccacttccactcacccttactccagccattggggtgggcacgtgaccagggcaggccaagtgcagttatcccaccccctggaccccatgattggttctgagacgggcgctggcctgacccaggccaatcagaatcattcagtggacttccgggcctctcaatttcctctgggctataggggttgtaaatccagacctggattcaaattccagtcctcacccatttcctgggggcaacttgtttgacttctttaaacatgtttccttatctgtaaatggggaaaataatacctcacagggttgctgtacaggttgctgtacagggttgctgaataagataatataatagacatcttatgtatgttaatttagaaacaggttttcaggactaattacttgttcataggtcaatcttccttactagtctgtgagcttcttaaaagcacttttgttccttgagtgt

SEQ ID NO: 478224 - DNA, 1136 bp, Homo sapiens
ctggaaaactgggttgacactcctgtcaatgcccatatcaataccactttttctaatagtacttgccacccagctttgtgtgtggcataagtgcacagtgttgataaagtctgcagtagtgcacagtaatgtcctaggctgcacattcacccaccactcattcactgactcacctggagcaaattccagttctgcaacctctattcatcataagtgccctcttcaggtgtgcaacttttttttatcttttatgccctgtttttactgtacattttctatgtttaggtgcacacatacttatcattgtgttacaattggctatagtattcagtacagtaacgtggtacaggtttgtagcctaggagcaataggttataccatacagcctaggtgcgtagtaggctctaccatccaggtctctgtaaatgcactctatgatgttcattcaatgatgaaatcatcttatgacacatttctcagaaccttttatttggctgtatctgtgttaccgttgatctggctacataagaatgctggaattcaaggtttttctgtagattcttcagctagatgatccaagataatacaagtaagcccctcttctgacaataggttttaatattaaaacatatattttatttatttattctataaaggatttaagataacttatacagaaaaataaaatatgtcatagtgggaacacaaaatagatgtaaaagaagaaagaaaacaaaacaaggcatagaatgggttaagagccctccaaatgataagtaccattttgagattcttcatatttggatttccagataatactgtaacctttattaacttatttaattataaactatcaatcatcaagataattgaagtttgtcttaaatgcacaaatggcttagagaaaatgttcttatagaaatagactaaatttctctacaaatattctcagatgggaagtgttcagaaggcactgatcccaccttctgctgagttgttggaaaagacaaatgataactactttgggtacaactatccctcataacagaaggcaacaggcccctttgcttcttgttggaaaattcaactttaaatctggaaagacctctgttacgaatggaatgtttctcccttcc

SEQ ID NO: 478225 - DNA, 661 bp, Homo sapiens
ttttgttttctaaatctatgctggcatggtgtctggaaagaagaaatatgggttccgacggggtttagggaacagaaactggcacttgaacaccaactgtgtatcagacacaaagctgggcatgttcacgttcctctccttccttctcacagcagctctgaaggaaagatgtcacagtcattttattgcagataaggaagagaagcttggagaggctgggcggcctgctacagtcacacaggtggcaagccacagaactggaggtggtgcatctgagccagggcccagccatgatgatcaccaggcgctccctggaggaagccaggccgctttgacaacagcaacaggctcaatggtctctgctcctgtagcccagggaatgacagggggtctctcttgctcagggtcatgtgtccctttccttgaccccctttccttgccaggacttgtgatccaatgtgagaggtgctgggtccagtttagacttgaaatgaaaaggtggatttgaaaaggtcttgaagaaagtgttaaacattgttaaagagattgaaaatgagaaagagagagaaaaaaaaaggagagagagaatagtcactttgaccagagaagggggacgcagttgaaacgcagtcaactccttatttttgtatgcattgaaaat

SEQ ID NO: 478226 - DNA, 484 bp, Homo sapiens
tttggagccaccgatattttccatgctcatcacaagggagaggggagctataatatttggacatcacaatgagcgtacatgtgcacaacatgcagctattaatagaaacaaactcttgctgtttatttatgacagaacacacgcaggacttgaaagatgttactaataatgtccactacgagaactatggaatcagaaaactggcagctgtgacttatcatggagttgataacaagaagaataaagggcagtttgctaaacatttaatgattacccttaatattcgtgacaggagccctctggcacaaatggaagaagaaagaagggagcaagtagctaaaattaagaagatggagatggagatggagcaggtgtttgaaatgaaggtcaaagaaaaagttcaaaaactgaaggactctgaagctgaggtaatcagtccaatattccagctcttagcagacattgtgttcctttttaaatagta

SEQ ID NO: 478227 - DNA, 882 bp, Homo sapiens
cccagcggatggaggggcagtacggcactgttccccagggcccgcgaacaaacgttaacaggctgaatggtacagaatttctgtttggggagatgtcatgcctgctactgaattgccaggggcaattgaatgacttaactggagtcatgcaaatggaaggcacaggatttgagcccatcgcaaacccagcaggaccagtgaggcacagctggtcaaggaccacagacggcatcaactccctgatggctacagagggggaagatacaggcctgtcctcagaacatcagcctggccattggaagtggagcactggattaagagtccccagtgacctcatcatgtccttgatggatgtgggacctctctggagaaaggcagtgtgggagagctggggacataactcccagtgggcaccaggaggcagtgcagccccagcatcaggcccttcccacaggggagccctggcttcagcagctgcagaggcagtaaactcctggggctagatcaacgtttttggattttaagaagtaaaagacgttttgagggtcatgaacttggaaaagagccagactttcctgttcaaggtcttgacccctgttccagccccacttatagccaaaagtaggaatgaagatggccttgtggttttaaggctgatgccctgtcatggcaaaaagaggcagaacggatgccttgtgttgtggagactcgaaaaggggtggtggcctgaggctgtcatctgtctcctgaggactggagagagccagccttcccttcggcatggcctctgaggagaggtcagctgttgcatactgtggggcctgcgcaggcccagtggggagggcgggggtggcctggagcccttctccttggcactgcccc

SEQ ID NO: 478228 - DNA, 726 bp, Homo sapiens
gtcttgttttcaacagctttatatgactgcaggcctgacccaggccagaggagtggagaagcgcagcactgctgtcacctaactgagctcagaccctcaagccagagctgctctgaagagcagcggggaagggggcagccagacggatgttcgcctgccagagagagaagacacagagggtccttggtctctgcgcctgcagcagcaggtcctccttcaacagctcagagatgcccaaactgctcttagctggaacgaattacttcttgccaggcttgaaattcgtttcagtacctgttccacctgcccagtttgctctgacccagagcgactctgccttcagacctcatccctgggtcttctcctggaaccagactcttgcaggccatttgctagaccatccgctcccctggcattcactgctttgctggaatacactcagaagtggtttagctcctccagaacgaccaccttctcactgccctgtccagtgcctctgctctcgcagagttcaagccaaaagacaatgggatcatctagccaggtgtttcctctactattgatcacctacagtcaagcactgttgtagacatggagattaagaaaatttgtaaagatttctgccctcactgttgacttgtgccatatggcaaattagtttatttcaatatggttaaattgctttgctttttgttattattcacccacacgatcagagctggcacc

SEQ ID NO: 478229 - DNA, 763 bp, Homo sapiens
ttcctgtctggtgccctgagctgccaggagaggctccagccacctgagacccggaactggaatatgtggcatccatgtttgaaaataagttggactttatcataccagaagcagggcttagtcaccctcaacacactgtccagttctgcacctcttcccagtttttcaatctggttgatctagatatctgccttatacaactgcctcctggtgaccacttccccgtgggacatatagatgcctgcttgactcacccaactgactcccacaccccacagggactgcacagatgtgccacagtgacacctctgttacagtgtgcctccacagagctggggccagctagttataaccccatcaccactaacaatagtaatcacttcaatctgagctctgcctttacaaagcactggggtgcctttgaccatcgtctgaatcagctcatgcatttaataatccacaaaccacgtttttcatattcaagtcatcttttctctcatcattttgattgcctttcaaaggtataatgttctctcaaattctgttatgtagaaaacatatttttcagaaatgttgtttgcatttggctgttgatggtctgttgtgtagggagatgttttctttgattccttgtgtaaagttctgtcttttgaagtactgaatcttgtcaaatgtctagtgattttccttcatttgcttcctcttagagagagaagcctttctttctcaagtatgagtagcaatggtgatttcagtccaacat

SEQ ID NO: 478230 - DNA, 578 bp, Homo sapiens
acatccgtggaaaaaagttgtcttccacgaaacgggtccctcatgccaaaaagacttgaacttggactggaacttacaccatcagctctcctgattctcaggcctttggactcagtctggaactctaccatcagctctcctgattctcaggcctttggactcatttcctcatcatcaaaatcatcatcatcatcttcttcatcagcagcaagttttacttttttctgtggcaccttgctaccacctccaggggcaaatcactttccatatatacttaagagtttcacatcctcctgttcttcatcttctgcctctgaatcttcctccacagtgactaagtgctgtccactaatatgcactggccctgaaccacacttcaaccatcaagtttctgggtccttaatgctgagagctggaaaaaagcccctactccctgatattccccctgtggggagacagccttctggactgcccccaggagtagccctcttcatcgccgtctgaattgctatcccgagaactttttatgtgcagacactttgtcatgaatttagggtttatagggaagtaaaagaaca

SEQ ID NO: 478231 - DNA, 788 bp, Homo sapiens
ccagttcagaaatacctacattggctctaccggaaaagtcaaaggcagctcatgctggtttgcctccagtcttcaaacagctctggggacatagagagttgcctcagctccaggaagccgctacaccagggataatgagatctgggcagcaggcagacacctgcaatttagagccactagggtcagccctggaacaagcagaatgacacggagggctgctcttgcaactggtgatcccggagaagaagaaatggattgccaggtggacatgccggtagtttatctccagtgtgtggtagcactccccctccaggagatgagaggatacctggagcccctccatttcaacccaaaccttgccttcaacgctgatgaaatgcagggctccggcgtcttttatggcagcagcccaacaggaaatctgactaaccaacaagtaattcttttgcacctctatggaagaaaacattctccgagtgttcagggagaatccaggcaggaaaagcaaagccatcctcatgtggtcatgggagaacaattaagtatcaggttgtgtgatcctgaatatgcttctctagcacgtaaaacaccagccggcctggtggaagctccaattgttgtcctctcctcttacagcttctttctaagtagaaactctgcattaaattaattctccccatacagtttgatgagaagcagtcagttacccagagcatatctttcctcttagcctttaaaaggggaacacaataaaatactgactctattaagataagaagtagttttgt

SEQ ID NO: 478232 - DNA, 545 bp, Homo sapiens
aacaactctggacgcgccatctttatgaaccgtaaaagtcactgcgaggttaagaatcgctacacagcacattgtctctgccctcaagacctcagttgggtgggagcaaaaacagacatgggaaaaaacagtttcaatgcaggacccatggaaacaaatcctgcggagagcctgagccaagtggaatttgcctctggagagctgtgcctgcctttcacaatggagttccacacaggcaagttctttctccctctcctccatgtggaccggataaacacaacatccctgctctgccttactcagctctattgctcagtccagagacatgttgttgttatgagatctataatcaacagccagattcgactttctgtatgggattttctatcaaggaaggttgtttatgtcttaatcaactgtagcatgcaactcctgccaacatatgtgtcactgtgatttccatattgaagacttcccttcctcaaaatgatgtttatttagtctgtacactttgtttagattctcctcatggaaattctggtttt

SEQ ID NO: 478233 - DNA, 653 bp, Homo sapiens
tgagaatctgcgccctgacgaagatgcaaaattattcttcatacagagggaagcctcacttcctgctgggggctctgggagaagtccacctcacaggatgccctgctctgaacagtggtggcttcatccgagtaagggggcagccctgccagtttgcaggagggagggacaactgtttccagtacccctgtccctccagtagtttatccagaactgcttccagtacccctgtgcctccagtagtttattctgttagtaggtgccaaagccaagacaccagtctgggcagtctaaatccagaaactgaacacggagctaccaaactgtgcacaggcagaatccaggttggagagaatgactgctatttccaaagtgtagtgagccttcttccaactactaatgctattgtttccccacctgagcttaaagggcctccaagcagagtcagacttttggagaggctttcgttttgccatccagcaatgtgcaggttggtgcagacccatacagattcgccaccactcacatactttggtgccgcctgctcagacacgttccctaagcgctaacaattatgtgagagggaaataaaatcacaggaccccaaactcactatgctaaagggacacagattctaccgtgatttgtgtttc

SEQ ID NO: 478234 - DNA, 552 bp, Homo sapiens
agcgtgggcgttatggccatcatgaacatgtcacagttttatgttcttggttttgtgtctagaattggtgagtttcttggtctcgctgacttcatgaataaagctgcggaccctcacggagtgaagctgcagaccttcgcagtgagtgttacaactcttaaagcagcgcatctggagttgttcattcctcctgttgggttcgtggtctccccggcttcaggagtgaagctgcagacatttgcggtgagtattacaactcataaaggtaatgcggacccaaagagtgagcagcagcaagatctattgcaaagagcgaaagaacaaagcttccacagtgtggaagtcgaggtgggttgctgctactggctcgggtggcctgcttctattcccttatttggccacactcacatcctgctgattggtccattttacagagcgctgattggtccatttacagagtgctgattggtccgtttttacagagtgctgactggtgcgtttacaaacctttagccagacacagagtgctgattggtgcatctacaatccttt

SEQ ID NO: 478235 - DNA, 755 bp, Homo sapiens
acaaccactgtccaaggttaagtgagccctgaggcaccagaagatctccaagaaagccacatggaaatcataaaatggagctgaatggaggaaaagagaagccacaccctccagaacctgaccagagtcgtctagccaccaggtccgcactttcctgccttctccttgggtacaccgccccgaagacaggatgtcactgctggaagcatttgccttctcctcctgggctcctgagttgctttggacttggattatcaaaagtggagcagttccagctatccatttccacggaagtcaagaaaagtattgacataccttgcaagatatcgagcacaaggtttgaaacagatgtcattcactggtaccggcagaaaccaaatcaggctttggagcacctgatctatattgtctcaacaaaatccgcagctcgacgcagcatgggtaagacaagcaacaaagtggaggcaagaaagaattctcaaactctcacttcaatccttaccatcaagtccgtagagaaagaagacatggccagagagataataataccactgcctctcaacgctggtgagaagtgtgaaggaagtaatggaagaaaacgtttagaacaatgttagcaagtctacaatagatgtttgatataacgttaattttaaaggcttatgattacacataaaaatgaactttatttaaaaacacccctctctgtgacatagtgttcatgagatagttctgaagtccaaggttcatgggga

SEQ ID NO: 478236 - DNA, 921 bp, Homo sapiens
ccaagaccccagagaggaaggcatgctgttggctctagctctgcttctagctttcctgcctcctgccagtcagaaatcttccaacttggaagggagaacaaagtcagtcaccaggccaactgggtcatcagctgtaatcacttgtgatcttcctgtagaaaatgccgtctacacccactggtacctacaccaggaggggaaggccccacagcgtcttctgtactatgactcctacaactccagggttgtgttggaatcaggaatcagtcgagaaaagtatcatacttatgcaagcacagggaagagccttaaatttatactggaaaatctaattgaacgtgactctggggtctattactgtgccacctgggataggcacagtgattcagacctcagaattcattccatgtcccctctggatattagactgataatttggatcaggtctcagcatgggccattgaggaacactacagccctgctgagagataaaaaggattatccactcaaggagttcacacctccgggccgacatggagaacgtgcctagaagcagacttggagggtgctcagtggtgggttgtggaatgtaagcctgaagaagcagagtttaattctacgggggtgctttcataatttagtaccctgacagggctcctggtgttggtccttagacactcctgggatggctccctggaaacatggaggaaaccttggtcgcatgacatgatacggagatgttggagctgcctggacacagttacagagggaggcattaaaaggcttcgagagaaccctaaaccttgaatcagccttatagtcctggctcctagaagagtgtttctcaaagtgtactccacggaccacctggataagaagcacgtgaggcttttaattaaaaaaaaaaaaaaaagtacaggt

SEQ ID NO: 478237 - DNA, 1592 bp, Homo sapiens
acatcacacactcgggcctgtcatgggggtcaccaccttccactcctccccagctctctccagtgtgtgctgcaagacctgtgtgctgcagttgctcacacatccaactctccctggggagtgaatcagcagcccaagcattgtcctagtgaactgcttccaacagtccctgacctagaatcacaagaggcttggggagtggggtggctccgacactgcaggcctccagaaggacccctcaccgacaccctgtctgcctccaccatgtccatcagggtgacccagaagtcctacaaggtgtccacctctggcctccgggccttcagcagctgctctcacatgagtgggcctggtgcccacctcagctccttaagcttctcccgagtgggcagcaccagcttccgggctggcctgggcagaggctatggtggggccagcagcatgggaggcatcactgccgtcatggtcaaccagaacctgctgagccccctgaacctggaggtggaccccaacatccaggccatgcgcacccaggagaaggagcagatcaagaccctcaacaagaagtttccctccttcattgacaagatacgtttcctggagcagcagaacaagatgctggagaccaaggggagcctcctgcagcagcagaagatggcttggagcaacgtggacatgttcgagagctacatcaacaactttatgcagcggctggagactctgagccaggagaagccgaagctggaggcagagcttggcaacatgcagaggctggcggagaacttcaagaaaaagtatgaggatgaaatcaataagcatgtgggtgaagcttacatgaacaagatctcggacacgtctgtggtgctgtccatggacaacagctgctccctggacatggacagcatcatcgctgaggtcaaggctcagtacaaggtgatcgccaaccgcagcctgactgaggctgagagcacggaccagatgaagtatgaggagctgcagatgctggctgggaagcgctgggatgacctggggcgtacaaaggctgagatctccgagatgaaccggaacatcagctggctccaggctgagattgagggcctcaaaggccagagggcttccctagaggccgccgtcacagacgcagagcagcccggggagctggccatgaagggtgccaaagccaagctgtctgagctggagaccgccctgcagctagccaagcaggacatggctcagcagctgcggcgaggagagctggctggagtctgggatgcagaacatgagtatccatacgaagaccacctgtggctatgcaggtggtctgagctctcctacgggcgcctcacaagccccggcctcagctacggcctgggctccagctttggctctggcgcgggctccagctccttcagccacaccagctccaccagggccgtggctgtgaagatcaagacccgcgatgggaagctggcgtccgagtcctctgacattctgcccaagtgaacagctgcgacagcccctcccagcctgcccctcctgtggctgccccagagccggggagggaggccgctgtgcattagagtatccaatat

SEQ ID NO: 478238 - DNA, 571 bp, Homo sapiens
tcaaggaaggcttttggaatgtagagatgccagagcaggaggaagagggcattgggggcaatgagcaggaagggaggctgagtgaggcacatcaggagtgcaggaaggtgactctgggagatggaggggttgttctcagagcagagtcctgtttctcgcctcctaatcagacggcaatgcaaaagcttggtctattgagtaaggagacattaacagacctttgtaagcagcgggaaggatgctcaagctctaagacagcccaggtcctgcatccaaggaggctctgcataggtggagcagatgacagccccagcaaagaccctagcagacagccagcatcaaccaccacacatgagagtgactcccaaaatcaccagcagggagccggcaggtctggggttcaaatccagacactctgcagtgctcaagtatggccagcggctgttgtaatggagggtgcagacccagaagcttttcgataaataggtataacatctacattctgtaccatgaacattatttttctatttttaaataatttactgtttagtctcagtcaggggtggccacc

SEQ ID NO: 478239 - DNA, 607 bp, Homo sapiens
agttgcaggaaaacaagctcagggctcccactgattctatattatgaggaggctggtggggctgagaagtgggtgggcatgggtgctagagaagtggcccatggccagatctagtaggccattttttggccattgcaaggacgtggaatttaattccaatcatgagagaaaaccacttgagggttttgggcaaggcatgacaaggtctgatgtgccttccaaaaggctgctttgtggggaggcaaaagcagaagtgtggaggcaaaagcagaagtgtggagggagatgcctgggtccactgatacgtgaattttctcctgcatctgccacccctgaaacagcaaaactggcttctacccttcctcctcctcctcaacctactcaaagtgaagaggacaaagatgaatacgtttatgataatccacctgtacttaataaatagcaaatatattttcttttccttaagattttcttaataaccttttcttttctagcttactttattgtaataatccagtatataatacatataacatactaaataagtgttaatcgaatgtttatgttattggttgttttcataaatataattttttaaatgaagatt

SEQ ID NO: 478240 - DNA, 551 bp, Homo sapiens
gcatctgtgatgcattgccaatatgcaatatgggcagatctgtggaacgctttcctcaagatccaatgatagctggacaagtcagtaagcccttgctgtcagtgcggagtgaaatgaatgcggagttgagaggtgaggacaaggctgctacttcagacagcgagctgaatgagcccctgcttgcgcctgtggaatcaaatgacagcgaggacactcccagcaagctcttcgttttcccctatacttgggctagaatccaagttccagtgtcttcttcgatgctgctatttactgagcacgggagacaagaagattcctcaggatttgcgcagtttaattcagagaatggctttctccttgggaatctcaaggttagcaactccaaagatgtgagttcaagtcccaagcttcataagaatagaaattctgcctatcttgttcactattgcattcttattgcctagaaaggtgcttagcatatagtagttgctctatgaatatcagataaaggaaatttgacctaaactgatttaaatatacattgttatgta

SEQ ID NO: 478241 - DNA, 1033 bp, Homo sapiens
agagagagggtctagcagacactcaaccacttaccagatgtccctgagtctactgctcaaagtcaagacagtctttccttccagggacagtagtatgaaggagaatttgaacctcagcataagtgacttgcccacgggaatatgtttgatttgtgcaagtggagatctgaacacaaagtatctggatctaagcactgtcctcttcttgccccaaaacaagacctccttgccgcttcaccttgctcatcctcagcagagcctgctggcgtggaaagaatgtctgagaaggaaaaagagctacgctgcggagactgctttttcaagccaggttcccagccaggacattttcttctacagtttcccagagatcaagccagcagctgcttcctgccccttgctgagctgtacctgggggctgatggttttactgttctttgataggttggaggaggggggcttacagcctcaaaacaaccctgctttccctatcacggggccagagggagtggagctgcttctgaatgcttgctctgaattcagccttgctgagtgctactcaaggtacagattgccagcccacacctcaggaatctctgatccagcagttctggagaaggtcctgatcatttacattgcttacaagtttccagatgatgctgatgctgctggtccagggaccagaatttgagaagcactgaccaagaggatgaatgatggaatgtggacagagtatagtaacattattttagaagattgttgtgctgcttcaacaggattatgtgtgggtatctgctacttggtatatttaagccttctcctgatcacaacgcattactagctgtcaaaagattggcagggagatctggaccaaattgaaaacagtactgaccaatactatatcatcatttgtgctcaatcagagactttggttagtttctctgccagctctcgaaactctgtattaagtgtacgtaataaccccttaggacttagaaacacggacttccagttaacagaagaaaaagtggtcatc

SEQ ID NO: 478242 - DNA, 539 bp, Homo sapiens
ataatctaactcatgtccgtccagtctacagcaaaaatatttatatttattgcgtgcttgaaaggaggggagcagggaggattttcaatgggaacccctttaaagatggcaggagtgagaatgacctttgatgtggatggttggcagacacccagcaagagacccctcctcgcccccagagacttccccatggagctgcatctcccagcagaggaaagcccaagatacttcacaaaagcagatatacagatggcaaataagcacatgaaaagatgctccacatcatatgtcatcagggaaatgcaaatcaaagcaatgaaataccactatgtacccaggagagtagccaaaatccagaacactcacaacaccaaatgctggtggagcctcaagctcaaccaccatgctgcccaccttacagtaattcagacagaacacagaaatcctgatttctagatgtattcacattaagatttttttttcagaaaagtactgtaccattagcatagagacagaagccttaataacacaaaattatc

SEQ ID NO: 478243 - DNA, 521 bp, Homo sapiens
gagggctgccagcatgctgtcacctctcacaaggctgatgcagaaaaggactttgacaaaattcaacatccattcatgctaaaaactctcaataaactaggtattgacggatcatctctcaaaataataagagctatttatgacaaacccacagccaatatcatactgaatgggcaaaagctggaagaattccctttgaaaacaggcacaaaacaaggatgccctcaaggtctcaccactcctattcaacatacaattggaagttccggccagggcaatcaggcaagagaaacaagaataaaacttacaagggatgtgaaagacctcttcaaggacaactataaaccactggtcaaggaaataggagaggacacaaacaaatggaaaaacattccatgctcatggataggaagaatcaatatcgtgaaaatggccatactgcacaaactaatttacagattcaatgctatcctcatcaagctaccattgactttcttcacataattagaaaaaactacttt

SEQ ID NO: 478244 - DNA, 533 bp, Homo sapiens
tactatcagccatggtcaaccacaccatgttcttcgacgttgctgtcgacagtgagcccttggaccacgtctcctttgagctgtttgcagaaaagtttccaaagacagcagaaaacgttcgtgctctgagcactgaagagaaaggatttggttataagggtccctgctttcacagaattataccagcatttatgtgtcagggtggtgacttcacgcaccataatggcactggtggcaagtccatctacggggagaaatttgaagatgagaaatttatcctaaagcgtacaggtcctggcatcttgtccatggcaaattctggacccaacacaaactgttccgtttttcatctgcactgccaagacggggtggttggatggcaagcatgtagtctttggcaaggtgaaagaaggcatgaatattttggaggccatagagcaatttgggtccaggaatggcaagaccagcaagaagaccaccattgctgactgtggacagctctgtatcctagaatctttgtgcttccactgcaa

SEQ ID NO: 478245 - DNA, 1411 bp, Homo sapiens
tgttctagcagccatagggggcagggtcttctgcgaggggcggttaagtggcagggaagcgcagatcccgctgcacgccgcagcagcccgggtgtggagcgcgcagagggggcacctcggctgagtttcgggcacgctgcgcacccacgggaggatttcagggaggcggtggccaagtcggggagcgcatgccggggccgtactccctcctgggacagcgagccttccgaaagtccgagccccaagaaaagttgaccctgggtctgagagtaagagggaggagccgagagcatggactagagaggcacggagcctcccgggccctgaggctgccgcctccctccgcagcagccacctcctcccgccctttacaaagacaagctccttgctcccaggagtcggcctgcccatccctgaaatgtgcacgtgaaggaggtagccttggtagccagggaaggtgcggtgcccgtgccggggccgcggggcgtgcgggagtcctgggcgtcgccgcacctgccggtctcctctgggagtcctgggccgaatcctcagttcgggcgccctctggcgccgccgtggggaaatcatccggcgccaggcgccatgccgcacaacactgtggagcagccctgccggcggggtgggtgcctcctatctaaggcactggaccaggggctctgccagcaaacatggttcttccatcagcgtgtcggggttgcagaacctcagggcatggtttccctcggcaaggtgttagacgccaattatcttcccccgacagacttctgtgagacttcaaagggaagagaaaggaggatcccaagacttccaactccctcttcctccctccctacacacgcgcgcacgctgctaagacctgaggctttagctgtcaaccctgcttctgtttggggtcatttgctgacacttgccattaactccttcctgtacggctgccagagactcagaaaggtggaatcactcttgcctgtgcccaccacaccctctttggccatagaaattactcctccccaatcctccttagcttctgttcctccctgccttctcacaccagatagctttttccctgaatgtctttcttcttttactggatcaacacagtaccattacaccaaaaatatggaagacttaacaaccaaagttatactactgctttttatagggtgaataatttaattccatgttaattaaaaaatatatgtatatacctttatatagccatgcttagaacaaacactggaagcacatacatcaaatttagcagtggttatccagaggtggtaacagcatgtgtgatttatctcattttaggctttcatgtgttttacactgctgcctcttttatctccttctgctcttttaaagcaagcaaaggaggaaaatacacatc

SEQ ID NO: 478246 - DNA, 1409 bp, Homo sapiens
cgacgacaaaccatgtaagatgacaaaggagctggtgaccatgatcctgaccctggcagaggcatcacatgaagcaggctgtgccttggaaaaatggtgtggtcatactattaggctgaataatgaggatggaagcaaaagtccaggaggccatggaggagacagtggtccagataatttccatcatcagagcgttaggctttcaggcagaaaacagcctttcaaacaaagtcccaccttggctcatggcacatatagaataaagatgatttttcacttggacagttctcatattcggacacttcagtatttgaatagtcctctggtgcctactccacttctccagactgggagaagggagagtattatctcccttcattaccatctggccaggtgtcttcccatttgtaatcccctgattgggtagtgttcttcccctctgtgtgcatctagtgaactgagaagaatatattcagtgtcacccagctgtttattccattaaattctcagtgtttgccgtatattagctgaagaaaaatattaacatcctgtggctggattgtaagctattatagtatattggttacataaatgaagtgtacagtggaaagagattcaaactggtgatcataaagcatgaagaaaaacattttaactgtgtcattagtattgtaatttattcattgatgcttggtttgctgctgatatgttcgtaagtaactgcttggttcatacctgtctctactctgagaatatggtgatgagaagcttccagttgtctccagaaaagcatccttagcatcaatttgaaataaaggtgtattaggttaataaaggctaagctgctataacagaaactcccctagctccccgccaccaccaaatatagtggcttaaataagattgaattttatttctctttcacatacatagatagtgggcagttctgctccacaaaactgtcgagggacttagatttatttcatcttgctaatatgtcattcctaaaatgttgtctttatttaaatgatcaaaaatgacttattgctttgcctggttttaaactcttgagaaagagaaaaagacgaaaaacaaggcaaataattttctttctgacaagtaatgtggaaatcgttcacatctctgaagcttacatttcattggcaaaaaagtctttgccacatagctatacctaactgcaaagattgttaggaaatttagtctctagctgggaagctatgtctccaggaaaaaagtgaagataaatttgaaaagacaaatatacctcacacatccaatttgaaatcaattacaattaccattagctctataagaccgtataacataatggttaagagatctagttctggagacaaaaagcatgaagtccagtttgggctctaacactt

SEQ ID NO: 478247 - DNA, 975 bp, Homo sapiens
ccatcatagcgtcagggtccgggaagcaagcagggcggctcatggacgaggagagcagtttgggtgtgcaagacaaggtctggattcaagtcctgctcagtacttaccaggtgggtaaacttgaggtactttacttccttcttggaacctcttttttttttttaatcttttctgtagaacaaagctctgaaatcaaatgggagaaaacattgaaaatgttaaataaccgaatggaaattgccgcagtaattccaaccttcagcaaccaacactctgatcagtcagcaaccatccgcatcaaagcaagaccctccaccagcaaagattacaacttgcagaaggctcagatgatcattggcatttttaaacaattaagaaattttaaattaagaagtgccacgacaggccactctccaaaagctggagacctgtgggatcccgctggtagggtggctgtgtccaaatctgacggcctcaaaaccagggaagcggatggtgtaactctcagcctgaggctaacagcctcgagacctgcagggactgctgatcaaaagtaactttgtaactttactttgcaaagtaactttgtaactttactttgcaaagttactttgtaactttactttgcaaagttactttgtaactttactttgcaaagttactttgtaactttactttgcaaagttactttgtaactttactttgcaaagttactttgtaactttactttgcaaagttactttgtaactttgctttagcaaaagtaactttgtaactttggcaaaaatctttgtaactttctttgatggtgtcctcagcaggacagatggtctgataccaggtactccattgagctggaagcggaagttatcttcaggtcatatttctcaagtgaatgctatttcctggtgaattctgaagacccagtaagactagattttgaagataattgagtgctcacattgggatttatgc

SEQ ID NO: 478248 - DNA, 587 bp, Homo sapiens
agtgccaaggtttgaccagggtcaaacatgagtgcacagcttgtagatgcatttccatccagtgagggtgtggttcagtcctcagcacttcagctcttctcagtgttgacaggcatctcctatgcattttaccaaggggtagggccagaactcaaagtcaagtgccagtggccttggagatggggcccattcgaatccctgcccctcaaagcaaggtgtggcttgttatcaagtctgggtctggcttctctggactgtgacacagccccctgttttgaaactccatttttccacacggggttaatccaaagagcctgctgggagaagagaggcggccgcaagccctgccagcatgttacacgctgcttagcaaccggtgaaaacaagcaggaagggaaaatgagcctcaggctgccggggaggagtgaagaagggggagactttggtccctgcctaatctggttgggtttgtgccgcgatgggcatgcgctaatctgaatgctttccccttagtgttacctggtccctgtgctgaggagatgccaggaccaacaaggaagatagaaaatgaaaagacctcatgacct

SEQ ID NO: 478249 - DNA, 547 bp, Homo sapiens
ttgactgttttgtttgtttttgtttcttgtttttttttttgtttttgttttgttttgtcatgtttactacatcagcagccatgcttagcgatccctggggacttaggaaggggctggggagagagatgttcagctgcaagaccaccgaaggtaaccaactggaagctggagcagctgagcaaagtaagagcagctgggaaataactggaagtgcttatgaagatggtatgaggccttcaactgactggataaggtacagccacattatggatggtaatctgctttactcagagtcccatccaaaaaatacctgcgtagaaacacctgtgatgtttgaccaaagatccaggtctctatgcccttcccaaaccttcagaccttcagacctagcttggtgcttttccttgagcatcctagctcacatcctagtgagaccgctcctggggctgccgctgctggcacagatgggtggggctcatagcacatccctaaaccaggcgctgtgctaggtgtttccttgtggattctttcatttcttattacatct

SEQ ID NO: 478250 - DNA, 618 bp, Homo sapiens
tccctgacactcagggcgctttctgcgtctttccttagacctgttcaagagggaacccgaccattatgcagcaggggaattgtgtagtgaactgcggtgttcaagtgccaaggagcaatgttcagtcaattagccattatgatgatgatgatgatgatgatgatgatgatgatgatctgatgcttttaaaaattgtttgccttaaatgttccgtgttccataaagtgttcaaggagtttacaaaaatagcaaacaacataaaattaatagataatgaaactgagcccacctctgagtgggtggtcacagcctgctccctgctggcaagggatgctggggaaggagttcctacttctggctggaggaggtgggactcacaatgtgggaaattcctccagcatagggccacacggccaggaaaagggaaaggtggaagcggaacctggggccgcctggttctgagagcaggtgctgtattcgggcctcgcgtggaagtgagtgttagttctgtttccctcaccaccctctaatggtgcttggatgtgtatttcgatgctgttttgcgatagttcatgaattgggagaaagtataaaagcctttgagaatctgtcctttta

SEQ ID NO: 478251 - DNA, 517 bp, Homo sapiens
cctgaggaaaggcttttagggctatgggagacccaaatcagtggagccttatttgtctctgccgtcagggagctgagagagaagatccagaacactggtttgaggtttgggacaaaaggagcgctggaccaggtgacattccatgtcgggaagatcaaaggccatctgagggccagggatgcccagtgctcagtggagacaagcaaggagagaagaggcccaacactcacaagagagaggtggaccagcagggctgctccataagaggttctctgttacctgacaagggagtttcaggatcaagaggcctcttgggagacagccaagaggcaagtgtaaaaagagcagagatcagctcaagccaaggtcttgaggtgagcaccagcatggaaggctcaaggagtggaaagtctgggctggtcactaagggccttatgcatcgtgaggggatttgaatcctcaggattcaattcaaatggatgcagcaaagaatgacacaattaatgatacatctttt

SEQ ID NO: 478252 - DNA, 483 bp, Homo sapiens
gcacgtccaagtcgagtccctggttttaaaagtgcctgctcaacacgatgtggaagctgccaaagccagggcttccaccctctgaagccacagcccgagctctacattggcccctttcagccacggctgcagtggctgggacacagggtaccaagtccctaggctacacgcaacacggggaccctgggcccagcccacgaaaccactttttcctcctgggcctcctggcctgggatgggaggggctgccgtgaaggtctctgtcatgaccaggagacattttccccatggtcttggggattaacattaggctccttgctacttatgcaaatttctgcagcaggcttgaatttctcctcagaaaatggatttctactgcattgtcaggttgcaaattttctgaacttttatgctgtttcccttttaaaacagaatgcttttaacagcacccaagtcacattttgactgctttgctgcttagaaa

SEQ ID NO: 478253 - DNA, 614 bp, Homo sapiens
tcctcatgtaggtggttcatggaccacactttaagaaactctgggttgagccggcctccaggctcaccatgtcattcactatgtctacagggagccaagattcatcacaacgtgactggaatccccagtgtttagcacagtcctggccttctagaaacctttgtcgaatgaatgaatgcatgggtcatggggagatgaaaggcagtgttactctttctctggggggacatgggaaggctgcttcactctcagatcagtgcactctcattcatgtgttgagtggcaggtgctggaagtcagagcatctgaaatgcaagctcctgtgccccttccctggacctcaggtctccaacattggggcatgtgatgaccatccagaaagtgtcatcagccaattggaaagtcatgaagcagacacagccctagactattctagtgggaaggcaagaacatgtgctgtgtccccgcctgctttccaacctaaggtagaggctgtcccaggcacaagagcactttcaggtcactggtgtagcttttccaaggctgcctgcctctgcaccatctctgggaagattccgaaactgccccattccagtggggtggcctaggggcag

SEQ ID NO: 478254 - DNA, 634 bp, Homo sapiens
aaccgtggtttttctcctctcaccagtcctgtgttctccctcaagaacatgctacttgattggtctgagtggtggctgaaggcagatgttttggggagtacagcagatggagcttgggtccccaaatccttttcagtacaagatggagctagggatgggaagagaggtggggcaggtggagtgcagggggcttccagctgtactgttgccctggccaccactaatgttagaggcaggcctagtgccaggattcgatgccaatgcccacataccgaaggactgacagagctgaaggtggactgtgttctgagactctgcaggtcactctgggctcggagactacccattgcatacaagaggagaagcattgctacttcagtgacaaaggccaatgggattctgatctgcagaaggcccttctctgccttaggtgtaagtcaatgtaagggtggagctttcccatccctgcctcctgattgaccgcgttacactcaaactcaaaatgatctcccttatggaaagtgattccttcgcagtaggatgcaaaaaaaatgaaagcctctctgtagaaataaatcacagtgctggaacttatttcaatactttagcatccctgaaaaataccctagctttg

SEQ ID NO: 478255 - DNA, 591 bp, Homo sapiens
atatctgaggcggtctcagttaatttagaaagtttattttgccaaggttgagggtgcttacctgtgacgcagcctcgggaggtcttgatgacatgtgcccaaggtggtcagagcacagtttggttttatatattttagggacacgtgagacatcaatcgatatatgtaagatgaacattggttcggtctggaaaggcaggacaactcaagcaaggatgtcttccaggtcacaggattctgaactttatcttccatgtcagagatggcagcctgagaaggacttgcctgagaaggactcggccgacattgctggctttgaagatggagaaatgagactgagccaaggaatgcaggtggcctctggtgctgcaaaagacaaggaaatggattctcccacagaccctccagaaggaatgcagacctgccaacactatgattttagtccaaagtttaactatgatgtgacttggtgtgaatttcttcatgttaggggttcactccacttcctgaatctgtaggtttatgtcttttgccaaacttgagagacattttagtcatttatttgggtactttctcagcctgctctttctc

SEQ ID NO: 478256 - DNA, 939 bp, Homo sapiens
tcctcggagctcccacatcccagagagtctgagcccggcacaccagttctcacctctaggttcaggctcatccttgcagatcttcccaacattcctgggggctctctggggacagagaatgggcccttcattttcctctctcctcctctttctcacagaggagcccgaacataacaggagggaagtccgagtttcttccttctctttaggaaactctcctctcaggacccgcggggaggctggctggaaggaggacaccggggtagttgggggctgcccagaccagcagccccttctccaccagccccttcggctcgctgagctccagtcaggccgcaggggtcctgcgtccatctccagcgtcagctcaggcaggcagcaccgtcggcccagccagggctcttggctgcagttagactgccacctggtggccaggatgatcattgcgcttctcagcctagctcgttgcttcccatccagtgtccctgttgtggaagctggagtcctgagagaggaagagcttgccagtcaaaggatctgcccaggaatctgcatcgtaggcccagtctgcgaatccctgtcatgggagagacaagagaagtgataggaatttgaggctccagttgaaactaaaagggagcaagtggtgaacctgcagccattgtgaaacctgtaggcgagggatggacagttcacagagtgagctgcttctgccactgccaatatcatacactcactgctgacactaatggctaactaaccaccaactaacattaactaacgctaaccactcactgctaaccagccactaacactaatcactaatgaaccaccaacactaactagccactaactactcactgctaactaaccagtaacactaaccactaaataacattaactaacactaacagctagctgctaaactaactggtaact

SEQ ID NO: 478257 - DNA, 1348 bp, Homo sapiens
gtggccttccctgctctcccacagggtgctgctaaggacctcctgagcttctctctacccttgtctatacagagggctcctgacacttcttctctgctctacacagcacactggggcccaagacaaggctgggggtagcaggagagaaagccagagctgtgtgagattagaggaggaagagcaggccagggaggaggctttctgcgggcgagggcatggctgggaggaactgaactaggagtgtgattattcagacacagaacctttgaagaggtaatcacgttaaaacgagttcactggggtgggctctaatccaacatgacggatacttgcttttactgtgtgatattcaggaacccagcccttcttcctgatgttacttctatagtgaaaatatggaactgcaacgaggcatccactgtgcatgtacaaggcagctcttataggtatggtcatctggagcatcctgagggcagagaagtggcaaatgttccaagctcagtgttactctcctgtaatgcgatccattgggtgactcaccatcatgggccctttgcattgtctttgtgggacttgggtgatgtcggagaaccgaagcaatcctatgcagctctggctagtgcttttgctgggatgctgaagaaggtgactaaggtggtttccaagaccctggcctggaatattcccactgcccttctctgtgagttattctcctctacggctcctgcatcttcagaacaaacaacagcagagcacgtgactgctggaaacgcccagatggctccagtcacaggatccctgcatgtccgggccagaatggccagcacagctgtccccttccctgttctcagtttttgattgaggacaagcactgtcgaggccattacacattatgactatgcattcttttttatacagccctcctttgttctggagttaataacccctttttaactcgcctgatgtctacttaaatgtcactcccccaggaagccttctgcaactctgcagccctccccacctcaccaaaattgcatgggtgccccttctgcccatccttcttcatactgcaacatcctcccctggtcttgtcctgtcttcccatcacgctgcaagctctgtgaaagcaggctcctgactgccctgcccagggtgtgtgaacctgcccaccctgcctccagaggctggcctaggccagaggactagaccaccacaggcctgagtgtgtcctcattcctgccctctcccaggacttagaactttctctttccaggagtgcaggagtactcagactgaacctgaattttatgctgcagctcagacctctgatttcatggatcgcttatga

SEQ ID NO: 478258 - DNA, 772 bp, Homo sapiens
gtccagtttcaggattagggaaaacttgccttgaaggtcagtttacaataggcttgagctcctgtgagaatcaaatgcaactgctgatctgacaagaagcggagctcaggcggtaatgcttgctcatctgccactccctcctgctgcgcagcccaggtcctctggtctaaaggaaggcagccaatacctctttccacattacaacagaccaaatgtttgcggccccctccccacccaaattcgtatgttgaaacttaaccgccgttggatggtattaggaggtggggcctttgggaggcaattagatcatgagggtggagacctcattaatagaatcagtgccattataagagagatccgaaagagctcccttcctccttcttgccatgaagtagatgcttgtacctacatatctcatcacctcaacgcagcagttgcaagtgcagactcttgccgatgtgccagtgactcaaagaccactgttgtcactgacatgattacccagaaataccaacacatcttaggaaagtttttgacaagagagagtttaatccttcctcgattggcaaagcagacattggaaagttgtgcaggatatgggacagttctttctagtgtgacctgccctgaatactgcaggacatccactatccctgaccctgccggataatgcaagtaacaccccagctccaactgtcatgatgatgaaaaatgcccccagtattgccaaagtggcccttagaagctggtttttcccttcttgaagagcacc

SEQ ID NO: 478259 - DNA, 520 bp, Homo sapiens
cccctcacactgttacttcaaaaactgaattcttgatgtttagatgtgtctggagtttgtttcttctggcgggttcgtggtctcgctgccttcaggagtaaagctgcagaccttcccagtgagccttacagctcataaaagtggcgcagatccaaaaagcgagctgcagcaacaattattgcaaggaacaaaaaaacaaagcttccacgctgtggaagggcatccgagcaggttgcagccgctggcttgggtggcctgcagatgccatttgggagccaaggcctggaatcagggaccacaagagcctgcttggtgttctaccccactgtggccaagctggtacctaagaacttcacataaggcccttgacatagtacctggatattgctgctggttcttcaatgcccaagggctctttagtcagcagatgatgaatcatccaggactgagcccttcccttcaaggcaacggattcccttctggccttgggtgtatctagaaatgttgtctgggtgctagg

SEQ ID NO: 478260 - DNA, 736 bp, Homo sapiens
agtgggtgcagcgcaccagcatgtcacatgtatacatataaatgggtgtcgtcaacttccaagtctatttcagcgaatcctggtttgcgtgctgaagtcaaaatgtggtgctgtttggcccagagtttcctagcccctcccatttctcctttcgcaatcctggcgctcctggctgagatgagactccagcgtggacgcaatttttctgaacgatataagataggaccaggacaaatggacttaggcgttgtaaacatttggatttctaatattaaaataaagtacacagaagcttcaaaagaagcagaaaaccaatgtggaagaaaagaacaagaaccagaacataatgggtgcaaaggtaagataaatgcaggacagacaaaaggaaccattgtttatgaaatccagagtctgtcttctacattcccgcgttacatttctaaagcagtggttctcaacgtgcagtccctgagccaacagcatatgcttctgcctgaacgctggttagaatgcttattctctaaccccacgctagacccacttaatcagaaacatctgcagaacttttccagaatccgcaagtgttgctggcacgagcttcattgtcagtaggtaatgtgaaaattgaatttgttgttggtgataaagttcacgtgtgctttctttggggggacattgatttgggattatagtttactgtaacctggtaatttcagtaatgcaaatgcaacaaaac

SEQ ID NO: 478261 - DNA, 578 bp, Homo sapiens
gctattttttttttttctcatagaaggcgactaacaatgcttaagcactgccctgcactgattttgagcccatccatgcccctaagtccacaactgcagctcagatctctcttcaacttcagacatagacagctgccattcaaccgcctagtacataactcagtcaggactttccacaagagacttagtctcgacaagttcaaaactgagggtctcatcgctgtcccaccccagcctgcccgatcgaggtcacacaggactttccacaagggacttagtctcaacaagttcaaaactgagggtctcatcaccgtcccaccccgacctgcccgatctaggtcacacatgtgtgtgttcttctccctctcctctcttcctcagtttccagattcaggcagtgcatactctcgcttctctctattaatcacccctgaagcctctcctctcctttctaactcactgccatctttcactggagctatttcctaattggttccctggttcaggttgcagctttgactttgctaccatagcacagcaatccttctaaaatgcaaatctgctgatgcattcctctg

SEQ ID NO: 478262 - DNA, 676 bp, Homo sapiens
cagcgtgggccatgaggcatggagtattcacaattggtgagaaaattcatgtgccaggaacacagctacagggaaaacaaagggccgtggaggcacatggctatgatattgtagaagctgagggccccgacaccaatcccaggtcgatttcccctataccacgtggccggctccaagttcatgacctaaaaccatgtgtggatttaaacagctgctcttctatcccagtggttatttcttgggacaaacccactgatgttgagcgtggggcagaggaggtgtggaaagggagaggacgagtccagagatgcaagacttggcagggcttggtaacggagtggctggaggaagaaagggagcagctgagaatgcccaggggacctggggacctgaggcagaaatgtgaagaacatggagattcaaatcacatgatttctctttactagcttgtaaactgttcatgcactagtcatgtcttggccactttattcctcatatacaatgatcattgaggtgacttgaggtccaagctctgagagtgtttaaatctgctgcccacaaataaatgaccattttagagatgctcctaggaggccttgcagtgtgctcttcagggtcagttggccaccaaattgtcaggttggcagaggttgtccttagggtctccaaactatcc

SEQ ID NO: 478263 - DNA, 2945 bp, Homo sapiens
ctcggtctcgctgacttcaagaatgaagccacagaccctcgtgttaagtgtcacagttcttaaaaatggaataagcagcaacaagatttattgcaaagagcgaaagaaaccaccattcccagagaacaaagcaaacctagcagatttcaggttttggttcgggtggcctgcttttattcccttatgtggccccacccacatcctcctgattggtccattttgcagagagctgattggtccattttacagagagctgattggtccattttacacagcgctgattagtccattttacagagagctgattggtctgttttggcagagtgctgattggtgcgtttacaaacctttagctagacggaaaagttctccaagtccccatcctcccagaaacccagccggcttcacctctcaccaacagtggctgcgggactttccagcacctagcctgggcattcccacagcccagagggagctcgtcccagacaaccaagaggaaaagaagggaaacaagaaagagatggagacccatcattgtggccaacgaccccacgaagagggaatagcggtccacgcacgggacccagcctccgatcaagcccagcaggcgccgggtgcgcctgtgctgggaggcagagcccacgcccacccggaaccgcgccggccagcgaggtccgtgcgcagccccggctgccgcctgcgcttctccctccacacctcaccgttagcagagggagccggctccggcctcagccagccccagagacaggcccccacagcacagcggcgggctgaagggctcctcgagcgtggccagagcagacgccgaggctaaggagtgtcgatgctgttattagcattcatgctcacaagataaaggcactgctgaagagttatgtgtttccttgaaagacccaaaacctatgtgaagctaaataactaaaatttcagtgagtttttaaaggttattttgtttaatgttatgaattctagtataccaaacaattctccaaaggttaggaacataattcagtctgcattattctgtcttgtgttattactgaaatttttataatttgctaccagcagatattcctaaagttaactggctaaaatattgactgttaatatagatataactattttttcccttaatttttaactaattgaaatgtcttcatttttgttttttaacataaaattgacagccatcataattattgatttttgtagtaatttaaaattgcaacaataaatgtatatatttatacctgacagaatttgaatatataaagcacgtaagaaaattgtgctgccagttgcatctagaacgctcacctattcttgaaagaaaatatttacatttgtaataaatctgaatggtttgccttttgcaaacagattagaaatgatttacatgtcatgtgatcagtgattatgcattaagtttagggatcctagaaatgctactgaattacagtcttttgacaagtttacacttcattctcaggaaaggctgatcatggaaaacaggagattttgccttcaggaaaaaaaatgaatatgcttatggaaggaaacatgtgactaaatatgtgggaaatagtgactgagtggcggctgagtaaacagggtagcatccttttagctggttgtgctttgactaactgatctgttctttcttacttgtagaagattccaagcaagaaagtattcagcagtggctggactctggattctttgtctctgcaaatgaaaactttcaacaagtcattgaccgcactggtaagacaagagaagcagttatgctttgggaagctgagtaggagatatattcaaatatctacgtgaataaatcttcttaaaatgagcattatcagaggcttctagaaatgatcagccctcaaaaactatccagctcaatctcttcatttgacatatgactgcgacaaaaatgataggtgcttccccagcagcaggttaagggccgaacccagggctcttgccatatcatcaatggctcagagtatagcataaactcactgggttctatgaagacatttgcaaggatgtagttatgaaaatgaaattgtttaattttccccatcctgtattatacttttatttctgaatctagattttttctattctttggtctcaaaattgcacttacattctctctttctaataatgcacttgttctcaagaagaataaatgtctgaattctaaagcaaacagtacaagtatttctgaaggagaaaatgtatcacacttgtttcactgagatttgataaaagcagtataaaaagaaaaagaaatttaattacaggactcacagtttccatcttcattaaatgcaatatcatattttatagaatctaagacccttcaattataaaatgcattcatattttaagtaccatttagaaaaaaaaaacaaaacctggcaattacaaacagaaggcaatattgactgtaatacgtatcttgatttcacaggtgttaaaatgtgaaaaagtatgtttcaaaatggatgaaatattgtgaagaatttgtgtgaaaaaatgacataaattaggaacttaatggttagatgaaaaaattattagtctaatagtcacttactttgctggttttaattatttcacttcctctactgccatcttacattaagactgaccgttggctacaaatcagtttaaattttgaatttttttactacttttaaaagaaaacctatatgtatcattgaaatttcccttttcaccaaccttctttattttttctaatataaaagttccatgatgccaaatactgtaaagatttttgccaataaatcaaatgtaagtacctctctgctcataataattcagactcaaggaaaagcaaaaacttcagaaaaatagccagcatttcatatccccctaatgttttctcttgcccc

SEQ ID NO: 478264 - DNA, 1250 bp, Homo sapiens
attgggtattgacttggtagttttcaaactctggctcctgaaggtgcctcacgggcaactctcgctttgttgaagaggaaaatgagagccaggttctgtgaccaactcgtgcttccaggctttattacaacagtgactctcattcctgaatggctggaattttgggagatagatccagtggagattctcttggatctggggtttggtgctgatgagccagacatctgcatgcaaatcccagccagattccttggttgtggctcagcagccagaggaatcaacatccgtgtttttcttgaagctcaaaagcagcgaatggacattgagaaccccaacttgtacggtcgtttccgacagctggaaatcctggaccatgtgaccaatgccttctcatctctgctgagtgatgtcagcatcctgccaaacagagctgaagagaaagctggaggagagagtgtgcaaagaacctcagtgagtgccgccaaagagcatcgaagaagaatgggtaaactcttaaggagagcttccaaacagaacatcaggcgggattgtaacccagaggtatcagagtccttcaaggtgaaggatgaagtttttgttccctttacaaaaccatgggattgtggagcagagctagcagcaacctcaatcaaccacaagcaaaatcatttgtctctgtcagtagaacatcagtctctccaagcctgtgatgatttgctaccttatcctcctcatggtcttctgagcaagcagtggccttgctcatctatgccggccaagcaggctcctccttcctgtgtgtctgaggggtcagtcaagggcagaactcagaaggagaacttatttcagactaacaagctcaagagcttgtctcatcttgcaggcaaaggaccagactcatttgaaatggaagaggtcagtgctgcaccaacgtaccagcctcctaagggaaataaccttcactatgacacccttgttttccagccctcatttcaccacttcatcttttaatccctcagcattacttcttagtgttctgagtcagtttagtgatttaaagtcattctagttgcttttgttggaaataagctagtaggaaaccagcctctgcttgctccagtatctttcctttcttcttgctcgcagttgaatccgtgggtcatttctgactttgctttggctcaattgttttatgtacctgtatgtatgctttttatctattctctaacttttcatgttttatcttcttc

SEQ ID NO: 478265 - DNA, 762 bp, Homo sapiens
agcatcgtctaaagctgatgccagcactggggcacaggagaggactgggtgacagcagcggaaaggtgggcagggatagggagtacctgctggtacaagacctggaacgagagtgcgtctttgcatgtgcttggctgttctcatgggcgttcatctccccactgactctacaatcaatcagccctttgtatttgtgggtactacagccttgtgttcactcaactatggattgagaatatttggggaaaaaaaatccacaaaaaaatttgcacacagcaatgcactgttgaatccacgtgaatgtgtaggcattgtattagctggtaccaccacaagaagagaacaaatgaatggcagaaaagattggaagaaggaagagctttcccagggaatgtctcaggaaaatgaagtactaaagcccctcctcccgcacctcgcatctgggctgtgcggggccgcacaaccagcgggaatatctgagtgggtgtgggagcatctgcgtgcaggcgtcctctgggaagcaatccatctgggttgatacaccctcctcatcagtatttcctcctccaatggggcgagtcctgctgtgtaacatcccactttatcagggtcagaactggaggaggtgctggagcactaggaaagaatatgggccacattggctgacggcaagagattagcctgggggaaggttggcaccagacccgggtgctagtgaaaaggaacttctggaaatattctgcctgctgattgaaaactgcc

SEQ ID NO: 478266 - DNA, 950 bp, Homo sapiens
tcctatattgtcaccagagctgcatcttcctgaaacccacgaccacttgacagggaggtaacatgaactacaaggcagctgcagcctgcgtcaccctgaagagagcatccattgctcaactcccaacatggccactgcctgaagatctcattaccactgctgcccacagtgctggcaagtcaatactcagagatctggaaggactagaagatcctgctaaggaggctgtacagggcgagtcagtgaggaatccagagattacagtgcctcggaaaccaggtgaagaaggaaagagtggatctttgtatgtgttgttctctctgcctggaacacaaccccatcctccaccccccatccccactccaccccttgcttgcctaactactattcttccttcaggtctcaacttacaagtcacatcctcagaggagaggcctcatttatacatcaacgtagccattgtttactgggcacctattatggaggcgatagaccctgtgtactcttcaacagagaccacctcggagctccctctcaattgccgatgagcttttaatccagtgcaggtgaccttgaggtgcctcagactcctgctccctgctttgggccactttatgtaggtttaccttttccacagaggtatggcagcacttccattcatttgtccagttttctagttcagaaagtttgcgggagtatttttcctgataataatgctaacaagttatcacttaaattttttgaaaaattaataagagaaaaataatggtcatctatacttctactacccaggaaaaatgagcatatcctcttcaaggctttgttatttctttttccctttatttttagtgttggtcaaagggctcaggagaggacttggttgaaactagtgtatacagaagggaatgtggggttttctaattattcaagcttgcattgtcctttatgcc

SEQ ID NO: 478267 - DNA, 1254 bp, Homo sapiens
gtcaaagccagttcccggcccagtctcgtcctgcagcagcctgccgcctgcctcctctttcctttcaacatgacagatgccgctgtgtccttcaccaaggacttcctggcaggtggagtggcagcagccatctccaagatgggggtagcgcccatcgagagggtcaagctgctgctggaggtacagcatgccagcaagcagatcaccgcagatatgcaatacaagggcattatagactgcgtggtccatattctcaaggagcagggagtcctgtccttctggcaccgtaacctggtcaatgtcctcagatacttccccacccaggctctcaacttggccttcaaagataaacacaagcagatcttcctgggtggtgtggacaagaggacccagtttgggagctactttgcagggaatccggcatcaggtggtgccgctggggccacatccttgtgttttgtgtaccctcttgattttgcccatacctgtctagcagctgacgtgggcctcggtaactgcctggttaagatctacgaaactgatgggattaagggcctgtaccaaggctttaacgtgtctgtgcagggtattatcatctaccgagctgcctactttggtatctatgacactgcaaagggaatgcttccggatcccaggaacactcacatcatcatcagctggatgatcactcagactgtcactgccattgctgggttgacttcccatccatttgacaccgttcgatgccgcatgatgatgcagtcagggcgcaaaggaattgacgtcatgtacacaggcacgcttgactgctggaggaagattgttggtgatgaaggaggcaaagattttttcaagggtgcatggtccagtgttctcagaggcatggatggtgcttttgtgcttgtcttgtatggtgaaatcaagaagtacacataagttatttcctgggatttcccccactgtgaacagtcatgttgtattatataacatatcttgagcattcttgacagactcctggctgtcaatttatcagtagcaactatttactggttgaaaataggaagcaagccagcttctcttgccattttttgtactgtctctaaacagtactggcatataatgggcactcaacatacatgacataagaggccatagctcagtgagtttcaaatgaacccatatgttaaataagtcaagggctgcatttaaatcagacgctagaagtgtctcacccttacactgtccactttcaac

SEQ ID NO: 478268 - DNA, 3011 bp, Homo sapiens
cagtgaagcgcgtgaagggcgagcggtgatgggttctgcgccagtggggctgggagcgtgtggggggctgtacgtgcagctgccgcaaggtggagagtgcacgtgtgggcttggggactacgcgcaccgggggctgaaggcgttggggagggtgtggggggctgtgcgtggggctgccctcactggaagctgcacgctcagggaagctcggaggcgggggtcctgcgagtgctggggagcacgtggggggacacgcagggactgcccgcgcaaatggcttcgaacgcatgctccccaccccacatttcacagtcgccatgacgaccaggaggtccgcaagggctgcggggacaaccgctacaatcttcccgccctggagccagaggtggaaaagtcggccctatgcggcgggaacctgccaaggggcgccccaaggtgctccacgcggaggatccgaaatctgaaagcacaaaaaggcttggagctacagttgggggccaagacccttcttctcggccccttccaggcagttagtagtataggaaaaggtctggataagcatggttgagaatttcaacattgcaattttttaattttaaaaaatttaatttcttcaacaattattaaattaatttgcatttattttgttagccaagaggagtaatttttgaatttttaagaggctattattggtggtttataagacgacttgccaagtatatttgggataaccataagaaataccattataaaatctcagaagggaggtaggacttctggaatagccaaggaaatgcactcctccatgatgacaatgaaaatacttggaaaattatcaaaatcattttcttcaaaactttggaagttaaccaaaggtttacaacaatctaaagggcattaattcaagaaaagctgctgaacctctataagaacagcaaagtctgtggtgttttaacttgttctattccccacttttctctctccagctccatggtacccttgaaaacaagcaattccccaacgaaacaggggcacaggctgcgtttgcagctctggtaaaagctccatacccagagcagtgtctcccagctccctggtgaagtcttacgtatacatggggtgctggcacaggtgcctccagataagtctcctaggccatctagtagttcctaagtctgggcgcttgcaaagagcttgcaattcatcaagggttgagttgcacaatggggcttttagatgtgctgctgaggaagtgattgcctgcatttaatcgtcttctgatgaatgctagagaaactgatctagagtggcacctcttggttagaacgagctgaagcatactgtatatatttacttctttaaaaaatttcatataaaggaatagaatactaaaaagaaaaaaaaacaaaaaaggtcacaatattccataattccatcactcctaccaattaactgaagtaaaaaaaccctctcaagtctctccctttgcttgtcaagccctgctgcagagaggtaagctctgttcagaatttactttgtgtcctggattttttcctatgctcatagagacaggattagctggccatcttgctttctgtgctatcttttctagacatgtaaaataatacatttgaaatacttgttttaatggtattttataataaagcagcttttaataacttttctcttttccagccgtctttgtggcaattttacattggtaagatttagtttcagttcgaaatatttaaaaacatttgaattaaaaattgccatcactctttgcatacagtaaaacaataacttctggctatatttgtagaacatctttatgtacgccattttatacatatattttgcttttttacaaacctcatatgtgaaacagcatttacaaaatagatgcattgggggaatataaagtgtttgagattatttttctgttacttcattatctctcaccctttcctaatgcagacttctttttaagataatgaagatgaattatagtagctgaggaaggaggacaaagaaagcactgaagaagtgataaaggggaatgaaatgagatgttatcagaaattgctttttctttggctacagttgggaggtcccatgttttactgggtcttttactgatgatgattattatttggttctcttttgatttcaagataatctcttttaagagatgacttttgatataatttttaaatatttttctgtttttcgatacttaatctttaaaatggagttttctgccatacacatctcacataattattgtgaggagtaaatgggatagcgaataccaaaattgtgcaattttacatttagaagacaccacaaccgtccatcttccagatctgctcccagctggtcgggggcctactgaagcattgaagctgactctcctcactctagccattgctttttgtttaaattatggtgaaatttagatttaagtttgtaatagaaaaatgtcaatggttatcatttaagcgtacaattcagtgacattaagtacattcgtgttgtcttgcaactattaccactgtccacatccagaactttttgctatcccaaacagaaactccacccactaaacactaatcacactcagctctattttctatctctatgattttgcctatgccaggcccctccgtcactgctttttaattttcatccctatattgcccctataaagtttcaaagcattggatacattaacatatgtatgacatttgaacattttaaagagaatatttaatatttccctaaatatagacttttgcatattagatatcctttaattattgtattgctttatcctcctaagcagaaaggaaaattctttatgaactcatattttgccaatcaactatgaggtaatggcctttcagacatcagctaaaacagacgtttaatttagtagttactcgtgttggatgaggcagatatgattatagcatatagcattttttagggagaatgcattttaaacaatg

SEQ ID NO: 478269 - DNA, 705 bp, Homo sapiens
tatgtgaacagcagtgagatcctccagactgcagaagatctagggaggtcagaatagagcagggctcccacatctttgataaaatgtgattttgtaaactagaagaaagggggaaatggcaaaagcaggcctttctctaaaaggtctaataaacgggatgatgccggggtactttccaggcctccctcatgccatctctatctctacgattacatcacaagccccagaacaccctggctctacacgcaaggcaggccacacactggactgcttgcatagacctagagcagttcagtggctcactacctcatccctgaactcccagctccagcagctccagctccagctccagcagcagcagcagcagcagcagcagcagcctcccccgtcaaccaaccagcacccgcaaccagccccacaggcgccctcgcagtcccagcagcagccgctgcagcccaccccaccccagcagccaccacccgcctctcagcagccgccagctcctacatctcagctgcaacaggcgcctcagccccagcagcagagagagaatctggagcagcccagggaggatgctgagataaaaagttttagtgcatacacaagtgtgctcttaccgcccaggaaagttaggaatgcacaggcccaggctccctgtgtgtccctgtgccgcctgatcatcctttgactccaggagggcaacac

SEQ ID NO: 478270 - DNA, 453 bp, Homo sapiens
cgcccccctttgttcagtccaccaggtaagacccatgggctctttccagcaggaagaagagatcagaggctctactggaggagatcatcaaatatcaagatattctgagaatgaccagggcattgctctagagacccacttatgcctcacctcatatcacacactggggaaattggcatggctagaccacctgggaacaatcaggaataacagaaagaggcaggggctctcagcagccagtgcatacagatctcagaggcagtcccacagcccctgtgagcagccttgcctgactgtggccctaaccaacaactccatcaaaccaaagagtcaagtcggctggctccacccaactatagagctcagagagcaggctcacataaccttagagcccaggcaaccagccccacccacctgtgaagccctaccagacaaccatgctcaaaagtaaaa

SEQ ID NO: 478271 - DNA, 780 bp, Homo sapiens
aatttcaggatgtatttgaactcattcctgtcaagtgtcagagatattccattagtcagcatatccttttctactggtattctatccaagctcaccatcagtgaaagttttaacaattgtactatcatagcatggcaggagctatccatactacaactactatcctcattgccagcttgccaggaaaaggggctcctccctaacttactctatgaagccagcatcgacctgataccaaaatctggcagagacacaatgaaaaaaagaaaacttcaggctaatatccctgatgaacatagatgcaaaaatcttcaacaaaatattggtaaactgaatccatcagcacataaaaaagtaaggggccctcaccagattccgaatttgctggcacctggatcttggatttctcagcttccagagctatgaggaatacatttctgttgcatataagccacccaaaccaataataagcaagagaactgccatttgggaagtgtaggttaaaaccacaatgagatacactaggtatttattagaatgtttacaactgaaaagtttgaccaaccaagtattggagagagtgtgaaggaagtggaacacatgtatattgctgggagggaatgtaaaatagtacaaccactttgcaaaacagtttgtcggtttcttcaaaatattatacctacacctactgtaagatttaataattccactcttcggtattcagtccaagagaagtgaaagcttatgtctatacaaatacttgtatatgaatgttcaaag

SEQ ID NO: 478272 - DNA, 773 bp, Homo sapiens
agaaactattagttgagctctgaaatacatgaatacattccttgcaatcacgggtgaaatgatggagggagtgagtgatgcagagataaggctaagaagagctggcaggcaggaatgtttaagtcagctgaagctgtgcccacagccaccccttcccccaggtcctctgtcccaggcagatggcagttttatctataagctcctgactggggctgctgcctttttttcagagatgccctgcccagagaggaggaatctagagaggctgtctggctacagtggggccctggtggtgtcagcacccaagggaatctcctggtctgtgggttatgaagaccatgggaaaagtgtagtatctgggccggatagctccatccctcacggcacagtccctcacggcttcccctggctaggggagggagttcccctaccccttgtgcttcccaggctcattgcaaatcttaaatgatccattttatacaaaaatgtgtaacgtgtattcttttattcaacaaatacttacagattgccaatatctgccttttactctgtgccaaaaaagaaagttattgatcttataattttatcttcaaatttcacaatttttctcctggcttcaattacctggaaatattattattaccaggaaagagtatgtaatatcatatgacatactgatatggtccatgcatgttattcaatgatgaaatatcttcattatcttcgtgatacaccctttttttcctttgtggttgaactgttctctccatatg

SEQ ID NO: 478273 - DNA, 672 bp, Homo sapiens
gcctatacccaggaatgaacaaggacagcttggaggttagaaggaagatggagaagcttacggtcatagaaaccaaaagctggagagctgcgattaccaaattagaaggatcttcaatggaatgggaaattcttcacacagtaacaactggtatgatactctctcacaatgctggacagtgtcagaaagctgaagttcccagtcagccacaccattctgatggtttcaatattctctatttttccttaatttttgaaaatttgatttctggtgagatccatccacttgatcaaaacatggtggagaaagctaaaggagaagcagacatgtgcaaagcggcaaaacctaatgggcatcctgctttgagtatagaaaacccagaggaaaaactggcaattaaaaatcccaacaagagaatgctggataacaacacttttttctctataaaccactttattttaaatttgtgaatagtactgacctacactaagcttcgtagagttttttaaatacttgtctttttaaaaatagaaagtcaccaatgcttcaattaattgtaaaattccgaggtgcttcaaattttctagtgaaagttaaaagtgtaaacatattttcaaaatttacctgttttttccctgtaaaataagtgatgccttggcagagaatatgcat

SEQ ID NO: 478274 - DNA, 691 bp, Homo sapiens
caataacaagaaggaacgattaggatgacattttgcacaggaagctgtttccaattccttattcatgtaagactgcgcaagaacagaaaggaaatttttttgcctgtgaatgagcaatacttgcacaatgcctatttagcatacttctgcagattgtggttgaccatggctttggggaagacattaactgatatgcttaaagcctctgaacaacttgtacccatcctggctttcaaggaccctcccatgagagagtaccaccctataaactggaggaaggaatgtgaatgtcatgaagcttccataaaaacccaagaggacagggttcagggagcttcaggagctgatcacgtggaggttcctagagggtggcacagccagggagggcatgaaagctccgtgcccctttcccaataccttgccctatgcatctcttcatctgtatcaattgcagtaacctttttaataaactggtgcgcttaaccttcagatttatattaactgcgaaggtcctgttgaagaacaaaagtctactatgaaatttaagaaactactgggccatgaaacaatacactatttaacttacttcatttgcccaactctttatcactcttacgaagtatccataaggttccctaagttttgcctgtgggccaacttcacaatgagctgcaggtacaaattaaaatgc

SEQ ID NO: 478275 - DNA, 3146 bp, Homo sapiens
aaggactgttatgctgcaggagctatgggtagcccctggcactggggcaggtctggaggtcattccacaggtacttgcctggaatcaggggtcatgggagtctgcctgatgatgggcttttctgtggcaggcctggttttagggtccaagaaaaagtcctctgcttacttgcctctccttcccccaagcagacagcatatctctaagtgtggtgctacctgtggagaagtcaagccagctgcagaaatttgcataagtaacgagaagctgaatgttaatcaccaaaacaatgggaaaatgtctccagggaatgtcagagatcttgatggcagtccttcccatcagaggcccagaggcctaggacagaaaaatgttttcatggtccaggcccaaggccctgctactctgtgtagccttgggacttggtgccctgtgtgccacctgctccagctccagccatggctaaaaggggctaagcttgcaccatgcactggaaaagctgccaacactcaatgccagcccgtgaaagcagccacagaggctgtaccctgcagagccacagaagtggagctgcccaaggctgtgggagcccaccccttccatcagtgtgccttggatactcctgtctctccttatattgtgggccagttggtggctctgcaaacttaggtctcgttgggtttgaaaaaaaattacgaatctgaagtttatctcattcctttttgctagagtcagtttttaaacactaaccagcataccctacatgataaatcataggaatatgggtaagaatctcagatgaaagctaggaaattataggtaaaaatatgaaaacagttaggaattaatattttttgtgtgtacaaatggctatcaacactgaatataaaaccaggaaaatatccagaaagtgaatatacatggagtaaaaaacagacaacgctgatcttgcaaaatttttattctttgggaaaattaggcacaaggatgaatgaatgaatgtatatcaacagtgggatggggcagggtgcagtaaaaaagcaagcaatagtagatataggacattttctattccagtaatttattcaataaaatgattctaaaatttatccagggtagttcaaagcgtcattttcactttatggcatgaggttaagcataagattgagaatattttgttttagattacgtatcaagtctaaatttttaaaaatctacttgcaaatattatgaacaaactctctggctgtctttcatacttcactgagaaattggaggtgaatttcaaactctttccacctttaatcatacatatggatgaccttgtttttaacaataatattttcaacattattatcaatcaagactttttattttcaaagactcttgctctaatcttgtaaagttataagagtttaatcaacacagtcaggacttctagatttattttcccataactgaagccagatataaagggctcttgaatttgttcactgaaatactatttttcctcaaagtgaaaattgtgctctttatgagaaagttaatatggaaaagcacatttatgtgatcataaattgaattcgaaagaatgtataaaattaaactctcacttttctcctgtaccaatgaagatttaatacagctccactgaataaaaaccaaggtttccaatttacataattgccgattttgatgttacccaatgattataaatacctcttgggtaaattgtgtagctctcctttttttctgcacttctcaatgaatggtctgtctggaaaatagccaataaattgctgtcaataacattttgaaaatggaatattttcaaatatcacataattgaaattcaaagtgttttcatttaattatattgttattcatattggtattaatggctataaattagcaatgatatgaatactagaaaaataattagatataatggttgtttacaaagaaaggtacaacttctttgcttcttcatgtcaaaatgtcattatagtatggagtataaggtctcctttagaacatattcaactagagaccaaaagtttaagaaggtttttatggaaaaacaattttccagtggatatgtaatcatgtaatcaggtgatccttttaccactgctatgtaaggcataggatacaattgtaatatatatgtgtatttattttacaattgtattatatatgtgtatctatattacaatcatatcattgtgtgtgtatatgtatctatacacatatttttacatataattttcttaccaataacatagtcatacatatgctcctatcagatattgtttttcagcagccttggcaagcaatagttcattttatttaaaactatctgtgttttgttattgctgttcctctgctgaagctgtctttattgaggtaatatctacatttatctctttctatatgtttctcaatacatttatacaattattttgttttcctgatgtatttgctataaaacgtttagtggcagttgtaataatagtaacaatatttccttgagttgtcttcattttgtccaacctccaaaagttgtctttaaaaatggcagtttattaccttccaactgcaagttcagacacatttctattataagttttaatattcaggtcttattttaatagaactctcaatgtatgtgaaggatagtttccaaagactatataaggaggattatcactgcttttgtcacctctacattatcctcattaattttccccaagaattactttttttcattgttatacaatatttatcttacttatatcctttcacaaaagtaattcgactcagtaacagtgatctgtatataaagcatattcagtccaacaaaatatggaggaaataatttgttaaagtgtttgtatttggcttgagctgttgaaacctgtgattgtgcctcattccctctatgaagtaactttgaaaaccaaaaacttaaagaaactagatctactcctcttcattttcccatatttattttttcttttaattgaattgccttctttgtgttgctcttcttattttccagtaattctcttaaagtctgagacagagtcttgtttgaaggtttttttcaagtgtttaaaactttgatagaaaaggtttgtgtggac

SEQ ID NO: 478276 - DNA, 744 bp, Homo sapiens
aaggactgttatgctgcaggagctatgggtagcccctggcactggggcaggtctggaggtcattccacaggtacttgcctggaatcaggggtcatgggagtctgcctgatgatgggcttttctgtggcaggcctggttttagggtccaagaaaaagtcctctgcttacttgcctctccttcccccaagcagacagcatatctctaagtgtggtgctacctgtggagaagtcaagccagctgcagaaatttgcataagtaacgagaagctgaatgttaatcaccaaaacaatgggaaaatgtctccagggaatgtcagagatcttgatggcagtccttcccatcagaggcccagaggcctaggacagaaaaatgttttcatggtccaggcccaaggccctgctactctgtgtagccttgggacttggtgccctgtgtgccacctgctccagctccagccatggctaaaaggggctaagcttgcaccatgcactggaaaagctgccaacactcaatgccagcccgtgaaagcagccacagaggctgtaccctgcagagccacagaagtggagctgcccaaggctgtgggagcccaccccttccatcagtgtgccttggatgagataacatcattagccaaaaagattatcgttctcgtctaatagggaaatgaatcagatagtttacaattgtcccttggtatccggggtcggggaaattggttccactggtttgcactagaaagc

SEQ ID NO: 478277 - DNA, 1018 bp, Homo sapiens
gaggagaaagtcaagctgcctgcagaaatttgcataagtaacgaggagctgaatgttaatccccaagacaatgggagaaaatgactccagggcatgtcagaggttttcatggcagcccctcccatcacaggctgagaggcctaggaggaaaaagtggtttcatggcccaggaccaggatttccaggttgtgtgcagcctagggacttggtgtcctgtgtcccagctgctcgaggcatggctgaaaggagccaacacagagctctggtcgtggcttcagagggtgcaagccccaagccttggcagcttccacgaggtgttgagcctgtgagtgcacagaagtcaagaactgaggtttggaaacttctgcctagatttcagaacatgtatggaaacgcctggatgcccaggcagaagtttgctacagggacagagccttcatggagaacctctgctagggcaatgcagaaggaaaatatggggtcagagcccccacacagagtccctactgggacaccacctagtggagctttgagaagagggccaccatcctccatatcccagaatggtagatccattgacagcttgcaccatttccttggaaaagccacagaaactcaatgccagcccgtgaaagcagccaggaaggaagttgtactctgaaaagccacagaggtggagctgtccaagaccatgggaaccaacctcttgcatcagtatgacctggatgttagacagagtcaaaggagatcattttggagctttaagatgtgactgcctcactggattttgaacttgtgtggggcctgtagcccctttgttttggccaatttatcccatttggaatggctgtatttacccaatgcctgtaccccataatatctaggaagtgactaacttgcttttgattttacaggctcacaggcagaagggacttggcctttctcagatgagactttggactgtggacttcagagagtaggtgacattagagcatagaatttaatatattgaggacac

SEQ ID NO: 478278 - DNA, 602 bp, Homo sapiens
acatcaaagaccaaaggtagataaatccacgaagatggggcgaaaccagtgcaataaggctgaaaactccaaaaaccagaacgcctcttctccttcgaaggatcacaactcctcgccagcaaaggaacaagactggatggagaatgagtttgatgaattgacagaagtaggcttcagaaggtgggtaataacaaactcttctgagctagaggagcatgttctaacccaatgcaaggaagctaagaaccttgaaaaaagagaaaaaagaatgaaaagaaatgaacaaagactccaagaaacatgggactatgtgaaaaggcaaaatgtacgtttgattgatgtacctgaaagtgatggggagaatggaaccaagttggaaaacactcttcaggatattatccaggagaacttccacagcctagcaaggcaggccaacattcaaattcaggaaatacagagaacacgacaaagatactccttgagaagagcaaaccccaagacacataatcattagattcacaaaggttgaaatgaaggaaaaaagttaagggtaggcagagagaaaggttgggttacccacaaatagaagcccatcagactaa

SEQ ID NO: 478279 - DNA, 622 bp, Homo sapiens
ccaattccaaagttgcttccacattttcagagctttaaactacaatgactaccaggacctgcttgagaggcaagtttgatttttacctgccgcacactctaagtttggacccaatgtcttcatcattcactattccatcaagtcctactattgctgctattatggttactaccactaccgatgatgatgatgatgacgatgatgatgatgatgatgataacagtggagcaacagtaacagtactaaagctgggccttcccaagaatgttattctgctcactgtcaaccccctttctttcaattcttcatacttgtgttctaatcaagcagagcttccatatggctgggaaaaaatcgatgatcccatttatggcacttattatgttgaacaacttttggagctggatgtgagctgcgtgagcagtgctgtccctcctgctggaagaggggacccctgtcccaggtagctcattgctaggcaacccagaaaacactgctagcatctttcattggacaatcctgtttgccactcaccaaggcagtgttctatgacaggtagatgatgattattctattatttgtgaaacagttagctcatatagcttattagttttcctctctc

SEQ ID NO: 478280 - DNA, 540 bp, Homo sapiens
aaacatctaatatgtacaataaagaaaacaatgaaaatgattttaagggggcatccagtacagcagtgacacacagtaaaggcttgcaaacatttgccaaatgcaaaaaattagtaacatttcaagaaggcatgagatgtccagaacagagctatccaaaggtgcagcaagttttagaaaatggggttagcaagagagtggattctgaggccttcttcaataaagaatttcggatgaagtacatgttattctgtatgacagtctgttgtttccaagagaataataacaagctgtccttgaaaagaatggctggtgatggaattagctctagagaatttaaggtagtatttgccaagaaagaaggtcagtctgatattgtgtcaaacatatcctttattaacctgaataagtaaatatatgaataagtaaatatacctaataaattacgaagtgcttggtgagttacctgaccattgtttttaaatgttctcattagcatttcttgtctgtaataaatgattttaaatttcgtgtttctcc

SEQ ID NO: 478281 - DNA, 1698 bp, Homo sapiens
aggagccatttctgcaaaaacgaatcatgcttgttcaggaatacaattacagctgtttgaaaataagcatgcatgttgttcaatgtgatgtcattgtctatattaatgaagtttgtgtccttggacacactcatgcagatgttgtcaaacttttccagtctgttcctattggtcagagtgtcaacctggtgttgtgtcgtggctaccctttgccctttgatcctgaagaccctgctaacagcatggtgccaccccttgcaataatggagaggccacctccagtgatggtcaatggaagacacaactatgaaacatatttggagtacatttctcggacctcacagtcagttccagatataacagatcggccgcctcattctctgcactccatgccaactgatggtcagctagacggcacgtatccaccgcccgtccatgatgacaatgtgtctatggcttcatctggggccacccaagctgaacttatgaccttaaccattgtgaaaggtgcccagggcttcggcttcactattgccgacagtcctacaggacagcgggtgaaacaaatacttgacattcagggatgccctggcctgtgtgaaggcgacctcattgttgagatcaaccagcagaatgtacagaacctgagccatacagaagtagtggatatacttaaggactgtcccattggaagtgaaacttctttgattatccatcgaggagctatcttaacacattgaggtgatatcacactgtggttttgatttgtatttccctgataattagtgatggtgagcaatttttcatataactgttagccattcgtatgtcttttgaggaatgtctactcagctctttcgcactttttttttattatttttttttagctgttaagctgtttgagttccttgtatattttggatattaacttcttgtcagatgagtagtttgcaaatattttctcctattttgtaggttttctcctattttggaggttgttgattgttctttttcagtatggaatctttttaattggatgtaatcccatttgtctgcttttttattgcctgtgcttttgaggcatatccaaaaaaccattgtccaagccaatatcatgaagtatctccacatgttttactatagtacctttatagttttggatcttacgtttaagtttttaatgcattttgatttgatttttgagagagacagaagtctagttttatttccaattttcacagcaccatttataaagctatgctttccccaatgaatctattttatctaagtatagccactcctactcttttgtttactgtttgcctggaatatcttcttctatccctttattttcagcctctgtgtgtccttaaggttaatgtgagtctcttgtaagcagcatatagttggatcttgttttttaaactattcagcaaatctgtgtcttttgattggagatttcaatccatttacattcaaagtatttattgatagataaggacttactactgatgttttgttaatggttcatagtagagatatctatgatttacagagcaacataacagtattgaattattctggatttgatatatttgcccttatcagtgaatgttgtactttcatatgctttcatttctacttgaagaactcccttaagcatttgatgtaaggcagatgtaggggaatgatttccct

SEQ ID NO: 478282 - DNA, 631 bp, Homo sapiens
acaagcaaaaattaaatagacatgggtatgaatcctagctctgtcatctatatgagtttagacaaattatttagtctctgtgaatctcaattttcttatgtaatagagaaatatctcctacatttaaaaatcattcatcagtcctgcctttcttgccctgaaccctgccagtgccacccaagtttgcctcttgttactagtgcttcctactctggcagacaccttcagaggagaaaacaggtggcaccaatccaaacgagtgtgataatagacgtgcttggtttcccagggacatgtgaagaattcaggagaaaaagctcacaattacaagtgctaagtcttcagaaaggcaagagggatgcaagaggggagcacggttataatggtcaacctttgacagaaccatttcactatgaaaacaactgagaagggcaagaatatgagtctagatatgcatcaaactgtaagcagttcagggcggcactgaaggtgtgcaatggtaaaaggttttttgaatttattttttatttcaataagtttttggggaacaagtgatgtttgattacatgaataagttcatgtaagattttggtgcacccatcacccaagcagtgcacattgtacccagtgc

SEQ ID NO: 478283 - DNA, 2909 bp, Homo sapiens
acagctatagattgtcattaccctgttcctacatacaatttcctatctggccctacctggcattcacatcttggcagtaatgctcattggcccaccactcaccttctgctgtgcaaactggttcctaacaagccacagactgatactggtccctggcctgggaccggtaccaaaatcacctggagggcttagtaaaacacaaattgctgggccccagtcccagaatttcttcttcagttgggctggtgggaaaggctcagaatttgcatttctaacaagtttccaggtgatgctgaaagctgcagaagaccgaagaggctttccagtttctattcttcaatggctaggatatttggtacaagtcacattccgtttgaaaacttccttgtttcccactcatataatgacagattcctttgtggtgcaagacatttggaaacatgagggcctgatatttgtgtgtatgtgtgtagtttgtaagtggggacaaggatgctgttattgaactatgttatcttaaaagaaaaattaataagtaatagcggtttacgtattacagaagagaaattatgtgatttacttctcaagaaagttcatagaaaagttctctaaaaattttttattgtaaaggcaaatgtgattatgaacttctaattttcaaaaataattccaaaagaacaatgtttagttactctagatttcaaaatcctttgtcatcagctgttactgccttctattctcttcacgaatatcacacattcctatttcattaggtaatttcaatactgacaattctattacttgctattggtgttaaatgatacaaaataaattcgtattcctggatctatcgtttactaattttatgatcaaaagtgagctgggataaaaacagacaatgagcaaatgaaaaaaaaaatcacatataatgctagatcaggctttgagacaaattaagtaagtgctatgaaaataaaataattcatgatatgaagattgcaagtgaaatgcaaaaggtattttagcataatctttcagtctctttccattatattcaaacctgaaatctagtaccattaaaaaattttgtgtaatcttattgtatgattaggaactgactccttttgctacccggtttctcaaaatgagtagatcgattggtttttacatttagtaccattcaccaatatttaaatcaccctcattaattgtttgagtgccatttcaagaattttaggtaaactgtaaaccatcttcacaagtaactatatatgtttacaaattatgcatacaatttttggaatgaacactgactttgtatgaaacccatttaattatgctgaaagtccatggacctcaggataacaatcttaatgtaaattaatatttgaaaaacatatcttcttcctattcaattcattcagctaattttaattagctggatcccaaaatgatacagttctatccaaaaatcacatatcaaatacttctgtggataaggctgtcagtttgtaagaccagactccacacaacctcagattaagatcctgtttcatcacataggctgttttaataatttattttttttgcaagcacttgaaaagtggtcatttttaatgacaaaatcagttctatttatattcattcctgctatccatgccctactgaagttagctggctttgttttcagcaagaataagtaattcatctcatatatttttatgaaaaaatataactctgtcttcctcacatctagtatttaaatgatggtccttaccataacaagaagtatgatctgtacactttgacaattcaataatacatttatattctctcctatcaaagtcgtatttcagacctaagctatttgagagagacagtctaataaattattaaaaatcagtaaatatcatgctgtgtcttcataaaataaaatacttggaatctcatctcactgtccaaagctacgtatctaaactgaaataaagtttgtcaatgttaatagtttttatagaataataacacaaaaaataaaaaataaataaataaaggaagaataaagaggaaacaaaagaaattatagttggttttgatataaaaatacacatgtgctaatatacacattcttatgcatgtaaattattatattatctgagtatatagtctttccaatttggccttattgatctatttaactaatagaacaaaggttggcaaactgcatatggcctgtgggccaaaactggatcaccagttgtttttgtgtgacctcaagctggatatggttattaaaggaaaatttttgcagtcaattttgatgatggggcacattaactttcagcccaattaagtgaaatgttatcccagaaaaaaagaattctgttcttctcagcagaattatagtacaaaaaaattgtactcaattattacattttgaattttgtcaataaaaacttgtagaaattaaaaaaaaaaaaaggcttgaagactctggaggtatctgtcatcttaaaaaggtcttacctgaaagtacattccctctttgagattaaaaaactgtcacatgccctatttgtgttcttgtgagaacacagcgactttggcaactcataattacatataaagccattcattaaatatttgctgagtgtgtgtaaggcacacagtactgaaatgagcacatttgaattttttattcaaataagaccatcattttttagcaggttgaggcttagtgtggagactgtgtataagagaaaattcaatctaaagggaaattttactctggcctggtgcagaagccaagtcaccacacagtgtttttacatccctgttcagtagtaaaaccataagaaaaaagaagtcaacattcaaattaaataaatttttcaattttataaatatgaatt

SEQ ID NO: 478284 - DNA, 1076 bp, Homo sapiens
gacagctcggtaatttttttcttcaaagtttctgtgaaaacttcaaagattttcttctgaagaatgcaatgaataaatttgtagttattaccacagaaggcacacttaatgagctagaaaatatcatcagtcagatgatgcatgttgcagaataccttgagtgggatgtcactgaacttaatccaatcctccatgaaatgatggaagaaattgactatgatcatgatggaaccgtgtctctggaggaatggattcaaggaggaatgacaacgattccacttcttgtgctcctgggcttagaaaatgtaagcatttccacagaggagggtggcctggtgaacgtgaaggatgatggacagcacgtgtggcgactgaagcactttaacaaacctgcctattgcaacctttgcctgaacatgctgattggcgtggggaagcagggcctctgctgttccttctgcaagtacacagtccatgagcgctgtgtggctcgagcacctccctcttgcatcaagacctatgtgaagtccaaaaggaacactgatgtcatgcaccattactgggttgaaggtaactgcccaaccaagtgtgataagtgccacaaaactgttaaatgttaccagggcctgacaggactgcattgtgtttggtgtcagatcacactgcataataaatgtgcttctcatctaaaacctgaatgtgactgtggacctttgaaggaccatattttaccacccacaacaatctgtccagtggtactgacaatggagctaaaaatccagataagagcagttgtcttctttcctgcaattcagagtaaattagatgaagcatccaaagaggttaaatattagggtgtgatacatactcacttacaggggctctagaggtgggaatcttaatccatcccaagggaaaacagtaaattaaactttttcttaaagaaatgatgtctgagcataaataggtattttgaaggaaaatgtaaagtgatgtttatataaatagtctcagtgacaagagagtacatagtgtgatcatgaaactccaaaatattttttaaagggcatgtgtaa

SEQ ID NO: 478285 - DNA, 2205 bp, Homo sapiens
ggtaaccggacgtttctctctggctgcccttaacattttttccttcatttcaaccttgctgaatctgacgattatgtcttggggttgctcttctcggggagtatctttgtgttttccttctaacagtcaggaccctctgccgcaggtctgctggagtttgctggaggtccactccagaccccgtttgcctgggtatcaacagcggagcctgcagaacagcaaagattgctgcctgctcattcctctggaagtttcttcccaaaggggcactcaccacatgccagccagagctctcctctatgaggtgtctgtcgacccctgcttggaggtgtgtcccagtcaggagacacggggagtgggcaggcaggaatatttgagtctgctgaagctgcacccacagccgccccttcccccaggtcctctgtcccagggagatgggagttttatctataagctcgtgactggggctgctgccttcttttagagatgccctgcccagagaggaaaaatctagagaggcagtctggctacagcagctttgctgagctgtgtttctctctcccctcccctctccctttgccgcttgactgtatcatactgtgttactggttgaggaggtgctgcgtcaccttctgtattgttgcttgatctttgatttcctgtgaagcacaatgaatcttacattagactcttctgagtcaggtggtgcaccatctgttcccaggcctggaaaacatgagtaacacagagcaacagaaagcaacagctaccccagtttttagcagaatattcatatttacatagcaagagagagggagacaattctgattttaggcagggtagaagtttatttttctcacactcatcgaatacatttgacataaaacctttataaaaattattttacacattagtacactcataggatgggataggtttgaacctacttgcctttgttgttctggggtgatgttagatttaagtggttgggaatggttgtgtaattgtacataagagctgcattgcatgaggctacccagaatacacgagagcagctggcaaacctaggtattgaagctgatagcagggctttcagtattcaattgataaacaggtacgtactggtcactgtgcttgtgctatgtgattagagagatacaaaagaaataaagaaaacatggggtgcctgatcactggtaacttgaaattcctgccaggagacaaaactagcatagattttatagcatatttaaaaaatatgaacagaagtataaatcttagggtgaatagtaatttaaaatcttaaagtcatgttaaattaagtaatactcattaaatatctaagtcatttctaagtaagttaaaatactgaaacattaattattaagaataactttaagtttatatattttaacattttttatatgatatagagaagctaaatatatttgggtttattaatcaacataaaacactgattaaacatatatttctcaaaattatgtaatagctttcatctacaaatactgttacaaaacagttcaaattgcttattttctaggttcttcactggaaattagttactaagagttaaaattgtaattaatgtatacaattaaaactactaaaaataagggtaacaattctctatgcaaaatatataataaaaaaggaaaaatatgtttttggtgagaaaggttataaaggagatataaaagtgtattttcttttaaagtaattttatctcagacattatttaaacattgcttcaaaataaacaaataaaaaatgatatagataaaactgaatggacatagaaagtttaaaaaaggaaaaaaagttaaaaatattgtgtggctaaactaaggataaataaattcattgtaagagttttaaaaactgagccttaatatcaaaagaaaattagggtgaaaataaaatttagctttctgttttaagcaagatttttgtgttgtattaataagagataataaaagatttttattcaccttttgagtaaactgcaaaaacggagagagagagagagaataaaagagaaagagaaacaaatattctgtgccttattctgactttattaggtcttttgattatttggaaaaccgagtctcctctttatcaaagagtaaaagtttttattttttaagatgttttaattatcactttggttaaatgactattattttc

SEQ ID NO: 478286 - DNA, 615 bp, Homo sapiens
agaattagtggtgttgcagatgtaaatggttaagatgacatcatactggagtaggttacaatactaccctctaatggcacatcgaagtatgccccaggatatgtgggaagattttctctgcaatcttttggaggaaatgtctgaaaacaaaattagaaagattattcctctgaagtctgacaggttattctataagaaaaactgctctaaggctaagagaggcaaggaaactgcagaagaagagtttgaagctagcagagcttggtttatgaaatttaaggaaggaagccatctccataacttaagagtgcaaggtaaagaggcaagtgctcttggagaagctgaagaaagttatttagaagatttagctaagataattgatgatgcaaccaccaccctcatcattcagctcccatcaacatcaatgcaagaccctccagcagcagaaaagattataactcgctgagggctcaaatggttattagcatttttagcaataaaatatttttaaattgagatatgtacttttttgtatttttaattaaggtatgtacttttttagacaatgttattgcacacttaatagtctacgatagagtgtaaatatacttttct

SEQ ID NO: 478287 - DNA, 722 bp, Homo sapiens
acccgaatgttcttcaataggttaatggttatagaaactgtggtacatccgtattatggaatactaatcagcaataaaaagaaatgcgttcttgatatttctggagctgaaggggtatatgattatggatttgctatagggagacttgtgtgttttcacacagataagccatatggccaagaagccatcgtgtactgtttactaaaagatgattccctagtaagacttgtttgtcacatgagcggggcagggatggattttcctgaaactgatgacacttcaggccccccaagtcctaggctcctcatattcaaaacatctgtgaataatatctacatcatacgtttgaagaaggtgttctctcgggtagtaggaggggacagcagcctctgtcccaaacttgggaagaacatcctcctatctgagtatgcaggtttaattttactgtcacagcacacgtgtacaaagtcagatacaaccgggagagtcatcggccctcaagatagtcattagtccattgcaggctaatactggtttcacttagtatctcctatcactctagtaactagccttttgttataaggctaattctggagtctttacaaatctaatatttctcttaagaaattaggaaatactgttatagtagaaacattctcttaaatactcaagtagaaaacaatattttattaatttggaaaaatgtacactactcatgtgac

SEQ ID NO: 478288 - DNA, 808 bp, Homo sapiens
caaagacaaatttcctcgctatgcaagagtcctccaccattaatgcctctttaataaaaactcttcttaaaaccgctttacttccaaaggaagctggagtcgttcactgcaagggccatcaaaaggcatcaggtcacatggctcagggcaacgtttatgctgataagctcaattctacccttcgacatgatcaaggacaaaacaacaatcagaagcttgctcagctggcaaaggctgcttgcctccttagaaggaaaaagagaaggtgtcagtattgtcaaagctgctgcatattcaaggaagataaaaatcccagaaatattcgttggattcagcaaaatgagttaacagaaaaagctagtacaggaaatactcttgaagaagtttggcagtcatggcaatggaaagcccaaagtcagaacacaggcatcagatttgatctgggtcctgatatttaattcaaaaagagaatcaaagtaaattactcagttgtagttatttaaaaggagaaaacttacccatttcttatgattagtatttcttcaaagtgtctaatcattaattatctgaaatacttacttaaaatacagatcactggctcctctcctgatgattctgatttgggggggtctgaaataggaggaaccaggaatctatacatttacaagcattaacaggtgattctcatcattagccaagtttggaaaaccacaattaaagggaagactgtgcaaggaacactggaaggacttagagatttcaaaactactgtaaacagagggtggccacagaattttcttgctctaaa

SEQ ID NO: 478289 - DNA, 574 bp, Homo sapiens
cgcaaggataaaaaaccaaacaccgcatgttctcactcataggtgggaaccgaacaatgagaacacgtggacacaggaaggggaacatcacactccggggactgttgtggggtgggggaataatctatgtaaagaaaagtgtatgtatcaaaggctttgccagctctgcagaaacaagtttgagaaatggctggagggtaggatggatatctagatgtccacagaggcaagttaggggacaaatgtgtgtcaatggtttggtgcaaggcagctgggagaggaatgtgatgaaattctcaatgcccctgcagacagacactcacacagctctcagtggctataacattggtgaatggaaaatggaacagaatctggccaccacccttactaaaatacctctagacatacatgaaactgaagacggggcactggaatggagcactgctacagaaaacctacttttccatagtcttttctgtatggacacataagaagatgaacatggcttcacatgtgcctctcaaattccacatgaaaattttggtctccttattaacaatctcattttcttcat

SEQ ID NO: 478290 - DNA, 2417 bp, Homo sapiens
gtacagactaagggaaccagaataaagtatggccaatatgagtctgaatccaaatttgtggatgtatgaatatttgtacgcgtatgtgtatgcagaagaagacaggaaaatgtgggaaagtttggaactccagagagacttgttgaatggctttgaccaaaatgctgataatgatatggacaatgaaatccaggctgaggtggtctcagatggagcagaggaacttgttgggaactggagcaaaggtgactcttgttatgttttagcaaagagactggtggcatttttcccctgtcctagagatttatggaactttgaacttgagagagatgatttagggtatctggtagaagaaatttctaagctgcaaagcattcaagaggtgacttggaggatgtatggaaacacttggatgcccaggcagaagtttgctgcaggggcagggcccccatggagaacctctgctgtggctgtgcagaagggaaatgtgggatcagagccccaacaaagagtccctactggggcactgcctagtggagctgtgagaagagggccactgtcctccagacctcagaatcgtagatccaccaacagcttgcactgtgcacctggaaaagccagaagctcaatgacagctcatgaaagcaggcaagtgatgtggctataccctgcaaagccacggccacgggagcccactttttgcatcagcatgacctggatataccctatgtcattgctcttaaatttggccttcccaaaagacctggagcatggaaacaatgcagccaagttctttgctatggcctcatcagcctgggctacactgtccatatttctattagcattttggtcacaaccatttaaccagtctctaagaacttccaacttttcctcatcttcctgtcttcttctgagccctccaaactcatccaacctatgtccattacccagtttcaaagctcccttcaaatattcagatatctttaacaaccccccaactcctagatatcgatttttggtttagttcatttagcattgctataaaggaatatccaagactgggtaaattgtaaagaaaaaagggtttatttggctgatagttttgcaggctggacaagaagcatggcaccagcatctgttcctggtgctagaactattagtgtataaaaccatttggtatttggtgacatattcaataataagacagataagagaaagcaacacaaagcattttaaaatttaaaaagcaggaatttttagtttttaaaataatactattcagagttaggctgaatgtctatagtgaatctttataacacattatttaaataacaatatgaaaacggaatgaacattgtagcgctagggaaaaaagggcttgaataagagaaatgagaaatctttttaatactgcaaagactttcaaagacaaaatgacaagcttatagatagggaaaggtgttaatttcttcactcacgtattatgtattattttctccctattaatgttatttttaagattgattcatgctgaatcctgagcctgaaacaattgtttccagagaagaaacatttttacttacaaagaattacctttccttgcttgcttttttatagaaaaagaaaaaagaaatgaaggaagggaaggagggaagaaaggagggagagaataaaataagaaaaaagagaaagttttattattgtctaatttcttccttgatttattttttactggactcattgattgaaaactcttcaaggaaatagattagttgagcattcttgtgtttctcataacaatataaatgtgtaagtcatcacaagtaatgattttcttgatcacttcaagtattttctgaatattatgcattgctctgtgctctgacaagctgcactgattctcttcttacattcaactatcaactggaaatgttaaatccattattatttattgagctggcattttgttattacctgtggatactgagatggaatatagtctcattactctagtaaaacattgatatctgattgagtgattctttacttcatttgatagtatcattttttgggtgagacacaacaaccctggacattggctagagaagtgtggccaattaaaatgattattttccgtattttttaagttttataaaataaacacatattttctttgataaccacaataatattcaacactaaaaaataaagacatcaaaacagaaatttagatgataaaaatgagaaagtgtgacatatttttgtttccttaattttacttacacctttggtttttgtgaaatattaaatatacttttttgaacgattgagtctcattcccaagttccgttacccagaaacaacagcttttaattcacttaactgcttttcctagtactttagtccatatttctaaa

SEQ ID NO: 478291 - DNA, 1104 bp, Homo sapiens
aaacaaacaagtcaacgtatttgtgatggtgctaagcgctctgatggtggtaagcatgctgatggtggtaagcacgctgatggtggtgagcactccgatggtggttaagcatgctgacagtggtaagctgatggtgcgctctgatggtggtaagcgctctgatggtggtaagcgctctgatggtaagcgtgctgatggtggtaggtgctctgatggtggtaagcgctctgatgggggtaagtgcgatggtggtgggtgctgtgatggtagtaagtgctctgatggtggtaagcgcactgatggtatgtgtaatgatgttggtaggcgctctggtggtgatggcgctctgatggtggtaggcccactgatggtggtaggtgctctgatgatgtgcgatggtgggtgctctgatggtggtgggtgctctgatggtggtaagtgcgatggtggtgggtgctctgatggtggtaggcgctctgttggtagtaagtatagtgatgatagtaagcacgctgttgctggtaagcactgtgatggtgatgtggtggccagccaagacctcattaataccatgacattggaggagacacctggagaaaccgaggccagctatgcagataagtggaggaagagtgttctagaaagggaagtcagaacgtgcacagaccctgaggcattacgtgctcagcaagttcgagggacccatgagtcacagagaagcagccaagtggaaagtctggaaaaggcaatgtaccccagtcaagtgatcacccattgcatgttacatgtgcagattcagagaaccggtctgtctgagcaccttctgcaataacttcagtctaactttcttaaggctttctcagagtcctgaatcattacaacttttgaggacattattcacaaaaaaaaaaaaaaaaaaaaaaaggaaaaaaggaacacaaaatagaggatttaaaatgatggtatattttctaaagcttatttaacatacgattttgtcgccttttgctttccctcacaaataaagacaaagctggcaaaccatgattaatgccacatattggatactgacatcattaacaataaaaaaaaaagtagtgaggt

SEQ ID NO: 478292 - DNA, 763 bp, Homo sapiens
ccagaatatttgcatgatcaacattttcgtaacaaattaccattcctgttctcctctaaatggaatcagtgcatggtcaggccgatactgtgtaggtgctcccggaaaaactggttttttgcaaaactcaccattagaaatactgggatggatgggaaacacagtgcagatggcaggtttttcaagtccgtacaactctgtgagcaaagcaccaggaagcagtcacatgcccctggggtgacccacggctggcacagtcaggcggccctgggcggccctatgctgatggcagaagcaagttaccatcgagtgtttattgaaggaagagttggcatcgccctgagggtgagtgtgggctgtgtgcatggaggagccacgtgctaccaagaagtgagaggcccagggtgtggggagccaggagctaggaagcctatggtgccccaggaacctggaagagatgaggatttgaacccaggaatttggatggacaccggcattcaatcctcatcatctagattagatgagggcatggaagctgaggctactggctgtaacttcaaatgtataatgatggtgatggtgatgatgatggtggtgatagtgacagtgatggttatgatgatggtgatgtttgacagttataatgacaatggtgataacagtattataatgatggtgatgatgacacggttatggtaatgttgatggtgatgctaatgatgatggtgagagtgatggtaattatgacggtgataaccgtgtg

SEQ ID NO: 478293 - DNA, 803 bp, Homo sapiens
aaaatatatgctaaataatcttttattttatgagagaatttctgagttgaattctcttaatccaggaattctcaaccaactattactttcgtcgattttcctgctcttaagtttgacccttttcagtaacatgatacgggaccaaagtatcgatgaaacaaaagggtacacttgccagcagttttgccatgacagtacaccgaacaaaggagacagggtcatttataacctgacgcggccaccctactgctgtgtcccgtttcctttggctggaacgggacctcagattctgtatttgtcccgattggctagcagcttagaacttttgaaaagaggcaaaggcagaggagaacaaaggaaggaggaagtaacttgtggaatggtgagaaagcatctttctgaagaccaggaaaaaatggatcgatatatccaaagttatgaaagtaaagagctgccaacgaagaatgctatactcagagaaactgtgcttcataaatggagagatacagattttcccgcatcaacaagagctgagaaatttcatcaccaccagatataccctgcaagaaacgctaaagggagtccttcaaattgaaatgaaaggacacttattagcagcaagaaagcacaaaacttacctgtaaaggtaagtgtatagtcaaattcagaatattctaatactgtaataatggtgaaaaatctaactcttttatgaaatttaaaggacaatatattttaaaaatagctacaagcaaagaaagacaaatactgcatgatttcacttatctatggaatgtaaaaaa

SEQ ID NO: 478294 - DNA, 945 bp, Homo sapiens
cctggagctagttagtagcccaagacagcacagcgggataaatcatggggccgggatcccaatccaagttggctgactcttttccccaggagcctctaatgattctggtagcatctgatggggctgtcaactgcacctctagagcacgtcgcagttctgatggggctgtcaaatgcagctccagagcacctggcagatctggccggctgtcaattgcaactctagagcacacagcagatctaatgggactgtcaattgcggttctagagcacaccgcacatctgacagggctgtcaattgcaactctagagcacattgcagatctgatggggctgtcaattgcagctctagagcacagggcagatctgatggggctgtcaattgcagctctagagcacacggcagatctgatggggctgtcaattgcagctctagagcacaccacagatctaacagggctgtcaatagcaactctagagcacattgcagatctgatggggctgtcaattgcagctctagagcacacagcagatctgatggggctgtcaattgcagctctagagcacatcgcagaaaattcaggtcaggaacctctcagactgcgcttgcacccagccacctgcacagtgaagccatcctgcaaagcgagtggcaagcttaacttcaaatgtcacattgatgtccccaataaaatgtcacacacgcacagagtttactgagccaaatttcgatccactgccaaaagaaaatgctgacgacagatcatgagtctctgttttcctatttagacttttcaattctaaactggtgagtacttttggttctaagataacaaacctaaacagagaggcacattgatatatgtttctataacgtaaagcagcattaaataatgactagctcattttgaatccagcagtaataagtacactattttgatttttc

SEQ ID NO: 478295 - DNA, 803 bp, Homo sapiens
gcactcgtacatcgccgtcggatgtgtacagcttacgttagggttcattcatggcgcgtttgttccatccaggcacctgcactcatacatcactgtcggatgtgtacagcttacgttagggttcattcatggcgcgtttgttccatccaggtacctgcactcatacatcgcccactgaatattgacagtccattgtcaggatgtcccacagtttattcactcacctcttacagggcaccttggtcgcttccaaattttagcaattatgggcaaagcacatataaacattcagtttctacatcagccacatacaaccaggcaatgcaggaagctgctaatgtggcaaatgttatatcagaagccggcgtttcctctccgtctgtaaatgcatctgaagtgcggtcgctacttccacatgtgtgtccccacatgtgtgacacacgcctctcctctgacctacacaagcacagcacggtgctccattactattttcatgtgggcatcacccctgatttacaaacagtcaacttgtccaggttacgagggcagctagtgcagccaagctcacacccaggcgcataaaatgtcttagcagagttacgtgagtcccttttcctcaatgacatttttaaatagagaactgggagcactgactatttaaaactctgtacggttcttacaatgcggagtctaattttgttaaaattctgttgtttctccattgctaaatagtccattttaaggataaggcctcttccagtattttaccaaccttgtgactacaacttaaagtagaatatgtt

SEQ ID NO: 478296 - DNA, 589 bp, Homo sapiens
ctctgctggaagagaccctgcagtcttcacatgcatctggcaaacactgtcaggccagcactcccacccccacctctggagaaaagtttgcactcttggtcggggacccctgcggaaaaagtgccctgagaaaacagcagctcctccttgaaaggcatgtttctgcatggctgacaggtgcaatcccgtggaggaatgcatgagtaagaatgatctgagaagactcgtgaattactacaaattagggggaaatgaagctactactgttcagagaagtatgctcatgaagcttgtatgctccaagaataccaagaagctaaagaaagatttggctaaacaaaggaaacacagtgatacctatcatttagatagcatttcacggtttaacactgcttttgtatacaatatgccatttggtcttcacaataatcctgagagttattcgctacattttcacacatgtacaaacaaaggggttaagaagctcttacaaacctgtacagaacgagtaactgtactaagaaatggagttgtaacgattcctccactatattttcaccctaattcacaagttttttaaatctccaga

SEQ ID NO: 478297 - DNA, 642 bp, Homo sapiens
gggcactcagcccacagcgagggctccactctcatcacctccttgcctcctaaaggctccacatcctaatgccatcaccctgagtttagaatttcaacaggtgcattgggaagggatgtcatgattcagtccctcatgctgcctttggcttgtgtcctgggaaagatggcacatgcaactcacccaaggggagctggagagtatgccagaaatgatacatacggctataaagacagagtgtccaagtttgactcagttcatctccgggctcttctcacttccgacattgccccgttttgtgaacttgactgtgtctctttctacattctggaagcaacagtgttccctagcctcattcatgctgttgcctgtgccccgcacttagcagatgagccagtggataaggttctgcagctctgcttcccagtctttctgacatttctgctcacaattgttgaattacaaagcaccagctggtccctcgtcagcagcggcctccacgcaatcatgggaaatgctgcattccgtcacagggtgccctgagatgtccctgctctgtttcctctcttcaccttgcaaggcagctgacatcctttattttctcataacgtcactgcctggaatttccgcttccatcaatcc

SEQ ID NO: 478298 - DNA, 703 bp, Homo sapiens
aatcccacagcatccggaatacacccgcaatcccacagcatccggaatacacccgcaatcccacagcatccagaatgcacctgcaatccaacagcatccagaatgcaccggcaatcccacagcatccggaatgcacccgcagccccacagcatccggaatacacccgcaatcccacagcatctggaatgcacctgcaatcccacatccagagcatccggaatgcacccgcaatcccacagcatccggaatgcacccgcaatcccacagcatccggaatgcacccgcaatcccacagcatccggaatgcacccgcaatcccacagcatccggaatgcacccgcaatcccacagcgtccggaatgcacgtgcaatcccacatcgacagccaatggaacgaaatgacaatgactacgctgtggtttcctcggatatagacgaaatacatctgctgataaacacaggctcccatacgtttaatgatcaatccaggcctgcctccagtaacaaacagcagatcttcaaagaccagcccggacacagacagcccagaatttaggccatgttctttgaatatctacaatattacaaaattccagtgtagctcactgagtcagtgtgtgtgtataaaattaaaaatgcaaaaataattttttctggttcacggatttctgtgataaatgtttttctttttaaatatgaaca

SEQ ID NO: 478299 - DNA, 956 bp, Homo sapiens
ttaagagtgttcttaacagaagtagcgaattcagatacttctctcctaccatcgccctcaccaacatggcattactttatccacagttcctctgcactaccatctctaaggatgaatgtcttctggggtgttataattttatgtaccaaatgaatgtcactgtggggcttgttgaacttttgctttaccagtgggtgtggagcgcggccatgggccagatccagctggtgccatctgacagctgcctagtttttgtccacacagtcggcctggggggagctgccactggctcctttccacaaggtgtatgtctccttttgcgataccagcagagctccgcagatgcagagcctaataaggtcgacattattgcatttccactttacagattagaagacggaggcctgcaagatcagattgtaggaaacaggagcgccatctgcctggaggacccatttcaaagagacaacatcaacgtccctgggaaggacggtgccaggacatacaactggcaggcagcctttaaaaagcattacatcgctcttcatcacaaacaagaggagtctgagaaactaccccagccaagaggagcctacgaagcccacttcttactaacattagcatttcaactgaagactcctactgaggaagaaggctcactggctaacagccacgtggaattgtggctgtgggatggtcgcggctggtggaaggataagggaggaatgcccacagaatattgcgactctaatcggcgtccaacgaattagtcgtgttatgtactgatgagatttccttaaaattacttttctattaacatttgtcaatacattgtccctgttatataatccatgcaaagtaactattaaattgttataaattgctgtttttgaactttgacatttaatgaatgtaggtggaacataatcatgagaaattagctcactcgtttgcac

SEQ ID NO: 478300 - DNA, 1649 bp, Homo sapiens
ggtcctgacagcaaaagtttcagaactgctgccgtagaaaatctttagatgtaaagtcctgtataagtgtaagatgcgagctttctgcgctcgtcaggccctcatggtgcaccatggccccacgctagctctaaacttttatcactttgaaaagaaatcctgcaccgcattcagtcactccggaagagaaatcctgcacccccattcacagtcactccggaaaagaaatcctgcaagcccattcacactcactccagaaaagaaatcctgcacctccattcagtcactccgaaagagaaatcctgcacccccattcagtcactccggaagagaaatcctgcacccccattcagtcactccggaagagaaatcctgcaccgtcattcacagtcactctggaaaagaaatcctgcacccctactcacagtcactccgtgagtttctcctccctagatcccaggcaaccactcacctactttctgcgtcaaaagattttttgtaagagctctccaagttactcgtaggttaaccctaagtcatccaagatagcatctctgttctgtgaaattataatatagttccaaatcattctgttcatgatttgccaaagaccttgattcagccattttctgaggagccctgatctctttatttacaataaggtatttggagacaataatctaaatgatcgcagtagtactcattgttaatagcatatatttttgaatagattcctggaacttatctgctgtgtcagatcatagcacctgtatcattttattaacatgcggccaaatttcctttcacaaggggtgtcaccttttgcattttgcacaatagtgcatcagagtgccagtttctccagactctcagggagaaattgtaaaactgtgtaaaaatgtaaaatgttacttattggaaaaatgagaaatggcatatcatgattatcattttcatttctcttaacatatcatacaaatttgagcacggtcttatattaaacatcaatagtgggttatttaaacctgcttagacaatcaaagacagaaaattctatcaaaatagggaaatgtgaactattttcaaatatgcatttatatgtaaaactgtattacaatttgggtcctcttgtacttttctgtcatgagactactatttatatatcagcattaaagggaaatataatttaaaatatttgatttagaggaaactgacaaaatacagtaggtatttttagaaataaattatccatctggtaaaatgcttatctttttataaatgctgttaaagatgcgacttaataaatgctaaaatgagagattattatataaagaaagttgtgctaattctgtagggcaatgtaatattgcatatagcttttctgttttgtgattattcctattattgttattgttattaaaagtcatattactaattgctataaggctaatagtcatatattccagaatttggaactgtatgttattacagactagttttaattgactctgattaaaaagattagttttcaagttgaaaacttgctgaacatttcgtggcctgggcttttctcggacctactgttatctgacactattctataaacatttcaaattaagcattgatttgcattactttcattcttcctc

SEQ ID NO: 478301 - DNA, 536 bp, Homo sapiens
agactttccagaaatgaaccctcatagatgtggtcaagcgattttccataaggaggcaacaaaagcaaaaatagacaaatcagattacatcaaacttaaaagcttctgcacagccaaggaaatgatcaacagagtgaagagacaacctacagaaagagagaacatatttgtaaatcacatgtctgaccaggaggtaataactaaaacatgtacagaacctgaacgactcaatattaagaaaacaaggaaatgcaacttaaaccataatgaggtatcatctcatatctgtcagaataactattatcaaaaaggcaacagcagctccatcaaattattgtttgacgcattaaactacagcatcaaactcttgagagttcaaaatgtcaatgaaaaccttgtcttggggcccccaaatgacgtattttatttcataattattattttcacctgaataccactcttctttatttaaccaaacatattaaaccctattgaaatatatttccgtttccgtaaatgttcctatctacctagtc

SEQ ID NO: 478302 - DNA, 564 bp, Homo sapiens
ccgcctaacctacctactctaacagcttctaagaacgaggaaacacgaactaaaataatcttagggccatgactggggatgtacttgaccccatagtcatctgggatgagccactcctcaaccaccatgtcttcaaattcatccacgttgaacttggtgaagccccacttcttcgagacatggatcttctggtagccagggaacttgaacttggccctgcaggaaaatcttcagtgttaacagacaaagagggaacgatggatgaacaggcaaaaccaacagctgtccggtgtagtgtgacttatgtgtcgcagaatgaatcaacagagaacagtagcttgagatcacatgaagatattaggttggagaatgggaatatttctgatattaaaagagaccttgccaaaattctaagagactcagttttcagtgaaaaaaaaaaaaagcatgtgataataaatctaattgcaccctaacggtattacttggttatttataagtaactatagaaagtgagttattgtatataaataataaaattaacctttctgtatatttgtatgt

SEQ ID NO: 478303 - DNA, 528 bp, Homo sapiens
agttctctcgttattgtcattatgtctgcagttacttcctgcactagtcttgaatcaaagtcatccacagagataaaactctcatctcctgggaacagagcacctgggggaaggggcagctgtgagcgcagctttagccagcttaaatgttcctgcctcccagctctgaagagagcagcagatctcccagcacagcacttgagctctgctaagggacagactgcctcctcaggtgggtcccggacccctgtgcctcctgacagggagacatctcccagcaggggtcaacagacacctcatacaggagagctccagctggcatctgacaggtgcccctctgggacgaagcttccagaggaaggagcaggcaacaatctttgctgttctgcagcctccactggtgatacccaggcaaacagggtttggagtggacctccagcaaactccagcagacctgcagcagaggggcctgactgttagagggaaaactaacagaaagtgataacatcaacaccaacaaaagggatg

SEQ ID NO: 478304 - DNA, 1568 bp, Homo sapiens
ggggatagaggagaagagaatattattgtatttggctgaaaagattctggtaatgccatggtgttcttttactggttactttataaataatgcaaatatatttctcatggccctggaggttgggaagtccatgatcaaggtgaaaacaaattcagttccaaaggctgctctccgcttccaagatggtgccttgaatgctgtggactcacatggcagaagagaaactaaaggaaatgctgatagtgatatggacgatgaagtccaggctaaggaggtctcagatggagatgaggagcttattgggaagtggagcaaaggtcactcttgttatgtattagcaaagaatctggcagcattgtgctcctgctctagggatctgcggaactttgaacttgagagtgatgacttaggttatctggcagaagaaaattctaagccacaaagcattcacagtgacctggctgcttctaaccacctatgcttcccccagaatggtagatccactggcagcttgcattgtgtgcctggaaaacccatgggcactcagttccagcccctgagagcagccatgacaacaggggcaaaactgtccaaagccttggaaatccaccccttgcatcagtgtaccctgaatgtgggacatggagtcaaaggagattattttggaaaccctgtgctccacctcctggttgctcctctaaagcccctgcagccacatcagggcttcttctataacacagtcttcacacatgcagagatgctttagcagcagacggaccgtgtaacttctaacaatgaaataaatggtaataaacaatttgacaatgtgtagaagaatgtttgagcccatataaaatgaggagaggagagaagaagaaatgaatattaacagtgtagatggacgtgattaatgagaaaccaaacagccctttttcctcggtcatctagtctcactcttacaatgtgaatgattttttaaagacatataaaatcatttacaaaattggcaaattctattacctttgtaaaaatgtatttttccctagtccattaaagtttgaaaatacttattacaaatcataagctagaagactttaggttatataaatatttttaatgttaattatgaacaagttctgcacggtagaaaagtggcttataggttttttaagtgttggttggttttaattatattaattagaaaataatctacaatttccttataaaacttacataaactgtttggtgtctttgtgagagtaattcttctgatggaattataagtactagaagtgaagctagataggcctcctttttccatgtttagacagaaggcaaaagggaacaccacaaagtctcactagattatcagttggctatgcatgatgaatgcttcacacgaaaattcattattttagaagttaattaactgttaaactttctaaatttctttctagtggaattataacatgattgataatttatttttattggtatttccaaatatcacaatacttagggatcttcttccaactctgagagttgacatctattttgcttatgtttat

SEQ ID NO: 478305 - DNA, 1245 bp, Homo sapiens
atcaacagcatgtaagaattatgaaagaacattacagtccatccgagggagatgagccctgcagccttaatttccaatgtggcaaaagtcatgagtctgagtgtcagaactgccacagagattcttggttgataccacagccatccattaacctgtccctggagttagcagcccagatggtgttgctctggctaggacttccagtgctatgtgaagaggagtggtcctgtgtgatttatgctttaaagaggttctgttttgatgcgtttccaggatttgtttcaagatttagagctccttttagcaattcttatagtggtggtttggtactggcaaactctctcagcatttgtttgtctgagaaagatggtatgtttcctttatatatgatgcttagtttcgctggatacaaaattcttgaatgataattgttttgtttaaagaggctgaagataggaccccaatcccttctagtttgtagggtttctgctgagaaatctgctgttaatctgataggttttcctttgtaggttacctggtgcttctgtctcacatctcttaagattctttccttcatcttaactttagataacttgatgacagtgtgcctaggtgatgatattgttgtgatgaacttcccaggtgttctttgtgcttcttgtatttagatgtctagttctctagcaaggccagggaagttttcctcgatttttcccccaaatatgttttccatacttttagatttctcttcttcctcaggaataccgattattcttaggtttggtcatttaatataaccccagacttcttagaggctttgttcatattttcttattctttattatttgtcatggttggattggtttaatttgaaggccttgtctttgaacttcaaatttctttcttctacttgttcatttctattgctgagactttccagagcattttgcatttctgtgtgtccagtgtttcctgaattttttattatttgtttctttatgtatttccttgaatatttctcccttcactttttttggacttccttgcattgggctttgcctttctctggtgcctccctgattagcttaataactaacctcctgaaccctttttcaggtaaatcggggatttcttcttggtttggatccattgctggtgaactagtgtgatttttgggggtgtttaagagcctgttttgtcatattaccagagttggttttctggttccctttcatttgggtaggc

SEQ ID NO: 478306 - DNA, 614 bp, Homo sapiens
ttctaagtgtataaagattcatgtgtggatttttctctgatattcactgtgaggacctggtagagctcctggtggtaaaactcaccaaaattcttgtccacactgaacctccatacttcatcaattatagtttagattttcctaccctggtacttgttccagtggaagtttctactgcacaaccactgactgtcatcacccttcttattgatctatgtaaacaaggaaaatatttcaaaacaattgtgtatcgagattttcagaacactattctcacagtcaagactgaagtctatttatccagttgcaataacctgtaccgacagatcatgctaactttagcacttgtgagagaagggagaatgaggccaccaatgcacttattctcgcagttggacttgggtgctccatcagtcctaatcagtgccttcacaggagaggcactgctgaggctggataaataaaggacccatgaaaaagttgccattaagaaaacaaaccagttttcaatcactgaattgtgtcatgactttttgtgccttttcagatttctttataagtaaaatcataaatatgtaaaaaacacatttataagcattaaatttttaatttca

SEQ ID NO: 478307 - DNA, 509 bp, Homo sapiens
ttttcagcaatatgaagttaaaaccaagtactgtgttccaggctgcaggtcttcctcgggcagaggaagataggccacagcctttccagagccactctgtggaggaaggcatgatttgctcctgcaccagcctacaaaaccacacttctcacccctctcagtgctctgagagtgaccctcggctgcaggtctgttggagtttgctgaaggtccactccagaccctgtttgtctgggtatcagcagcggaggcgcggaacagcgaatattgctgaacagcaaatgttgctgcctgattgttcctctggaagcttcgtctcagaggggtacccggccctgtggggtgtcagtctgcccctgctggcagtgcctcccagtgctgtctgtcacagcttcccttggctaggaaagggaattccttaacgccttgcgcttcccaggagaaaaaaattgataagacattattactagtagtaaatctctgcatccttgattatattttctacaatc

SEQ ID NO: 478308 - DNA, 764 bp, Homo sapiens
agactttggtgatggaattttctcatattatagaagaaacgtgatgctgaggcctgtgttagttgagagttatgttcttggagtggcaagactcagggtccagggcatctgctcttggagtagctcccttgtgacccggatatttgccgctaggcgatctttccaggtcagcatctcacgtgcaggagacactcgtccgttcgatgcctctgaccgcaccgtccttgcttctagtctcacctggacaccaggagctgcctcttgctatcagcactcaaagcagatgcagccgtttggtgcctgtgcaaggttgcaagtgtgtggttggatgggaggcttctcctcgaccccctggtcccatgtctcatgcatagaagaggaaagtcagggccagaggtcacctggcccgttgaaggtccttactccaggagcagatcctcaatgggagtccagatttcaggtgcacaaggcgtgcggtctttcggcagctcacgccaccatgcacgtggtgtgtttctgctccatgcttctcctacggaggccattccaccgccatggcgtaaccagggaggtgggcgaggccagggccagttcctcacagtcgggggaactaagggacctgactccagcaggtcctggattaccttgatgcatcccagggggagaggttgtgttctgaagattggaggagtgtttgatttatttacatgggatttgttgcaatacatgttgtgaataaattttctttataactgtttcagtat

SEQ ID NO: 478309 - DNA, 754 bp, Homo sapiens
ggaagcggcaagaacaacatgggtgcttggagagaccacgacgacagcgccttcacggagccaaggtatcacgtccgtcgagaagatctgggcaagctccacagagctgcctggtggggtgaagtccccagagcggatctcatcgtcatgctcaggggccctggcattaacaaaagggacaagaagaagaggactgctctacacttggcctgtgccaatggcaattcagaagtagtaagtcttctgctggacagacaatgtcaacttcatgtctttgacagcaaaaagaggacagctctgataaaggaggatgaatgtgcgttaatgttgctacaacatggcactgatccaaatcttccagatatgtatgggaatactgctctacactatgcagtctacaatgaagataaattaatggccaaaacactgcttttatacggtgctgacattgaatcaaaaaacaagaagcttaatgagaggtttgtagaatgtacacagaactgtatgggataatattgttaagttctgatattctgatactgtttgaaatactcaaagaatttttgcatttggtaagcatttttatatcagtattaaaatagtaattttatttattacatttttatacatagaatttgccaattactttctgactacaaagaaaaccagatgccaaacaactcttctggaaatagcaatccaggtaagacttctgatagtgaattactttaggtcagttgtccccaaccttttc

SEQ ID NO: 478310 - DNA, 685 bp, Homo sapiens
gcgttcctggtggttttgttcatttacgttgggtggatgaatttgttgaagaagaaatgcagaagcatggaagtaataatgtgggattatcagaaaacctgactgatggtgctgctgctggcaatggtgatggtggattagttccacaaagaaagagcagaaagcatgaaaatcagcaatttcctaacacagagattgaagagtatcacagtgaagaacaaaatgatacccggaagcaactttccaaggaacagaatgctagaatattacaagatgagattctgactactaaacagaagcagatagaaatttctcttagccataaggaagaaaaagaactcttgcatgaaaatagcatgatgcaggaagaaattgccatgctaagaatagaactagacacaataaaacatcagaaccagctaagggaaaagaaatatctggagtacattaaaagtgtgaaagaaaagaatgataatcttctaaaggctatacaattgaatgaggaagcactaacaaaagcagtagttcagtacagtggacagcttagcattttgacaactgagaataaaatgctcagttttgaactgcagaatgtaagacacaacaatgaaacactggaaatggaaattcaatcatgtcattttagactggctactgctctacatgattgtgactgaagtcagat

SEQ ID NO: 478311 - DNA, 835 bp, Homo sapiens
cctccgtggccatgacagcttttcttcttaaaagaaaaaaccggaccaaactgctcaggcctgagtgtgaaatgggcatcggatgtaaacagaaccatgacacagacttaggaatgtttactaaatggcatctcacccccaaccaaaaaggatcctgggtgagaatgagctatcctggatccatttacaatccaggtagaggccaacatgaaggaggagagaccaatggagaaattcttcatggcctaaaccaacgaaaaaacaaggacggtcattccttgccaaggactaaaaggagttccgcattcctcacaggctccaatgaacatattggcttaaatggtctcctacctaagaatctgctcttcacaatggaagaagaggaaaccaacggagtggaaaaactggatgaagattaggaataaaataagcatgtgacctgcaaggcctgtgaaaacatgaaaaataacctgaagagcctttctcatcaaatttaggatccactcatgtccaaatgaagtgtctaatgtgcagtcaaggggtccagggctggggtatcaaagatattggaagcccactgatactgtttggctgtgtcccccactaaatctatcttgaattgtaattcccataatccccatgtgtcatggtatggacctggtgggaagtaattgagtcatggaggcagttttccccatgctattctcatgattgtgctttgtcgtgaactctctgagtaatctgaggcaagctatgccaaatatactactacgactacgaccgttactactgctaataataataataacgactgctaatattcatatagaactac

SEQ ID NO: 478312 - DNA, 616 bp, Homo sapiens
ggttttgtgctcacttaattcctgaaccttcgtagcgtcacttatttactacccgcattttatgaacaagaaaactgaagtccagagagaggaaggaactctcccaaggtcgcgcttctatgctctctggcatgtggtcctagcaaccgactatgtcatgataccccaggctgttactcctgtggctgtattcaaggtcaccagctctacgatggcaacaactgtccagttacaagggcacgtgcccattgctggaacctactggactgacttgctgaagcagctgtttgctttggatcccggggttgaaggagcagccccaaccaccgctcctgctcctcccgctcctcctccaagacctttaagaaacctaataactcagtatgcttttcagggaggtggtgggaatattccacaggtagtaacaggtgctcaaaagaccatggaggatgtggccatatttgtatcccagaccctgaaggacagattcttagatgtcccagggagaagtaaatgggtgatggtcatggatggtgagggggaagtactaagtttctactgttttaactaccgaggaatagcgacggaattcagagaaaccaggaactagaatata

SEQ ID NO: 478313 - DNA, 777 bp, Homo sapiens
ctccagaatatgggaaatacctgctacgtgaacgcttccctgcagtgcctgacatacacaccgccccttgccaactacatgctgtcccgggagcactctcaaacgtgtcatcgtcacaagtgctgcatgctctgtactatgcaagctcacatcacatggcccctccacagtcctggccatgtcatccagccttcacaggtgttggctgctggcttccatagaggcgagcaggaagatgcccatgaatttctcatgttcactgtggatgccatgaaaaaagcattccttcccgggcacaagcatttagataatcactctaaggacaccaccctcatccaccaaatatttggagggtactggagatctcacatcaactgtttccactgccatgggatttcagacacctttgacccttacctggacatcgccctggatatccaggcagctcagagtaaggcgcctacctccaggacgttaactttacacacttctgccaaggtcctcatccttgtattgaagagattctctgatgtcacaggcaacaaacttgccaagaatgtgcaatatcctgagtgccttgacatgcagccatacatgtctcagcagaacacaggacctcttgtctatgtcctctatgctgtgctggtccacgctgggtggagttgtcacaacggacattacttatcttatgtcaaactcaagaaggccattggtataaaatggatgatgccgaggtcactgcctccggtatcacttctgtcctgagtcaacaggcct

SEQ ID NO: 478314 - DNA, 974 bp, Homo sapiens
ccttggtgccatggctgccctgagcttagaggcaaagttaagagactcatcagattctgagctgctgcgggatattttgcagaagactgtgaggcatcctgtgtgtgtgaagcacccgccgtcagtcaagtatgcctggtgctttctctcagaactcatcaaaaagtcctcaggaggctcagtcacactctccaagagcacagccatcatctcccacggtaccacaggcctggtcacatgggatgccgccctctaccttgcagaatgggccatcgagaacccggcagccttcattaacaggactgtcctagagcttggcagtggtgccggcctcacaggccttgccatctgcaagatgtgccgcccccgggcatacatcttcagcgaccctcacagccggatcctcgagcagctccgagggaatgtccttctcaatggcctctcattagaggcagacatcactggcaacttagacagccccagggtgacagtggcccagctggactgggacgtagcaatggtccatcagctctctgccttccagccagatgttgtcattgcagcagaagccatcgtgtcgctggtcggggtcctgcagaggctggctgcctgccgggagcacaagcgggctcctgaggtctacgtggcctttaccgtccgcaacccagagacatgccagctgttcaccaccgagctagggctggacacagctgtggactgcaggacgctggagcacaggctgtacaggcggatccaccacgccactgtcctgagcacccagttgatggaagacgagcagggtgactatagagaagggaaactggccccgtagtgggccagccactgtcctcagacctgacatttgtcaacccccagcacctgtgagggtgtgctgtcattgtcccatctcaccgacaaagacactaggacacacagaggccaagtgacccccgagctcccgcagactgcagccc

SEQ ID NO: 478315 - DNA, 492 bp, Homo sapiens
gctttgaagaatagatgttccccgtcagacatgtctgtcagcagagaaccctgaccacaccctcatgtgttttctcctccaggaggcgcttggaaaccaccgtcaattggaccgcactgggaaacacagatgaacaaagtcaacaccgctttgtcctgcagtgcctggctcctttttcagctcgtcttgcgactccagggttggtggacctgggtgtctctctggacacatcctccagtggcctggacctgcccatgaagttggtggacatgttcagctgcagcgggcttggctttgtgaggaaccgagtgtgtccagggatgtggcagctgcagcgggcttggctttgtgaggaaccgagtgtgtccagggatgtggcagctgcagcgggcttggcttttgtgaggttcagcattgccatctccaagtgctctccatagggaaacagtttctggtcatgatgagcttccgcttcccatctgatcccatccc

SEQ ID NO: 478316 - DNA, 835 bp, Homo sapiens
ggacaggatgctgaagttttacaacggcctctcggaagtggaggcggtgggactccctgcggggaccgaccccctggaccccactgatatgaacggggtacacttcgacccggaagtttacctagacaagcttcctagagagtgccctctggcccagctgatggatagtgagacggacatggtgcagcagatccgggctctagacagcaacatgcaaaccctgacctcccagtgccaagtgtataagtgtgtccagaattggtgggttcttggtctcactgacttcaagaacgaagctgtggaccctcctggtggggctcgtggtctcgctggctcaggagtgaagctgcagatcttcacgtgggttcatggtcttgctggcttcaggagagaagctgcagaccttctcgggaggcagctaaggcccggtgagaagtcgagcacagcagctgctggcccaggtgctaagcccctcacagccccggccggcaaggccagccggcagctcctagtgcagggccaccaagcccacgcccatccagaactccagccggcaggcaagcagcacacccgtgggctgaagggctcctcaagtgctgccaaagtgggagcccaggcagaggaggtgccgagagtgaacgagggctgtgagggctgccaacacgctgttacctctcataaggagtgattaatctgagcttctccagaaagtccattcctggtaggcactgggaataagaaatctcagagtataaaaaaacatcaagtggtagcactttttctctccttgcaactgactctcagtggtgggggggggtgggttagtttgaggaaa

SEQ ID NO: 478317 - DNA, 922 bp, Homo sapiens
ggtgacctgaggtttactaagttcccccacacgtcccagaaggccacccagcttcaccactcattgggactcccagtgggaactctggcagcccagagggagctcatcccctgatcaagcccagcaggcgcccacccggaacctgggctggccggcgagtgccgcatgcagccctggctcctgccagcgcctctccctgcacacttccccgccagcagagagagccggctccagccttggccagcccccagagaggggccaccacagcagagcggagagctgaagggctcctccagcaccgccagagtggacgtcgaggcagaggaggagcccagagcgagtgagggctgcaagcacgagggtggagctgcccaaggctatgggagcccacctcttgcatcggagtgacctggatgtgagacatggagtcaaaggagattattttggagctttaagatttgactgccctgctacatgtcagacttgcatggggcctgtctttaagtttactaattctttgttcttcttgatacattttgctgaaactgatcatattagaaatatggatgtcaaaggtgtagcattccaggagagcatgatgttcagacaatatcactacattgaaggaattccacaattaggaactgaacaaggccgtggtaggactggtgtcaaacctgaagacctgggaccggtggagaaattgctgactgaagaagcttggttgcgactcaatgggttgcatctgggcagctggatgaaggaggagctgcaaagagttgaagagtggcaggcaatgacaagcaacaggtcatgtggggaatttctatggtagtgtattgcaggctctggaaatacaaggtttaaaatccagcaggaaagcacagatctgaatcttggttttaccttcttacaggggtct

SEQ ID NO: 478318 - DNA, 599 bp, Homo sapiens
caaagaaagtcgacacatatttagaactgttttgtgaatacgtatcaaggttagaaaacagtatgttttacctcctgaaaagagccaactgtgcttcaagtataatagggagattgactaaaggatctgatagtccaatcgtaatttcatgcccaagttattctctgatgcctacatcctcatataagatgtccacatccttggaatttctcatgggcctgacaagttcccaggactctggactgtgttatccatggtctactgattcaaatgttaacctcttccagaaacatcctcgcagacacacccagaaatatattttatcagctctccaagcatccttcagcccagtcaagttgacacagacatttaaccatcccagggggatttgggatataggccctatcacgtcttccctggaactcatggcagtagaggactgctgtggtacaacacgagacctggggctattcaagaggaagcattctctatccactgtaagtgtcctgtccctggagtgtgctaatgtggtccaaatgaccacctagagggcatgtcactgagacaactccagtgtctcatcaggaagaactagataa

SEQ ID NO: 478319 - DNA, 1819 bp, Homo sapiens
gagagaactcactcactgtcatagagaaaacagcatcaagcggatgatgctaaacgatgcatgagaaatccaccaccgtgatccaatcactgcccaccaggctccacctccgagattggggattacgatttaacatgagatttggtaccgaagatccagaccgtatcagtggtatagaagctaggagtaactggtatgtttctgcatactttacgaaaggagtcagtaaacacaagaaatataagaggaaacaaaaaccaaaagtggaaattactgatcaactcacctgcttagacaagaactcatgcacctgtttggcaaggctttgtcgattttgcactaacaatagtgcgataatcatgggaagcttcctggccctagaatgcagggcaacacccccacctagtggctcctttgccaagttgtacacagtttgtcagataataagcgcacatcctgagtgtacacatctttacacatgtatccttgcctgctacttatactgcaactatgatctttccgtctagaagcatgcagtcaaaaaaaaaaaaactgcttaagagtggataatggactcacaagatttagagagttacaatacccttagaaatcattttaaattaagacgtcatgtgtttggaaaatgtctatggtaaatccaggcaggcttctgagaaagcaaaaaggcccatacaagatgcaggccccttgaccttggacttctcatcctccagaactatgagaagcaaactaattttatttatatattatccagtcactagtattcggttatagcaacaaaaatgaactaagaactctgctagcttcctgccaggtgctaggttgactcttcataaatataccttcgtttttctttttctttttttttttttttggagacagagtctcattctgttacccaggagtcttcctctcatttggacatcagctttcctgccgtctttggccttggcacatgtgggagtgtgtgtatgtgcagggaaactgtgtcattcagtgccattcccaaagacttccaaagacccaacagagatttcaaatagttctttttgtctagttctgttatgaacatggaattttgaatctgcagaaagcaaatttgagactcatttaaaatttaataaataaccataatatattaaaagtcaaattataatagtgtgatgttattgaattagggcaaatacatgacactgtgaaatccttaataaattatgcatgaggcattctgaattgtttacctcaatttggacaattttagagattaaagagtactgtgtaatttagtttgtagttttagggcataatggggagaagagaaacatagcttgtatttgttccagcttatttttgtattagtgtcttacttcacaattgtgtttgaaaacatttatttatttactttacattaatattgcttatcgttcaatgttttcagaagtaaatcaacttcaatagaagttaaaaatgaaagcttcttttggaaataaatgtggttactctcacaaatcttatctatctcttgactctttgtaagacaattgtctactcatacatttattttcaaaatcatctacttcaagctttaacatcagagcaaaatgtttcttgctcatgaaacaatgagaaatagtagagtgtgtgtgtgtgtgtgtgtgtgtgtgtgtgtgtgcgaattttccctggaggaagagttggatgtctaaaataggcaaaataaaacacaataaggtaaatgttttcatagagatacttaattatttgatgggtctttgctgcatatgaggaaagtaagcat

SEQ ID NO: 478320 - DNA, 576 bp, Homo sapiens
agatcaatctcagactgctgcgctagcagtgagcaaggctccatgggcgtggcagctgctgagccaggcacaggagagaatcaccttgtctgctggttgctaagaccattggaaaagcacagtaattgggcgggattgtcgcgattttccaggaagcctatagacggatgtgcaagtaggagaaatatcactgaattcttttcccagccaggaatgaccctggggaaggaatgcattcctggggaccagccaacacttacggaaaatagaacctacgttgaaatattgggggctggtttcctctatacaagaggagtcatgaatatttatgaaaggagaaatcgcacatgcacagaagcagtactagcacaaagaaagcatgtgggaaacgaaggactctccgggaggtacaaaatctatactttgttttctaacataaagatgaaaactgcggtgaactgagctggcaccaggtgtttctcaggaaacacaattttgagagcttgaggatgctgtctggtaagacggactgaacctatatttaagtctttgggcccataagtgccttgtccttat

SEQ ID NO: 478321 - DNA, 609 bp, Homo sapiens
agtgccgccaaagtgggagcctatgcagaggaggcgccgagagcgagcgagggctgaggcatcgcattacccagcttcaaactatacttacaaggctattgttgccaaaacagcatggtactggtataacaatggacacatagaccaatggaacagaatagagaacccagaaataaagccaaatactcacagccaactgatcttcaacaaagcatacaaaaacataaagtggggaaaggataccctattcaacaaatgtcactgggataattggcaagccacatgtagaagaatgaaactggatcctcatttcttaccttatacaaaaatcaactcaaaatggcccatttttaaatcatgttctttgtttactatattactaaaacaactattactatactatgcttactatagtttaaactcaacaactatatatagatatatagtttaaactatatctacgtgcatctttgcatgtgaggtgggtctcctgaatatagcacactgatgggtcttgactctttgtcctatttgccagtctgtgcctcttaattgggggcatttatcccatttatatttaaggttaatattgttatgtgtgaatttgat

SEQ ID NO: 478322 - DNA, 675 bp, Homo sapiens
ccagcacgctgtcacctctcaagagtatgagagaaaaggacttccaagaacccatttccacagttgatagagctccatacagattagaacagatccaggaccagacacagtggcacacacgtacaatcccagcactttcggaggcagaggtgggtgatcacttgatcgagaccagcttgggcaacatgaaaacttcaataggctcctttgctacccgtaaaaggggaacaggtattatctatcattgtccaaacccacataatactttatgtagcaatttggtgcttcgagtcactagcctacatgagactggaacccaagtcactggttatgcatcagagcaacacggctgccctgctggcctgttgctgctagagagtaaagagaaggaatcaactgttctgaatgataaaaacggtgaaagtaaagaagatgccatcaggaagtatgaagtaaatgtgtgatattggcattaaggtacatttccattaggaaatacgcctttctccattaggatggcaaaccttccacataccatccagttaccaattaccatcatctgctatgaagcttagtatatctgaattttatctaagccttattttaaatacaacctatataatatgaaatttaatattaaaagaataaataaaaagaaaccagaaaaatattttc

SEQ ID NO: 478323 - DNA, 569 bp, Homo sapiens
tgaacacttcagtcctgttgcttcgctctctctgagaagtactatgaaggccgctgagaaggctgcagaagaaaaattggaagctagcaggggttggtttacaagatttaaagaaagaagccacaaccatgccataaaaatgcaaggtgacgcagcaagtgctgatccaaccaagattactgatgaagatggctccactaaacaacagattttcgatgtagatgagacggccctctgttggaagaagatgctgtctaggactagctacagagaagtcaatgcctgccttcagaacttcaaaatacagaagtgcaacagcagacacatgactataaaagctgtttggccgccaagaagggaaaactctccattgttcacatcaaatgtggtcatcaaggataacgaacaggaaggaccttccaggggaaaatgcagggacctgtggacaatgtggaagagggtgtttctgagtcactattaacatgtgcatggaaccaggaaatttaaatgaattgctgtaatctgtccacctttgtacaccagctcaaaatgccagtctgttaaaagtc

SEQ ID NO: 478324 - DNA, 773 bp, Homo sapiens
tgattgtgaggcctccccagccatgtggatctgtgagatcattaaatctctttcctttataaattactcagtcttggctgctgggagctgggggaggggtgacacaacactcctgtggccaccatcactgggaccgtactgggtcagacctgaagccaggacagcactcggtctgatccaaggcccatggcaaacactgcctcattactgccaatgttcactcaaggcccaatggctcttctatcagcatatggtgaatctagccagacttgtgtccttccttgagggtaagaagctccccctggcccagtgtctgtccagagatgctgtctgggagcctgggcctaaagtcaggaaccttgagattctactggtgctctattctactgtgactgagctggcacccatgctacaagacaaagtccttcccactcttctctttcctttcctcaggcagaagaaatctctccccatggccactgctaccacaggcttacataagcttgtggcaaatacttccatgcctgttctctcctctattccagggtgggcccagaaaagcccatagatgagacaaggcctggaattggtgaccgcaggagcccactttgtgctctaccccactgtggctgatctggtacccaacctaacactcaaaatctgaatatgtgttcacattatggtgctgcatatgtcccataggctttctttattctttttttattcttttctttttatccttttcttttctttgggacagggggttgactcgg

SEQ ID NO: 478325 - DNA, 556 bp, Homo sapiens
tgcaaacacaagcattttgccatggtatcttctggctttagggttttagctgaaatgtctgctgttagcctgatgagcttccctttggcaagtaaagcaaacctgctaatgcagacatgcaccggcaaagtgatgtggggagttgccatgggctcaggagaagctacagtatggggaggaaatatgtgggtctggtgtgcagccataggggccaccttgcttctgctggtacagaagctgccctatggcttgctgtcccaccacttctctaagcatctctctctgccacctcaaatgtccatagtggtcaaggggttccctcctgctggaggtccagagtcctgtggtgagagtgggttgctccttgtcagttcaactcacccatactccctgagctgttgtggttcaaaaatgagtcccaatgcacaatagcctgttgtgtgagtttcccagctttctcacccttcagcccagcttctgtgtctcccctccgtctacttgaagtgccttccctctgaagatcttttaaaagcacaccagttgactcagtcccttc

SEQ ID NO: 478326 - DNA, 773 bp, Homo sapiens
acccccatcatagagcctgacagttctgaggcacgagtcctcaaccactgggccacagactcgtacttatccatggcctgctaggaaccaggccccatagaaggtgaacggcaggcgaggcgtgcgacagggggagcggctcgctgcttcagtgccccgctgctcaaagctctagaggggcatacagacgggcaggctgcggggctcccgccccacgtctcggggtggacgttgacagctccggaagccgcagtgggcatgtgctaccatgtgctcttttagttttgccgtctgtaggcggcttgtgttaacctgctcggttagatcctccaccttgtctcaaggacagagggctttcctggaagtagctcagcgaaagtcagaagtgggtagagtgggagggctttcctcgggagctgggccactcggtggcctgggctttcctcggactgccccagccaaactctgcattgttctccttctgctggttggtggcctgctggcgcctgccggtgcatggccaagggtattcatgaaggatatccataaagaccatgccagtgatggagcctccagatctgctgcctgcaagctaaaacacagaaaagaaaatttaagtggttgggaatcagaatgtgagatggattggaagccaaattataagcttatttcaactcttggcctgcaggcgctgaagtaacattatttgttgtcggggacagaaaacaactcagattcgggtccaagtgattattccacttaggcattgctgc

SEQ ID NO: 478327 - DNA, 604 bp, Homo sapiens
cctcgtcttagttccgcacagtgtggacagccgtcagcatgacctcattcttcttggacgctggacaagagctcaggacccaccaagcaggggtacccagtagggctggtgacatgcctggtctggccgcaggccctgcatggagtttgctcctgtgtcagcactcaaagcagcccactggaccctgcacttgcttactcacatgctccctcccaccaggggctgagcacgtgggccaagtagatgaggctccccctgctgcaaatctcccacttttgaagtccatgccgtcatactgctttgaatcccataccatcagactatgtcacccactacctctcgttgctgaagtcatcaacctgggtcaagtatattgtaagcctcctcctcacttgcatattcttctctttattcgccttatttgtgaaaatcataagtctggctgaacactcgcattgctctgctctgctcctgcatctgtgccgctgagcctgactcacacatactcatactacatggtctcactttaaattcatgaccacaatcctcaagcaggcctttaatactgccggtcattatactatatttccctacttcacatatt

SEQ ID NO: 478328 - DNA, 1959 bp, Homo sapiens
tttagctttccttggagccctgctgttctgacaattaggtcctaagactggtggataccagtcactggatttaaagcgcactctaaatccaggatgattttatcccaacaaccgtaactaattacatctacaaagacaccatttccaaacaagttatattctgagtttccaggtagacatgaattttggagggacactattcaacccgatatagatggtcgctttatgtcaggagctatttgtgctcaacttaccaccagtgatggaatccttattgccagcgaggtggcaagtgacccagttcccaagcctcgtattacattttcacctacccaactttatcagttggtctctccaggaagcagaccctgagactgttgagcctgcagattgtttattaggaaatgctccctggtcaacgcctgtggaaggccagggggagatgccaaattgggcagtgggagaagtgaagctgcagccaccccaggcaaccgcagagggagttttggagctaaaatcgctggtggcaaccgtatgcttgcatgatcctgagagtgagggcctccttaaatgtgaagccccaggcacctccttgactcacccaggtcctgacgcttctgagcatacactttcaactctaataattgcttcagaaattgtccctctgcatgttggaaccaatttatggtctcatcagcaatgccaccccagcttggcattcatcattgccttccccgggcagttttcagtttcctacaatgtctcatactgcctgtcacacccagtgacagcctgttatagtcgggtgggcagcactaaatggctgctccctggctcagccccatccgtcagtgcctttcccctgcatctctgctccagcaccgcccttcctggggatcctcaggcttggcagaggaaaaacagggctgatagagacagagaaagagagagaaacaggaatgtcttggggtgagatttttactttattggtgataaaccaactgtgaaaagttagaaaggagaattttagcaacatgttgaagaggggagttctttaaagggaatataggaaaagcttcataattttattgatatacttgaatttaattttaaaagtaaggacagtagtactcttgcatcaaaatgcagaagatttatttaacgctgtgtatcccacccctgtaggtgttaggaatgcccccgtgaggaagaggaagtgaactgaggtgactacgtggtggcaaaagtcaggaaattagcagagttagggtttgtgtcctccctcctacccaggaagggattagcactgactcatttcgtaaacatttatttagcaacttctgtatgccaagagttatcctccatgctggaatatagcagaggctgaaacagatgaggctaaatcttttatgtctgggattttactgctttcatggaacttaaattggcttgttagggcatggaggaggttaatggccagaaacagacagaaagacacatgataatgaaaataaataaatagttacatgtcagttactgttaaatgctaagtgtcatagtccactttgtattgctataacagaacacaatagatgataatttatttataaagtaaatttattcttcacagttctagaggtaggggcatctggtgagggccttcctgctgcatcatctcatggcagaaggtgaaaagatcagagagtatgagagtgcaagtgagcaagaggaagccaaacttgctttgataacaagcccactcttaagataactaacacactcctgtgataatgacattaatccatgaggactctcccttcatgacctcatcatctcttattcagccccacttcccaacgctgtggcattggggattacgtttacaacacatgaactttagggaatacctttaaaccatagcaccgtgtaatgatttttaaaaggtgatgtgaaagcaat

SEQ ID NO: 478329 - DNA, 569 bp, Homo sapiens
ctgacatgcccgggtattgatgaggttatggaacggaggttatggaaagctcttatatcctggagctgatttctacccacaagcacctgagtttggaagcagaggcttccctctttgagcctcagatgatgcttcagcccaaaggaacacctttatttcagccttggagaagacccagattcctgacccacggaaactgtgagtcaggtccctcagctgcaggtctgttggagtttgctggaggtccactccagaccctgtttgcctgggtatcaccagtggaggctgtagaacagcaaatattgcacaacagcaaatattgctgcctgatctttcctctggaagcttcgtcccagaggggcacccacctatatgaggtgtcagtcagcccctactgggagcctcagcaatggcagatgcccctcaccctgccaggcttctgcctcgccggtcaatctcagactgctgcgctagcagtgagcaaggctccatgggtgtgggacctgccgagccaggcgcaggatataatctcctggggtgccatttgctaagaccactggaaaagtgcc

SEQ ID NO: 478330 - DNA, 1320 bp, Homo sapiens
gacagtaaacatcacatataggttcagcaactgctgttacgagatgttgttcgcaaccactgtgaaaacgacctgtttgcgtggttcgccaaatccagagaacatcttcacacacaagtactgtgggaacggtgtgtttgaggaaggagaggagtgtgactgtggatccttattcttgtgtactcaagatctgtgttgtttggcaaactgtactctgaaacctggggctgcttgcgcttttggactttgttgcaaagactgccagtttcttccatcaggacactggtgtagagaaaagcacaatgaatgtgatctttcagagtggtgcgacggaactttgcataattgtccagaagatgtgtatgtgcaggatggccttggtagcatggacagtggctaccgctgtcaaaaggcatgtagaaaccatgatggacagcgtaaacacatttttgagaaggtagccaagagtgcaaatcagagttgctacagggtgaacaccgacggtgactgtttggccactgtggtttcaataacactaaatatgtaagatgtaatatttcagatatcctgtgtgggagagttcagtgtgagaatgtgacagaaattcccattccgagagatcattctatgatgcactgggctcacttcaacggcatcaactgctggagtactgactaccattttggaatgaccgtacctgatattggtgaaattaaagatggcacagagtgtggttcaaaacatgtgtgtacacataggaagtgtgtccctctgccatttgaggaaagtacttgctcacctgagacctgtaatatgagaggcatctgcaacaataaacatcgtcattgcaattataagtgggccccaccctactgcctgttaaaaggcacaggaggaagtgttgacagtggcccatcccctaggaaaaaaacaaaactatgattgcacaagaaaattttgttgatactacttttattaattcctgtgtgtctctgtttacatttgttaattttgcttagtaagagccaaaaaccacatcagaaagaagagcaaaatgttcaaacttcacctgagaaagaaaagcaaaacgttcagactccatctgagacagaataggaaatttttacaatttcagaaaagaaactcaatccttaatgaaatatcctgtgtattaatttttagttcctggcagtagaaatgttattgccggtgtcagagaccactgacagaaaaacccagagatctatcatgtttcaggattaacaatcaccattaaagaaagatataaacagaagagctaataattagttttatgtttat

SEQ ID NO: 478331 - DNA, 704 bp, Homo sapiens
gacatcactactctcgtaatgaagacggcagatatcctacgcacctgacttacaagataagctatgcagccttggataaatagctcaacgcctctgaacttcgatttagttacttcaaaagtgatccaaatagctagtttagctgcccgtgggcaacaaagtgaggctctgtctcaaaaaagaaaagaagaagaagaagaagaagaagaagaagaagaagaagaagaagaagaagaagaagaagaagaagaagaagaagaagaagaagaagaagaagaagaaaagctacataggtgctaccctccagaagtaaatatgaccatctacattcatgaggaatcaattttgttaagcctgctggaagaacacaggacccaaggctgtcaaccatgctcaagcctggttgtctctgacttggatgttattgtgtgtgagtccagcacattacacaaagtggtcactgatttaaagcttagagaaatgagacacaagacaaagagcattttgatagactttccttttgaatctacatcgcatgttccccctcaatccctgccttctgaaacagggaatgcctagaagtgcttgtagttttaccgactttgagatgccgggagagatttctttcctattttcagactccttttttcatattacttcagcttgctgctgattctgctagtattctttgaaacaattttaac

SEQ ID NO: 478332 - DNA, 894 bp, Homo sapiens
tatcaagttaaaactagggacatggatgaagctggaaaccatcattctcagcaaactatcacaagatcagaaaaccaaacattgcatgttctcactcataagtgggagttgaacaatgagaatatgtggacacagggaggggaacatcatatactggggcctgtcgggggaagggggtctacgggagggataacattaggagaaatatctaatgtagatgatgggtggatgggttcagcaaaacaccagggctcgtgtatacctgctatatacgaacagtctagaggcatttcaaataataaggaaagtgtttccaaaatgatgaagaccacagacagcaacacatatattaataattatcaaaccctgcctctgtccctcatatcctcagcaacactttacaataactgtaacttctctataatttcaattccatgcatcccatgtggtaatcaccactgtggtctttccattccactgtcagtgtagtggacagtccgatttgaatattaactactgccaaagttcagtcacgggttagaagggtggccactgaaatatgggttgttaaaataatgcttttgtttggtatgaggacttcctctcttaaatggtgatatcacacaaatgactaagtcactttatttgaattaaaaaattacccacttggtgcctggattttttattaagtaacctctgactatctttatttcctcatgtgaaaaatgcaatcaatgccagtaatcataattattgaataagttaatgtgtatttagagtggtgcctgacacatagcaagcactttctcaaagcagtttattttttattaataaaatgaaagctgtatgcatacaaagagtatttagtgaattttaacaaactcattttatttg

SEQ ID NO: 478333 - DNA, 1593 bp, Homo sapiens
caggactgggtgttgctctgggagagtgagtgacaaagaatgtgtttgcttagtgcttgctttaatagcagtggggatcctaaactcagtgttcctcaactacagtgcaaattcactgtgtttgtagcatccacgtgggtcatacaccatcacttctatgggacatgtggatgtgatttgcatttcggtgtttgtttagggggaatttcacattggaattctgctgagtggttagaatttgctgcagtgacgaacagtgttgctgcagatgcagcctcgcagcacccagcttcagctgccttgcttatgttttgttttttcctgctggcttctccattccgcccctgtgaacttggaccaatggggtgggagccaagcgggctgccggatgaaagtgaccgatctttaaacttcaaagcaccagaaaagatggacatggatgaaattggaaagcatcattctcagtaaactatcgcaagaacaaaaaaccaaacaccgcatattctcactcataggtgggaattgaacaatgagatcacatggacacaggaaggggaatatcacactctggggactgttgtggggtggggggaggggggagggatagcatcgggagatatacctaatgctagatgacgagttagtgggtgcagcacaccagcatggcacatgtatacatatgtaactaacctgcacaatgtgcacatgtaccctaaaacttaaagtacagtaaaaaaaaaaaaaaaaaaagacatacccaagactggaaagaaaaataggtttaatggactcacagttccacgtggcttattttccctctttattacctgttttgttcttgactttgcttttttctgtcattagcatatcatagagagatctagttattttagtacacgcacaccttctgcattctgtttctacaagtgtctaatattccatggtgtagaagtactttattcagtcagtccaatatttttgggaacttggattatgtctagactttttctactacaaacaatgcccacaatgaaaaatcttgcacattttattctacaagtgtgccatcatctgcaaataaagttttatcttttccagtttttaaaaagttgtattttgttttaaattgacacataattgtacatatttatggggtagagggtgatgtttctatacatgaatacattatgtagtgatcaaatcagggtagttagcatactcatgacctcacaaatttatcatttctttgtgtgagtttttattatctgcaggaaagttacaccattctttttcatcactttcttactgagtttgacaaaactctctcaataaataaaatatcagataaaaaatcgcttcccttaagccttctttattggctcctcttcccctgcctttcctggaatggttggacgtctgtagaattctgcctagatcctcccgatttgctcatttttacttcgggaatgtatgagtctcctttcatgtgtgccttatccaatgcagcagccctcaatatctgcctacctcttcagctaagatcatgtcaaattttacttttttagtttgcattagttgtattgactatgtttt

SEQ ID NO: 478334 - DNA, 938 bp, Homo sapiens
tttaatctttacaacacccttttgagtctcaagactttggaaaggggcgcttaggctattttggtctgtatttggcaccagggaagcgagactcgctgtccaatccgtctgtcattgtttctgtcatttagggttccgagaagcggcaaagctaatgctctgaaggaggaaaagaaatatgttgcgatgttctcaagacgtatatcaaagatgtttcagtccccagatgacgaatcagaaaaagacaccagttcaacagggagaatatgagttttcttttggccctactggatttgaagtgagaatacagtgtccatataaagcttctcaatctcagataaacaaagagcagagtgagtgtgacctatcaatacccattcttcacgttgaccatctgaagaagacagactgcgttcatgaagaaggacgaataatgctcagaaaagagggtgaagatattatagactacactgatgaatatgacctttggggacctcaccaaaagctggggcaagaagtttcctattttaacatgctgttagatactgttatttccaaagagctagatgtatccttagcaaaggtcctccactctttctgccaagatctcagtctatgaacaatgaagcttaaatgagattaccaaacatatactacttatatattaaaggtattgatttcattttgactgtaattgaaattagtatagtgaagtagtgcgtctttattagactgacaaagttttaattctggccccatgatttataagttatgacccttgggcaagtgaattaatcactgtgtaaaatcatgataatggtctgcttcatactgttttcatggagattaagagttaaaatatgtgaatatgtgttaatcatgtcaagtaaatagtaccaattcaatacaaccttttccagaaaatctttccaaagaaa

SEQ ID NO: 478335 - DNA, 730 bp, Homo sapiens
aggggcagcagtgttgatggaaaggaacaaagaaactggaaatttaagaatttagaattggtaaggcttgtatctgattagatgaaccagttgatccctccatccttggccactgttcttgaaaacaaaagtgaattgactccctttttctctagaatgatttgctccagaacaaagtttaattctttatgtatgaagacccataattgtttctatcaccctgcctacatattcctaactagtaaggattggtaccagttcttctttgtacaactggtagaaattgactatgaattcactggtccaaggttgcttggggttgattctgaattctatgtctgtcatttcagagattttagactggttaagaaatcattgctgggagctagtagactcatttggagatcagtggtcctcaacctttttggtgccaggactggtttcatggaagacaatttttccacggaccagggagtcaggaaaggatggttctgggatgaaactgttccatctcagatcatcaggcattagttagtatattagcccattttcacactgctacagcgagctgcccgagactggaaaatttgtaaaggaaagaggtttaattgactcacagttcagtatggctggggagacctcagaaaacttacaatcctgggggaaggcaaaggggaagcaaggcaccttctttacaaggcagcaggaaggagaatgaacacaggaggag

SEQ ID NO: 478336 - DNA, 568 bp, Homo sapiens
gattttcaaaggggagggagtgtacaaataggggtacatgtgcacaatgtgcacgttagttacatatgtatacatatatcatgctggtgtgctgcacccattaactcgtcatttagcattagatgttctgggatatgggactcccttggacagaggccaggcctggaaaataggccgcacttcttctggactagccctacaaagggatggcttccctgctcccttgttggcccataagcccatgtttctcaaccctgtcagtattctgagagtgagggctcctttcctgctcaagtgtcaggcacagatcttagctcagtactctggagctgtgcactgcaaccctgaggcacaggaaccagctcatagttatttttttctggccccttgggataaggcaggggccctgggaagagctgtctggcaggagggcctaaggaacagatgtaccctagtcatctggaagaaaggatatcactgactgaagatcaaattaatgaaatgaagtgagaagacaagattagagaaaaaagagtaaaaagaaatgaacaaagcctccaaaacatat

SEQ ID NO: 478337 - DNA, 589 bp, Homo sapiens
agagctttcatgaaacccctatgcataaatacaatgtttttttctgtcattcaggacacaacaggtaataagaaccctgccattcagagtggagcagtagaccactttgtgaaaccatgccacagaattgtaaaacctactatgccattattagcccatcatgtttctatagacaaaataatacccactttattgaatggagttttcagcaagaagacaggtggtatgatcaccagcatccatgtcacgaggacccttgaccatcctgaggccagcatccatgtcatgaggacctttgagcatcctgtagagtggttcatgtggcaaagagccaaggcctaccagcaagcaatactcatggaagctgacagtttcatgagtattgaaaacagacacaaaccacgtgggtcagagataaagggcatcattactcattgaaaagcggcatgagcagggtatttgtgtaatacctctttacccacaagtagcataggggtgaagtgaagaagctcaaataagtgcttgcacatgcagtagcttcagtgcaggagagaaactctaagcttagggagcacacattatttttaac

SEQ ID NO: 478338 - DNA, 2250 bp, Homo sapiens
gcttgttttggtcgggtttgtcaaagatccgatggttgtagatgtgtggtgttatttctgaggcctctgttcttatggtgctctcatgcattggtggtcatttaatggttgctacagtgtggaaacacaatggaacagtgatagatgatgagattataaagaaactgataggacagaggcttgtgaaggcacaggaggaaagttgtccagaaatagacaaacgttcttccagaaaggcttttcctgacttagtttgtgatatagtcttccttcagtgcttccaatcaaaaggcactgtatctcagaataacaacagtaacaatgacaagacagagccaactattggtaaaaatgttgaacaaactgaattttcatacacagtcatgaagaatgcaaattggtaccaccgctttaaaaagctattggcagtgtctcccgaagctgagaatctgaacatttgcataacttaagacctagtaattcctttcttatgtaattcccaggaaaagtaaagctcatttatattcatatgcccataaaaagacatactctggaatcttcatggcaacactattaacaattacctacaattttaaactatatgaatgcaaattaaaagtagaatggaaaatgcatgttgatatattcatacagttaaatgctatgcaataatgagaatgaaagagctaaaattacatgaaataataaaatggttagatctcacaaagaatgttgaggggaacaagacaatcgtagaaaatgcacactataagattccatttatataaacttaaaacaaaacccaacacaactgatatatggtgtcatcattccgaatagtgtttggtttctatttagtggactgtgacagaattggagatctggaatgagagtttcttgagggaaaaaaacttgtctgtttcagctttgcattttcagttctcagaacaatgtatggcacatgtttcagggtgaatgaccacatgattaattgaatgaatggattgatttataaacccatcaatggcaaagatcatgaagaacccaaatgttttcttggtgcctgcttttctactggcattttgtttgcttacctttgtgtttcccttgatccttccacaactttatgaatttatttagtcatccctattcacattttataaaggataaaactgagtctaagggataagaagtgaggtacccactaaaagaaaagcagtaaacattggaactccaattaaagtacaacattccaccttcagaatataaatttcatagtagtaacatagtatattagtacagtatataataactatatgtatgaataggctctcacaggtgagagccaaatgtgtcaataaatacaaacatactttgagtattaaaatccctataaaaatgttataatgccttcccacctctatattctgatatgtgagggcactcatcaggatttgttttctttatcttactctattatagtatttggcatccattaagaaaatacaaaataccaaatggtctccagcttttatataattaaactttcctgaacacacagagccagctcgagtcatctcctcatctgatcttccataattacatacactacttatatttatttatcatatactgctttaaaaaaaattattcatgggttcttggaaagcagggagaatacttctcatagacctgtgcctctcatcaaactttgcctggatttccagaaaataagtgctcttaaattgttgtcactcaagatactttttaaagactcaataatacagctttttcatatttttattaaaaataaaaagtgtctattcagatgtatatattttgtcctttcttttttttattttgaagcaaagaacaaaacagctgaaatagctgtggaactcagtgtttaataaaactgattataaatctgagctagtactaagcatttttatgccaagtaaaaatattctttagaaagttctcaagtaagcatattaggcacatcacagaaatatattgctgctttggactgtttcacatcattttcaaacttttcctgagcacctaattgtatatgatgctgtattacattatgttacagacaactgcacatatccaatcccagcacagctagagttgggacaactttgaaactagtattcaccaaagaatattgattctgataatttgtaacatcttacaaatcttattagtacaagtgctagaagagtatgtccctttaataagctc

SEQ ID NO: 478339 - DNA, 634 bp, Homo sapiens
tgtaggctacggacagcgatatctaagctggatgtgtcactgtttttagtcttatgccatgtacattatgactaaagagcataataaatctaatttcatttttctacatgtggtggacaattatagcacaaggcaaaggagaagcaagcacctgcttcacaaggcggcaggaaagagagagcgcaaggaagtaccacattttaaaaccatcaggtctcctgaaaactcaatcactaccaggagaacagcatgggggagactgccccctgatccaatcacctccaaccaagtccttcccttgacactgttacaatgtgcatttcccatgtcagccagaggctactgcctgaaggtctctgacagaaatcagtgtgctcaaaatgctgccaggccccaagcaggaaaggtacatacctctgtgtaccctgtggagcacccagagctgccaggaacaaacgagtatgagagaaaaatgctagtcacagagggtcaaccaccactacatttttctcaaaaagatctgtctgcatagccagttctgctacactgccaacttaatttgggcatctcttagtgtggttgagcctaatgtgcactttatgtttcccttgtatagatctctttggagaccttc

SEQ ID NO: 478340 - DNA, 603 bp, Homo sapiens
tctgggatttttataggcttataatgggggagaagacatatggatcttggagaatgacagtggattattgtaactttaaccaaggggtgactccaattgcagctgctgtaccagatgtggtttcattgcttgagcaaattaatacatctcctggtacctggtatgtagccattgacttggcaaatgcctttttctccattcccgcccataaggcccaccagaaacaatttgcctcagctgggaaggctagcaatatacctttattgtcctacctcgaagccataaagtgtgtcatgcacagcagcattccaccatcaaatggaagtgttatatatgtgatcaggcttgagcaggtcctgaaggcacaagacatccttgaaggagagtggggaagggacatcttcccagtgggcagagcttcaagcagtgcactggttgtgcactttgcatggaagaagaaatgtccagatgagctattatatactgattcatgggctgtagctggtggtttggctggatggtcagcgacttggaagaagcatgattggaaaattggtgacaaagaaatataggaaagagggaagtaagctttctgaacttcac

SEQ ID NO: 478341 - DNA, 631 bp, Homo sapiens
ccctgacagtgcctgtgcactccagttcccaccagcaaaggggtcagggaaatatcctgcttcagtttgggtcagttccctgtaatggttaatactgagtggcaacttgattggattgaaggatgcaaagtattgatcctgagtgtgtctttgaaggataagttgctgcatttggttcctcctaaaagcaagaaagaggcacgacacctagcgggcctatttggatttttgaagcaacacattcctcatttggttatgttactccagcgcatttatcaagtgatccaaaagactgccagttttgagtggggtccagaacaggagaaggctctgcaacaggtccaggctgctgtgcaagctgctctgccacttgagccatatgatccagcagttccaatggtgcttgaggtgtcagtgacagatagggatgctgtttggagccttttacaggcccctataggtgaatcacagcagaggcctctaggattttggagcaaagccctaccatcttctgcagataactactctcattttgagagacagctcttgttctgctactgggttttggtagaaactgaatgttgactatggatcatcaagtcaccatgcaacctgaactgcctatcataaa

SEQ ID NO: 478342 - DNA, 1044 bp, Homo sapiens
tctgttgtttcttgcataagagcatatacttcccagccatatggtcccaagagcctcttggctctatcaccaccatcaccatgaccaccaccaccaccaccatcaccaccaccaccaccaccaccaccatgaccatcaccaccaccaccaccaccatcaccaacaccaccaccaacaccaccaccaccaccatcaccaccaccaccaccaccaccaacaccaccaccaccaccatcaccatcaccaccaccaccaccaccaccaccaccatcatcaccaccaccatgaccatcaccaccaccatcaccaacaccaccaccaccaacaccaccaccaccaccatcaccatcaccaccaccaccaccaccaccaccatcatcaccaccaccatgaccatcaccaccaccatcaccaacaccaccaccaccaccatcaccaccaccaccatcaccaccatcaccaccatcaccaccatgaccatcaccaccatcaccaccaccaccaccaccatgaccatcaccaccaccaacaccactaccatcaccatgaccaccaccaccaccaccaccaccaccatcaccaccacgaccaccaccaccaccatcaccaccaccaccaccaccatcgccatgaccaccaccaccaccaccaccaccaccatgaccatcaccaccaccaccaccatgaccatcaccaccaccaccatgaccaccaccaccaccaccaccatgaccaccaccaccatcacctccatcaccaacaccaccaccaccaccaccatgacaccaccaccaccaacaccaccaccatgaccatcaccaccatcaccaccatgaccatcaccaccaccaccaccaccaccaccaccaccatgaccatcacaaccaccaccatgaccatcatcaccaccaccacaatgaccatcaccaccatgaccaccatgaccaccaccaccatcaccaccaccaccatcaccaacaccaccatcaccatgaccatcaccaccaccaccaccataccatcaccaccatcatcaccaccatg

SEQ ID NO: 478343 - DNA, 709 bp, Homo sapiens
agagcagagcccacacctgctatgccacaagaggccctggatgccatggaggcgcaagggcccaggcgggacttgcagaatgagagtcctaggcccaagtatagagtccctggtgggcacagaggagagaccaggtggaaagtagacttcactactgtgggagtgggggcattcctggacacagggggaaaccagctcacagaacagcctggggtcttcttggaggaggccattttggcccagatcctaaaggaagactggaagcctcagggggcagaaatcaaccgtggaaacacacggaccctgccctcccggcgccagtgttctgggtggtcaggaggtgaagaaaccagcaagaaccagcacaggaatccgacggtggcaacgcgagataaccaagcttggaggcgaagtagagctacaaaggctcccatagataaagccagcttcttgaaaatggcggtcttgagattcacgaaggctctggaccagaaacgggacaaggcccacgggacagatgaaccaaggttcggttgtcccacctgagctcctcccctccacctccctcactccacgtttggagtcattccacagcttcctaaaccacccacccaggcaaccccatccccctacccacccatccacccaccaactcaccctcaacctcccatccacccatcctctcactcacctgcccacccactaaccc

SEQ ID NO: 478344 - DNA, 738 bp, Homo sapiens
gaggcctgctgtgtcttcctgtgaaaggcattttcttcccctcctctgtgataacatttggatcctgaaatgaggacaaatagaggagagtcaaatgaccagatctacagctaccataattcagcagtgaggctatacttcctgggcattttcttaatttcctcttcttcctcctcccctccctctccccctcctcctccccctcctcctccccctcctcctccccctcctcctccccctcctcctccccctcctcctccccctcctcctccccctcctcctcctcctctttctcctcctcctcctcctcctcctttcctggtggattctgctctgtcagggtcatacactggggccatagaaagctgtcttcaagaacgcttccaagccctggaaaggaacttgcagaccttcagtcaattagttctgaacctaacaactggcccaggactagaaatggatcaagtaccatctcagctgagttatgttgtcacttagcactgtttattactctgatggacaacatgggaggaggggtggagattctgaggggcacacaggtcatcttttcagtcagtagtatcacttatcataatttgtttttactttattaaagctcaattaactagatatataattacacaaaataggtcttcaaattatgtttgtgtttatatacaattattgttgagatattaataaaaaagtaaagcaaatataaatctggatttggggaaa

SEQ ID NO: 478345 - DNA, 2197 bp, Homo sapiens
atatgctagtgaaaatcaaccctctttttccctgtcgccgtccacgtaagatgtgacttgctcctccatgccttccaccatgattatgaggcctctccagccatgtggagctgtaagtccactaaacccttttttctgcataacttacccagtcttggaagaagacaggacaatgtgggaaagtttggaacttcctagagacttgttgaatggctttgcccaaaatgctgatagtgatatgaacaataaagcccagactgaggtggtctcagatggaaatgaggaacttgttgggaaagtccctactggggcaatgcctactggagctgtgagaagaggaccactgtcctccagaccccagaatggtagatccaccaacagcttgcaccatgtgcctgtaaaagttgcagacactcaacaccagaccatgaaagcagcttggaggaaggaagtagcccgcaaagccacagggtcggaggtgcccaagacagtgggaacccacctcttgatcagtgtgacccagataatgttattcagccttaaaaagaaaggaaatttgaaaacatgcgataacaaagatgaatcttgaaaacattatgctaggtgaaatgggacagtcatgaatgaatacactatttgtatatatacttttatactgttgtgctatatatatgtatatgtacctgttgtagtataaaagtacctgttaccactgaactgtgcacttaaacatggtttaaatggtgaatcttaagtattttgcttttaaagtacctttaagtttgcaaagtactttaagtactttaagaattttatgtatattttaccacagtttttttaaaacaacaaaagaacaatgttgtctctaattacgtcagacatcatatagcataccatatgatacccttcagcttcagcaagtaatgacggggtccaagattcagtaattgttaaatgtactaccctggtgattttgatgaagagaataaattaggggaaaattgtgatagtggaaaatatcttcagtagcatttgtcccaagagtctagtataaattaatatagttctactctgtcactacaaatttaacatgttttaatttaccccaaaatgctacaagctgcttattgaatcacttctctgaggcacttataccaaaaagtgacattctatttttcatcgaccttacctcacccatccaacttcacttggaattgggtagctgtaagcttttccttgactttataataccaggattatttttgcaatatttttcccattagcaggcattcttacctaaaaaacaggactcaccaacaaaagtgaaccttatagccaagtctgtataccacagccatggatgtttagatcacatggggaatgtaaccagtgtgatccaaactgagacaatcagatgttttcttttttggaagatagtggctgaaatttacaaatgttagaaaatcatagtctttatactggaatcagcatgatgcccataggtttattcctcattggctttctaacaatgagatcgcaagcttttccaggtcatgtagaactatgccaagtctctgacttttatacttcacccaaacttttaaatctatttttttttcattaaattaagcactcttctgtgttttcccatcctactcaaatcaatatataatcaccagttgatttataaaaggactgaagaaagtttttttgggaaacttatgccagggaggttgctgtatttcttcggaaaatatgggagtgcaggcctgagaataaggagagggaaaaaacataaatctggcacaatggtaaatggttgtctccttatataaaaagccttattccaggatctcaactctgacatattttgaataaattttattaatatcacagtaattgatgtaaggaagggcttagtttcatgcagtgggtgatcataacatatagcacattatggctaagaacaagagagcaaaggatttaaaatgtttatgttccttggaaattaaaggaaatggctaaaggctttggattgcacagctgatggcactggcaaaaggtaccgtggcagtgtctagctatatcaaatttgcaatttggttcctatttaacgtcctttttgggaatatgtaaatttgcaacacgcaactgcattttcctttaatcaggactctgaaactcatctagtagtacc

SEQ ID NO: 478346 - DNA, 627 bp, Homo sapiens
actgaatactgtaggtgattggaacacaatggaaagtattttctttgctgcagtttgcatctgctctctagcaagaaatggaattgaaaaaggaattggtggcagtgacagtggctggacttattactggagaaaaggcttcggggatcttcttgttcttgtcttcccaatagtaggagttttagataagaagatctttcttggtgtcagcccacaagcagccatggcagaactggggtctagggaacaggttctgaaagcagctgtggagccaagttcctgggctctggattatacaactactgtagtacctaagggacattccaacagctacagccctgaaggctggggtgtagttgtgattcagaccactgggagcagggtgctttgccatggcactggggaagaaggagtgctttggaggctttgtacctggggaacaaggcacagctgcaattcaagacctgggactaacaggtcacagtggcaacttgggctctggggaataaggtaccatgcagtggtgactctggatcctgggataatggtacacaaaaacagtactggctttgtagggccaggtacaacaacaggttgtaaatgaagaaataaaaaaactttctattt

SEQ ID NO: 478347 - DNA, 1629 bp, Homo sapiens
caggaagctgcggtgtatatctgctcattccagtgccacatagaattgacagtgcttcctgtcaggaactttctgacattcccttggccagagaatgttctcaggccaagagacacagagagctgaggactgcgggcaggtagcccgaggggatgtgaatgggacaccgacagcatctgctagctttggcagatgggagctagggccactccatgctaagggacagcatgaacaaaatgaaggagaagatgggttgagtgaggagctcgccaagctttgctccagagggagagagtatttgaaattgggactatctgcaaaaatcaccaaatatatgaagggcagcaaggaaactctaagaggggaaaatgggcagcacaccggcctgggccggcagttggacaatggtgaccggatgagtggccagtcatggttccactcaatgctggtgaatgaactatcccctggcagtttgcaaagctcaggtccacagctgactgtggaactggaagtgccacagcacccacccctgccgccaagccgtgccccacttctgctgctaaatggagaaaggatggagcctacattagaaaccagagacctggcaaagtgggtgggacaggaggttcctggcaagcgacagacagaactacagaatgccgtaagagaaaggaaggtgatgaggcctgctcaagagcatttggctgatgggggctgaaacctctcactgcaaccaggttcatttggctccaagtcctgtgtgctctttatgaagtcatagcaaggcctggactagggtgagaaaggacaggtgcctgtgaggcaggacttaaaggaggcgctggccctcaggggcatgcgagggcagggtgagcacctgagagtgagggcctccttaaagtctgtggtccagggtcctttggtcccctaatcccagagcagaaaagaaagccttcaaatccagctgctgcctgaagagcctcagactcactcccctggggcagcaaagtgcatttctttacccacaaggccctgtagtgctgactggaagatggggctgtcagggactcatgggaaagaatggcacattggatacaaactcattcggcttagttttaccctgtggctgcccctgtagtgtcatttgtgacaccaggaatatgttccataccaaccgaatagcttctcttcctattcgtgccagtgcatggaactatataatcattcatctattcattaattcatttatttgtagccttcctctttatataggcttagagagccactactcgaagccaagccttacgtcaggcagcagagataccaagatgaggttgaagaaaacacacggctttctccactcatggactccaatgaggatggcaacaacatgggctgagacttgaccttgtgactccagcctaggattatataaggatgtgactgaccttagaggatttcacgggaacttagctgtacacgtggaacccatttatttgctgacacttctcatttcctttcagaacaaacctacattcccagacctataattttcttgagaaaatgggtttattataagtcactcaataaaacaccctaccatggcttcccagtacaaaccctagtttc

SEQ ID NO: 478348 - DNA, 998 bp, Homo sapiens
gcaataatcctttaggctattgttagcttgtcttggctctgcaggctcttttttggttacatatgaactttaaagtagttttttccaattctgtgaagaaagtcaatggtagcgcccctctgctgcaggtctgctggagtttcctggaggtccactccagaccccatttgcctgggtattaccagcagaagctgcagaacagcaaagattgctgcctgttctttcctttggaagcttcatcctggaggggcatctgccagatgccagccagagctttcctgtatgacgtgtctgtcagcccctactgggaggtgtcttccagtcaaggatacaggggcatcagagccatcaggcagggacatttaagtctgctgaagcgtgcccatggctgccgcttcccccaggttttctgtcccagggagaagggggttttaatctataggttgactggggctgctgccttcttttcaaagatgccctaacccagagaggagaaatctggcagtctggccacagtagccttgctgagctgagtgggctccacccagtttgaacttccaggtggctttgtttacactggggggggggctgcgtcaatgattgtagtgctaattgttacagacatgaccacaatgccaaggcgaatggggacaatgaaatccatggctggttttaagggcaggtgcagaggatccagcatgttattctgaaaccccagaagacgctgcagctaccaaatagaaggagcctggatccctgaatgtcttcatggaacagaacattctcctcactccagtctgtttgaaccagaatatgacctgagcaagaaataagccttaattatatttgaccatagaattctggtgatatttctatggctgtaagtccatgttgattaatacaaagggatgctgtaaagcctcttctattaaaaaaagttgcccaaggagtgaaaggagagatattttctgtaattaagattttcataatacatagaa

SEQ ID NO: 478349 - DNA, 503 bp, Homo sapiens
cgtgcaaggcagtgggtggtggccctggctggctgcagatgttgagtcagctccataggaccgtctttgcaaatgtcatctcgtgcaagaacaataattatcctgtctgttgccagagagttttagcatttacaaagtgcctgaatacaccgagacttagaaatgattatctctgtgataatggatggagaaatggtgacttcgtgaggccaaataacttgctgaaagtcacacgatatgaggctgaatgcaaaccttctcctgctaggctcttcaaggccatgcagtcttcactatactgtggaaacctcacaataaatcctacaattcctccactaagaacggaatggattttaaacattaacttgggtgactgtgactcagcagggtctctatttccatgggatttgccttttaaaagatgttcgatagaaaatatttgtaatgtacagccaacaaagggcaagtatccaagatgtgtaagtaattcctaaaattcaata

SEQ ID NO: 478350 - DNA, 520 bp, Homo sapiens
ccaggtaaaaggagggcgtattcaaatggtattcccaccaccacatctcccagcacttcaccagttcccctggatgcagcagaattcacatgagcctgagagtcaggcagcatctctcgcctcacgctacagcgtggctatagcctatcacagtacaactcctcctggccttcagccaccaacagttattctgcaggactttctgagcggcactcagatcattttggtactgacaaacttccaggacaaagtgccctatggtggtagaaaatgtgagaaggtggcaatgaagcagagcactgttgctccgaaagttatgtaccatgccagaatgcaaatattctcacatccatataagttgcgaggcacgcgaggggaggtaggcaaggaacagagaatccacaaagtcactataggccttgtagactgctggtggactgcccgtgaccatccacggtgaagtgtgggagcctcatgctcttgggcaaggcccctccctgacatcagaaatccttagcat

SEQ ID NO: 478351 - DNA, 622 bp, Homo sapiens
attggggcctacaaacttcaatcttctgctctgccccactgcaatgaagaagagcagtgaatccaggactggaggagacgagagaattctagagctcactgcaaaagccgtgggtctgaatctcctcaatatctctgagtctgactctccctcctggtacatacccaattcaacaacaacgacgacaaagtacccttctaagttgggcaattctctttgggcaaaattatctgcagaaatcagaatttattcttcaatctcccctgacgaattaccccagtatttaaaaggcaggagaaaaatggtgctgcggacgtcagatgccaggggccctcctcagccccatggttcaggggtatccccccctaccagtaagacccagaggttccaaggaaatgagaggcaggcaagaatctgtgcaaatgttgtcgtatttaatatggtcaggttccctgggtgatccagtgcacaattttcttccccttataaataaacccagctgagcgtgcgtttgcagctcatcatcacttacagaagcgaatgagcatagcaatttattgtttcttattgcaggagttttcagagcagaaagttaaacttttatctgcacattcaagtgagg

SEQ ID NO: 478352 - DNA, 1533 bp, Homo sapiens
gccattcagtgccccaataactggtgcgcctggaactcaagccagatgttccggctttgggctccgggtctttcgcatccgtcttccagaagcccaggagtctccgtggagtcctgcatgttagaacttactagaggcaccatgcaagccaaatgtggaggagaggaaaggagtggagactgtcacccagggcaagatccatttggatgttgtcccaaagaggctgcctttccaggtcccccgcctctcgatcttcagtttgtgaagctgtcaatggaaactggatccaagtgtgacacccaggatgtcagagaatgcgacagcagcactggggacatgaatcacataatgccacacatcagcattgccagcagagccaggataacttggcagtgggcacggaaacaccgtctgggtcagaaggtgctaagaagagctggtgtgttatcattagcaaagtaacacacagattcaaccaaggctgctaataccaagttgccatgtcttccaccctctccttctgccctctaactgacctcaggcaatctctatttggcccaaacccaaacactacaagtttttggtgacatttgtattgagtcccctttctgcaactcaccagtgttggccactgtgaggccatggtagatgtgggcagggaactggagactccgggcccagtgggttcaacctcatgagggagtggagttgagatgctttggggatcagtgacacaacctcttacttggcttggggtgcaaacctagactccctgtcaccctggccttctcctctccaagagaaggagaactgtgggcatcgcagtggtgacacttcagttatcacaggctcagcagccaagtgaaaagatgatgttggaatttcctagatgattccattcatggattggccatgcagcagtccttagggatcccctcctaaaagtcacgatctacccaagaatccactgtgaatcgaccatccgccagtttctccaaacgttttaaagagcaatttgtattttcaacctgtctcacctcttggggataatgaattagacgagttgactacccactgtgtctcagcggccctttgggctggtgtctttagggaacagtctgtagccattcttatccttttccaagctgtcctcccagaactacatgcagggttcattctagcacagggctgccaactttctctgttctcacatagcctcttggcatcagcctggatttatctgcaccaggtggcatttgcacatgcagagggcctccctgatcctctgattacctggaggcctcattgcacaattcctcttccatgaaggtgtagaataaataggcctagagttgaacccaaaagaaagcaacctagaagtgaatagagaaaggacccgtttgctgttttgttagttgttgtccctaagctgttccctatcaatgacaaaatatttggcaccaaaggttcttaattttgaaagtaaccttgtcaaaagcttttgaaaaactaaatacaatttcctttcccact

SEQ ID NO: 478353 - DNA, 617 bp, Homo sapiens
accagcccagccaacatggtgaaactctgtctccaccaaaaaatacgaaaaccagtcaggcgtggtggcacgcacctgcaatcccaggcacttggcaggctgaggcaggagaatcagcttcctttagcatcctgccagcagcacatgccaggctcccagcttctttcagtacttctggaacctgctgtgtggtgcccacccttcaaaagtctttccttccagcagctgtgcaatgcaccacccctcagaaatctaagcactggcgaatctaaccagaaatctaaccacctacccttcgagctcctaagttgtgccagtaaaatgcagatgctaacaatcaaaactaacatgaccacagtgctggagcagggtcctgcaggagtcggctctgttgggggcatctccttggacagtgggagaagctcaggatgtcccagtggcagctgggatggccatgtgggcattcaggagctgggactggtgacttttgatgtcaagtagttcagaagcatctcattctctgagcaacttttatagccttcccaagtctatcctttcttttaatattctctacagatttttggctgccttttccagtcaataaatgggatgggttg

SEQ ID NO: 478354 - DNA, 529 bp, Homo sapiens
cctctgaagatgttaggagtgtgccagtcctcttcgtttctgcgtggaagctcttacacatggctgtgtcccgagtgcagcctgtggtttctactcctggggaccaccctttccctcacagtacaacttctatggaggccagcttgtcaccaggtcctgttgggtgaggtgctcagagtggggggacttcctgaagattcctctgcttctgctgccatgtccctcccctcagtagtgtccctgtgttcacaagaacgccgccacgtggcagcataccctgcccaccgcagagcaaattgcgacaaatgccaaggagagcttgattctgagatgcagcattgcaggaaatacgtgaatgtgcttaaccagtattccactctctttgcaaagagaggctcctctgctaagttggcaattacaccagcctcatatcctgtattatttgaagtgcgttgactgtaggagtctctgcatgtgtttagttcagatgaatttagtctaatgagttttctgattaccccactcttgc

SEQ ID NO: 478355 - DNA, 589 bp, Homo sapiens
ggagaaaggtggaaagggggccatatggggaggccacaggtaggttttctagtcaaaagcatcagcattggtttggcggacagccagcattcaccaccagacaagggagtggtgattccatgctcaaccctttgtgtcttccagctgaggccccaggctctcttgagagatgccataattatgaaaggccttatccctgctggcttcctgtgcacagcaaagcctaatgatgctgacaggtcatataagcttgcactaatgggctcatgttttatttattcaggtgctgatttgacattgcccagccccagtgaatctatggatttggaaataactgggttctctctccatactgtgatgttatctccaaaaatgaaggaaatgagaaacaggaaaggccttggattccctgcagatagctcccatagtttacaataagaattcaaatactacaaaaagcattaggcaacatttaaaacacaaatcaacagtgtttaatatgatatattgcaaagaaatttttggcaccgtgtaatgttagatctgaatttgagatctttctaacttcttgatataggtatttagcact

SEQ ID NO: 478356 - DNA, 744 bp, Homo sapiens
ccagcaacatttctgacaacaaatggttatgacctgattaagtgacagggactctcctgcctccgtggacaggaatggagtgtggaatcccagggtgccctcagattggcagaggagaaaatgaaggcttaaagaagtttaatgacctgtccagagccccagggttagtgggtgcttggagctgggacttatatccaggctcacctaatggcatagtaacgctgatcatatcagctccccactgccagggctatgctgacccatgccaaccaagactcaccttcagggcctttgagagtgaggaagtgtgctctgaatcttaccttttctcctgctgtcagccctgcgagggctcctggcagccctgggctgtgtgtcctcatcttccgcaagcaccaagcccatggcagctcaatgagaccttcatagaggctgtcggtcctcagcatttccctgcctgcaagcagattcccatcatccaaaggcgttagaaccagagggctctttaaaggcaatcctgttttacagataagaaactgaggcctaggcttagtagctcattcaaggtcatgcattgtctttctctataacagttattcatgttctagaaagaaactatgggcccactaagtgcattagctgtactctcattcttgaaatagcatcagactagcggacaatgtgatcaccagtcactgatgtgtgtgatgagaaagcttggtttgggaagtaggatggtcattt

SEQ ID NO: 478357 - DNA, 1077 bp, Homo sapiens
gactgagaaaaggacagaagacatagggctgcctctgtgccatcacagtgggtgataattgaagcagtgagatcacgcagttattcaaagataatgtacaggacaaaaaaaatcagacctatggtaaatcttagcatcagcagtttcaatggagtaaagggggaaaaagcagatttcaatgagatgaagaatgactggaaggagaaaataaaacagggggatgagatctggaggacaggaggtggagaaggagatgtgaacattagggaacaggttaactcttgtaacaaaaacaggaagacaagggtaaaaatggatgcagatgccatcagctggcagatgatcttggggtcaatggatttggctttaggggacaggaaggcagaagagcagagacctacagctgacaagctgactgacgttcataagggatgtcacagaaccaaattagcccacgtgctagtggaggaaaataatgcaagccaaaaagccatggaatgacactttaaaatgctgaaagaagaaaaaatgtcttacaatgtgcacatgtaccctaaaacttagataataataaaaaaaaaattaaaaaaaaaaaaaaagaaaaaatgtcttgtgttctatgttcatcaaacttttttttttaaaattggaggatcactgtcctccactgcctgttgtccaatgtctgaaaatagtcatcttctatgttttgggcaatgtttcagttgtttttagcaggagggaaattgttgagtgttttactctcttatgtttggaaatgtaagttccctatgtgtttttatttttctcttatttcccccatgtgacttgctaatttgaactcctcttctgctctgggaaactgttttaaactaaagtttaggactttatatttatttctatgaatgtccattttattttgcaccattatcctatcatatagagtcttttttaaattcgttacccataatgttaattctccttttcagttcttgccactctcaaactctttaatattacttcttggtaataattgaagtgtttgccaaaatgttattaagcaactgcagggtaatt

SEQ ID NO: 478358 - DNA, 1605 bp, Homo sapiens
catcccagcagtttcttcttgaatattagtgtatctggcaggctgggataagacaaggaatcgatgcatgtcgtctttcacggtgacttctcaatgtgcaagacacacagtcaagaatgcaactttcagggctacagctttcattggtaactttcaggtgtttcaggcagaaaggagttgcagtgtcaaagataggaaggctttccagtcctgcagaaatgacaactcacaggggcttaatgaactatgttggctgactttatgcagtgcgattgccaacacctttaccactcactcatataagacctttaaaatggttcttagtgtttggaagagccagtctcttagtagtcaatactgcattcctgaagagaatggacttaaaggaggagggcctgctggtgaatcctctgaacaatggtgtacaaaagaatgtggtgtggacgttattgagggggaagtcccactgttggtggggctgtggcctgtggacattaactgctgccagggttcgaataaaggacaggtcaatatgggttggaataatcgggagaggtttcatggaagctggagaagtaaatatgactcaacacacaggaaagctcctccagcttttttccttttactactgtcaaaatgcaaagtccatgcctctgaaggtgataaacactgtgaagatgacgatgatgatgacgatgacgacaacgacaattattatatcattttctacatggaaccctatgcttatatttccactgctcccacagagaatgggttgatggacaggttgattccccttgctccaatccaccatcagaaaaatcccctggagccagctatgatggatgaactcggagagcagtcatcaagaactaaggctgaagagctcatgggaatatatgaacttgatctaagccttcgtgcatagggcctgaggttctgatatccatccaggaggtgatctccaggatgcaggctctgtgcacgtggggagctgatattgagtcatctatgtactgtttagagtcctatctgcaaaataaatggggagagaatgagtctcctgcaagaaatcagaaaccctggcttgtgccactctcagaaatgctaaagaaaagttatttcatggtgtttgcatcctagttacttgactgcctttatttaaggttgcatggttttaaaaatcatactgacccattaattcaagtcagtttcatgggtattttgtctgatttgattattcagtttggttgaactggttatgtgtaaaactgcaggcagttttgattaaaaaattactgttacattcaaacaaaatcaaggatcactcaaatatgagacctattccattttgtggtgttgattgaggctatgcagcaagccacaattattccatgtttctaaaacaaaatataaaatcaatttttaggaaagatatcaaatacacatttgttgctgttgttctcttattgcttttgtaattgacataaagtactctcctgtgacttgattcagcaataactaatttacatttttattttctggaaaactttctgaagcaccaatacttggtctatatatgaatcttaactgttgctgctttgg

SEQ ID NO: 478359 - DNA, 590 bp, Homo sapiens
cacatctggaatcacttacagctggatggtcaggccagcaggatgaactcactcgttgctcaaatcagcagtgggatgacaggaagtcagtgggagatgctggcaagagcaccaggtgaggagtcttgggtcctggagcctggtctggttttgcccactccatctgtgacctgtgccacttccccttggtgcttagtgagctcatccgtaaaatcagagtcagacaacatgatctcacctgcctcttcctactctaaaatttgcgtgtttgtctatgaaataatccaaggattttgtgtcaggcttaaaagctgttatgtgcccattagaagtaatcctacgctgcccatccagattctaaactttgcttccactgatgacaggggagggtcatttgatcctcccaagccacaccccatccccctccaaaatataccaccccaaagccacccccaaaggaaggtgctgtttgctgaaggaagtctgaggcagctcttcccatctcagacccaaggtgagggatggtgcctccctcaatccctagtcatgggtggaccaagattgtaattgttggctccctcggggtctac

SEQ ID NO: 478360 - DNA, 517 bp, Homo sapiens
ggtcagcggactcaaagaccaaaactagacaaactcacgaagatgagaaagaatcaacgaaaaactgctgaaaacccaaaaggccagagtgcctcttttcctccaaatgatcgaaacgtctctccatcaagggtacagaactggacagaggatcagatggatgaattgacggaagtaggcttcagaagatgggtagagcatgttctaacccaatgcaaagaagctaagaaccttgataaaaggttagaggaattgctaactaaaataaccagtttagaaaggaacataaacaacctgatggaactgaaaaacacagcgctagaactttgtgaagtatacacaagtatcaacagccgaattgaccaagcagaagaaaggatatcagagtttgaagaccaccttactgaaataagacatgcagacaagaatagagaaaaaagaatgaaaaggaatgaacaaagcctccaagaaatatgggacttcataaaaagaccgaacctacaattgatttgagtac

SEQ ID NO: 478361 - DNA, 536 bp, Homo sapiens
tatcatccgaggctttgtgggagagcgaatgtcgagcccgcagctggggctgtacgggggtgtcaacagaatagctaatggcaagttgacacacagagatatcaacttgcaagagacaaagtggaatccagtaatgagtattgtcagagggcctgcaatatttgaaggaaggagaaagatctatgggaacatcaactttggaacaggactgctgcaatgtactgggaagagcatctggtcttggagccatgatactagggttgaaataataattagaactcttctgagcaggatgactgtattagtctgtttttacactgctgataaagacatacctgagacccggcaatttatacaggacaaagatttaatggacttgcagttccacgtggctggggaggcttcacaatcatggcataaggcaacggggagcaaagtcatctcttaaatggatggtggcaggcaaagaaagagcttgtgcaggggaactccttttagtaaaaccatcaaatatcatgagacttattcactgtcac

SEQ ID NO: 478362 - DNA, 703 bp, Homo sapiens
tcagaggaggcatgtagacaagggaaaaggagaaaggccggtctatatccagtgggattgagaactggccctaatggaaccttcagcaggaagacttcattacactatccctcatttaatcttctcgctgtgccatttcaacatctctggctatgcaatagcccttcagtgggcaataaagagagggagaccttttcctggagagaagagctgtgatttgtaccacaggcaatttccaacattcaaagtcgaagtacgtttcccaaaaggctgggcaaattccagttgtagagttagacagaaagagagtgttggtgttgtttgcaaggccacggaggatctgatacctggttcctggatctgctatcactggtacctggagctgatccggacaatggagacaatggaaagatcagtgaagaggggacctggggcagcagagatcagctctgacagtggaggacgtgcaccagacagggctctcatcccaaacaggcttgatacatttctttcccagaaaagattgaattagaagagaatgttttaaggaaaaaaattgagagaacatctaactatctctgaagtgttgatatggaaatcccagcgtaatgttctattacttttttttccctgattcctatttggatagactccaatgacatgcagaaaaagtacagtcctactttatattcattagagactc

SEQ ID NO: 478363 - DNA, 625 bp, Homo sapiens
gtttataggaaatgtccacaatatggaaatctatgcatatgggattgatcgcactagggaggagggtcatgctagccatgtcaccggtagtgtggcccgcagggacgccgacctgctggagcgtcgtgccagcatgggctgtggcaaccacgtgggccagcaggaggttcccgctgcacagctgtgggaggaggacacgggagaacacaatgacatgagtgactgtcctgcttggttaggaaagggaaacgtaaagttgtggaattctgttgatgatggatgtgagagtggtgaagccctgcgggatgatgtagaggacttccacatccctggtgaggagctgccccttgggtctgagtttctgggaggggagagggagaagctgggagaccccccgagagctggggatgagctgctgggtgatggcagtaagaacatgtggtatattattgatgaacgtggggactctgaggagtcctcagaggaggacacggcagagcccaatggcttcattgatttcccatcaagagtccgccaaacgctccggccgctgatccgctccgcgaagatctgagtacaggccagccagggtgggtttaaatagcctcgggcgcagcctagcagc

SEQ ID NO: 478364 - DNA, 1389 bp, Homo sapiens
gtttataggaaatgtccacaatatggaaatctatgcatatgggattgatcgcactaggaaggagggtcatgctagccatgtcaccggtagtgtggcccgcagggacgccgacctgctggagcgtcgtgccagcatgggctgtggcaaccacgtgggccagcaggaggttcccgctgcacagctgtgggaggaggacacgggagaacacaatgacatgagtgactgtcctgcttggttaggaaagggaaacgtaaagttgtggaattctgttgatgatggatgtgagagtggtgaagccctgcgggatgatgtagaggacttccacatccctggtgaggagctgccccttgggtctgagtttctgggaggggagagggagaagctgggtgaggcaggcatgaatcttgaggagtcagggctgggggaccgctcatattctcccgagacctgtgagtctctgggggactcctgggtgcatggggctgactcccgcaggaacctggggatggctggagagtaactgggagccacaggagggtccctgaggcctgggggtgaagagatgcaagacacaggggtggagcagcgtgaggctcgtgagtttgtaggtgattcctgggtgtggggggctgactccagctgaaatctggggttgcttggagagtagcttggagacacaggagaccccccgagagctgggggtgagatgctgcgtgatggcagtaagaacatgtggtatattattgatgaatgtggggactctatcttgtcaatgattctagcttatattaatatgcaatgtatacaatatgctaacatttacaatatatgtttatagtttaaacatttctgtcatattttcagattctttaaagattatattacacttcctgtttcagatagctgcttaaaatgagtaaggaaaaacggatgtgtgcatcagttgtaactgtttatggactaaaactagttgatttactggttaagaacaaaaagtgacaacctaattaactgaaaattttaatgttaacatctccgttgaagctttttatgattagtgtctggatagcatatttttatgattagtgtctgcatagcatattttttctcatactttgtgtctttgtatttaaattgtgtctctgtggatgccatattgttgggtcttgctttcctctcaggtctggcagtctctgtcttaagtagagtatttgtccagttacattgtaactaatcattgctaaggacgaacattcagacccttgtagcagtgttctgtaatcctatgtgagggacaaacattcagaccctcgtagcagtgttctggaatcctatgtgagggacaaggattcagacaaggacaaggattctcttgattggaatagtttc

SEQ ID NO: 478365 - DNA, 742 bp, Homo sapiens
ggtagtgtggcccgcagggacgccgacctgctggagcgtcgtgccagcatgggctgtggcaaccacgtgggccagcaggaggttcccgctgcacagctgtgggaggaggacacgggagaacacaatgacatgagtgactgtcctgcttggttaggaaagggaaacgtaaagttgtggaattctgttgatgatggatgtgagagtggtgaagccctgcgggatgatgtagaggacttccacatccctggagaccccccgagagctgggggtgagctgctgggtgatggcagtaagaacatgtggtatattattgatgaacgtggggactctgaggagtcctcagaggaggacacggcagagcccaatggcttcattgattgcccatcacgaggggagagggagaagctgggtgaggctcgcatggaccttggggtgtccgtgctgggggaccgttcataagaagagccagacaagaccctactgttcttaggtgcagacatgattaggaaacctgcagctcccaggggcccccactaatgttctaactcgcagaaggaaggagtgtgtgtgcgtgtgtgcgtgtgcgtgtgtgtgtgtgtgtgtgtgtttgtgtgtgtgcggtgtgaggtatgggccccttaaggaaatggaaatcaaccaaccaatgggacagacagacagacagacagacagagattcacttgcccaagtgttctgtcctgtcctctgaatccgctttcaa

SEQ ID NO: 478366 - DNA, 5571 bp, Homo sapiens
tcattcagaccacagctggggtgttctggatccctaggtgtgggacaaacattcagaccctcgtagtaatgttctggaatcctatcagtgctctggaatcctacgtgaggaacaaactttcagaccacagtagaagtattgtggaatcctatttgtgggacaaacactcagaccacagcaggaatgttttggaatcctatgtgagggagaatcatgcagaccacagcaggattgttgtggaatcccacgtaaggcacaaacacccagaccacaacaggagtgttctggaatcctatgtaagggtcaacctttcagaacacagcagcagtgttctggaatcctataggagggacaaacattcagaccacagcaagagagttctggaatcctatgtgaggaacaaacattcaggccacagcagcagtgttctggaattctatgtaagggacaatcattcagaacacagctggggtgttctggaatcctacgtgtgggacaaacattcagaccctcgtatcattgttccagaatcctatgtgaggaagaacattcagaacacagaaggagtgttctggagtcctatgtgcatgacaaacactcatactctcatggtagtgttctggaatcctatgtgagggacaaacatttagaagcacgtagcagtgttctggaatcgtacatgagggacaaacactcagaacccaacagcagtgttttggagtcctaagtgagggaaaaacattcagaccacagtaggagtgtcctggagtcctatgtgagggagaataattcagaccattgcagcagtgttctggaatcctttgtgagggacaaatattcagatgtcagtagcagggttctgcaatcctatgtgagggagaaacactcagaacccagcagcggtgtcctggaatgctaattgagggaaaaacacacagatcacagaaggaatattctggaatccattgtgagggagaataatacagaccctcgtagcagtgttctggaatcctatgtgagggagaaatgctcaacccagaagcagtgttctgcaatcctatgtgagggacaatcattcagactacagccggggtgttctggagtcctacgtgtgggacaaacatgcagacccgcgtagcatttttctggaatcctctttgaggaaaatacattcagaacacaacaggagtgttgtggagtcctatgtgcgggacaaacattcagtccctcgtagcagtgttctggaatgccatgtgagggagaaacactcataacccagtagtagtattgtggaatcctatatgagggacaatcattcataccacagttgaggcattctggaatcctatgtgtggggcaaacattcagacccggacccttgtagcactgttctgcaatcctatgtgaggaacaaacttttagacccagggagcagtgttctggaaccgcaagtgagagacaaacacttggaaccctacagcagtgtcctggaatcctaattgagggacaaacatacagaccacgaaggaatcttctggaatcctatgtgagggagaataattcagaccctcgtagcagtgttctgcaatcctatgtgagggaaaaactttcagaccacagtagcagtgttctggaataccatgtgagggagaaacactcacaacccagcagcagtgttgtggaatcctatgtgagggacaatcattcagaccacagctgagttgttctggagtcctaggtttgggacaaagattcagactcacgtagcattgctgtggaatcctatgtgaggaaaatactttcagaacacactaggtgtgttccagagtcctatgtgcgagacaaacattcagtcccttgtagcagtgttctagaatcctatgtgagggacaaacatttacacccatgtatcagtgttctgtaaccgtacgtgaaggacaaacagtcagaacccaacagcagtgttctgcattcctaagtgagggacaaacattcagatcatagaaggagtgttctgtaatcctatgtgagggagaaacattcagaacccagaagaagtgtgctggaatcctctgtgagggacaatcatttataccattgtagcattgttctggaatcctatgtgaggaaaaacccttcagaacacagcagtagtgttctgcggacctacgtgcgggacaaacatacagaccctcatagcagtgttctggaatcttatgtgagggaaaaacatttagacacacgtagcagtgttttggaatcgtacgtgagggtcaaacacacagaacccgacagcagtgttctggaagcttaagtgagggacaaacattcagaccacaacaggagtgttctggaatcctatgtgagggagaataattaagatcctcatagcagagttctggaatcctatgtgagggagaaaaattcagatcccagtagcaatgttttggaatcctacgtaaaggagaaacactcagaacccagcagctgcgttctggaatcctatgtgagggacaatcattcacaccacatctgggatgttctgggtccctatgtgtgagacaaacattcagaccctcatagcaatgttatggaatactatgtgaggaagaacattcagaacacagcagcagtgttctggagtcctatgtgagggacagtcattcagaccccagttggggtgttttggatccctaggtgtgggacaaatattcagaacctcgtagcattgttctggaatcctatgtgaggaagaacattcagaacacagtaggagtgttctggagtcctatgtgcgggacaagcattcagaacctcgtagcagtgttctggaattctatgggagggaccaacatttagacccacgtagcaatgttctggaatcgtatggggggggaaacactcagtacccaagaacagggatctggaatcttcagtgagtgacaaacattctgaccagagcaggagtgttctggaaacatatttgaaggacaaacactcagaacccagcagctttgttctggaatcctatgtgtgggacaatcattcagaaaaccactgaggtgttctggaatcccacgtgtggaacaaacattcagacccttgtagcattgttctggaatcctatgtgaggaaaataccttcagaacaaagcaggagtgttctggagtcctatgtgtgggacaaacattcagagcctcgtagcagtgttctggaatctgatgtgagggaaaatcatttagacccacgtagcagtgttctggaatcgtacatgagggacaaacactcagactccaacagcagtgttctggaatcctaagagtgggacaaacattcagaccacagcaggagtgttctggaatcctatatgagggagaataaatcagacgctgttagcagtgttctgtaatccaatgtgagggacaaactttcagacaccagtagcagtattctggaatcctatttgtggtacaaacactcagaccacagcaggaatgttttggaatcctatgtgagggacaaacagtcagaccacagcagcgattgttgatgataatacccatggtgaggcagaaaacacccagaccacagcaggaatgtactggaatcctatgtgagggtcaaccattcagaatacagcaggaatgttctggaatcctatgtgagtgtcaaccattcagaccacagcactagtgtaatggaatcctacgtgagggacaaactttcagaacctcgtaacagtgttctggaatcctatgtgagggacaaacactcagaaccccgcagcagtgttctggaatcctaagtgaggggcaaacattcagaccacagcaggagtgttctggaatcctatgtgagggagaataattcagaccctcgtagcagtggtctggaatcctatgtgagggaaaaacactcagaacccagcagcagtgttctggaatcctatgtgagggacaatcattgagaccacaactggggtcttcttgaatcctacgggttggaaacgcattcagactctcgtagcattgttctggaatcctattttaggaaaatacattcagaacacagcgggagtgttctggagtcctatgtgtgggacaaatattcagactctcgtagcagtgttccggaatcctatgagagggacaaatactcagaaacccacagcagtgttctgtaatcctatgtgatgttcaaacattcagaccacagcaggagtgttctggaatccaatgtgagggacaagcattcagaccccatcagcagtgttctggaatcctatctgagggacaaacattgacacccaagtagcagtgttctggaatcttatgtgcgggacaaacactcagaacccaacagcagtgttctggaatcctaagtgagggacaaccattcagaccacagcaggaatgttctggaatcctgagtgaggcataaacattcagaccacagcaggagtgttctggaatgctatgtgagggagaataattcagaccctcatagcagtgttctggaatcctatttgaggcacaaacattcagaccccagtagcagtgttttggaatcctatttgagagacaaacactcagaccacagaaggaatgttttggaatcctatctgagggggaaacattcagaacacagcaggatagatctggaaacccttgtgagtcacaaacacccagaagacaacaggaatattctggaatcctatgtgagggtcaagcattcagaccacatcagtagtgttctggaatcctatgtgagggacaaacatttagacccacgtagcagtgttctggaatcctatgtatgagacaaacattcagaaactcttagcagtgttgtggaatcctatgtgagggagaaacactcagaacccagtagcagtgttctggaatcctatgtgagggacaaatactcagaacccagaagctgtgttctggaatcctatctgagggacaaacattcagaccagagcaggagtgttctggagtcctatgtgtgggacaaacattcagaccctcgtagcagtgttgtggaatcctacgtgggagacaaacactcagaacccagtagtagtgttctggaatcctatctgagggacaaaaattcagaccagagcaggagtgttctggaatcctatgtgaggtacaatcattcagacccttgtaccagtgttgtggaatcctatgtgagggagaaacactcagaacccagcagcagtgttctggaatcctatgtgagggacaatcattcagactgcagctggggtgttctggaatcctacttgtgggagaagcattcagaccctcgtagcattgttctggaatcctatgttaggaaaacacattcagaacacagcaggagtgttctggagtcctatgtatgggacaaagattcagaccctcgtagaagtgttctggaatcttatgtgaggtagaaacaatcgtaccctcttagcagtgttctgcaatctcatgtgaaggacaaacattcagaccctcttagcagtgttctggaatcctatgtgagggacaaacactcagaacccagcagcagtgttcc

SEQ ID NO: 478367 - DNA, 5470 bp, Homo sapiens
gtaagtgtgttttggaatcctacatgagggccaaacaatcaaaccctcatagctgtgttccggaatcctatgtgaggggcaaacactcagacaatcgtagcagttttctggaatcctttgtgagggacaagcattcattccctcgtagcggtgttcgggaaccctgtatgagggacaaacattcagaccacaccgttctggaatcccctctgtgggaaaaacattcagaccctcgtggcagtgttctggaatcctatgtgacggacaaagatttagaccacagcagcagtgttctgaaatcctatgtgagggacattcagaccctcttagcagttttctggaatcttattgttctggaattctatgtgatggagaaacactcagaatccagcagcagtgttctggaatcctatatgacggagatacacgtacaccccagcagcagtgtcctggaatcctatgtgagagacaaactttcagaccccaggagcagagttctggaatcctacatgagggataaacattcagaccctcttagcagttttcttaatcactatgtcagggacaaagattcagacctcagcaccattgttctggaatcctacatgaggctcaaacattcagaccctcgttgcagtcttctggaatcctgtgtaagagacaatcattcagacaacagcaggagtcttctggaattccctgtgagaaataaacactcagatcctcctagcaacactggtagcagtgttctggaatccaacgtgagggacaaacattcagacaacagcaggattgttctggaatcctatgtgagggacaagcattcagacaatcgtagcagtgttctggaatcccatgtgagggacaaacattcagaccttcatagcagtgttctggaatggtatgtgatggacaaacattcagacaatcatagcattgttctggaatcctatgtgagggacaagcattcagacaatcacagtcgtagcattgttctggaatattatgtgagggacaaacattcagacaattgtagcagtgttccggaatcctatgtgagggacaaacattcaaacaacagcgggattgttcaggaatcctatgttatggacaaacattctgaccctcgtagcggtgttctggaattctatgtgagggagaaacactcagaacccaacatcagtgttctggaatcctatgcgacggacatacctgtagaccccagcagctctattctagaatcctatgtgagagacaaacattacgaccccagcaacagtgttctggaatcctatgtgaaggaaagtcattcagacactcagcacagcaggcgtgttttggaatcctatgtgagggacaaacattctgacactcatagcagggttctggaatcctacgtgagtgacaaacattcagacaatcttagcagtgttctggaatactatgtgagggacaaacattcagacactcgtaacagtgttttggaatactatgttgcagacaatcattcgtatgctcgtagcagtgttctggaatcctgtgtgaaggacaaacattcagaccacagcaggattgttctggaatccccagtgaggaacaaacgttcagaccttcatagcagtgttctggaattctatgtgacggacaaacatttagaccccagcagcggtgttctgaaatcctataccatcatagcagtgtattggaatcctgtgggagggacaaacattcagacaatcgaagcagtgttctggaatcctaagagagagacaaatattcagaacacagaaggattgttctggaatcctattagtgtcctggaatcctatgtgagggacaaacatgcagacaattgtagcagtgttctggaatcctatgtgatcgacaaaccttcgaacaacagtggaagtgttctggaatcctatgttatggacacacattcagaaccttgtggcagtgttctggaattctatttgagagagaaacattcagagcccagcagcagttttctggaatcctatgtgatgaacatacatgcagaccacagcagcagtgttctggaatcttatgtgagggacaaacattcagacaattgtagcagtgttctggagtcctccgtgaaggacaaacattcggaacccagcagcagtgttctggaatccaatgtgagggacaaacatataaatcacggggggggagttttctggaatcctatgttacggacaaacattcagaacctcgtcgcagtgttctggaattctatgtcagggagaaacagccagaacacagtagcagggttttggaatcctatgtgacggacacacatatagaccccagcagcagtgttctgggatcctatgtgagagacaaacattcagcacctcgtcacagtgttctcgaatcctatgtgagggacaatcattcagatcctcgtagcagtgttctggaattctgtatgagatacaatcattcagaccctcgtagcagtgttctggaatcctaagtgtgggacaaatattcagacaatagtagtagtgtcctggaaatctatgtgagggacacacattcagaccctcttaggagtgttctggaatcttatatgagagacaaacattcagacaatcgtagcagtgttctggaatcctcggtgagggacaaacattcggaacccagcagcagtgttctggaatccaatgttatggacaaacattcagagactccttgcggtgatctggaattctatgtgatggagaaacactgagaaaccagcagtattgttctggaatctgatgtgacggacatacatttagaccagagcagtagagttgtggaatcctatattggggcaaacattcagtccccagcagcattgtcctgcaatcctttgtgagggacaaacattcagaacccagcagcagtgttctggaatcctatgtgaggcaccatcattcagaccctcgaagcagtgttctggaattttgtgtgaggggcaaacattcagaccctcgtagcagtgttctgcaatcctgtgtgaggtactattattcagatgatggcaggagagttctggaatcccctgtgaggaacaaacattcagaccctcctagcagtgttctgtaaccctatttgagggacagatattcagacgacagcagggttgttctggaaccctatgtgggggacaatcacccagaacacatcagtagtgttttggaatcctatctgagggacaaacattcagaccctagtagcactgttcaggaatcctatgtgagggacaaacattcagacaatcgtagcattgttctggagtcttatgtgagggacaaacattcagaccccagcagcattgttctggaatcctatgtggggttcaaacattcaaacaacagcgggattgttctggaatcctatgttacggacaaacattcagaccatcgtagcagtgttctggtattctatgtgagggaaaaacactgagaatacagcagcagtgttctggaatccgatgtgtgggacaaacattcagaccccagcagcagtgttctttaatcctatttgagggacaatcattcagactctcatagctgtgttctggagttctgcataagggacaatcgttcagacccacgtagcagtgttccggaattctgtgtgatggagaaaccttaattacttcatagcagtgttatggaagcctatctgtgggacaaacattcagaccacagcaggagtgttctggaacactaagtgttctcaaatcctatgtgaggaacaaacattcagaccctcgcagcaatgttctggaatcctatgtgacggacaaacatttggactgcagcagcaatgttctggaatcctatgtgagggacaaactttcagaaaatcgttgcagtggtctggtatcctaggtgagggacaaacattcagaacccagcagcagtgttctggaatccaatgtgagggacaaacattcaaacaacagagggagtgttttgcaatcctaggtaaaggacaaatatttagacaacaggagcagtgttctggaatcctgtgggaaggacaaacattaggaccctcagtatagtgttctagaatcttatgtgagagaaaaacattgagacaatcatagcagtgttgtagaatcctttgtgacggacaaatatttagaccccagcagcattgttctggaatcctatgtgagggacgaacattaaaatcacagcgggaatgttctggaatcctttgttacgggcaaacattcagatcctcgtcgcagtcttcttgaattacatgtgagggagaaacactcagaacccaccagcagtgttctggaatccttagcgacagacatacatgcagacatcagtagcagtgctctgggatcctatgtgagggacaaactttcagacggcagcagcagtgttctggaatcctgtgtgagggacaatcactcagaccctcgtagctgtgttctggaattccgtgtgatggacaaacattcagaccctcatagcagtgttctggaaacctatgtgagggacaaacattcagaccacagcaggcatgttgtggaatcctctgtgaggaagaaacattcagaccctcgtagcagtgttctggaatcctatatgacagacaaacatttagaccccagcagcagtgttctggaatcctgtgtgagggacaaacattcacaccctcggagcagtgttctagaatcctataaagggacaaacactcagaacccagcagccgtgttctggaaccatatgtgagggacaaacactgagaacacagcaggattgttttggaatgctatgtgatggagaaacattcaggcactcgtagcagtgttctggaatcctaagtgagggacaaacattcagacaatcgtagcagtgttctggaatcctatgctagggaaaaacattcagaccccagtagcagtgttctggaatcctatgtgagggaaaaacattcaaacaacagcgggagtgttctgaaatagtatgttactgacaaacattcagacccttgtcacagtgctctggaattcaagtgagggggaaacacacagaacccagcagctgtgttctggaatcctgtgtgacggacatacacatagaccccagcagcggtgttccggaatcctatgtgacggacaaacattcagactccagcagcagtgttctggaatcctctgtgagggaccatcattcagactctcgtagtagtgttctggaattctgcgtgaggggcaaacattcagaccatcgtggcagtgtactggaatcctgtgtgagggatagtcattccgaacacagcaggagtattctggaatcccctgtatggaaaaaacattcagaccctagcagcagtgttctggaatcctatgtgagggacaaacatttagaccccagcaaaagtgttctggaatcctgtgtgagggacaaacattcagactttc

SEQ ID NO: 478368 - DNA, 6976 bp, Homo sapiens
agacgccagcagcagtgttctggaatcctaattgcgggacaatcattcagacccttgtagcagtgttatggaatcctttgtgagggacagacatttagaacccagcgacagcattctggaacactatgtgaaccctcgtagcagtgttctggaatcctatgtgagggacgaacctttagaccccagcagcagtgctcttgaatcctacgtgaggaaaaaacattcagacactcgtagctttgttctcgaatcacatgtgagggacaaacattcagataatcttagccatgttctggaatcctatgtgagggacaaatattcagaccccagcagcgttctggaatcctatgtgaggaacaaacattcaaacaacagcgggagtgttgtcgaatcctatgtaacagacagactttcagaacctcgtcgcagtgttctggaattttgtgttagagagaaacactcagaaaccaacaggagtgttctggaatcctatgtgatggacatacatgtagacgccagcagcagtgttcttgaatcatatgtgaagacaaacattcagatctcaaaagcagtgttctggaatcctctcagcagtgttctggaaccttatgtgacagacatacatgtagaccccagcagcagtgttctggaatcctatgtgagggacaaatattcagacagcagccgtagtattctggaatcctatgtgaaggatagtcattcagaccctcatagcagtgttctggaattctctgtgtgggacaaacattcagaccctcatagcagtgttctggaatccccgacactcgtagcagtgttctggaatcctatgtgggagacaaacattcatacaatcttagcagtgtacgggaattctttgcgagggacaaacattcagaccccagcagcagtgttccagaatcctattgctctggaattctatttgagggagaaacaatcagaacccagcagcagtgttctcgaatcctacatgagggacatacattcagaccacagcagcagtgttctagaaccctatgtgagggacaagcattcagaccgtcgtagcagtgttctcgaattctgtgtgaaggacaaagattcagaccatcagagcagtgttctggaatcctttgtgagggacaaacattcagaccacagcaagagtcttctggaatccactgtgaggaacaaacattcagaacctcatagcagtgttctggaatcctatgtgatggacaaacatttagacctcagaagcaacaatcgtagcagtgttctggaatcctatgtgaggggcaaacatacagacacttgtagcagtgttctggaatcctattatgtgagggacaaacattcggatcctcttagcagtgttctggaatcctatgtgacggacatacatgtagaacccagcagcagtgttctgaaggcctatgtgagggacaaacattcagaccccaggaacagtcttcgggaatcgtatgtgagggtaaatcattcagaacgtcgtagcagtgttctggaattctgtgtgagggacaaacattcagaccacagcagcagtattctggaatcctatgtgagggaaaaacattcaaacaactgcaggtgtgttctggaatcctatgtgagggaaaaacattcaaacaactgcaggtgtgttctggaatcctatgacaaggaaaaacattcagaccctcctcgcagtgttcttgaattctatgtgagggagaaacactccgattcctgtagcagtgttctggaaccctatgtgacagacctacttgtagactccagcagcagtgttctggaaccctatgtgagggacaatcattccgaccctcgtggcagtgttctggaattttgtgtgagggataaacattcagaccccagcgcgagtgttctggaatcccacaccctcgtagcagtattctggaatcctatgtgggggcaaacattcaatcatagcagtgttcaggaatcctatgtgagggacaaacatttagactgtcgtagcagtgttctggaatcctactgttctggaattccctgtgagggacaaaaactcggaacccagcggcagtgttctggaattccctgtgagggacaaaaactcggaacccagcggcagtgttctggaatcctatgtgagggacaaacattcagactccagcagcagtgttctggaatcccataccctgatagcagtgttctggaatcctatgtgagggacaaacattcagaccacagcaggactgttttggaattccctttgagaaacaaacttttagaccctcatagctgtgttctgcaatcctgtgtgtgggacaaaatttcaaaacctcgtagcagtgttctggaatcctatgtgaggtacaaacattcagacaatcgtagcagtgttctggaatcccatgtgagggacaaacatgcagaccctcgtaagagtgttctggaatcctatgtgagagacaaacattcagacaatcgtagcagtgttctggaatccaatgttagtgacaaagtttcagaccccagcagcagtgttctggaatcctatttgagggacaaccattcagacactttcagcagtgttccagaatcctgtgtcagggacaaacattttgaccactgcaggactcttctggaatcccttgtggggaacaaacattcagaccctcgtagcagcagtattatagaatctcatgtgagggacaatatttcagaacgtcatagcagtgttctggaatattatatgagtgaaaaatattcaaacatcctcgggagtgttctggaatcttatgtcacggacaagcattcagaccctcgtcgcagtgttctggaattctatgtgagggagaaacactcagaacccagcagcagtgttctggaatcctatgtgaaggacatacatgtagaccatagcagcagtgctctggaatcctttgtgacagacaaacattcagaccccagcagcagtgttctggaatcctgtgtgagggacaaacattcagaccccagctgcagtgttctggtatcctatgtgatggacagtcataaagaccctcgtagcagtgttctggaattctttgtgagggacaaacattcagacattcatagcagtgatgtggaatcccatgtgagtgacaaacattcagaccacagcagaagtgttctggaatcccctgtgaggaacaaacattcagactctcgtagtagtgttctggaatcctatttgaaggacaaacatttaggccccagcagcagggtccttgaatcctatgtgagggacaaatattcagaccctgacaatcgtagcagtgttctggaatcctatgtgaggggcaaacattcaaacaacagcgggagtgctcttgaatcatatgttatggacaaacactcagaccctcgtagcagtgttctggaatcctatgagagggacaaacattcagaccctccagaccctcatagcagtgttctggaatcctacatgagcgacaaacacactgaaaccagcagcagtgttctggaaccctatgtgagggataaacattcagaccatgccaggattgttctggaaacctatgtgagggaccaacactccgaacccagcagaaaggttttgaaatcctgtgtgagggacaaacgtttagactctcgtagcagtgttctggaatcatatgtgagggacaaatatacagaccatagcaggagtgttctggaatcctatgtgagggacaaacattcagaccctcatagcagtgatctggaattctatgtgagggacaaacattcagacattggtagcattgttctggaatccaatgtgagggacaaacattctgaccctcatagcagtgtaccagaatcctgtgttaggaacgaacattcagaccacagcattagtgttctggaatcccctgtgaggaacaaacatacagaccctcgtagtagtgttctggaatcctatgtgacggccaaatatttataccccaggagcagtgttctggaatcctcagtgaggaaaaccattcagaatcttgtagcagttttgtggaatcctattgttctggaattctgtgtgagggacaagcattcagaacgtcgtagcagtgttctggaatcctatgtgaaggacaaccattcagaccacaggaagagtgctctggaatccccagtgaggaacaaacattcagacactagtaaaagtgttctggaatcctatgtgacagacaaacattcagaccccagcagcagtgttctggagttttatgtgagggaaaaacgttcagacaatcatagcagaattctggaatcctatgtgagggacaaacattcagacctcagctgctgcgttctggaatcctatgtgagggacaaacattcatacaacagtgggagtgttctggaatcctatgttacaggcaaatattcagaccctcgtccgagtgttctggaattctatgtgagggagaaacattcagaacccaccagcattgttctggaatcctatgtgacggacagacatgcagaccccagcagcattgttctggaatcctatgtgacggtcagacatgtagaccccagcagcattgttctggactcctatgtgagggatgatcattcagaccctcgttgcagtgttttggaattctgtgtgacgcccataaatctacaccccagcagcagtgtggtggaatcctatatgatggacaaacatccagaacccagcagcagtgttctggaatcctatgtgaggtacaaacattcagaccccagcagcagtgttctggaatcctatgagagggacaatcattcagacccttgtagcagtattgtggaattctgtgtgagggataaacatccagaaactcatagcagtgttctggaatgctctgtgagcagtgttctggaatcctatgggacaaacaaacatttagatggcagcagcagtgttctggaatcctatgtgaggtacaaacattcagaacactgcagaagtgttctggaatctcctgtgaggaagaaacttttagaccctcataaaagtggtctggattccgatgtgatggacaaacatttagaccccagcagcagtgttctggaatcctatgtgagagacaaacattcagaacctcgtagcagtgttctggaatcctatgtgagggacaaaccctcagaactcagcaactgtattctggaatcctatggagagacaaacattgagaccacagcaagattccgtgttctggaatcctatgtgagaggcaaacattcatacactcatagcagtgttctgcaatcctatgtgagggacaaatattcagatcatcctagcagtgttctggaatcctatgtgagggacaaatattcagatcatcctagcagtgttctggaatactatgtgagggacaaaaatgcagacagtcgtagcagtgttctggaatcctatgtgagggacaaaaatgcagacaatcacaatcgtagagtgttctggaatcctatgggagggataaacattcaaaaaacagcgagagcgtctgacatcctacgtttcggacaaacatgcataccctcgtcgcagtgttctggaatttatgtgagggagagacacacagaacccagcagcagtgttctggattcctatgtgacggacatacatgtagaccccagcagcagcgttctggaatcctatgtgagggaaaaacattcaggcaccagcagcagagttctggaatcctatatgaaggacaatcattcagaccctcgtaacagtgttctggaattctgtgtgagggacaaacattcagaccacagcaggactattctggaatccccagtgaggaagaaacattcagaccctcgtagcactgttcttgaatcctgtgtgatggacaaacatttagaccccagcagcggtgttctggaatcctatgtgtgggaccgtcattcagaacctcgtagcgtgttctggaatctggtggacaaacattcagacaatcataggagtgttctggaatccgatgtgagggacaaacattcagactcttgtatcagtgttctgaaatcctacgtgaaagacaaacattcaaacaatcgcagcagtgttctggaatcctatgtgagggacaaatattcagaccctgaccctcatagctgtgttctggaatccaatgtgacggacaaagatttagaccccagcagcagtgttctggaatcctatgtgatggacagacattcagacaatcgtagcagtgttctggaatcctatgtgagggacaaacattcagaacccagcagcagtgttctggaatcctatgtgaggaacaaacattcaaacaaacaacagcgggattttccggaattctatgtgacggagaaagactcagaactccgcagcagtgttctggtattctatgcgatggacatacatgcagacctcagcagcagtgttctggactcgtatgtgagggacaaacattcagaccccagcagcagtcttctgaaatcctacatgagagacaatcattcagtccctcgttgcattgttctggaattctgtgtgagggaaaaactttcagacaatcatggcagtgttccagaatcctacgtgagggtcaaactttcagaacacagaagtagtgatctggaatcccctgtgaggaataaacattcagaaccctgtagcagtaacctggaatccgatgtgacggacaaacctttagaccccagcagcattgatctggaatcctatttgagggacaatcattcagaccctctcagcagtattctgtcatcctatgtgcgggagaaacattcagaccagagtgggggtgttctgtaataatatgtgacaaacatttcgatcctcacagaagtgttctggaatattatatgagggacaaaggttcagacaattgtagcagtgttctggaatcctacgtgagggacaaacattcagagactagaagca

SEQ ID NO: 478369 - DNA, 3064 bp, Homo sapiens
gaattctatgtgagggaaagacattcaaaccccagcagcagtgttgtggaatccgatttgaggggcagacattcagaccccagcagcagtgttctggaatcctatgtgagggacaaacattcagaccccagcagcagtgttctggaatcctatgtgaaggaaaaatattaagaccctcgtagcagtgtcctggaatcatatggaagggacaaccattcagacaccagcagaagtcttctggaatcctaggtgtgggaaaaacattcagaacctagtagcagtgttctggaatcctatgtgagggacatacattcagaccacggcagcagtgttccggaatcctatgtgagggacaaacattcagaccacggcagcagtgttccggaatcctgtatgacggaccaacattcagacccttgcaacagtgttctggaatactaggtgagggagaattatttataccctcgtagcagtgttctgtaatcctatgtgagggacaaacattcagaccccaggagcagtgctctgaaatcctaagttaagggaaacattgagaccccagcacgaatgttctggaatcctatgtgagggacaaacattcagaccacggcaggagtgttctggaatcctatgtaaggaacaaacattcagacctcagcaggagtgttctggtatcctatatgagggataagcatttagaccctcgtagcagtgttctggaatcctatgtgagggagaagcattcagagcacagcaggagtgctctggaatcccatgttagggacaaacattcagaacctggtaccattgtgctggaaacctatgtgagggacagacatttagaccctcgcagcagtgttctggaatcccatgtgagggacaaacattcagatcctcgcagcagtgttctggaatactatgtgagtgacaaacattcagactccagcagcagtgctctgtattcctatgtgaaggacaaacattcagaacccaggagcagtgttttgaaatcatatgttaagggcaaacatacagaccctagcatcaatgttctagaatcctatgtgagggacatacattcagacccttgcagcagtgttctggaatcccagatgggggacaaacattcagacaatggcagcagtgttctggaatcctatgtgaggcacaaacactcagagcctcgtagtggtgttctggaatcctatgtgaggaacaaacaatcagaccacagcaagagtgttctggaatcctttgttagggacaaacattcagatcacagcagcagagttctggaatcctatgtgaaggacaaacattcagaccctcgtagcaatgttctggaatcctaagtgagggacaaactttcagacaacagcaagagtgttctggaatccaatgtgagcgacaaacattcagaccctcatagtaattttctggaaccctaagtgagggacaaacattcagaatttcatagcagtgttctggaatcctacatgagggataaacattcagaccacagcaggagtgttctggaatcctatgtgagggacaaaaattcagatgccagcataagtcttctggaatcctatgtgagggacaaacattcagaccctcatagcagtgttctggaatcctgtgtgagggacaaacattcagaccacagcaggagtgttctggaatcctgcgtgagagaccaacattcagacccttgtggcagtgttctggaatcctatgtgagagacaaacattcagaccctcataacagttttctgaaatcctacttgagagacaaacattcccaccacagcaggagtgttctcgaatcctatgtgagggcaaacattcaaaccacagcaggagtgttctggaatgctatgtgagggacaaacattcagacactcgcagcaggcttctggaatcctacgtgagggacaaatatttagacaatggcagcagtgttctggaatcctatgtgggggacaaacattcagagccttgtagtgttgtggaatcctatgtgagggacagacatttagaccacagcagcagtgttctggaatcccatgtgagagacaaacattcagaccccgaacagaagtgttctggaatcctatgtgagggacaaacatttagaccctctttgcagtgttctggaatcctatgtgagggacaaacattcagacgccagcagcagtgttttggagtcgtatgtgatggacaaacattcagacccttgtagcttcttctggaatcctacgtgagacacaaacactcagaacccagcaacagtgttctggaatcctatgtgaaggacaagcattcagaccctcgtagcagtgtactgtaatcctatgtgagggacaaacattcagaccatagcaagattgttctggaatcctatgtgaggaacaaatattcagaccaggacagcagtgttttgtcctgaaggacaaacattgagacccttgtagctgttttctggaatcttatgtgaggaacaaacactcagaccatagcaggagtgttctggaatcctgtgtgaaggagaaatattcagaccactgcatgagtgttctggaattcaatttgagggacaaacatgcagaccctcgtaggagtgttctgaaatcctatgtgatgaacaaacattcagaacacagcaagagtgttctggaatcctatgcgaggtacaaacattcagaccacaacaggagtgtcctggaatcccatgtgaggtgcaaacattcagaccctcatagcattgttcttgaatgctatgtgagggacaaaatttcacaacacagcaggagtgttctggagtcctatgtgatggacaaacattcagaacacagcaggagtgttctgaaatactatgtgagggacaaatattcagaccacagaaggagtgttctggaatcctttgtcaaggacaaacgttcagacccttgtagcagtgttcaggaatcctatgtgagggacaaacattgagaccccagtaggagtgttctggagtcccatgtgagggacaaagattcagactttcgtagcagtgttttgaaat

SEQ ID NO: 478370 - DNA, 641 bp, Homo sapiens
gaaaagggaaaatggtcccatttataaatgacagatttgaaactggggttcacatcaacagtgtcactgccaggaaggagggtcatgctagccatgtcaccggtagtgtggcccgcagggacgccgacctgctggagcgtcgtgccagcatgggctgtggcaaccacgtgggccagcaggaggttcccgctgcacagctgtgggaggaggacacgggagaacacactgacatgagtgactgtcctgcttgggtaggaaagggaaacgtaaagttgtggaattctgttgatgatggatgtgagagaggtgaaaccctgcgggatgatgtagaggacttccacatccctggtgaggagctgccccttgggtctgagtttctgggaggggagagggagaaactgggagaacccccgagagctgggggtgagctgctgggtgatggcagtaagaacatgtggtatattattgatgaacgtggggactctgaggagtcctcagaggaggacacggcagagcccaatggcttcattgattgcccatcacgagtccgccaaacgctccggccgctgatccgctccgcgaagatctgagtacaggccagccagggtgggtttaaatagcctcgggcgcagcctagcagc

SEQ ID NO: 478371 - DNA, 625 bp, Homo sapiens
gtttataggaaatgtccacaatatggaaatctatgcatatgggattgatcgcactaggaaggagggtcatgctagccatgtcaccggtagtgtggcccgcagggacgccgacctgctggagcgtcgtgccagcatgggctgtggcaaccacgtgggccagcaggaggttcccgctgcacagctgtgggaggaggacacgggagaacacaatgacatgagtgactgtcctgcttggttaggaaagggaaacgtaaagttgtggaattctgttgatgatggatgtgagagtggtgaagccctgcgggatgatgtagaggacttccacatccctggtgaggagctgccccttgggtctgagtttctgggaggggagagggagaagctgggagaacccccgagagctgggggtgagctgctgggtgatggcagtaagaacatgtggtatattattgatgaacgtggggactctgaggagtcctcagaggaggacacggcagagcccaatggcttcattgattgcccatcacgagtccgccaaacgctccggccgctgatccgctccgcgaagatctgagtacaggccagccagggtgggtttaaatagcctcgggcgcagcctatcagc

SEQ ID NO: 478372 - DNA, 2083 bp, Homo sapiens
tgagaagcgctgctgcttcacactttgtctaaaacagcataaaaatattagggtgatgctctgaaatgctcaagtttgtgcgccttctctcaatcctgctaaatctgactgtgcttgttcatgaatcatctgtaaaggctcacactccatgtctaggggatgcagatggggagtcagccacagagaagatatttggggaagctcatgggccagtttctttttgggggggagtcacaaatcacattattcgagagatcttgggaagcgcctctctccaggcctcagaatggtggagcccatgtcacatcataattctctccaaggcattcctttctaaaatgcctttctccatctccatgcttgacccaaacctcaagctaggtgaggaaataatagccatgaaactggttttcatacacttttctttgcaaatttgtatcttgatatggtatctgtttgaggaatatcaaatctattgactcttcagaactcatttaaatacccaattaaaaaatagaggtgaaactggcctcagttttaagagaatcgtaacatatatatggacttaaaacagtaacatctatttcaattgaattctgttaaaaacactaaccactcttccttgtactgtgacattcctttctgtatccgtcaatgccatttttgaatcttcatattttattctgccaatttgcaaaagttctccatcttctttcattctttctattttctttctcacttcactcacttttcaaataaagcaagagacagatgagctcagaatcaggcctggtccctaaattctctgatcattgcagagccctaaaagactgctcctacaaaatatattctgtttatttgacacatttctgtctcatttcctcaatttgtgttctcctacagttttactttctgaaacagtttgttctgtgacaaaaggtttgcaaaaaatacagggataattgctaaagtttctctctttttgacagtaattcaatgcctttaacaaaatttataatccttttgtacctaaatgtttataagtgttgttaaaccataatgtaaaagtatataaacattttcacatgttctaccagatcaaatatggtacgtatgataataattagaaccaccaacctaacatattgtgaaaaatgccacatatgcatttaattacagtttctgattttcaagcatgcattcagggaagggaggaagtggctttctatttaacttcttcactgctaacagaacatgcatgtgttttggcaagtttcctagggaacatctgtctaaaagggaacgttggggagttaatcgacatctatggagctgggcaacggctgtatggcccatgctgtctccattaaacttcttaactgtgtctcccttaagcagagtcacaaaacataccattgattcagctctttgaataaaaagcaaatcacaagcaaaacttaaactggtttatttacaggatagctttatgaaattggtaaacaatcgagcctctttttccaaaagaattgtttgtagaagatgccaatactggggtggggaacagagttatgaggagggatttgtaaatggtttgtgggtatgtttccaacagctcatagcaaaggaatgaatggaaaaacactccttggaattgggggtggggagagagagggctataaagatggcaaatgaaacaaactagcattttgacattgcctcagttctgggtggaaggagcatgatgaagaatttgaaacatagccaagagcccaacaatttagaggaactgggtggacagacatagtcatgggtcccttaatgacagggatacattctgagaaatgagtcattaggcgattttgtcattgtgtgaacaaacatcatagagtatgcttacaaaaacttagatggtagagcctactactcacctaggttatatagtatacatagcctgttgcttataggctacaaggcctgtacagcatgttcagcatgttactgtaccaaatactgtaggcaattgtaacacaagagtaaatatttttgtgtttctaaacatatcttaacatagaaatggtacagt

SEQ ID NO: 478373 - DNA, 813 bp, Homo sapiens
aggcacaagatggagagtacgtgctgataggttttgtgggaaggtaaagagcatgaatattaaacaacatgttctgttgctgccaaattccaaattcccagtagcaacccactctaagcgtgaagagaatgatgctgacttggagcccgccctcatcttctcctctaaggtggagttagaggctcatgtgtcaggagcagtagactgctttccacaaattgtgaaggatcaaagagtgttgggtctctggactgggttgacagtccacttgctggagttcaaaatgggttgtaaagcagcggagacaactcacaacatcaacaatgcctttggcccaggaactgctaatgaatgtacattgcagtggtggtccaagaagttttgcaaagaagacaagagccttgaagacgaggagcttagtggctggccatgggaagtttacaatgaccaattaagagcaatcactaaagctgatcctcttacaactacaggagaagttgccgaaaaacttcatatccaccattctccggtcattcagcacttgaagaaaattagaaaggtaaaaaagctcagttccaggtccagggcttcaggtattgcaggcttgaccctgaaaagatatatccaactatctaatcctggtactttgaccatggaaggcatggccagcaccactgaaaacggtcccttccatttgggttacaattgttgagcagatgatccctcctttcatgttttaacaagtaccttatctcctgacttgattttgggttgctgtgactatcccatatgtttaaaaacttctcatttccc

SEQ ID NO: 478374 - DNA, 2539 bp, Homo sapiens
ggcggtgtatagtccagagggagtgaatctttaggtttattctactgttctctcgatattgtccctaagaacctgctctttcaatgacgaacacctgtacatcagagccattgccaccctgcagccaagctaacagatatcacatgacaggaataaatcttcgagtgaagctgcagaccttcctggtgagtgttacagctcataaaggtagtgcagacccaaagagtgagcagcagcaagatttattacaaagcgcgaaagaacaaagcttccacagtgtggaaggggaccccagtgggttgccatgcttgcttgggtggccagcttttattcccttatttggccctgcccacaccctgctgattgatccattttacagcacgctgattcatataaaagcaaaaattgaatcagataaagataaacaggcaaagaagattttattcaaggcaattgcagtagaggagagggaccgtaacacagtctgacctcaactctgatgaaacaaaggacagttgagggagagaactctgggctgagagggagatcagggggcatctatttttgcaaattgactttacccatatgaaaacaaatgatagtatttaggcctgaagtctaatctcagtgccttcgaaatagagagagagagaaaaaaaaaacaataagaaaaagaaagaaaacttaaggataactttcttaatagaaaaggaaggggaaaaatagacatactttgtttccgttcgggcagtttgtcctggtatgaaagttagcaacgctggtataattggtttacaagacccatgggaagagtgttaccatctcagcaggaaaggggaccaaagtcaaagaaactggataaatttgtgaaatggactaagaggatgctcagaaagggagaacattgaggaggactaatgttatggattccaagaagttccttctaaaaataatgatgggttggtaatgtaaatgctacataaagatgatgtcagagtagttctgaagtttagagatcacggctgacttgtacaaaaggaatttaaacagaaatttgagtgtcaaaagcatgtcaaaccatgtttttctgggtttagctaaacaagggagaaatgtagactgccatctcaagaaacacagttgtgatgaaattgagacttctaaagaatttaatagaggtaggaacaggttaaagatattttttcattttctttttatttgctttaagcagggcaaagccttcagtatgtttataaggacatagaaacagagcattctatggttctcagggttttatgcctgagaatgttaaataagagagcaagttacagtgtaaatgaaggtgaaaaggtcagaacttaagtaagactttttgttttttttttgtactcaaggaggagtgatacaataaaacgaatatgaagagtttccaaagagtttcaactctggtctgatcatattcaatattatatttagggtaacatagttgtgatacacacagttcagtggagtgaatttcctaaaactatattttaaaactttactatttggagtagtgaacaaatgtaaaagttaaacttcaaaatcaagttcacttggctttggatttgaatagttgctccaataccgtgtaacttagataaattttctgtgtctccattttcttctttgaacatttttgtatatggtttaattccttacaaaaatcagttattttctcaaaccaatttgttagtttcaaaatggcaaaaaatatttaattaaaatggctaatatgcctacatatttttatgattgcattgaatacctaaccaactctatacaaaaggttgcttttgtttctaattgccacttattgtactagatagtaaattactactagttgggggctatctttttcatctttatttacccaactccttagtcaaatgacaagcccataataagcacttgattaaagttttctgagtgaagtactagagctaatactatctgatgcttccatagagttaattatgtgtttccaaatgcatattgaattcttctcttctttatactcttttatataccaactactgattattttattgttgtctttacattttattttttattctttaaatatcatcataattatttttcaaatgcagccaaggtcacaaaaagagattttttgaaaattaagaaaataaagataaagaaatagagtagagagaaagagtaagataaggatgtttttattattacccaatggtaatctaaaagatatgtgaattagtgccttctaaaatttatttttacattaaattttgctaatcccgttaaaattcatcaaaataagagggggctatggaagcatgtacagaaatttagcttctaatgtgatagaatatttttcttagaaagctttgctttggggaatacaattgttatcattagtgagttttcagtaactgccaaaagtccagagagatgtgatgaaagcagcaataagttttagaagttggaaaacatagattatattctccttcccctgtgt

SEQ ID NO: 478375 - DNA, 602 bp, Homo sapiens
aaaccagaagcccagccagctttacctttcaattttataggacttggtctgttgtcattggtgttaatgggtgagctagtgtctatgcccaattgtagcagcaatgtctcaggcaaattctatttctgtgttctcccttggttgcttcacaaatacctgtgccttgcaaactattgccaacacagtaacaaaggtgtctacacactggcaccgatgccattactggcccaggtccccaaactgcagtccctccacataggcccatgtttcaggcctctgctctgtggccgctccatgggcacctataatttaagggaatttgcagttaagggcgtttctctacccattgggtctggcttgtggtcctgctcccaatggtggttgtatcagtgtcttgtgagtgatgcccatgaagtagccacagagcagaggcctgaaacatgggcacaggtggagggactgaaaattggggacctggtgcagtaatggcactggtgccagtgtgcagacacctttgctactgtgttggcaatagtttgcaaggcacagataaattgactttatcaaaattataaactttgaaacatcgaaggatagtcaac

SEQ ID NO: 478376 - DNA, 863 bp, Homo sapiens
ggttaaggcaggaacaggccattttcacttcttttgtggtggaatgtcatcagttaaggcaggaaccggccatctggatgtgtatgtgcagccatgcagtggggctactgggctccaggctgatgctggggaatgtttgcaaagagtccagtgatgtgattcatcttcaagtctcccagccatggataccagcacccactctggtggaggtggcaggggagggaagtggactctgtgtgggtccttggttgtgttttgttgattgtactggttttgtgttggttggcctcccaccaggaggtggcactttcaagaggcatttgaagaaggtgtgcctaggatttaataaccactttaagatgacagtggcacagagcattatttggaaaatatataacttagggagtaacggacatacaggagccttggaatcaagggatgatggatactatggctattttactcacctagagaagaaagatcagcaaactacatgtttctaatgtaaagaatccaactgactaagtaggggacaaactaatctgtttgttggagccacaagtcatttgctatacctttatgtttcaaaaagatatataatatggcttataatgatgcttcagtcaacaaagtactggatacacaatggtagtcccataagaatatagtactgaatttttactgtacattttctgtttaggtatgtttaaatacataaatccttcccaatatgttacaattgcttacagtgttcagtatagtaacatgctgtacatgtttgtagcctaggttcaataggctactccatatggcctagctgtgtagtatgctataccatctaggtttgtataagtacactctac

SEQ ID NO: 478377 - DNA, 453 bp, Homo sapiens
ctgccagcacgctgtcacctctcacaatgatacattttctaaagccagcccaagtggtcataggcaccaagacagtccctgtgattccaggctttagactagcccctgcagacccagactccatgcctgccccagaaacgggcccactccaggctccaagctggttccaattataccaggctccagtggactcagggtccagacctgctctagcaaaaccagggttcaggctcatccaagtagaccccagtgccaggccagcctctgcagaaggaggatctagaaacactcctccagatctaggcttcaggacagcattggtggacccaggacccaggttcagtcccatggacttagacctcaggcccattttagaggacataggttccaggtccatcctgttgcctggctggctcctaaagactcgggtacaaggccttttctaatgccaag

SEQ ID NO: 478378 - DNA, 795 bp, Homo sapiens
gggtccctgacttccaacatatgtttcctatagagattatttcatcacccaggtctggtagaattcagctgtgaatccatcaggtccgaggcattttctggtttgaaagcttcctattactgatgaattttggaacatttgttgatggcttcattcaaaaagcttcatctggaagatttcatgggggtggagtatggctcagctcaacactcaggctgttcactctaacccttgggggctggtgtcaagcccatggctttgttctctggaccctcaagattaagcacctgctgcactggaggggaaaagtgtttttcctcagcattcagggcatcttggaaatggagactggacattctgcaggcaccaagcttgccagcgccttgattgacatctggtgtgtaagcagtcaaaataaaattaataatgttgaatatcaaaaattaaacacatacagtaaagtaaaatatattaaaaagaaagacaatactcaaatctcatcacttcctaattgttttactaaatttactatttcctatggtcttgaatttatgttcacctattatatctgtatggtgaaaatactataacagtgtgccacaatgtgtaatattctctcaggtaactgcccttgatctccaattctttgttctcttccaatagttgctcttctggattttaaaaatgtaatctttataatgagtagagagaaggagggaacacttcctcttggcccctctgccaggtactaagttgccaaggtttacctacaaaactgggaactgtcacaaggct

SEQ ID NO: 478379 - DNA, 1223 bp, Homo sapiens
gtgtggtcattgttatggtagccgtagagagctgatatggccagatgcggcggagagaggaagcccggctggacccacgtggcttactgtgaaatcagccagtatggcctgcggtggggagaagatcagaaagctgacaccaaggactctgcaggcccacccatggccagctatgctcctgccttgccctgcctgaatccaggtcccttcctttgccctgctgccatcctagcaggagacagagagaggcctcctactcagagtagggtgtttgtgaagggcaccaggacaagctgggacagggccagggacagaggccaacaaccctggggccgtggggcctcctgcaggctgaagagggtgctgagagaccagccctcccagcagtgcaggcccctttgcaaggagcagctcatgcattctgcccagtctgatgactttccaccagtcctgacatggccaaggttttcctcgctcggtgacaagggagggatgcgggatgtagaaaacccaagatatcagcctttccggttccagccctgcccgggaaacatcaaaggcattgaacattccacactgagctgtttagggggcaccacaaggcgcttagataagaggggtccttgagtatctggctcctccatgccaccctccctgccctacatagccccactctccatacaggccacatgtttctgtcctgttttgatggggcagtagcatgccttcaccttgtccaaggatgtggggtgagacccaccatccacatgtgccatgcactggctctgctgaaataaagaagatccctctgggttagggagggcaggtgagaggccctggggtctgcacaggtggtgtcggctcaggttccgcttctgcctgccagctgtgtgtcatgggcagatcagctcattcttctaaagctcaatttccacttccacagaacgcaggcaacagcagcccttcatggggctcttgtgagtcctgttatttatcacacatggagtgtctcctagaattctctggcacacagtaggagcttaataactgttactaccgtcattcacagatcccaaaagaatccttgattgctcttttattctgttcccaaatatgcttacctgcctctgtgcagagacctttggggatggggaaggcggtgaagggggagcacgtgggctctgccccaccaagctcttagacacacctgttcctatgctggg

SEQ ID NO: 478380 - DNA, 674 bp, Homo sapiens
ttccctgaccccttgcgcttcctgggtgtagcgatgcctcaccctgctttggctcatgctcggtgcactgcatccacttgcccaatatcgaaccggcaagggtcagacttgcctcaggttgggccctgtcatccactgaaagtgagatggaatgagcttccaaccaggaatttcaatatgtggactctgggcaagatgaaagagcagacagttgccctgagtaacagaaaagctagaaaagggaaaagagaaaaatattgtctgtggcggggtggggaaggcaaagagctcagggaggccagagaaggacctacccattgcagtaacagtgaattaaagttcagggggctgcttatcagtcgtgaagggatcttttttaggagtaccatcagctctcgtttccctatttcaggagaaaaacagttccccatgtcccatgatcctttacatgccgaatcctgtcatccacagccatcagcagagtgcaaggcagatttaatttctttaatcagtcttttaagctgtttgtttttctgtaaagtctttaaaatactgaagtatttttagaagcttttgcacatcaatagacatccttcaatgagactgatgtaagaacccttattttcaaatcacttcagtgcagtgttgttcatttaaaatgttccactgttcta

SEQ ID NO: 478381 - DNA, 758 bp, Homo sapiens
tcccacccccaatttctgagtgagagggtttattttttacaatttaggaaaatctcaacagctccagggctgagttgccagtgggtgctggctggacccagggccaggcgtgtgtgtctccaggggatgccagctcccaccactgctcacgccaaggatgaaacagcccagctctatggtggagacaattcctggacccaggagatggtgatgaattgttgtgtaaatctgtcccacgggagcaggcctctagtcttcagctaccttaccccgcgggctgccgctgtgaatgctgagaagggcgctgagtcaaactgggaagatgggaggaatgtgagcaactcagtggcctgtgttgggaggaatggagaatttagagaatacagggaccagcgtgcgtgttgggccacgtttccaacaacagcatcaatcagagtaaatgtcatcccctctctttcgctctatggaggcagaacatcctgtagagggccatcttctgacactctcagcagagcaacacagcatctcaaccaaagggtgggtgtctcctccccagtgacaaaaagtacacttctcagctgcatcccaacattcaccatcactcatctctacttctacgatagctgaactctccttacaaatatgtacccttcaatgatttgtgagaaatgagttaaaaacaaaacaactccagagagttctgttatgtagctcctacagatggtgctaaacatatgaaattaaacaaaatgataccc

SEQ ID NO: 478382 - DNA, 554 bp, Homo sapiens
ccgtgcacttctccagcattggcttgtcagctccgcagggggcagaattaattccgttactccctgggcaaaacctttaaatggcttccctttcatccaggcccaactcagtacatttgcctggcccacagagcctctacaacttgtctctggcacacatcaccaagatcgtttttactcaaagtcgctgtataaaatgctacgtgcctggcacccttctaagcgagttacaagtattagcccacttaatcttcatgtcagccctccgagctgggcaccgttatttacgtcatatttttacagataaggacactgaagccattcgaatgcagaagcctttcacagaaataagcagtctagagttggaagctgagaaggtgtggaagcactctacgctgccggagatgccagaagactgcaccgctcactgcataatgtcatggttctctactagaatccccagaaccagaaactcacaattctgtctgcacagacagatcgtgataccacctgtgatgacagaatggacacttgtttctccttgttgaggccct

SEQ ID NO: 478383 - DNA, 2611 bp, Homo sapiens
agtggtaggggcactgctgcagggggtccaggggtgaatggtcatgcaaggaagaacctttgtcctctggggcagtgcaccttccagtgattgcctcagcatagtggacatggatgagggggtggctcatttctcattggacaagctttttttaagtgtccttgtaaaccacactaataacaagccctaccgtgtgattggcctgctccattatctgtcctctctgaacaaccaagaccacaaagaggaccgagaaaaaccagatttagtggcccttaccaacacattcaaaaacctgaaaaactggaaaagcacaagagacagggagtggtttttagaaacaggactagccttggagaagagaggagtgaagctgcagaccttcacagtgagtgttacagtttataaaggtggtgcatctggagttgttcattcctcgtggtgtgttcatggtctcactgacttcaggagtgaagctgcagaccttcacacagttatagcttataaaggtggcgtgggcccaaagagtgagcagcagcaagatttattccaaagagtgaaagaacaaagcttccacagagtgaagggtgacccaagcaggttaccagtgctggctcagctggcctgcttttattctcttatctggcccacccatatcctgctgattggtccattttacagggagctgattggtccattttacagaaagctgattggtccattttacagagcgctaattggtgtgtttacaaacctttagctagacacagagtggtgattagtgcatttacaatcctttagctagacagaaaagttctccaagtccccacctgattagttagacacagagcactgattggtgcatttacaaacatttagctagacacgcagtgctgattggtgtgtttacaatctttagctagacagaaaagttctccaagtccccacctgattagctagaaacagagtgctgattggtgcatttacaaacctttagctagaaacagagtgctgattggtgcatttacaatcatttagctagacagaaaagttctccaagtccccatctgacctagaagcccagccagcttcacctctcaccatcatttgatagatgaagaaagagcccaagaaacaaagagttctaagaaagtgaaggcagagaccagccaggaaacctcatgtaagtagttcattcttgttgtataggactccccactacataacactcagcttccgtgttcctaaactcaatctataccaatttatttctaattgtgtgggtttgaggagaacccttgacagcattccttgaaacattcacattctttccccaaatctttgcagaaaataatgcataaataataagtgactaagatttgtcatggtatatttagagggaaataaataatttctgtcatgcatgttcatgtgaagagaacaccaaacaggctttgtgtgaacaataaagctttttaatcacctgggtgcaggtgggctgagtccaaaacgagtcagtgaagggagataggggtggggccgttttataggatttgggtagatagtggaaaattacagtcaaagggggttgttttctggcaggcaggggcaggggtcacaaggtgctcagttggggagcttccaagccaggagaaggaatttcacaaggtaatgtcatcagtcaaggtaggaaccggccattttcacttcttttgtgaatcttcacttgcttcaggccatctggatgtatatgtgcaggcttgggctcagaggtctgacattcctgtcttcttatattataagaaaaataacaaaatagtattgaagtgttggggcattgaaaatttttggggggtggtatggagagataatgggtgatgtttctcagggctgcttagagtggaattaggggtgatgtgggaacctagagtgggagagcttaagctgaaggaagattttgtggtaaggggtgatattgtggggttgttagaaggaggatttgtgatatagaatgattggtgatggcctggatgcagttttgtatgaattgagaaactaaatggaagacacaaggtctgaataagagaaggaataaagcaggcattaaaggactaagaattggaaggacccaggacatccaattagagagtgccaagggggttcagcataattacttgcttggttggtgagttttggggctccatccttgagtttttttatgttgtcatacaccaggccagattgatttaggtaaaaacacttttcatttaaaaacatagagtctcattttttttagcagtgagatggcaaaaccaggtatccaaaggcgaaagtatccaacaatgcccaggaaggaaagcagttgctgttttgtagaagggattgggctggagagatcagtcagacgcaattggcagggagaatccatgtgtttgcatgaagaattatgctaagataggtaatggatgaagaagaaatttgggcttgactgaagtaatggaggctgtctgcaaagccctgtggcagtacagcccaggcaaaatggggagtttataggctttaaaaattgcaaggagagtttataggctttaaaatcgccatgctgtaacag

SEQ ID NO: 478384 - DNA, 2855 bp, Homo sapiens
cccgaatagaatggaatggaatggaatggaacggaacggaatggaatggaatggaatggaatggaatggaacggaacggaaaggaagggaatggaatggaatagaatggaatggtatggaatcaacgcgagtgcaggggaatggaatagaatggaatgcaatggaatggaatcttccggaatggaatggaatggaatggaatggaatggaatggaatcaacccgagtgcaatggaatggagtggaatggaatggaatggaatggaacaacccgaatggaatggaatgtaatggagatgcaatcgaatggaatcgaatggaatggaatgcaatggaatggattcaacttgaatggaatggaaagaatggaatcaacacgagtggaatggcaaggattggaatggaatggaatggaatcaacccgagtacaggggaatggaatggaatggaatgcaatggaatggaatcatccaatggaatggaatggaatggaacggaacggaatggaatggaatggaatggaatggaatggaacggaacggaaaggaagggaatggaatggaatagaatggaatggtatggaatcaacgcgagtgcaggggaatggaatagaatggaatgcaatggaatggaatcttccggaatggaatggaatggaatggaatggaatggaatggaatcaacccgagtgcaatggaatggagtggaatggaatggaatggaatggaacaacccgaatggaatggaataatcaattcgaacgtaatggaatggaatggaacggaatggaattgaatggaatggaatggaatgcaatggaatggaatcaacccgagtgcaatggaatggaaaggaatggaatggaatggaatggaaactacccgaatggaatggaatgtaatggagttgcaatcgaatggaatcgaatggaatggaatgcaatggaatggattcaaattgaatggtatggaaagaatggaatcaacacgagtggaagggcatggattggaatgcaatggaatggaatcaacccgagtacaggggaatggaatggaatggaatgcaatggaatggaatcatccgtaatggaatggacaggaatggaatggaatggaatggaatggaatggaatggaatggaatggaatggaatcaacacgattgcaatcgaatggaatggaatggaatgcaatggaatggaatcttccggaatggaatggaatggaatggaatggaatgaatgcaatggattcaactcgattgcaatggaatggaatagaatggaatggaatggaatggaatggaatggaattaacccgaatagaatcgaatggaatggaatggaacggaatggaacggaatggaatggaatggaatggaatggaatggaatggtatgaaatggaatggaatggtacgaaatagaatggaatggaacgaatttgcaggggaatgtaatggaacggaatgcaatggaatggaatcatccggaatcgaatggaatggaatggaatggaatggaatcaacccgagtgcaatggaatggagtcgaatggaatggaatggaatggaaaaacccgaatggaatggaattggaaaggaatggaatggaatggaaaggaatggaatgaagtcaactcgagtggaatggaatggaatggaatggattggaatggatttcaatggaatgaaatggaatggaatggaatggaatcaatcattccgagtggaatggaagggaatgtattggagtggaaagaagggaatggaatcaacccgagtggaatgcaagacaatggaatggaatggaaaggaatggaatggaatcaactcgattgcaatggaatggaatggaatggaatggaatggaatggaatggaatggaattaaccggaatagaatggaatggaatggaatggaacggaatggaatggaatggaagggaatggaatcaacacgaaatggaatgcaacggaaccgaatggagtggaatggaatggaatggaatcaacccgagtacaggggaatggaatggaatggaaagcaatggaatggagtcatccgtaatggaatggaaaggaatggaatggaatggaatggaatggaatggattcaactcgatgacaatcgaatggaatggaatggaattaacccgaatagaatggaatggaatggaatggaacggaacggaatggaatggaatggaatggaatggaatggaacggaacggaatggaatggaatggaatggaatggaatcaacgcgagtgcaggggaatggaatggaatggaatgtaatggaatggaatcttccggaatggaatggaatggaatggaatggaatgaaaggcaatggattcaactcgattgcaatggaatggaatagaatggaatggaattgaatggaatggaatggaattgaatggaatggaatgccttcaaaccgaatggaatggaaagcaatggaatcaacacgagtggaatagaatggaatggaaaggaatggaatggaatggaatgctacggaatagaatggaatggaacgaaatggaatggaatggaatggaatggaatggaatggaatggaatggaatggaatgcaatggaatggaatcgttccgagtggaataggagggaatgtattcgagtggaatggaaaggaatggaatcaaccagagtggaatggaagggaatggaatggaatggaaactaatagaatggaatcaacacgagtggaatggaatggaaaggactggaatggaatggaatggaatggaatggaatggaatgaaatcaactcgattgtaatggaatggaatggaatggaatggaatggaatggaatggaattaacccgaat

SEQ ID NO: 478385 - DNA, 822 bp, Homo sapiens
tggaaaggactggaatggaaatggaatggaatggaatggaacggaacggaacggaatggaatggaatggaatggaatggaatggaatggaatggaattgaatggaatcaactcgactgcaggggactggaatggaatgcaatgcactggaatcaacccgagtacacgggaatggaatggaatggaatgcaatggaatataatcatccgcaatggaatggaaaggaatggaatggaatggaatggaatggaatggaatggaatggaatggaatcaactcgattgcaatcgaatggaatggaatggaattaacgcgaatagaatggaatggaatggaatggaacggaacggaatggattggaatggaatggaatggaacggaacggaatcgaatggaatggaatggaatggaatcaacgcgagtgcaggggaatggaatggaatggaatgcaatggaatggaatcttccggaatagaatggaatggaatggaatggaatgaaatgcaatggattcaactcgattgcaatggaatggaatagaatggaatggaatggaatggaatggaattaatccgaatagaatggaatggaatgcaatggaacggaatggaacggaatggaatggaatggaatggaatggaattgtatggaatggaatggcatggaatggaattgtatggaatggaatggaatggtacggaatagaatggaatggaacgaattgtaatggaatggaattgaatggaatggaatggaatggaatgcaatcaacgcgagtgtaggggaatgtaatggaacggaatgcaatggaatggaatcatcc

SEQ ID NO: 478386 - DNA, 561 bp, Homo sapiens
gagtcactcccaggtgggcagtatgagtctccctcgatgggccctgaggcaccctctgggtgtagagacttcctctcttgatgaccgcgggtaccatcattgtcaaatgaatcccatgcaagagcgagtgtctgagagtgagttgcccaattggctgctgaccttcttcccctactgggtgcagctaatctatgaacaatctgaaagcactggaggtttgttcccttctctcctccagcagtcctggctgggcaccccagctgtgtggccccctgatttcctcccaggcccctgggagacatacatagaaccacaccctcacatcaactcatcacatcaccagcgcttgtccacacgtgtggtaggatgcagagtgctctgggcaggccactcagaggcccaggtctgctccatggtcccaggcgttccctggacctgcttgtggtctcctcatttgttgagtggatggcttcgtctgaaggcatctgtgacgatgtgtggtttctgcctgcacttcttaccccagtcatagagacacttggaggcctctccttgtgcctc

SEQ ID NO: 478387 - DNA, 817 bp, Homo sapiens
gtcttcgcctttctgagtccagttaattgtattcgtttccgtcaagcatgtacacagtctgtggaatgcttatgacagaggtgacttttcttccagttccaagctccactcacgcgaggcacttgctcaggctgtattcatggaggagatgtgtcggtggtcaaagcactcaaatacttccctctcattcggtggagagtcgctccccgaaatcaccttcctggccacctccgtcagtccctcccctaggttattctagatatttctatgcctccagtaatgaaaggggtaattccctgcagcagagccgccgagcccctgccctttctcgaagctgcccctctatttgcttggttgttgcccacgcccctcgggctgttaaatattgcgaccatcacccctgtttttcagtaataagaaagagaagccatgtgcatgtgcaggagaatggggccaacagccagcaccagagatgtgaaagcagagactgggatgtggcagccagcaaggattgctgccagccaccaaaagtgggaagacgccaggaagaattctcctctaaagcttcagagagagtttggccctgccaagaccttgaattcagctcagtgaagctgatttcagacttctggccttcagaacaccctgatcattccttatactctgaagacagccaggtccttcctcctcagttgtttcaagaaaatggcaccacagtcaatcacaagaacaaagaagacaaaccttaacttttatgtatatcaaaatacactttcagagctcttaatggaaaaaatagcctggtttttgatcctta

SEQ ID NO: 478388 - DNA, 715 bp, Homo sapiens
tggcacctcctctctctctctcactcctgctctgccatgtaagacacttgctctcgctttgccttccactatgaggatccactggaaatttgcacctaggaagtctggcttgtgctccaaaccactgggatacaccctggatacgctttatctcccaaagaggaagagagttgctcagtttatatgttgcatgagtgagcaaggtctccatcctctgaagctggatgtgattggcgctggaggatctgctggcaaggtgaatcacttagatgaatcactcaaatgccaggcaattggagccagcacttggtgggaggcctcagttcctctccatgtggactctttcctactattgtgtaagcgtcttcatgatatagtgggtagacttccctcaaaacaagaagagagaaatacagagagccagagagaagctctttacatgtgctctgaactacatttttatgacctggctttggaagtcagttattaccattctgctgatcagtatcaagtctctaagttggagctatattcaaggggaggaacctcagctccaccttttgaagtagggagtatcaaaaatttccaaatatatttttaaactaccatgggagaaacatatgtacattacacgtaagtaaacaatgatacaaatgacttctgacttcctgcagaaaaaaaaaggagtccagaaaacattgagatatttttaaac

SEQ ID NO: 478389 - DNA, 1469 bp, Homo sapiens
tcatgaggggtctcctgatccatggccaccacgcccatcctggtcatgacttttcttggcaattcctctgagttcctgaccctcattcagtctgctttgttgccctttccccttgtatcttctgagagccccgcaagccacaaagagatttatcacagtgtcatttgtgaaaactcatcacactttgcaagctgcctctgtggggaagtagatggtgttttattgatgcttaggtattgttgcgggatcctgaggaccagagagagaccttggggtgtaaacaggaggatacatttattattgaatgcactcagacctagcagactcaatgtccaaagactgggcccagaacaaagacagcacttgacttttatacacacttcacaaaagaggtgggctagtttgaagcaggcttatggttacggtcacgtgaaagcaaggatacagaggcagaacaattaattaaattgtgacaggtttataactcaggattacacatgaccattgccaagcaacccagatgtccattatctaggttttgctctaaagagccttgcactggttcatctcataacgtttactatggtgcccaggcagcggtagttcaggcctgctcaggcttctgatgaccttcattgtacttcttagataaaacagaatacttgaagttactagttacagagaacaagaatctataaactcattccataaaacaaaggaaaatttgttttttcttctccctgtgttgagggagtgctgggagagtctccagagcgcattagataatattatcaggacttttcctgggtctgggctgtgcctgttgctatctctgggacaagtcagcctaatacaggaaagcttatttttctttctttttaattttatttttctttaatttcccacctcagtatcactactaaagtttacatcattttgtgtgttttttagataaattaattactatacggtatttgactctaggcttcaaagtcaggtttcgaattatgaaacattcagttctactttccagtcttcattcccacaacatacttgccaggaagatatttctcaaaataaacacctgtctagcacactgaggtttcacaagtatattgggtccttgcccaattctctctgtatttaatatctctttctttggagtaagatttttctgtaattaaaaaaagttttttgaaaaacaggtgtctatattgttttacactaaactaaaactgaagtaactaacaagtacaattcactgcaggtactctcttcatcttgtagttcacgcttaagcactgaacctgtgctaagaaatgaattaagggaaatttaatactttagtcagatatattgataccaccaacaatcaggttcttttagtaaggaggaaggggagaatggagattgactgggtatcaagcaatcttaccacatgtattggtatatattttggttgtttacag

SEQ ID NO: 478390 - DNA, 1018 bp, Homo sapiens
gcgttctactgctctggttgtgctggcagctgattagattgtgcccacccagatttagggagctgagaccttgccaaggtgcagccagccgtggagcatgcagaaaggatctggggaaacaaacagcccaagcccgtctcttcccttctgccaatctctggtcattcccccttgtggctgtgcccatctgaaagccaaaggcaagagacttcgttatgtggctcttaaaggccagcttcctgggacagagaacaggagtgacttccagaacagtgccacagcatcagcccacttggggagctgccgctgctgccacagtcccgaagcgggaaaatcaggaagcagacatggcaaatggtacatccaggaatacaacgtccctgctgtgatccatgggttgggagaaggccacggcagctattgcctccagaagagtgctgcacctgccaggtccactttcgcagaacacagaccccctaccatgaaatcagcaactggacactgggacctctgccactgttactgcaggaaaacccagggcccccgtgaaccagccggtcaacagcagcattggacagacccaagttgagacctttaccttcgacacactttctgaatctcatgcaactgtttatgtttggccaacctaaatcctatttgcattttaactgcaagagattatgggaaatacctctttaagtttttcagtctttcagtttgggaaggcactctagggtaatgggcaggctaggatagtgggggtttgccagcaaccaataaacatacatttaaatcaaaagccagattgtctgtgtgtgtgtatgtgtgtgtgtgcatgcacatgtatgcatggttttacgatgttttacaaaactatattaactttactagtgtaatgcactctagcctgttctattctattctattctattctattctattctattctattctattttctattctattctattctattctattctattctattctattctattctattctattctaa

SEQ ID NO: 478391 - DNA, 927 bp, Homo sapiens
tgctgttatgaatagtgctgcaataaacgtccaagtgcaggtttgtcaaagatcagatgattgtagatgtacggcattatttctgagggttcttcaggaccctcagctgcaggtctgttggagtttactggaggtccactccaaaccctgttttcctgggtatcagcagcggtggctgcagaacagcagatattggtgaaccacaaatgctgctgcctgatcgttcctctggaagttttgtctcagaggagtacccggccatgtgaggtatctcaagctgcatgctgggagaaccactactctcttcaaagctgtcagatagggacatttaagtctgcagaggttattgctgtcttttgtttttctgtgccctgcccccagaggtggagcctacagaggcaggcagacctcctcaagctgtggtgggctccacccagtttgagcttccaggccactctgtttacctactcaagcctaggcaatggtgggcaccgctcccccagcctcactgccaccttgcagtttgatctcagactgctgtgctagcaatgagcgaggctctgtgggcataggaccctccgagtcatgtgcaggatataatctcctggctccctggggtcaagcaccagcagtgctggggatatgaactgctcccaggaagctgccaaaacactcaggtgggttagtagaggctgtgctgtacgtacccttttgaaggagcatgaggccagcagaaaagacggcatgtggatcagatgtgccctggtcccatgagaaaggatacatgtgcacaacgtgcaggactcatgtaatatgtatattggtccacttactgttattcccttgcttcctttttttcactttcatggctattttttccagggtactctctaataaactgtcatattccaggtcttcctggaattt

SEQ ID NO: 478392 - DNA, 546 bp, Homo sapiens
gtttatacatcccagttcacagaataggaaaagagtgtggaaatggtgattaggttaatggaccttgatcccttttcctgggggtatgtttttatagaaagaggaatgcagtccatcctattaaaacttttactggacctgttccttccaagtggcatcaataccatttccccaccaagacttcagaattcaacaggaccccaatccaagaaaatcatccttgcttacgaggatgtacacagtcacatccctggtcctaggacccttggcatcaggcagtgctccagtgcttcttactgggacaaaaaaaaagtgagattatatgggaaaaatcatataaccacactggcagcaggagggagatttccacccctgctttgccagatcccccagaaaagtgagaaatctatccagggggagccttcctttatcctcccccatgttgagtgtgagcacacactcatgaaggcaagtccctcatgcctttgtcttctcttgttttaggtggtaaatatttcaattgcctgttccaattctctattaaac

SEQ ID NO: 478393 - DNA, 732 bp, Homo sapiens
aaggcctaggaatggattttgtgagggactcatcttcccctgccaccaccactaccatctccctctccccagatcaaaccctcaaaagaaaaaaagaacataagaacaaaaagcccccttcaaatgacagcaatttcaaaaagataaagaaacaccagccctctcagataaggaatcagtgcaagacctccagcaattcaaaaagtcagagtgtttccatatctccaaatgatcagactaagtctccagcaatatatcctaaccatattgaaatatctgaaacgacagacctagaattcagaatctggatagcaaagaagctcaacaaaattcaacagacagttgaaacccaatccaaggaagccagaaaaacaatccaagagttgaaagataacatagcttcttttcaaaataatcaaactgaacttctagaactgaagaattcattatatgaatttcaatatataagtggtagccttaacaacagtctaaaccaagctgaggaaagaatttgagggttgaaagactgggctttcagatgaatccagccagacaaaaaaataaagatttttttaaaaaataagcaaaaccttcaagaactatgaaactatgtaaagagaccaaacccatggctcattgcaggtttggttcttgaaagaggaggagagagagaataagccaacactaagggaattcattaccattagatcagccttacaagaaatatttaag

SEQ ID NO: 478394 - DNA, 940 bp, Homo sapiens
cgctgtgcaaatacactgaggatatcatgctgattgaatgtgttgaagcagctaccaagatccatgcactgattcttatggagccttacccaccttccgtggctccaactgaccccaggtggtccagccctgctggcactcccaatatttctcacatgatgagacaggagcaagtctccagcaaagggtctcagaacggtacagatgctgaatgttcacctccaattcatccctcacactgcagaagctgtggacccaggagaattttctgcatgtggtgccatgccagtctggaaaagggggactgcagtcaaagaaaactgattctcttaccattcactcatggcatttttagattctgtggtccaaagaagtgtatcagcctcactcctgaattctgggatattcaagatggaattcttgcctgtgcataattgctaattggatttcttttgcgggcaaggaatgaagccagagaactccatgttgctgacataactccctgttattcctaatgattttaacttacaatatcttaattatattacagaagtttgtgagaggatgttcacaaaataccaagcaaaattcatgactcatggctatttctcaataaatatcaatttgctttctttttttcattctcttctactcattactcctcccctacactaataaattaaaatacagggatcagtcagtttaatactgttttaaggaggactacatgttatttggagagaagggcaataagtccaccaaattcacatgaccccaagaggctacaagaaaggaaccacagggagattgtatactttttaagaaagagaagggaattgacaaagatgaggtctggggggaaagaaagcttacggaaagaaaagaaaatgcatgggctcattgtcaatgtctttcatagttaccttagagtatgaaacaa

SEQ ID NO: 478395 - DNA, 593 bp, Homo sapiens
gcgaagcgccgggcagctagggaacatggccctggaggggctctgctcggccctcaaagatggacaaaatgttggaatcaagcacattcctgcaatccagtatgacatttggattcaaaccagcaatgaggtcattttgcttcaccaaattatcctgtctcatatccaccaaacaaggagcgtatctacattttggacgctgctccacgtgaaagaatcgagcttcgatgaacattattatatagagccatcatttgagtattatccaatggagcactcaaatgaatccaagagagacattgttgcagtctacgatgaaagcagttctattgaaaacctgaaggccaagtttcgcagcactgtggccaatgatggaatgcttaaaacaggaataggcgtgatacaaatgtgggcagatgaagtacaagtgaaacagcctcaagaaaaggtcatggcttgcaaaactgcttttcataaaaccgggttccaagaaatgtttgatcctccttattatgaactgttttcgctaagggacaaagacatttctgcagatctggcagacttgtcagaagaactgaacaaccactagaaga

SEQ ID NO: 478396 - DNA, 619 bp, Homo sapiens
gagtgccagaagctgcctctgtggttgagtcaccatgtgcatctcaccgtgctgaatgtgaggaagtggagtggcagcccacagtcagttccgcatggtcacaatagagatccccacaactcacttgtccatgggtcaccctgtgttccacagccttgtgcttgtccctgtgctcccaaggttactaggtgctgggcttggagctcatggccatctcactctcccccaggccgacaaccccacctgcccacctgctgtggccagctcgggggatgcagggccccactgtcccttagtcagcatgaggccaaaatgggcccttcatccccagcattcacacttgctcagacacacgagcgaggtgtctggggcctcaatggcagtgggtcatgatgctaccagtaaacaaggctcagagtgcaatggcaagagcagggactttgcaagcaaactgagcagcatttgggttctagttctgttactctgccttggggtgaattttgaatctctgagctcttcatctgattcttagaatgagaaaatagttacatggcaggattgctggaaggattataaagaatatcaataataataaagtaaacctttatcgaatattttg

SEQ ID NO: 478397 - DNA, 726 bp, Homo sapiens
tcccgccactgcacacaccttaaaggcagagacggttgtttgcttcactgtccttgatcctggtgcctggcacatagtaggtgcacaggaaatgtttgttgaataaatccctggatgggtgggtggaagtggactggcgtcccagctctgttcctggctgcctcagccctgctggcttttcccaaagcacagaggacagtgccctgcctgtggcaggaacttcgggaccttggatctaccccaaacactgctggggaaagtgctagtcctctggagggaatagatgataagagactggccgttgtcaccactgaaggcaatgaagaggtgccccctaggcagcggtgtgtgtgctggagctgcccaactctgtgcacactgacctcacgtgagcagattcaaatgggccagggtgggagcatttacaccgtggaaatcggcaaacactgccaccagaatcaactgttcccacattcaccagcacacccctgctcccaagaacttggaaatgaggctgctgtcagagttaaagcagaaattccacccccagggcatgtgattggcctttggtgggggaaaccagggggctgaccatagggtgagacatgggttgtgagagcaccccaagctcttaactcctatcaagttgggcagcgggatctggggagcacatcgcagcagccatgcggagtggctgtctcctctggagccccagaggaggtgtgg

SEQ ID NO: 478398 - DNA, 733 bp, Homo sapiens
actaatcttttgttgtgagcagcgtcatttatcatgcactacttgcccgaaaggcaggcagcacagagggatagctgagccatggaaacgtgtctgcgtcgcactgagtgggagtggcctgccagcaggagtccaaggtcatgggagtcacctcgcctttggacaaaggcccaatgcagagatacctcaagacaggaccctcagctgcaggtctgttggagtttgctagaggtccactccagaccctatttgcctgggtatcagcagtggtggctgcagaacagcgtatattggtgacccgcaaatgctgctgcctgatcgttcctctggaagttttgtctcagaggagtacctggccgtgtgaggtgtcaaaaatcaagaagggaaacagaaacacagacactttcttaaactctatggtagcttatacaataaagtcttatagcccacaacgtagaattgctgtccccagagcacaggttcagggatgtctgtggccttccaaaagctggccggccatggcatgccacctcatcatgctgacagctgaaggctcctgggacaggtgcatacttcaccctcctggaacccccaggacctacccagttacaggcttctggaccagctcagctccatctttttagagccacattctctcaaagctttgtcattctagtttttgctcctctccacatgctaagaaaatcaggtagagatttcttttctgatggca

SEQ ID NO: 478399 - DNA, 698 bp, Homo sapiens
gttagtgttgctctgtacatccactcagcccagcacgaatattgtaggcaaacccatgcctcagtaccagcactgggaaaataaaaacacacatccactgaaagtgcatcagcagcacctgaaaccctccagaaatgcaagttttgagacctcacctcggaacagcaaagtcagtatccctgagtcagcccagccatccatgatgcagcaagcctttcaggtgactctgatgcagcataagtgcctatggaaagcagcttccctgccccagggctggaggaacaaagcctcagtgtgggaagctctgatggggccctgcatggggctgggtgcttccttgaaaaaggaggatcccacagagcagagtgaaaacctgaggaggggcatgcttcacctcttaggggacgcaggagggaactcttcgctgatcctcaccctggaccaaagtcagtcctcctgcactttttcccatggcactgtcgagcctttccatcccggagttatcctcaccgagttgctggtctcccctgctgggccacaggctctgttaagggcagggactgcgtcagacttcaaaacttggaggaaaataaatgctaatcagtgttttctaagttcctgcactcgtgtcttggcacagaaggcgattataaatgtttgttggatgtgccaggcattgtaacaagcagtgtaaatat

SEQ ID NO: 478400 - DNA, 559 bp, Homo sapiens
agatcttcttccaagatggcttcttcatggcgtgtttggcacctcttggccctttgcctttttctgtcctcatatgtggtgtcgcatcttctaggccctctctacatagcttgggcttctcacagcatggtggtctccaagattggcttccaagacataggaactgggagctgctccccagggaagggctgcctcgggcagtgcctcttcctcctgctgcgtctgttggttggaggagtcaccgagtccccctgcttgcgggtggagaagcagactcgcctcttgatcggagtggttacagacacttctagagacagtcttcattttgatgctcaactcaaccaaacccatcaatgggccccactactcacttcttgtgagggaatcacaaggcctttcagtggtgctccatcgcacgcagaggacatgtcagttccttaatgggtcccgtgggacggacccctctctttgctctctgacttctctccctacccccctcccctgctttctggatcttttgaacacatcccatgttccggcgtcaggaggtatccgcctg

SEQ ID NO: 478401 - DNA, 571 bp, Homo sapiens
tctttttttttttgagacagcatctcactttgtctcccaggctcgagtgcagtggtgtgatcatggcacactgcagcctcgagctaccagtgggcctatttggattttggggacaacacattcatcatttcagtgtgttactccagcccattaatcaagtgacccgaaaggctgccagttttgagtggggtccagaacaggagaaggctctgcaacaggtccaggctgttgaattttggagcaatgccctgccatcttctgcagataacatctctgcttttgagagacagctcttggcgagttactggaccttggtggaaactgcatgtttggctctgggtcatcaagtcaccatgcgacctgaactgcctataatgaactgggtgctttctgacccatctagccataaagtggttcaggcacagcagcattccatcatcaaatgtaagtggaatacatgtgatcaggctcaagcatgtcctgaaggcacaaataagttacatgaggaagtggctcaaatgcgcatggtctccactcctgccaccctgccttctctcccttagcctgcacc

SEQ ID NO: 478402 - DNA, 841 bp, Homo sapiens
agggctatcatggtgggaaaggccaaatggaagccattagagctgcctctacctagaaaaatagtaaatcaaaaacaatattgcatacctggaggaactgaggagattagtgccaccatcaaggaattgaaagatgcaggggaggtgattccgattcccaccacattcccattaaactctcccatttggcctgtgcggaagacagatggatgttggagaatgacagtggattattgtgagcttaaccaagtggtgactccaactgcagctacagtaccagatgtggtttcattgcttgagcaaattaacacatctcctggtacctggtatgcagacattgacttggcaaatgccgttttctccattcctgtccataaggcccaccagaagcaatttgccttcagctggcaaggccagcaatatacctttactgtcctacctcaggagtatatcaactctctaggtttgtgtcataatcttattcttgtgatggttaatactgagtatcaacttgattggattgaagtgaagagagaaccttaatacaagtttatattaccaatattaccaatattttgggggagatgtagcaatggatttttcaattgtgacttttaaaattctggttttaaaaatgtttaagaaaatcaactatattaaatatgtgattgtattttgaaatgtttaatagggtttgttggtgttaaataaggaaacttcacttgtttaatttattagctaagttgtaaagaaaataagtgccttgagtttcaaggcttaaaacagcttgtaacagttacagttttaaaaactttggattactttaaacattagttactaa

SEQ ID NO: 478403 - DNA, 550 bp, Homo sapiens
cagccggggtcctagtagaaacgcatggaccttttgatattgtgatgttgttctacaaggccctgagtccctgttcattttttcaatatttttctgtgttcttcagactagataatttctatggctctatcttcaagttcacggatttttttattagtcatctgtattctcctgttgaaaccatccagttatgtgaatcagatcaccctcaggtaaaagaaaaaaaatccagaaaactcaccagtattcctgtcacactgacacttttctgggttgctaccaatggccattgcaagctggaatcagtagtaatggacaatagaccacctttgttttccagacctcttttgggaggtggcagtgagtttagaagagatgctgctcaatatctggctgagaagagcataaaccacttaagtcaggtagaaaggcctgaaagcatgggtactttaagttttgatgaacttggtgctcactaaaaagcagttcccaaaaactctttgatacctatgatctaacaatgtatacagcacagattagtccaagtttg

SEQ ID NO: 478404 - DNA, 1341 bp, Homo sapiens
taggcgttcccctgctgagcagagaagatgactgcagaattgagagaagccatggccctaggcccatgccgcccagtgaaggtgaaaaaggaggaggaggaagaagaaaacttcccagatcaggcatccagccaacaagtgcactctgagaacatcaaagtctgggccccaggggagtttcgtcagacaggccttgatggatcagaagaggaagaaaaggtgctgaaaccaagaaccttcagttactggttccaaaaactgagatacagtgcaaacctcgttgtgcatcagagaatccacaccggggagaaaccttttgaatgtcatgagtgtgggaaggccttcattcagagtgcaaagctcgatgtgcatcagagaatccacactggacagaaaccttatgtttgctcaaaatgtgggaaagccttcaatcagagttcaaatctgactgtatatcaaaaaaacctctccttagaaaaaacctttaggcgtagtaaatgtgagaaagcctttagttatagctcacaacttgctcggcaccagaaactccacattacagaaaaatgctgtaaatgtaatgagtgtcggaaaacatttactgggagctcaaaccatattgtccaccagaggatccacactggggagaagccctctgcctgtaacgattctggcaaagcctttatgcagattgcaaatcttattgtacatcagcgaagccatactggtgagaagccatatgagtgtgagtttgggaaaacctttagttgtttttcacaccttattatgtaccagataattcacactgcagagaaaccttatgactgcagtgaatgtgggcaagccttcagtcagctctcttgcctttttgtccaccagagaattcacagtggagatcttccttttgtgtgtaatgaatgtgggaaggccttcacatgtagctcatacctacttattcatcagagaatccataatggagaaaaaccttacatgtgtaatgagtgtgggaaggccttcagacagaggttgagcctcacggtgcaccagagaacccacactggggagaagccctatgaatataagaagtgtggtgcagctttcatttccaactcacacctcatgcgacaccacagaacccatcttgttgaacaacaagtaaggaagaggaagacttccagcattggtcataaccttctgcctcccaaatgagacacctctttgctgttttcttcttcctttataaagatgaggcctatgtccttaaaagttacagttttcaggaatgcagcacaaaacacaagataaacatttcagcagttaatttaaagaaaacagaaagtaagc

SEQ ID NO: 478405 - DNA, 571 bp, Homo sapiens
tacccttcctagcgtctgggcaggtagagaaagaccatcagttgggggcggggttaagcatgtctgagttcagactctccttgggcaggacttgctgcagccactgtggggttggtggttctcaggccaatgaggttatgttcccagggggattatggctgcctctgctgcatcatacaagccaccagggaagtgggggaaacccagccatgatgggcctcagccagctctcatgcagccagcaaggccagtctcactcttaccatgccccaacaaatcaccaggtttatatccaggcagtcagtgtgcagggctgagttcttgccccaggctacaagccttcctgctgagaaagcaagtagggctttcaggcttcacccctacccacatgccatggcttctgtgctcaaatctgcacttcctgtttgctccccacccccggattttaccctggaaaattcatgttcagccaaaattattacaaagttcagctggaagtttcctttaccctgtggttcttccacaattccactggcagccctccccaaggacccttgtgagataaagtctt

SEQ ID NO: 478406 - DNA, 576 bp, Homo sapiens
agctccctgacacctcaccagaagacaagcagatgcttgtgatgggctggacagtggatagcctgatgccatgagcttcttcttcccaggatgtagggggacagagcttaacagaactggagcccctggcttgcccacaaagacaccaatagtgagtgcagacatcaactctgatgagagcggctgggaggcattcctggtgaaatgcactgatggagcgtcctggtgtcagttaccacctcttggtggccataaacagaaaaaggctaaaccctccaaacttgtgcacttagcagactccgcttctacaaagaccagccatatccaaagcagctctctaatgaggagtcggcatgagaatcggattcacacttcagagaaaggtcagagactcctgctgagggcaccaggaaatagtggtgctctccaagatcatggcgaaccatacggtgattttaatttagagagggaaagaaaagaaactccattttcaaaaatagcctatttcgtatgtgttgacaagcaggaagtgaatgaagtcagaaggttaatctcatagcagagcctgcaagtcac

SEQ ID NO: 478407 - DNA, 769 bp, Homo sapiens
ctggggagagtttcaggaagcgggctttgctctggattggatgtgatcaagaaacaggggcgtcgccatgccggaatgtcttatctatagagagggccaattagattgctcctctggcaccctgctttccaatctcagctgccttatcatctcccacctctggattcaaccccctctgtccagtgaggttgccccttccaacttggccttcaccttcctgtgccatgatctggaaatcattcccagggagaaagcatgggatgtagggtgttttttctggatgtatctggttatgactgggtgttgccagaggagattaacttttgactcagtggactgggagaggaggacccaccctcaggagggcccactcacaatgtgggtaggcaccatccaatcggctgccagaggaactagaaaaagcaggcaggagaaggtggaagaagcagatttgctgggtcatccagccttcatctttctcctatgctgggtgcttcctgccctcgaacatcggacttcaagttctttggcttttggacccttggacttacaccagtgacagtcatgccagaataaactgtcattgtgattttattaaaatcaatgacataaatcattacaatcaatgattataaaataattgtaattttctaaaatcaatgaataattgtattcaatcattgggttaggcaatggtctaggtatataaacataaattatcacagcagaaaaaattaagctttacatttatttcttttgtaaaatttgt

SEQ ID NO: 478408 - DNA, 602 bp, Homo sapiens
agggaggagctgcccacagccctgggagtgggtgatgtggaagggaacccatcgtgcctctaggtgactgagccatgggttcgagggtctctgtatgtctttatcagcagcatgaaaacagactaatacatagctcattctactttacaaagaagggtgtggaagctctaagaaaggaagtaaaacgtgtaaggtcgcatgactattacttcactgccagagatgaccaccgtaaagagtttactatttatttcttacaatttttatgggcttatgttcattttatgtttgtgtcccttcaatatatattacttccctgtgctagaataccctgctggatatcagagtatggcaagaacaagacagacaaggcctctgacagacttcaccttcgaatgaaggaggcagacaagaggcaaacgaatgagtcaacaacgacatcccacaagaagaggcgacagggtgaccgggaaaagaactactccagaaaacgcatctctctcagtaacaaaggtccaaatcatacgtaagaatcagatattttaaaatatgaggaatgttaattgaaatggtgatcgcatttgtgtaatttcaatttgttc

SEQ ID NO: 478409 - DNA, 693 bp, Homo sapiens
acaccgtggccccttctgcagtcaacttgcccagcctcaacccagcccaatctctgcctccaacatttagagccacctgaatcgcaaagaaaggccagtgggtgtgagatgtttagttccggttttattaccatttattgccaagtgaccctaatggaaataccaaccatggtgccagatacaggacaaggacactgcctggcaaagaggctctgctcgattcctatccactctcatccacatcaccggtgtccccatggtcaagataccgtcatccccatcagaagtagcagccccagcatcctcatcaacatcaccatcgtcattctcaccatcgcatcatccagctcccatcaccttcatcatcgccatcaacaccatcatcatccttactatcgcatcatccagctcccatcaccctcatcatcacgatcaacaccatcaacctgtgtcatcatccccatccccaacatcatcatcatcaccgtcaacatcaccaccgtcatcatctacaggcccagggctagttgacttcttagattcgtaatgttttgaaagtaggtccatgttttatttacctttatgtctgctgcaataacagaaaatatccagccctatagacaagaaggttacctcatttgggagaacgcaaggttttgtaatttattgatctcattttacagatggagaaat

SEQ ID NO: 478410 - DNA, 1981 bp, Homo sapiens
ctgactgacgtgaagaagatggaatggaaggagcggaggcaaggagagcaactccaaggccatgttaataatttaggaggggtatttgatttggatggaagatcaaaccagctacaaggcctaatccagagcaaatccttaaatctcttaaattctctgaaagctgagagagaaaatgaaacttcagaagaaacgtctaaatctaatagaggttggttcatgacgtttaaaggaaagaagttgactctatttaacacaaaagtgcaaggtgaagtagcaagtgctgatggagaggctgcagcaagttatccagaagacctagctaagatcatcgatgaaagtagctactttaaacaacacattttcaatgcagatgaaacacccttctgttggaagaagatgctatctaggactttcatagttagaggggagaagtcaatgccgggcttcaaataatcaaaggacaggatgaccctcttattttatgtagagggttccactatattcattcattcatgaccatatatttgatattttggtgctgttttaggaaactcatttttaaagttcagttttctagtatagtatgcttatatataaaattcagcagatttttatattcatacctattaatcttaatcattcctttgtaggtaattttgaatgttctatttatacaatcatattgtttataaataatggctattttatttattcctattttaatcttaattatgtatttttcatgacttttgggtatgaaaaattgaatgtaagaggggatattaaacattcctatctcatttcccatctcagtcataaagcttttaaaatgttgctgttaggtatgatgttgtatatgattttgaatatcattgataaagtcaaacacatttcattctattactaattttctattttaaaaaattataagtaggtgttatattttatcaattgattctccaccctaatggaatttttatatatttttcttctttattatattagtgttgcaaaatgcattaaacccttcagcagtggggtagtaccactgtggaaaatagtatggaagttcctcaaaaaagtaaaaatacaactacaatattacccagaatcccatttctgggtacataaccaaaagaattgacatcagggtcttaaagagagacctgaactcccatgcacattgcattattcacaaaagccaagatatgaaaataactcaaatctctattgacaaacactaatggataaataaagtgttatatgtgtatgttaatatgtatgtgtgtgtgtgtgtgaatattatttagcctttaaatagaaggaaatcttaccatttaaggataaaggaagatcttaccatttgtgacagggtggatagacctgaaagacattatgctaagtgaaataagtcagtcacagaaaaacaaatactgcgtgatttctattatataaggtatctaaaatagtcaaacttatagaagcagaaaatagactggtggttgacaggggttggggggaaggataaatggggagtgtataaagttacagttatataagacgaatatattctaggtatcagttttacaacctagtgcctatagttaacagcaatggtgctgtgcccttacaattttgttaagagggtagatctcatgttaagtgctcttactacaaagaaagcaaagagacaccagggaaaattctggagataatggatatatttattaccttgattgtagtgatggtatcttgggcatatgcttatgtccaaactcatcagattgtatacattaaatatgtacagttttcttgtatatcaattacatcccaataaagatgtaaaaataaagaaaaagatgattcaaataaaataaaatgtgattaattcataaaaaataacaactgaatgttaaggtatttaaaaaaggcctatttttcaagtattatgttgaaattttggtgaatattttgatgt

SEQ ID NO: 478411 - DNA, 627 bp, Homo sapiens
acagctgcagtgctggcccctaaggagcatgcacagtgttaactctccagctagggaaaacaaaacaaagcaactcgctcaggtgctccacacatctcaggaggatggcacacgctccatccacctggcagtgcctcattggctggagcccagattgctctgtctggggacgccagcaattctctcacataccattgcaattcctactgtattggacgttgtggttgctgtcggattaaagcagacatctatttgtatttttgatggggaatttttggaggaatctgatgtcaccactgatctgacaggaggtgtagctcaggcagtaatgcaagtgatagggagtgactgtaaacagatgaagctttgctcacttacccgctgctcacctcgtgctgtgtggcccggttcctaacaggccacggaccattaccagtctgtggcctggggtttcgggacccctgctgtaattttaccatgttttttagaattttattttaatttatctgttggctttttaatatgtatttttgcatcattttaagtggttgctttagggatgacaatatgtattttaaaaaaaaaatcttcatttcttcttaacattaacatcacttcacataacac

SEQ ID NO: 478412 - DNA, 3889 bp, Homo sapiens
ctggtgtcctgtgtttatctggccatgggctgggagaagttagccaagaaggtcaagctcttgaccctttggggaactggagaggaagagaagacaccagacgccagcaccaaaggaccagccctgacaagggcccagtggcccaatggcagtgagggagtggcctggagagggtgccaagggcctcagtccattgggaacccccagcccctgctccaagggcaccaggatgggggcacagtgggctcctcactccactgcaagaggaaggggactcaggcctgctccatgctggatccacgggcaacaccaccatggccagttctgggtatggaaacaggtagcagctgccacatgcccaagtcagcccctgctctgcacaggtgcagggaccagtcccatgctccaccgcagcagggcatgcagctgtaaaagctgagggctcaaagcatgtttgttgggtgagagagagaagtagtgattttccccaggacatgctcctagttagaaaataatatccctctagaattaattaattaatgggagttgatacaattaacaaatactgagtgacaaattctacagaggtgccattctctaattagtgctgtggtttagggcactgcagagcctcttagcttccataccctgaccggtaaaacgaggggctaacctgaaacttcccactacaatctatcttcccagggttttttttttttaaagtagaaaaacaattaaaatgtgtttttatatttatttaaaatgtaatacactgtcatgaggagtattttggaaactaagcaaacaagcaaaaaggcactgacatcattcattgttcccagatgtaattaatatattagcacattttctttcagacttattctttcctgtaggtttgttttttcattgtaatcaatcagaatataaacttcgatttgtttaattctccctttgatgagaatgttcaaaaaacattataatatagtctgtataagtatagtttgtaatgattccataatattctagtaaatgcaacaactgtaatttgcttagccattcttttatttatttatttattttgacatttaggctgttttaaagtttttgttattataaataacacttctctgaacatctttataaagtttgatatatttagatcgttttctttggttagattcccagaacaaaattatgaggtcaaacgacatgaatattttaaggcttacattactcccagccaaattttcttccagaagtgctgcgctggtttctcctgcccccagcactatgtgagaatttccgatttcaccactccatctcagttttggatattaccattaaaaatttctgctggttggatgggtcaaaaatggtgccatgtttcatattcattttattattaaccgtgaggttaaatggtttttgtcgcattatgctttgcattctatccccttggaattgcttgtttctgtccctttcccattaatctattgggatgtttatgtttttcttccccatttgtatgagctatttatataataaagttattatcccttaattgtatttctgcacactttttttctaatggcattgatttctaagttggctttcaagctcacagtaattcttaaatgatttgaggacaatgcagcctttctagtgctttcccttctgttgaccgccaagtttagaaggatatgagccaacaaaacagaaacctgtgcaataaagatgttgggtgttttaaatatctgccatgtgaacctggcttttaaaaacctttctttcctagccaaggaatccttgtatgaattaaatatgaaacttcctttccttacaaagtaaacatgtaatgatatacttcttgtccccattacaaatctgaggggagcctgctctctgatctcacatgaaacaggtgactcttcaattaaacataaattttcaattaaagcacatccctctgggtggcggatcgcagttcccaccctggctgggcagagcctgcctgggcagcctctcagcgtccagctgctgctggagaggccaggctccctggcggctcccaggagtgtgggctcagctggctgcttgaggagcccgggcctgggcagaggggcccagagccctgctgtgatgcccaccgtgcagggcagagccggaacctttgaaaaccaagggagagctctctccttctgaccctgcagccctgaagtttcatcggctcagcatgaggctccgaggttacttgaaaatagcatcttccaggaaaagatccaagggctgcaggatacttgggggcacttgtcatactactcaggcccagccaggccccttctcattcgtttcagcaacagtgatctgaaaagatccatgtttatctgtataagaatttttaaaaattcttgtaaacttaagaatgttcaacaatcaagtaaagtcaaattccttgcctctcccatgtctatcccagtgtccttccccaggggaaccactgatatcagctctctgtgtgcccttcttccagatatatgcacacctggaaatatagtgtgcatgtgcatgtgggggtgtatgcatgtgtgggtgtatgtatgcatatgtttatatgtgtgcacatgtatacttatacacacatgcatgtatgcatgcctgtgtatgcatgcacctgcatgtgtgcatgtagacattcatgtgtgcatgtgtgatgggggtacattatgcatagtttgtagcttgcttttttcatgtaacccgcatggagacctttttacttcagcccatttggcccgatcttgtcttgttgtgactcctgtaggaattagaagttcaggtcaggtagtgaactaacatgcttcagcaaacacagagcttgtggaatcctggacttacttgggcactagacctccctcacccctggatcaaagatgtttcttcccttttgcattttaatttcttacctgtatagtggccctaagctccttccagttttattattctaggctaaaaggttaaaaacagttgtttgatggaagagtcaaaagatatggggagattttatgtcaagaagaattgaaaacatttttgtgttgattatttaaaacgtaagaattacagcaatcaaaatgtgccatttccttcacattggtaatacagtattgttgcagggatctaaaagcgactttacaatgttacaatctagaaatcagtgatacttcatgccacacaggatgagaagcagttggatccagaggtgggagtcagactaagactcagaggaccacggttcaagcctaggccccctccctgcctcagtttcctcatcctcgagatggattgtgaaaacggatgaagtaatagatgtgagagtgcatgtgtatgccatgaagagacacacaagtgttgacgattgttgttaacaaggcagcaagcttgaagttttgtattgtgaagtaactgaaattgatcagtgaccctgaatttcctccaaaggggccgctggaaaagcttcaaggagcttccagctttagcaacctgctactcaatgctgtgcagaatgttctgtgaggacacaccctcgggcccttggagaccatgttctgagggagatgccttcataaggagtggggaccagtggccagaatgagcagcaccatggatcctttttgctgatggagagtgctctcagtgaacacggtggaaattctacagggcacatggagggtattggtgagagctgcctcccaggcttggccaggtatcccagatgttctgtggccaactgtgcagctggaggcaagtgggcttcaccctacagccctggctgggtcaggccaccctagagtcctttgccttcagtgcacagcagattctggggtggggacag

SEQ ID NO: 478413 - DNA, 482 bp, Homo sapiens
tgcacccagaatgaaagccaaaaggagactgacatttgagtcagtggactgggagaggaaggcccgccctcaaggctgtgggcaccattcaattggctgccagtgtggctacaacaaagcaggcagaagaagcattcttctgatgctcacccttggggtccagtcacagctgggaatggaacattcaaaatggcttcgctcacatgtttgtggcctcaacaaggaagaatggaaggcgggtttcagcagggacaatgggacactgggcttctctctccatgtggtctcaggacttctccttctctaccgcctttccacatggtctctccttgtggtctttccagtagagtcattgggcttcttacatgatggctcaggactccaaagtgcacagaagcagaagtcaccaggtcttctgaagactgccacagtgacccttctcctgcattctcttggctaatgtgagtcacaacaccagtgcc

SEQ ID NO: 478414 - DNA, 614 bp, Homo sapiens
ccaagcgcttcctgcgggtcacgtcatgtcacttgcagcaccatttatgaaggaacatttggtatacagagctatcttactagattgctccaagacacacacatcagggtctaagaaatgtcacctgtcagttgtcctggcttataatttcaagcacccaagctggttggaaagctcagaccatttgcaaagatgtgggagaggaggttttcttaaagaatcagagtcagttggaaacatggggaatgaggcctttagctggcttcggagagagtcctggacctggcataggatggataacggcaagagctgggggcctttgaaggcagggtcagtgcttgtgggacagccagaggcccctccagggcctcctgtcttccccatggcaccacggatgaccctggaagaggagccagggaaacccaaggtgacatacaatacgttcctggtgctgtgtgaccctcaccactgtccacctctgaaactccgtcatccctgtagaaactctgtgtcattaaacagcagccctcgctaacccacccccagcccctggcagcctctgttcattctttctgtgtctataaatctgaccattctagatgtttctcaaaagc

SEQ ID NO: 478415 - DNA, 655 bp, Homo sapiens
cgtcgcagcgtgagcagccgagaagtgacgacaccacggggcggaggggaacggagaggaaagctgctgacgccagggagagatgccgctgggccaggcacggctgcccgcaggagaggcctccgcagggagaggtaccgctggatcaggcgagggtgcgcgcaggagaggcctccgcagggagagggagaggtaccgctggatcaggcgagggtgcgcgcaggggaggcctccgcagggagaggtaccgctggatcaggcgagggtgcgcgcaggggaggcctccgcagggagaggtaccgctggatcaggcgagggtgcgcgcaggggaggcctccgcagggagaggtaccgctggatcaggcgagggtgcccgcaggagaggcctccgcagggagaggtaccgctggatcaggcgagggtgcgcgcaggagaggcctccgcagggagaggtaccgctggatcaggcgagggtgcgcgcaggggaggcctccgcagggagcggtgccgctgggccaggcacgggtgcccgcaggagaggcctccgcagggagaggtgccgctgggccaggcacgggtgcccgcaggagaggcctccgcagatctctgatgatgtgctaactaaattagataaatccccgtcatgtctcattca

SEQ ID NO: 478416 - DNA, 744 bp, Homo sapiens
ttcagctgttgtagggcctgcctcagtggcaggaatgtggttttggaaatactgagcttcaggatgaggtccctgagatgcgatgaagctctggagaaaagcttcccacatgggaaatgctcccacagaaccgtgtattcccatgggcactttcagcatgaatgcctctgttttctattaattcatgtgctcccagcgggtgtgtacggtcaggagcgttctctgtgctccccactcaacactgggaccaaagctgagtgtgagctgcaggaatatggtgtggagcaatgggacctccatgtgcaacaaaatgaacccagaaccagaccttacaccctttacaaaattaacacaaaatgcaaaactataaaagtcctaggagacaatgtgggagaaccctggcgaatagcagagcttctgacctgtttgctgcggctgagaaatgaaaacagccctgggctccagaaacactttcaaggctctccattatccatcgccttggcttttctgtcccaatggaatgaatttcattgtcctggaccaaatgacttcgctggggccgtagagaatgggaagggcatgcttcttggtgatggagacacggcagaggatatgggttatttgaatatctgagtcagtttgtgtctctctccagaaatacagatatgaatatggcagtgaaatggatttcagggacatgctgtgaaatcttgtactttgctatttgtgaattgtctatgcatg

SEQ ID NO: 478417 - DNA, 1413 bp, Homo sapiens
cctcgggatctcgcgggccgtgtgcccagtgctgctggcatgagctcggcctggtgttcgaggcagcctggccagtcctcggacctgtgcagcctgcagaagaaggggccgcaccttgtggataaggagccgtttggcctgtacgtctccccacactctgggttctgcaagcgcatctacacggtgcacacctgcatgtctccgtacactctggattgtgtgagcgcgtctacacggtgcacgcctgcacgtctccccacactctggattctgcgagcgcgtccacacggtgcacgtctgcacgtctccccacactctggattctgcgagcgcgtccacacggtgcacgcctgcacgtctccccacactctggattctgcgagcgcgtccacacggtgcacgcctgcacgtctccccacactctggattctgcgagcgcgtccacacggtgcacgcctgcacgtctccccacactctggattctgcgagcgcgtccacacggtgcacgcctgcacgtctccccacactctggattctgcgagcgtgtccacacggtgcacgcctgcacgtctccccacactttggattctgcgagcgcgtctacacggtgcacgcctgcacgtttccctacactctggattctgcgagcgcgtccacatggtgcacgcctgcacttttccccacactctggattctgggagcgcgtctacacggtacatgcctgcacgtctccctacactctggattctgcgagcgcgtccacacggtgcacgcctgcacgtctccccacactctggattctgcgagcgcgtccacacggtgcacgcctgcacgtctccccacactctggattctgcgatcgcgtccacacggtgcacacctgcgtgtctccctacactctggattctgcgagcgcgtccacacggtgcacacctgtatgtctccctacactctggattctgtgagtgcatttacacggtgcacgcctgcacgtttccccacactctggattctgcgagcgcgtctacacggtacatgcctgcacgtctccccacactctcgattctgtgaacacgtctacatggggcacatcgtgcattcgtctgtgttttcagccttggcagctggatccagagactggatccccttgtgtattctgtttggcaggactcagcagtggctgtgccctttcatccagggacgctgtgtctagctctcactctctggtgatgtcagaaagtattgactgatgagagcctaggcccattaattcactaggagttggggagtggtaatattttgattttaccttttatttctcatatataaattgaacttgtttctataaaacaacagcccttcatctatttcattatgaaatggagcagttcatatggaaaaggcaagataaat

SEQ ID NO: 478418 - DNA, 973 bp, Homo sapiens
aggaagataatgaatataaactcacactatctggacacagatggagaaggcggtggagcatttgagtggatgattaaagagaaaaacaaatcaggagaagctacaggaaataaacgctctttccatcctggtccctttgccacccacaaatacggagaagttgcgtctagggtccatccaggaaacacacagcgcacagtcaaaccgcagacggcctgtacccacagtcaaaccacagacggcctgtatgcacaaccaaaccgcagacggcctgtacccacagtcagaccgcagacggcctgtatgaacagtcaaaccacagacggcctgtacccacagtcaaaccgcagacggcctgtacccacagtcaaaccgcagacggcctgtacccacagtcagaccgcagacggcctgtatgaacagacaaaccacaaatggcctgtattcacaatgcaaaggaaggaaaagcaaaagcaaaagttaatattcacctagatgcaacttctctgtattaaattggctttatgttccaaccctgcatttccagatgaattttaaaatctgcctctcagtttttaaagaacaactcattgggctttgattaggaatttatggaatccgtaaattaaaatttggacatttggcatccttatattgagtctttcaaatgcattgacatggtagtttcttccatttctttgggccctctgaagtttctcccagtgttttacagttttctgtgtatttgtgcatcttccttagatttatcatagtgatttcagtcttaaaatctacttatctgattttagtatatatcagttttctttgggttaatatttgcatgttatgtcttctttcatcattttactttcacacttactatattctaatatttaagttttattctttaagcatatagttgtttctattttcatctggtcagactgtatatattaaatgtaattcatgacat

SEQ ID NO: 478419 - DNA, 800 bp, Homo sapiens
agctgcaaatgccctcacagaacacaacaccgggagcaggtcctcacggaacacaacaccgggggcaggtcctcaccgaacacaacaccgggagcaggtcctcatggaacacaacaccgggagcaggtcctcaccgaacacaacaccgggagcaggtcctcaccgaacacaacatggggagcaggtcctcaccgaacacaacacggggagcaggtcctcacggaacacaacaccgggagcaggtcctcaccgaacacaacacggggagcaggtcctcacggaacacaacacggggagcaggtcctcatggaacacaacaccgggatatggtgcacaaccgtattgaaatcaatgtccatcggatgcaggagggtcagccaagtggtctgaatgccactgccccaaatgatgagcctgggagccacagcaccctccggggaaaagcaacgcgaggctctaacgtggccacgaaggggcctccacacacgaaggggcctccacacacgaagggacctctacacgtgaatgggcctccatatgcagggccaccagacctggggcccatggctctcagcctgcccggacaatccagtgaggcccctcatctgcaccacaatggggtggtgccttccagagcccgtgggagtctccagacccacgtctggtctcctggacccctcaagagtctctgcacatctttccttccagagacaacaaatgttctttccaaaagacattctgactaacatgaccctgagactcttaatcaaagccctcagcagcagagcaccgcccacagc

SEQ ID NO: 478420 - DNA, 914 bp, Homo sapiens
caggggggcccaggcagcttgggctggggatgcggcagaagccactgggccgcctgctgcgaccaggaagcccctgaggtccgaggcaatgggtatcatgggctctgacggtgacttaagaagaaattgggactgagactatactgggccgcagctctcccacgtcccatcagggtctttttcaccatgaagacctgccctacaagcacagctttgccatccagacagcagggacggaggtgccgcgtgtggaggccaaggacaaagacaggccagtcgtggtggagctgccctcctcactcagacttgaccatggtggggaactgtcctcactcagacctgcccatggtggggaactgtcctcactcagacctgaccgtggtggggagctgccctcactcagacctgaccatggtggggagctgccctcactcagacctgaccgtggtagggaactgccctcactcagacctgaccgtggtggggaactacctgcccaaggtggggagctgccctcactcagacctgaccgtggtggggaactgtcctcactcagacctgatcgtggtggggaactgtcctcactcagacctgaccgtggtgaggagctgccctcgctcagacctgcccatggtggggagctgtcctcgctcagacctgaccgtggtggggagctgtcctcgctcagacctgaccgtggtggggagctgccctcactcagacctgaccgttgtggggaactgtcctcgctcagacctgccccacaagccagcgagcggacctagccccagcaactgcacagccgggacaccaccacgacgtggccacgctcaggctggacagtgtccagctcggcagtgtctcctctgagggctcctgacactcaagtcaggcccagagcattctccccacag

SEQ ID NO: 478421 - DNA, 1222 bp, Homo sapiens
aacaacccgaatggaatagaatatattggagagtaagggagttgaaaagaatcaatccgattgtaatggaatggaatggaacggaatggaatggaatggaatggaatggaatggaatgcaatggaatggaatcaacccgagtacaatggaatggaatggaatggaatggaatggaatggaatggaatggaatggaatggaatgcaatggaatggaatcttccggaattgaatggaatggaatggaatggaatggaatgcaatggattcaactcgattgcaatagaatggaatcgaatggaatggaatggaatggaatggaatggaatggaattaaaccgaatagaatggaatggaatggaatggaatggaacagaacggaacggaacggaacggagtggaatggaatggaatggaattgtatggaatggaatggaatggtacggaatagaatggaatggaaagaattggaatggaatggaaaggaatggaatggaatggaatggaatggaatcaacccgagtgcaggggaatgtaatggaacggaatgcaatggaatggaatcatccggaatggaatggaatggaatggaatggaatggaatggaatcaacccgagcgcaatggaatggattggaatggaatggaatggaatggaataacccgaatggaatggaatgtaatggagagtaagggagttgaatagaatcaatccgaatgcaatggaatggaacggaatggaatggaatggaatggaatggaatggaatgcaatggaatggaatcaacccgagtacaatggaacggaaaggaatgtaatgtaatgtaatggaatggaatggaatggaatggaatggaatcaacacgagtgcaatggaatggagtggaatggaatggaatggaatggaacaacccgaatggaatggaatgtaatggagagtaagggagttgaatagaaatcaatccgacatgtaatggaatggaatggaacgcaatggaatggaatggaatggaatggaatggaatggaatggaatggaataaaccccagtgcactggaatggagaggaatggaatggaatggaatggaacaccccgaatggaatggaatgtaatggacactaatggagttgaatataatcactcacaatgtaatggaatggaatggaacgcaatggaattgaatggaatggaatggaatgcactggaatggaatcaaccccagtt

SEQ ID NO: 478422 - DNA, 3091 bp, Homo sapiens
tggaatcaacacgagagaatggcatggattggaatggaatggaatggaaacaacccgagtacaggggaatggaatggaatggaatgcaatggaatggaatcatccgtaatggaatggaaaggaatggaatggaatggaatggaatggaatggaatcaactcgactgcaatcgaatggaatggaatggaattaacccgaatagaatggaatggaatggaatggaatgcaacggaacggaatggaatggaattgaatggaatggaatggaacggaacggaacggaatggatggaatggaatggaatggaatggaatggaatcaacgcgagtgcaggggaatggaatggaatggaatgcaatggaatggaatcttccggaatggaatggaatggaatggaatggaatgaaatgcaatggattcaactcgaatgcaatggaatgcaatagaatggaatggaatggaatggaatggaatggaatggaattaacccgaatagaatggaatggaatggaatggaatggaatggaatggaatggaatggaattccttcaaaccgaatggaatggaaaggaatggaatcaacacgagtggaatggaatggaatggaatggaatggaatggaatggaatggaatggaaaggaatgatacggaataggatggaatggaacgaaatggaatggaatggaatggaatggaatggaatggaatggaatggaatggaatcgttccgatggaatggaaaggaatggaatcaaccagagtggaatggaagggaatggaatggaatggaaactaatagaatggaatcaaccctagtggaatggaatggaaaggactggaatggaaaggaatggaatggaatggaatggaatggaatggaatggaatggaatcaacgccagtgcaggagaatggaatggaatcgaatggaatggaatggaatgtaatggaatcaacccgagtgcaggggaatgtaatggaacgcaatgcaaaggaaaggaatcttccggaatggaatggaatggaatggaatggaatcaacccgagtgcaatggaatggagtggaatggaatggaatggaatggaacaacccgaatggaatggaatgtaatggagagtaagggagttgaaaagaatcaatccgaattacaatggaatggaatggaatggaatggaatggaacggaatgcaatggaatggaatgcaatggaaaggaatcttccggaatggaaaggaatggaatggaatggaatggaatggaatgcaatggattcaactcgattgcaatggaatggaatagaacggaatggaatggaatggaatggaattaaaccgaatagaatggaatggaatggaatggagcggaacggaacggaactgaacggaacggaatggagtggaatggaatggaatggatttgtatggaatggaatggaatgtgcaggggaatggaatggaatggaatgcaatggaacggaatcatccggaatggaatggaatggaatggaatggaatggaatcaacccgagtacaatggaatggaatggaatggaatggaatggaatggaatggaatggaatgccttcaaacttaatggaatggaaaggaatggaatcaacacgagtggaatggaacggaatggaatggaatggaatggaatggaatggaatgatacggaatagaatggaatggaacgaaatggaatggaatggaatggaatggaatgcaatggaatggaatggaatcgttccgagtggaataggagggaatgtattcgagtggaatggaaaggaatggaatcagcagagtggaatggaagggaatgtaatggaatggaaactaatagaatggaatcaacccgagtggaatggaatggaaaggactggaatggaatggaatggaatggaatggaatcaactcgattgtaatggaatggaatggaatggaatggactggaatggaatggaattaacccgaatacaatggaatggaatggaatggaacggaatggagggaatggaatggaatggaatgcaatggaatggaatcatccggaatggaatggaatggaatggaatgcaaagcaatggaatcaactcgattgcaatggaatggaatggaatggaaaggaatacattggaatcaacccgagtggaatggaatggaaaggactggaatggagtggagtggaatggaatggaatgggatagaatcaactcgattggaatggaatggaatggagtggaattaacccgaatagaattgaatggaatggaatggaacggaacggaacggaacggaatgaaatggaatggaatggaatggaatggaatggaatcaacccgactgcaggggaatggaatggaatggaaagcaatggaatggattcaacttgaatggaatggaaagaatggaatcaacacgagtggaatggcatggattggaatggaatggaatggaatcaacccgagtacaggggaaaggaatggaatggaatgcaatggaatggaatcatccgtaatggaatggaaaggaatggaatggaatggaatggaatggaatggaatcaactcgattgcaatcgaatgcaatggaatggaattaacccgaatagaatggaatggaatggaatggaacggaacggaacggaatggaatggaatggaatggaatggaatggaacggaaaggaagggaatggaatggaatggaatggaatggaatggaatggaatggaatcaacgcgagtgcaggggaatggaatggaatggaatgcactggaatggaatcttccggaatggaatggaatggaatggaatgaaatggaatcaacgcgagtgcacgggaatggaatggaatggaatgcactggaatggaatcgtccggaatggaatggaatggaatggaatggaatgaaatgcactggattcaactctattgcaatggaatggaatataatggaatggaatggaatggaatggaatggaatggaattaaccccaatagaatggaatggaatggaatggaatggaatggaattaacccgaatagaatggaatggaatgtaattgaacggaatggaatggaatggaa

SEQ ID NO: 478423 - DNA, 686 bp, Homo sapiens
cgcaatgcaatggaatggaatcatccgcaatggaatggaatggaatggaatggaatggaatcaaccccagtgcactggaatggagtggaatggaatggaatggaatggaacaacccgaatggaatggaatggaatggaattaacccgaatacaatggaatggaatggaatgcaacggaatggagtggaatggaatggaatcaaccccagtgcaggggaatgcactggaatggtatgcactggaatggagtcatccggaatggaatggaatggaatggaatggaatggaatggaatggaatggaatcaactctattggaatggaatggaatggaatggaatggaatggaatgggattaaccccaatagaatggaatggaatggaatggaacgcaacgcaatgtaatggaatggaatggaatggaatggtatcaaccccactgcacgggaatggaatggaatggaatggaatggaatcatccggaacggaatgtaatggaatggaatggaatcaactctattgcaatggaatggaagggaatggaatggaatctaatgtaatggaatggaattaaccgcaatataatggaatggaacggaatggaatggaatggaatggaatggaatggaatggaatggcatccacccgactgcaggtgaatggaatggaatggaatgcaatggaatg

SEQ ID NO: 478424 - DNA, 8466 bp, Homo sapiens
tcttccggaatggaatggaatggaatgcaatggattcaactcgattgcaatggaatgcaatagaatggaatggaatggaatggaatggaattaacccgaatagaatggaatggaatggaatggaacggaagggaacggaacggaacggaacggaacggaatggaatggaatggaatgcaatcaacacgagtgcaggggaatggaatggaatggaatgcaatggaatggaatcatccggaatggaatggaatggaatggaatcaactccattgcaatggaatggaatggaatggaatggaatagaatggaatggaattaacccgaatagaatggaatgcaatagaatggaatgcaacggaaccgaatggagtggaatggaatggaatggaatcaacccgagtacaggggaatggaatggaatggaatgcaatggaatggagtcatccgtaatggaatggaaaggaatggaatggaatggaatggaatggaatggaatggaatggaatcaactcgatggcaatcgaatggaatggaatggaattaacccgaatagaacggaatggaatggaatggaacggaacggaatggaatggaatggaatggaattgaatggaatggaatgccttcaaaccaaatggaatggaaaggaatggaatcaacacgagtggaaaggaatggaatggaaaggaatggaatggaatggaatggtacggaatagaatggaatggaacgaactggaatggaatggaatggaatggaatggaatggaatggaatcgttccgatggaatggaaaagaatggaatcaaccagagtgaaatggaagggaatggaatggaatggaaactaatagaatggaataaacccgagtggaatggaatggaaaggactggaatgggatggaatggaatggaatggaatggaatggaatcaactctaaatggaatcaacccgagtgtaatggaatggaaaggactggaatggagtggaatggaatggaatggaatggaatggaatcaactcgattggaaaggaatggaatggaatggaatggaatggaatggaattaacccgaatagaatggaatggaatggaatggaacggaatggaatggaatggaatggaatggaatggaatcaacccgactgcaggggaatggaatggaatggaatgaaatggaatcatccggaatggaatggaatggaatgcaatggaatggaatggaatggtatcaacccgagtgcaatggaatggaatcgaatggaatggaatgcaatggaatggattcaacttgaatggaatggaaagaatggaatcaacacgagtggaatggcatggattggaatggaatggaatggaatcaacccgagtataggggaatggaatggtatggaatgcaatggaatggaatcatccggaatggaatggaaaggaatggaatggaatggaatggagtggaatggaatcaactcgattgcaatcgaatggaatggaatggaattaacccgaatagaatggaatggaatggaatggaacggaacggaatggaatggaatggaatggaatggaacggaacggaatggaatggaatggaatggaatggaatggaatggaatcaacgcgagtgcaggggaatggaatggaatggaatgcaatggaatggatgcaggggaatgtaatggaacggaatgcaatggaatggaatcatccggaatggaatggaatggaatgcaatggaatggaatcttccggaatcgaatggaatgcaatgcaatggattcaactcgattgcaatggaatgcaatagaatggaatggaatggaatggaatggaattaacccgaatagaatggaatggaatggaatggaacggaacggaacggaacggaatggaatggaatggaatggaattgtatggaatggaatggaatggtacggaatagaatggaatggaaagaattggaatggaatggaatcgaatggaatggaatggaatggaatggaatggaatcaacccgagtgcaggggaattggaataggagagaatgtattcgagtggaatggaaaggaatggaatcaaccagagtggaatggaagggaatggaatggaatggaaactaatagattagattggaatcaacccgagtggaatggaatggaaaggactgaaatggaatggaatggaatggaatggaatcaactcgatttggaatggaatggattcaacccgagtgcaggggaatggaatggaatggaatgcaatggaatggaatcatccggaatggaatggaatggaatggaatgcaaagcaatggaatcaactcgattgcaatggaaaggaatggaatggaaaggaatagaatggaatcaacctgattgggatggaatggaaaggactggaatggagtggaatggaatggaatggaatggaatggaatgcaatggaatggtatggaatggaatggaatggtacggaatagaatggaatggaacgaattgtaatggaatggaattcaatggaatggaatggaatggaattgaatcaacgcgagtgcaggggaatgtaatggaacggaatgcaatggaatggaatcatccggaatggaatggaatggaatggaatggaatggaatcaacccgagtgcaatggaatggagtggaatggaatggaatggaatggaacaacccgaatggaatggaattacaatggaatggaatggaatggaatggaatggaatgccttcaaaccgaatggaatggaaaggaatggaatcaacacgagtggaatggaatggaatggaatggaatggaatggaatggaatgatacggaatacgatggaatggaacgaaatggaatggaatggaatggactggaatggaatggaatggaatggaatcgttccgagtggaataggagggaatgtattcgagtggaatggaaaggaatggaatcaaccagagtggaatggaagggaatggaatggaatggaaactaatagaatggaatcaacccgagtggaatggaatggaaaggactggaatggaaaggaatggaatggaatggaatggaatggaatggaatcaacgcgagtgcaggagaatggaatggaatggaatggaatggaatggaatggaatcaacccgagtgcaggggaatgtaatggaacggaatgcaatggaaaggaatcatccggaatggaatggaatggaatggaatggaatcaacccgagtgcaatggaatggagtggaatggaatggaatggaatggaacaacccgaatggaatggaatataatggagagtaagggagttgaaaagaatcaatccgaatgtaatggaatggaatggaacggaatggaatggactggactggaatggaatggaatggaatgcaatggaatggaatcaacccgagtacaatggaatggaatggattggaatggaacggaatggaatggaatggaatggaatcttccggaatggaatggaatggaatggaatggaatggaatgcaatggattcaactcgattgcaatggaatggaataaatggaatggaatgaattggaatggaatggaatcgaatggaatggaatggaatggaatggaatcaaaccgagtgcaatggaatggagtggaatggaatggaatggaatggaaaaacccgaatggaatggaaagtaatggagaggaacggaatggaatggaatggaatggaatggaatggaatggaatggaatcaacccgactgcaggtgaatggaatggaatggaatgcaatggaatggattcaacttgaatggaatggaaagaatggaatcaaacacgagtggaatggcatggattggaatggaatggaatggatcaacccgagtacaggggaatggaatggaatggaatgcaatggaatggaatcatccgtaatggaatggaaaggaatggaatggaatggaatggaatggaatggaatggaatggaatcaactcgattgcaatcgaatggaatggaatggaattaacccgaatagaatggaatggaatggaatggaacagaacggaacggaatggaataatggaatggaatggaatggaacggaacggaatggaatggaatggaatggaatggaatggaacggaatggaaaggaatgaaatggaatggaatggaatggaatggtatggaatggaatggaatgtgcaggggaatgtaatggaacggaatgcaatggaatggaatcatccggaatggaatggaatggaatggaatggaatggaatggaatcaacccgagtgcaatggaatggagtggaatggaatggaatggaatggaacaacacaaatggaatggaatgtaatggagataatggaatggaatgcaacggaatggaatggaatggaatggaatgcaatggcatggaatcaacccgagtacaatggaatggaatggaatggaatggaatggaatgccttcaaaccgaatggaatggaaaggaatggaatgaacacgagtggaatggaatggaatggaatggaatggaatggaacgatacggaatagaatggaatggaacgaaatggaatggaatagaatggaatggaatggaatggaatggaatggaatggaatggaatggaatggaatctggaatggaaaggaatggaatcaaccagagtggaatggaagggaatggaatggaatggaaactaatagaatggaatcaacccgagtggaatggaatggaaaagactggaatggaaaggaatggaatggaaaggaatggaatggaatggaacggaaaggaatggaatggaatggaatggaatggaatggaatggaatcaacgagagtgcaggggaatggaatggaatggaatgcaatggaatggaatcttccggaatggaatggaatggaatggaatggaatggaatggaatggaatcaacccgagtgcaatggaatggagtggaatggaatggaatggaatggaacaacccgaatggaatggaattgcaatcaaatggaatcgaatggaatggaatgcaatggaatggattcaacttgaatggaatggaaagaatggaatcaacacgagtgcaagggcatggattggaatggaatggaatggaatcaacccgagtacaggggaatggaatggaatggaatgcaatggaatggaatcatccggaatggaatggaatggtatggaatggaatggaatggtacggaatagaatggaatggaacgaattgtaatggaatggaattgaatggaatggaatggaatggaatggaatcaacgcgagtgcaggggaatgtaatggaacggaatgcaatggaatggaatcatccggaatggaatggaatggaatggcatggagtggaatcaacccgagtgcaatggaatggagtggaatggaatggaatggaatggaacaacccgaatggaatggaatgtaatggagaaatggaatggaatgcaatggaacggaatggaacggaatggaatggaatggaatggaatggaatggtatggaatggaatggaatggaacggaatagaatggaatggaacgaattgtaatggaatggaattgaatggaatggaaaggaatcaacgcgagtgcaggggaatggagttgaatagaatctatccgaatgtaatggaatggaatgcaacggaatggaatggaatggaatggaatggaatgcaatggcatggaatcaacccgagtacaatggaatggaatggaatggaatggaatggaatggaatggaatggaatgccttcaaaccgaatggaatggaaaggaatggaatcaacacgcgtggaatggaatggaatggaatggaatggaatggaatggaatggaatggaatggaatcaacgggagtgcaggggaatggaatggaatggaatgcaatggaatggaattttccggaatggaatggaatggaatggaatggaatggaacggaaaggaatggaatggaatggaatggaatggaatggaaaggaatcaacgcgagtgcaggggaatgggatggaatggaatgcaatggaatggaattttccggaatggaatggaatggaatggaatggaatggaatggaataaacccgagagcaatggaatggagtggaatggaatggaaacaacctgaatggaatggaatggaattgaatagaatcaatccgaatgtaatggaatggaatggaacggaatggattggaatggaatggaatggaatggaatggaatggaatgcaatggaatggaatcaacccgagtgcaatcgaatggaatcgaatggaatggaaagcaatggaatggattcaacttgaatggaatggaaagaatggaatcaacacaagtgcaagggcatggattggaatgcaatggaatggaatcaacccgagtacaggggaatggaatggaatggaatgcaatggaatggaatcatccaatggaatggaatggaatggaacggaacggaatggaatggaatggaatggaatggaatggaatggaatggaatggaatggaatggaattcacccgaatagaatggaatggaatggaatggaaaggaatggaagggaaggaaatggaatgtaatcaacccgagtgcaggggaatggaatggaatggaatgcaatggaatggaatcatccggaatggaatggaatggaatggaatggaaagtgcaagggaatggaatggaaaggaatgcaatggaatggaatcatccggaatggaatggaatggaatggaatgcaaagaaatggaatcaacacgattgcaatggaatggaatggaatggaaaggaatagaatggaatcaacccgagtgtaatggaatggaaacgactggaatggagtggaatggaatggaatggaatggaatggaatcaactcgattggaatggaatggaatggaatggaatggaatggaattaacccgaatagaatggaatggaatggaatggaacggaatggaatgggaatggaatggaatggaatggaatggaatggaatggaatggaatcatccggaacggaatggaatcaactcgattgcaatggaatggaatggaatggaatggaatcgaaaggaatggaatggaattaaccagaatagaatggaatggaatggaatggaacggaatggaatggaatggaatggaatggaatggaatggaatcaacccgagtgcaggggaatggaatggaatggaatgcaatggaatggaatcatccggaatggaatggaatggaatggaaaggaatggaatggaatggtatcaacccgagtgcaggggaatgtaatggaacggaatgcaatggaatggaatcatccggaatggaatggaatggaatggaatggaatggaatggaatcaacccgagtgcaatggaatggagtcgaatggaatggaatggaatggaaaaacccgaatggaatggaatgtaatggagagaatggaatggaatggaatggaatggaatggaatggaatggaatggaatggaatcaacgagagtgcaggggaatggaatggaatggaatgcaatggaatggaatcttctggaatggaatggaatggaatggaatggaatgaaatgcaatggattcaactcgattgcaatggaatggaatggaatggaatggaatggaatcgttccgagtggaataggagggaatgtattcgagtggaatggaaaggaatggaatcaaccagagtggaatgggaatggaatggaatggaatggaatggaatggaatggaatggaatcaacccgagtgcaggggaatgtaatggaacggaatgcaatggaatggaatcatccggaatggaatggaatggaatggaatggaatggaatggaatggaatcaacccgagtgcaatggaatggagtggaatggaatggaatggaatggagcaacccgaatggaatggaatgtaatggagagtaagggagttgaaaagaatcaatccgaatgtaatggaatggaatggaacggaatggaatggaatggaatggaatgcaatggaatggaatcaaccggagtacaatggaatggaatggaatggaatggaatggaatggaatggaatggaatggaatggaattgaatgcaatataatggaatcttccggaatgcaatggaatggaatggaatgcaatcgaatggaatgcaatggattcaactcgattgcaatggaatggaatagaatggaatggaatggaatggaatggaattaaaccgaatagaatggaatggaatggaatggaacggaaaggaacggaacggaacggaacggagtggaatggaatggaatggaattgtatgcaatggaatggaatggtacggaatagaatggaatggaaagaattggaatggaatggaatggaatggaatggaatcaacccgagtgcaggggaatgtaatggaacggaatgcaatggaatggaatcatcc

SEQ ID NO: 478425 - DNA, 1508 bp, Homo sapiens
taagggagttgaatagaatcaatccgaatgtaatggaatggaatgcaacggaatggaatggaatggaatggaatggaatggaatggaatggaatggaatggaatcaactcgagtggaaaggaatggaatggaatggaaaggaatggaatgaaatcaactctagtggaatggaatggaatggaatggattggaatggattgcaatggaatgaaatggaatggaatggaatggaatcaatcattccgagtggaatggaagggcatgtaatggagtggaaagaagggaatggaatcaacccgattggaatgcaaggcaatggaatggaatggaaaggaatggaatggaatcaactcgattgcaatggaatggaatggaatggaatggaatggaatgaaatggaatggaatggaattaaccagaggaatggaatcaacacgagggcaggggaatggaatggaatggaatgcaatggaatggaatcatccggaatggaatggaatggaatgaaatcaactccattgcaatgcaatggaatggaatggaatggaatagaatggaatggaattaacccgaatagaatggaatgcaatagaatggaatggaacggaaccgaatgcagtggaatggaatggaatggaatcaacctgagtgcaggggaatggaatggaatggaatgcaatggaatggaatcatccggaatggaatggaatggaatggaatggaatcaaaccgagtgcaatggaatgcaggaattgaatagaatcaatctgaatgtaatgaaatgcaatggaaaagaatggaatggaatggaatggaatcgaatggaatggaatggaatggaatcaacccgagagcaatggaatggattcgaatggaatggaatgcagtggaatggattcaatccgaatggaatggaaaggaatggaatcaacccgaaatggattggaacaaaatggaatggaatggaatggaatggaatggaatggaatggaatggaatggagtggaatcaagtcgattgcaatggaatggaatggaatggaatggaacggattggaatggaatggaatggaatggaatggaatggaatggaatggaattaaatggaatggaatggaatggaatggaatcaacccgagtgcaggggaatggaatggaatggaatgcaatggaatggaatggaatagaatggaatggaatggaatggaatggaatggaatggaatcaacccgagtggaatggcatggaatggaacgcaatggaatggaatggaatggaatcaactcgagtggaaaggaatggaatggaatggaaaagaatggaatgaaatcaactcgagtggaatggaatggaatagaatggagtggaatggattgcaatggaatgaaatggaatggaatggaatggaatcaatcattccgagtggaatggaagggaatgtaatggagtggaaagaagggaatggaatcaacccgagtggaatgcaaggcaatggaatgcaatggaaag

SEQ ID NO: 478426 - DNA, 1028 bp, Homo sapiens
agctgcgtagacctaagatgaacaaggacagccacagcaagacctgtaaggagactatccttgtaatccaggcaagagatgatggcagcttggaccagggtagtagcagtggaattgatgagaagtggttgaaatctggatatattttgaagatggagcccgtgggatttcctaacacattggatatggaatatgtgagacagaaaggacatgattctggcaatttagtatttggactttgctatctgccttcctctatagaaacaattgggggtggggcggtaaaggagtgggccaaatgcacatacacaaatgcactaaaccggatacttcactgctctgaagactggaagccaaggagagtattgattaaatctgcaacaagaccctatattcctattttcaaagtctcaccaccagaaaattcttcctcgtctcttatgacaccaatctaaaggcttctttttaatctaaagttcccaggtgtactgggttgaataattcccccaccccgcaaccttctcccatattcatgtccatctggaacctgtgaatgtgaccttatttggaatagggcctttgcagatatagtcaagatgaggtcatgctggattgaagtgggtcatactgaatgcagtatgactggtgtccttagaagaggaggtaagcttggacaccgacacacagggagagtgccatgtggcttgctagggagagatggtaagttctgctgccacaagctaaggattgccagcagccaccagaagctaagagagctgcatggaacaggttctccctctgaatactttaagaagcaatcagtacaccaacaccttgattgcagactgccggcctcttgaactgaatagtgttcaaaaatatttctgtttctggcaaaggcagtatctcctctctggattgaaacctatttcccctattatagtgatatagaaagtacaaaagcatccaattatctacctttggtttattaactcatatctctgatattttctggttaattctttatg

SEQ ID NO: 478427 - DNA, 724 bp, Homo sapiens
ggcggctcctcgtcttcttccatctctaaggagattattcctatgtggaatacgggctacaaaagcccaaacataatgatctgttatggacagagatcacagtgcctgcggtttccagaagctgctgctgacatggtcttgacaagagcaccagctcaggggtcactcgagttggagctatgggcttggcgccatgagaaaacttcagtactggggaccgttgagcatcacacagagtgtgaggtggctttctttcatcaggtgtttgctggcctgactgtccactgggaaaggagcctacccaaggagagagaggggcttgctagtgataaaccgctgacagcccatacattattgacaagatttggcagagaggggcctctgctacctctgctcgtcctggttctctttgagttttgtgcttgcaccgactactgctttatcccaacatcttgctgcccacatgaaagtacacacacggaaaaacccagaaactaacaccaggttgaattttttttctttctgttttgcacataaaatgtctatggatctaagagaaagtttaactgtataattggaacagtctttgattacaatcactcagttcaaaattaaagtagataaataagcatgggtctggaatgttaagaaaaaaaaagtgggctgttgcaataaaacaggttcatatcccttgagtgacaagtttcagatgctaggcctaaaa

SEQ ID NO: 478428 - DNA, 727 bp, Homo sapiens
gctcatggaaagacctaagctgacttatctgtagactgggccattctcagaagaagacacgaagatgaaggaaagtttggaacttcttagagactggttaaatgactgtgaccaaaatgctgatagtggtatggacagtgaagtccaggctgccaaggtctccgatggaaatgaggaacttattgggaactggagcaaaggccacacatgttatgtcttagcaaagagcatggctgcattgtgtccatgccctaaggatctatggaagtttgaactaaagggtgatgatttagggtatctggcagaagaaagttctaagcatcaaagcattcaagatgtgaccaggctgcttctaacaattcactggcagcttgctggctgtgcctggaaaagccacaggcactcaactccaacacgtgagagcagctgtgggggctgcaccctgcaaagccaaatgggtggtgtggcccaaggccctgggaacccatccttgcaccagtgtacattggatgcagcatatggagtcagaggagattattttggagttttaagatgtaatgactaccttgctgattttgaacttttcatgggacctgtaacccctgtcttctggctgatttctcccttttgaaacaggaatatttacccaatgcctgtacctccatcatatcttggaaataactaacttgtttttgattttaagggtcgcaggttgaagaaacttgtc

SEQ ID NO: 478429 - DNA, 707 bp, Homo sapiens
aaagaagccagacaaaaaataaatattggatattggccccccccgcttctggcttctggtttctgcagagagatctgctgttagtctgatgggcttccctttatggtcaggcccttcagctgcaggtctgctggagtttgctggaggtccactccagacactgtttgtctgggtatcaccagtggaggcgataggacagcaaagattgctgcctattccttcccctggaagcttcgtccaagaggggcacccgccagatgccagtcagagctctcctcagagctcaagtgctgtgcttgagatccactgctctcatcagagccagcagacaggaacatttaagtctgctgaagctgcgcccacagctgcccgttgcaaagactgtgggaaaagcatagtatctgggccagaatgcaccacccctcatggcacagtccttcacagcttcccttgtctagaagagggagttccccgaccctttgcaattcccagacattgacgtgacctcttatcttaaatactgatatgagcagcagcttccttttaagagagagactccaaggagaatgttatcttgcccaaaggaaagtggaaggatgcaacttttatattcaattattccatttttttcttaaaatagatgaagcaatcttgggaagaatatttattttttcttgctatatcatcagacttccatggaccactca

SEQ ID NO: 478430 - DNA, 695 bp, Homo sapiens
tcactatcacaaagacagcagtatgccacgagggatccacctccctgatctaaacacctcccaacaggtcctacctccagcattggagatgacaattcaacatgagatttggactcatgacagggacaaacttttacttgtctcgcttcactcaaccccttgcaggagggagcacatcagcaaatgtgtgtgggatctggccagccactccaggatccagcaggagcaagcttcatgtggggctgatggccagatcaggcatgagttagtgagtgcaggatccagctggcagctctgggcaccagcaggagcaagatctgtgtggaacccatggctagaaccagagggagtattccattactctcctaactccactgtctgcagactaacagctcagttgaccccttgccacatcacctggggaggctgccctctgccagtgaccatgaatagttggtgtgatagcatttttgggtacccacagtcaatgtgtcctgagctcttgttcgatgtccaaggataatgaggtggcatgggattctcaaagggtggtaatgggggagaattttgttgagtggtggaaatggttttcagtggagagggcagctggagaagggggcaggtggggttgagggagaataagaggccccctcctatacatacatgtgaaaatcttcaggagaaagtataatttg

SEQ ID NO: 478431 - DNA, 673 bp, Homo sapiens
caaattgtactcatgatataggtgtacctcagtttcctgaatacttatataaaaatactgaagtaatgattccagctagtttggaattattagtaaatttcctgggcactaatattttgaactattttccccttacaacagcaccaaagggggaaattcactgccatgatctcatcacctttcgccaggagccatctccaacattggagagtacaattcaagatgagattttgatgacacgagaacaatacatactagcaacccaacagaataacctgccaaggactgagaatgcacaactttacccagtgggaatttatggatggcgaaagaggtgcttatacttctttgtccttctgctgttggttaccatgatagttaacttagccatgacaatatggatattgaaagttatgaatttcactgtgaaatataattatatggttcatccaaatatgtacctcttctcctctatcaacgtccccgcatttccttgtccctttgaagtgtaaattccctaaggagcagaagctgttcttatttaccttgatatcttggttgagcacatagtaggtgatacattatttttcgctgactttttttaagttttaaaagtgtaggttcactttcagtagagggatcttcaaatttaatgttttaattttttcacttg

SEQ ID NO: 478432 - DNA, 1979 bp, Homo sapiens
ctctccactctacagcaggcaccagcgggcatccccgggacacaggcaccaacaaccacctcaccgatcaatcggcctccttcggcatctgctcctccttcctcctgttttgaaggaagttttgtataaacggagactgcagcttccctggatgcagctcgtgctggtttctacccctcccctctgtccttctgggtccaggtttagtggcagcaaagcccccacctggggccgttccaggttttcctttgtgccttgtcaggagggtcccctataaacagacacagtggcagaggcctctccagacatctctgtcacatctgtgcacgcaagcaggacccagccaagcctgggtcggatgcccgcaggcactgggagaccacctgctgctctgaattctgcccccaggtccagggaggtctgggaaatctgtcctccctggtcctcacctcctccgggaaagccggcttctgtgctgtccctggaggctcagggctgtgagcccggccttctctctccccagggtcagaacaagtgacagaggtcaccaggggctgcaccaacaaccgcatcgtctcggcccgtcccggctgggaggagttcacctgggacagcatcctctgtgccagcgtcttgtgctgtttggagaccctgggtaaccgggaagccatggcaggcagcgctgcccaggccctgcaagggggctgcagctcacccagtggttagcaccctccctccctgatgcccgcccccctcatctgcatggtcctttgatgaccatctccacgtctcatcccccatctctgtttggactggtcatggggcctgccctcgcaggtgaggctgccttgactcgctgcctccccctaacagtggagggagaagcttcctcttgagcctgtaagtctgggcaggtccagcccccgtcccctcccccagggccaaggggtggccagtgccccggtgtgtgctttctgttccagcccaggagggcgtcccctgacaaagccgcccctctgtgctgtgaggtgggaggagcctctgcctgtctaccggccccagattccacgcccatcggggaagcccggcaaaggcaccagcactgggaatgtgccccagcaaacagtgagcaacgaggagggtgaggaaagcgaggaaggcagccaggactcagtggcagtgtggacgccgatggctggatcatgagcaccccagtgctgttctcatgacagagttctcacgagatctgggcatttaaaagtgtgtagcaccttccccctctccctcctccccccacccctcgcccccagctttctcctgctacggcctgtgacgcacctgctcccccattgccttccgccatgctctcaccactagcgttcaacacaacacagtgctggaagctctggccggtgcacacagcaagacaaggaaaccctcgcgttcaacacaacacagtgctggaagctctggccggtgcacacagagagacaaagaaaccctcgcgttcaacacaacacagtgctggaagctctggccggtgcacaaagagagacaaagaaaccctcgcgttcaacacaacacagtgctggaagctctggccggtgcacacagagagacaaggaaaccctcgcgttcaacacaacacagtgctggaagctctggccggtgcacagagcaagacgaagaaaccctcgcgttcaacacaacacagtgctggaagctctggccggtgcacacagcaagacaaggaaaccctcgcgttcaacacagtgctggaagctctggctggtgcacagcaagacaaggaaaccctcgcgttcaacacaacacagtgctggaagctctggccggtgcacacagagagacaaggaaaccaaaggcatacacatcaaaaaggaagacacgcccttgtcccataagcagatgactttgtagcccacttaaaaaatcgtaaggaatctgaaataaataagagc

SEQ ID NO: 478433 - DNA, 627 bp, Homo sapiens
ggtttcacctcggccacggttcccaagatgattgtggacatgcagtcgcatagcagagtcatctctcacgcaggctgcctgacacagatgtatttcttggtcctttttgcatgtatagaaggcatgctcctgactgtgatggcctatgacggctttgtagccatctgtcgccctctgcactacccagtcatcgtgaatcctcacctctgtgtcttcttcgttttggtgtcctttttccttagcctgttggattcccagctgcacagttggattgtgttacaattcaccatcatcaagaatgtggaattctctcattttgtctgtgacccctctcaacttctcaaacttgcctgttctgacagcgtcatcaatagcatattcatatatttcgatagtactacgtttggttttcttcccatttcagggatctttttgtcttactataaaattgtcccctccattctaaggatttcatcgtcagatgggaagtataaaggcttctccatacgtggctctcacttggcagttgtttgctgatttgatggaacaggcattggcatgtacctggcttcagctgtgtcaccaccccccaggaatggtgtggtggcgtcagtaatgtacgctgtg

SEQ ID NO: 478434 - DNA, 1038 bp, Homo sapiens
ggattttcatgtagcttgtagcagatcacgaagtcaaaaagggtgaagtccaatttgaaccaggcagtctaagtccagacacatggcatttggccagtcctctccctgcaaccaacctgccctctcaaatcctcgtcactcaggcggatggccctgctcactgtgcccttccctttgggggttccttgtagaccacagctcgacaaggacgtctttggcttccatcatgggggtgcaggcaactggattatccaccccaagaaatctggacaaaggaaaacgaggttctctgaggaaggagacatagagcccagggagctaaccaagagacaaatattggagctatggcggcggcagctgtcactgggcctagcccggagtgtggacctggggactccccagaagggcccgagggggaggctcacggagcgtcggcggaaggcgcacagaatgctaaagctttacaacggcctctcgaaaggggaggcggtgggactccccgcggggaccgaccccctggaccccactgatctgaacggggcgcacttcgacccggaagtttacctagacaagcttcctagagagtgccctctggcccagctgatagacagtgagacggacatggcgcagcagatccgggctctagacagcgacatgcaaaccctggtctatgagaactacgataagttcatcccagccacagaaattgacaaacagcataaaactgtatgaagaattgcaggagacccagaatttcccaaataaccttataaaagaagaataaagttggaagacccatgcaaaaaaaaacatatatatatatatatatataatatatatatataaataaagatgtgttttcgttcagttgtaaatgtttagtaattactattgtgatttttcatttaactcatgaaaggatatttttaattttccaaatgtatgcttgtgtttagctatcttcttgctgttgacttctaattttgttgcattatggtcaggataatgtggtctggacaatgtcaatcgtgtagtgga

SEQ ID NO: 478435 - DNA, 950 bp, Homo sapiens
gtggttccaagtcaagttccaaattgtggcaggtccttacttagtatgacccgcaagaaagaaccaacatgaggtgggcagctttgaaaagggacacaaccttggggctgggttttgctttcacctccctctgcctcctgctacttggctcagtgtccaggccaggaaatggcccggatggttcctcaggctctgtgttccaaacagcagccctgggaattccagctcagcccctccacccagacctgcgtggaggcacagtgaacttcaatctcattgtgagtggcaatgagctcagtgggaaaggctccatttctcagctggccttgctgacaagtggctgcaggacacttgtggccatgttatgtggcagtggtcagttgaagcgggatggggaagctccttcaaaggggagtggaggctggcggcatgtgctttttcccttcctccctgccttgcctcctggaatgggggagtggaggggttcagcgctgatggccaggtggggccggcttgttcatgaggatgagagtggctatcagggtgacggcacaggagacagaggagcttgggacgctctgactttgagggcgggagctgctgcctgcagactggctgtcgtgtgtgaagaccccctgtttggtttaagtggtcctagcatagccgaaagcaatccccagtggaattgcttgcatctcttccatactacacaacttttacacaacccctctagaattcctcccttgatcccatcacattcctgttgaactctaagggggcggtgtggggagacttcctggagcaggccatgctgtggatgtggctctgaccccatccagtctcaggagctcgtcaaggatggcccagcttttcatcaggaatttacctagggcagccaaaagatcagagaacatggactcaatcatttctcaagtttgtaaaatgtgcct

SEQ ID NO: 478436 - DNA, 3548 bp, Homo sapiens
gcaaacacctgctcaccctcccacatcatgcgtgcacgtacaagtaaatttttcagcagctgccgcctggctgtgcggtcttccctgctgatgattattgatgggctgctgccctccgtgctccctttcctgggccagctgcacccccagggctgcgggcttggctacacctgtgagcaaaagtcatggtggttcagaacccggagacaccagatggacccaccgtctcctatccgatatgcaaaccttggagaaacagaccaaaagcccacagtgaatgagttagagatgataaccctgtcatggcttaatgcagaggaagggattcaaagccttggggaggttggaatgcaagagaggattcgtctttccagacatcctcactcaccctgggagggcccagaactcacaccttttcccacgattatgggaaatgcatgtgagaggggagccccagaacccttgatgagctgtgactgctcttctctgtgggccacaccctacagtggggaaacatccacacagtgggagtattaaatccttaagtggcaggggccaagtagcatcactgcatggatgtggaccctgtaaaggatggcagaatccaagctgcaatcagaagagcctgactcatgccagcccggggcatcggctggtggatcatggtattctcagcagtgaaacacacaggaaacctactaaattcttactcgagctgtataagcagttaaattctggatcaagcaaactaaagtctaacttgaaccatgaaaagagagtcatgccccctcaatcaattcccagacttgagccagtttacagactcaaacccattgaatgaaggggaggttgggtctccttgaacaaggaccctggtatgcagccaaaaacttacactccatctttcttccagccttccctaaaggaacttacagccttcagaatgggactgcaacataagccttttcctagttctccaatctaatggccattaggcttcagctgcaacatcagccttcttggggtctccagcttgccagcccaccctgtagattttggacttgccagcttccataattgcatgggtcaatctttaaaataaattgctctctctccctctatgcatatatacctcctattggttatccttctctggagaactccagttagtacaggtatagtacagtcattgtacacagagcgagtggatgtcactgtccactcaccctggggttgcaagttcagagggtggtgatctctgtctgatcacagggtgagctgtgtgagctggggacactgttcctcatgtgcttggcatggccacttgtgcttttgttctctctttgctcgtcccacacaggcccagactcactgcctgtgcccctcctatggcgtgctcattctctgcctctgcaccttcagagctgtgttctgtgacactttggaaagcccagtttccccattcacctcctggccccttctgacagtcactaactagtctctgtcctcgttcattttcaaacactttgcaggactctgcttctccagatgctcttctgtttaacctctctaggctctagttgaacccagctctgtgagccacccactgctgtccaccaggctgtgtttaagatgttcccatggcttgctcttggtggggtcctccctcgcaggcattcagtttatcatctgcttgactgtggaattgtaaatgttaatgttttgtctttgttcttcctctacgtctctaaggagtacaggcacctaaagtgcaatgcctgctgttgacaggactcaagtagatgctgagtggtgacacttaaaagtccccttttctagaattcataaaaaacaagtgacttcacctgtctgagttgtcattccttggtgccttgttgaacttttagcatcgtcactgccatacatgataacttttcagcgaggtgcttcctagcagcagggcaaaaaatactaaagtctgactgttttcccccatgtcttactccttcatgcaagctcgtctttgacatcatggttctttctttgcagaagctcttcaaggttcttaatggtgtctgtcagcctgtctcccttcctgctgcattctgtggcttttaacaaaggcaggcattggaatgcatgaatattgaagaggtacacgccgacagtgttacaaacacatcttgaattttgaattttaagttaacatccagtagagccaagttcttctgcatgtgtgcaccacccatgagccttaacacacgtgtagatttgtctcattacaggcaagacacagggtagctgcagcacctggaggccctgagctgccctggggcgatcacaccctcccccatgccaccccaaagccatcagtctgctcagtcatgtaaatagggtcatacaggtagaaacctcttgatattggcggtggcttctcctcctcttcctcctcctccttcttcttcttcaagctattattattttcattttaggaaacagagattcaaataaattaattgtataaggtaacaaaattcagggatgccagagttgattctgagcctagttcattttgagttccagtcttacaattagagactatacaaatctgtccccacactggattcagagcatctttaaaataatgagatattgtacttgatagattgaaacttacaataaatattatttgcctagcagcatacagacatggtttgaaatatcataaaatggaggaattaactttggatattggcatcttctgattcacccatgtgattgaggatatcagtggtttgttccttgttgctgctgactagtatttcattgtatagatgtgtcatagtttgtttattcattggttaaaggacatttatattgttttctgtttttcatgattattactagagctgctatgaatatccatttacaaaatttttggtgaacataagtttccatttctctagagcagggatggaaatcttttttttttaatggtcagataatacatattataggcttttcaggtcacaaaacaactcaaaatcgaggctactatgcaggaacttttataaccacttaaaaatgttaaaacgatttgaagtttgcacaaaccataaaaaacaacaaaatgaaacaaagcaaaaacaagttccacttgttttgtgaagttttgctgaaatatagccatgcccacttgttcatgtatctttgtgtggctgcattctacaaccggggagttgactttctgtgacaaagaccttgagtctaaaacatttaccatctgacactttaagaagttttccaactcctgctgtaaacactgaggagtatatttttacatttgtaagaactgcccaactttttcagggtggctgtgcccttttacactctaccagcgatgtatgaaagacccagttttcccccatcctcccctgcactcagtattgtcagcagtttttgtttcagtcattctaatttgtgcgtagtgttactttaccgtggttttaatttgtattttcctaatgaattatgttgaacatcttttc

SEQ ID NO: 478437 - DNA, 567 bp, Homo sapiens
ccctcaagtaggaacgaggcaatcataatgtctgcaaatgcagacagtttttatttcttcttttccatcctgtatatctttgatgaatttctgtcttgtagcactatccattgcagcaagtcacccaatttaggttcagcccacaagttttggactgtttttgtggactgtggttctgatggcagcttaattttcggagtctttgctgtgttgtttggtctgcttggtttttctggttccctgggggctcccactggtccctgctggtgtggcctgtggattgggaaaggcttcactgggccagctgccaggaggctcttggtggaagaaggatgtggtgggacccatgtgcctgtgtcctgggcagcccaggcacctctggtcagggcaggagagccccaggccatggacaacagagtttctctgagcagctgcttgcagtggcaggcccctttatgaagctcttaggatgtgaagagagcagtgactctctttgctttcaggctgggacttagcttaggtgtctggctgttgggaaaatttgggaaaagcttggcatgttaattt

SEQ ID NO: 478438 - DNA, 2345 bp, Homo sapiens
tgggcgattcagagcatagagtgtcacccaccagcatcaagaagataccgccatggtggtgctgctccaaggaaaaggacaacataatatgagacaagggccaagaactgcagaactgtgcacggtgtttagaagaggctgcgagctgctgctctgcagagttgggaggtgctttcgggctctgcaggctccctgcaggcccttgctgactgtccatggcctgcacctgccctacctgctgagctgccccatcagctgctcctggctgtggtttcctgaggggtcccgtctgcatcggctgccctgtgtcctgacactatgtcctgatctgctgacttccactggagtcctgctggcactctgggtggttagaggacaggagagccatgcagtgcacggggaggaaggcggcagtgccagctcacatctggcagggggcagtggccctggtgttgggaagcccatacctcctggctgctgtagtgtgctgtgacccgcttcacctgcacccatctacagacctgccctcggggtccctcagtaagaaccaactgggattcaactttagctgacatggaagagtgatctctacactgtagatgagtaaaaggcaaaagtcttgtatttaatgatatcaaagcatggtaaattattcaaaaattttcacatggagcagttgttttgaatgaggtccacttaatgctactcaataaggtcttaatttgtatatgatttcaccattaagtctatcatggtgcaaccattaatagcgagcattggttaaatacttgcattatttgtaaggggattccataaaatatatatagtcattaaaattgttttgagtaggtagcacagtcatagagttccaaattcaaaacgtacaaaagtttaaataatgtattcttccactcttgtcttgacacaaattcccttcctatgaaacagccagttctataatttttctaatatttttcagaaataggttacatctctacaaaggaagttaattcatgttcgtattcttccttctttatataagtggtaaaaatactgtacacactcttctgcccttgtaagagcaatatattttcaagtgcattccatatttgcacacaaacattccttgcatcctttctacagctgcattatattctattgtatgatatgctgtattatttaaaagtcctttaatgatgtatacttatggctgtctccaacattttgatcttactaatagtgttataataacaagtatgtgtatatgtcatctcacatgtattagagtatttctgtgtgaaaattcctagaaataaaattgccagatcaaaaaatacatgcattagtaatttgtatgtattttgccaaactgcttttatagagagtggttcttttttgtacacaactttttataattaaaattgctacaaggttattttcttttatgtctcctgggttatatgaagtaattttaaaaggcctctttcattggaagattattaaaagtgaattattacatacttttcaagaaatgtattgatatatattcacatggattatgtataaagaggtatatataattcacatgaaatatatataaaaatatacgttctgtgtgaattttattctgattgttaggtgtgatattttcaatgaatctatataatactgtttttaaaattgtgttacaatatatacaacatgaaattaaccattttaaccattttaaagtgtacaattcagtggcattgatggtggtacacactagccatgtgcacaaccatcaccactatgtggttcaagacctttttcattgtcccatgaagaaaacccataaattaggcagtctcttcccattgccgcttctgtccagccctaggcaactacgcatctgctttctatctctatagatttgctttttctgggcatttcatataaatggaatcacacaataatgtggttctggctttttgtcatatggcctttttgtcatatttttcagtgtttttgggagggacaggtccccagagtttcctactctttcgtttttgctgtacaagttttaaaaaatttgaataacttctgtcctgtagttgtagactaacagcaaagtaaaaatgttgccctggttgactgctcagctgcatgctctgccaggctggcagctcagcaaaccctcacaggtgctcgataatcacaaccctcagaacttatgaatgagcccttagatcatcacaggaggtcagtgagatttttggccccatcatcagttggggatttaagctcagaatgcaaattacctttgagacctcctacctgaagggggctgctggctgtggggtccc

SEQ ID NO: 478439 - DNA, 627 bp, Homo sapiens
gccatttgtcctttgatgctagtgctctatttatcacttgccatttcttatcagcccgcggtccctggaaagctatttccctgggaagatggatgtggacagggttttttggggaaagcgtatgttctgtttccacatgccccactgcagggtgtctttagcagatgtgattctgagacagcccatttcaatggaggacacagcaccacacctacctgtctgctgcccctggattcagaggtcagccaggcccaggttgcccatggaggccggctgcctgaggtagacgttatgctgggtgttcaagggggctctgtgtgtgtgccctgcaagcagtccttggtggcagtgaacagagtggctttctgtggagccgccactcctgtctcaggctgccgactcagtgtctgtgaggggaattcctgttcctggcccaaacccacaggccttgctcgtgaaggcctctcacacactctctttttcttgcttggataagaatctgtgctctggagactcttccatggaacccagaaagaaaaaaaaaaaaaaacagagagagagaaaagctttcactcacatccatggctggaaaattcaacttgctctttgtaaagcagactttcccct

SEQ ID NO: 478440 - DNA, 625 bp, Homo sapiens
gagatcgcatacaccgggtgcttgctatagtttggaatgttaaaccaaccttgcattcctaaactcttggtaatgatgtcttatcctgtttatatattcttggattcaatttgctgtatttccagtaatgattgtcacacctaccttcaggaatattggtctgtaattctgtttccttgtaatatagctggtttgggtttcaggaaagtggtgacttcattaagtaaatttggaagtgttgcctcttcttttatttattatcagtactcagccaaaaatcaaggtgacccctctgtgatgctgttcccaacatccagccatctcactcttcatgaacttccatctgagtctcaacccagtgagaagctcagcctgttcatgcattttggcctgggcacagtctccaagggcaagaagcccctcaccagatgccaagcagatgctggcaccatgccttggactttccagcccccagaaccgtgaaccaaataaatgtattttccttataaatttatctgtctgtggcattccgttacagcaacacaaaacagactaagacaaatgaatgatttaaacattgttgacattgacatattcatttccatgtattatttcaataattttt

SEQ ID NO: 478441 - DNA, 678 bp, Homo sapiens
tgtcccctcccaatgcacaccatcatcttgcagccagacaatgagcataggacagctattcagaaaagcgcgtggcttcggaggctcaggacatgtcctgacggcacctgcaggttttcttttcctggggccgcgggcactggcggtgctgcacctgccgcgggccagcgccctgcctgtcagccgcatacctgggcgctggtgcaggccctggcctgctccacatcctgccctgctgcagggcagggccgcttctccgcagcgcttccgttgtctgggatggggtctgccggcgctggctgcaggggctgcacacatcacgcacacatcccacggcgtaaccgccagggtccctggaaatacggaaggtgcacccacttcctgattcacactatcccaattaagaacacagcaagtggaccacggcatgaatttggcttgttggagctcacgtaacttggatgcaagttcatgtttatctaatgggattttagacttttatcctttcatacaaatcatatctcattaatttccctttgatattttagcactttagagccagcataacaaacacattaaatcttgaatgtggttaatcagaaccctcgacgtgagcagtgtgatgccaattgctttagaattaatgaactcttgatgggatgagagagattcaaataa

SEQ ID NO: 478442 - DNA, 450 bp, Homo sapiens
aataccagttcagagcacagagtccatgagatgggagatgagcactgtctacctaaaatcttccagaaatagagccagccatctgaattcaccttataccacaatcaaaccctcaatgtcatcaggtcagaagcctcaaagattgaagggagataagcctacaaagatgagaaagaatcagtgcaagaaccctgaaaactctaaaagctggaatgccctctttccttcaaatgaccacatcacctctgcagcaagtattttgaactgggctgagatggctgaaatgacagaaatcgaattcagaatatggataggaaggaagatcattgagctagaggagtacattgaaacccaattcaaaaaacctagaaatcatgataaaacaaaacaggagctgacagacaaaatagccagtatagaaaaaagaatttaaccaacctgatagagctg

SEQ ID NO: 478443 - DNA, 450 bp, Homo sapiens
taattgaatcatggcggcaggtctttcccatgctgttcttgtgatagtgaataagtctcactgctgtgctgcgggtgtgggacccaccgagccaggcaagggagagaatttcctggtctgccggttgctaagacgatgggaaaagctcagtatttcagcaggagtgtcccatttttccaggtacccagtgaaatggccttgcattggtggcaacgtatttgaaaaagtactccagtctttgcatattggctttgctgggaacatactgggtccctgtggatccagatatgagactttggtctatggggctgtcctagagcacatgtttacagaggtggtccctgaaccttggtctgcaggatctgggatggcactggggtctactggggtgtgcttggaccctaggttctgcggagcctgtgtccacagaggcctgcctagaacgtgaag

SEQ ID NO: 478444 - DNA, 3773 bp, Homo sapiens
agagaagaggaaggagaggaggaaaaggcagaggccagcttggaggaaggagaggaggagaaggcagagaccagcttggaggaaggagaggaggagaaggcagaggccaccttggaggaaggagaggaggccttccttggaggcccctgcatcctcccttgctctgctctcactgctcctgcagctcccccactcccctcggagactccaccagatgtctggaatctccccccctgtctccacatccatgaaggactcatcttgcatgaaggtacaccaggactctgcccgcagggacagatggtcacaccccaccaccatcctgcttcacaagtcgcagagcagccaggccacactgatgctacaggagcacaggatgttcatgggggaagcctacagtgcagccaccggcttcaagatgctgcaggacatgaacagtgctgaccccttccacttgaagtacatcatcaagaagatcaagaacatggctcatggctcccccaagctggtgatggaaaccatccacgactacttcatagacaacccagagatctccagcaggcacaagttccggctgttccagaccctggagatggtcatcggggccagtgacgtcctggaggagacctgggagaaaactttcacacggctcgctctggagaacatgaccaaggccacggtgggcctcccctcccacagcaagtgggccaaccccccacgggttctgggaatgccagcagctgccccagggacccaagtgatgctgggcatgcccagccttgtgggttaccaagcaatttccatccagtgactcacgttcttacccccagccccttcagcgggacaatcatacttttccatctcacgttcccattccaggaaggggtgtggtctggcctcagcctccctgagggtggacaagaccctcctggggcttcatgaggaggggcccctgcatggagtctggcatgaatgaggccaggactggtctacattttctgcttctgaacacactgcagccccgctccagcccccagagtaagtcgacacttctgtgggtcctacccgcctcctgggacacagacagacacttctgtgggtcctacccacctcctgggacacagtgggacacttctgtgggtcctacccgccccctgggacacagagggacacttctgtgggtcctacccgctgcctgggacacagtgggacacttctgtgggtcctacccgcctcctgggacacagacggacacttctgtgggtcctacccgccccctgggacacagagggacacttctgtgggtcctacccgcctcctgggacacagacggacacttctgtgggtcctacccgccgcctgggacacagagggacacttctgtgggtcctacccgcctcctgggacacagagggacacttctgtgggtcctacccgccccctgggacacagacggacacttctgtgggtcctacccgctgcctgggacacagacggacacttctgtgggtcctacccgcctcctgggacacagacggacacttctgtgggtcctacccgcctcctgggacacagagggacacttctgtgggtcctacctgccccctgggacacagagggacacttctgtgggtcctacccgctgcctgggacacagagggacacttctgtgggtcctacccgccccctgggacacagagggacacttctgtgggtcctacccgccccctgggacacagacggacacttctgtgggtcctacccgctgcctgggacacagacggacacttctgtgggtcctacccgctgcctgggacacagacggacacttctgtgggtcctacccgcctcctgggacacagacggacacttctgtgggtcctacccgctgcctgggacacagacggacacttctgtgggtcctacccgcctcctgggacacagacggacacttctgtgggtcctacccgctgcctgggacacagacggacacttctgtgggtcctacccgcctcctgggacacagacggacacttctgtgggtcctacccgccgcctgggacacagacggacacttctgtgggtcctacccgcctcctgggacacagagggacacttctgtgggtcctacccgcctcctgggacacagagggacacttctgtgggtcctacccgctgcctgggacacagagggacacttctgtgggtcctacccgctgcctgggacacagagggacacttctgtgggtcctacccgcctcctgggacacagagggacacttctgtgggtcctacccgctgcctgggacacagagggacacttctgtgggtcctacccgccccctgggacacagacggacacttctgtgggtcctacccgcctcctgggacacagagggacacttctgtgggtcctacccgccccctgggacacagagggacacttctgtgggtcctacccaccccctgggacacagagggacacttctgtgggtcctacccgccccctgggacacagacggacacttctgtgggtcctacccgcctcctgggacacagagggacacttctgtgggtcctacccgccccctgggacacagagggacacttctgtgggtcctacccgcctcctgggacacagagggacacttctgtgggtcctacccgcctcctgggacacagacggacacttctgtgggtcctacccaccccctgggacacagagggacacttctgtgggtcctacccacctcctgggacacagagggacacttctgtgggtcctacccaccccctgggacacagagggacacttctgtgggtcctacccaccccctgggacacagagggacacttctgtgggtcctacccgccccctgggacacagagggacacttctgtgggtcctacccgccccctgggacacagagggacacttctgtgggtcctacccgccccctgggacacagagggacacttctgtgggtcctacccaccccctgggacacagagggacacttctgtgggtcctacccaccccctgggacacagagggacacttctgtgggtcctacccgccccctgggacacagacggacacttctgtgggtcctacccgccgcctgggacacagagggacacttctgtgggtcctacccgctgcctgggacacagagggacacttctgtgggtcctacccacctcctgggacacagagggacacttctgtgggtcctacccgctgcctgggacacagagggacacttctgtgggtcctacccgccccctgggacacagagggacacttctgtgggtcctacccgctgcctgggacacagagggacacttctgtgggtcctacccgccccctgggacacagacggacacttctgtgggtcctacccgccgcctgggacacagagggacacttctgtgggtcctacccgccgcctgggacacagacggacacttctgtgggtcctacccgccgcctgggacacagacggacacttctgtgggtcctacccgccccctgggacacagacggacacttctgtgggtcctacccgccccctgggacacagacggacacttctgtgggtcctacccgccccctgggacacagacggacacttctgtgggtcctacccgccccctgggacacagacggacacttctgtgggtcctacccgccccctgggacacagagggacacttctgtgggtcctacccgccccctgggacacagaggggcatcaggcactctgttacct

SEQ ID NO: 478445 - DNA, 619 bp, Homo sapiens
cttgcaataatccagttgagagatgatggcagctcggactacagagaacacggcagaggtgtgtctgacttgccagataaacatccgtgcaatgacagaaatggaaatgtatctttgcctgaggagaagagaaaaggcagttagcagcttcccgcaaggtcatcagtacaaggcagaaagatctccagccagagcattagcacaatcggctgtaactcagagactcactaaattcctttccaattttgcaggaatggtttgggtattccgaaagaaaaagagcagtaaattgaatgttctgctcttaagagagactcatgcagagaggaaggaaactcacaaggccctaatgacatcatttactaagaaagtccttagaaactgtcagcgctgccaatggactcaactgagaagtctgcagctctttgtcaataattctctatctccatacttggcacagcgcctgcattgatgattcacttaataaataactgactgaatgaatgttggcaccatttggagatatttattcattcattaaaagaagacaactttattgagcattttgtgggttaggtataccatgcaaaggtttaagcaaaattggtcctgccctcac

SEQ ID NO: 478446 - DNA, 725 bp, Homo sapiens
tccctttgaagacctggagagccttccaaagaaggacaggcacaaacaagcccagactgtgaagattatgataaatgtcaaactcttcaattttttaaagacgggccatttgaatatacagtctgtggagacaaaagaaaaaattttaaaaaatgaagcacacgtacaagatttagaaaatagcctcaaaaaggcaaatctaagatttattggccataaagtggtaatgaaagagataggagaagaaagtttatccaaaggaataatatcagataactacccaaacctagagaaagagatgagcattcaagtacaggaaggttataaaccaccagacaaatttaacccaaagaagactatttcaaggcatttaaaagtgaaacccccaaagataaagggtaaagaaataattcttaaaaacagcaataaaaagaaacaaataacatacaatgaagctccagtacatttggcagaaaacttactggtgaaaaccttacagacaaggagagaattaggttaacttgaaagccttgtctttgagctctaaagctctttctctacttgtttgattctatttttgagactttccagtgtattctgcatttctctaagtgtgtcctttatttctagaggttgtgatttttttttaatttatgctgtctatttctctggagacattttcatccatatcctgtaactttttttaaaatttctttaagttgata

SEQ ID NO: 478447 - DNA, 702 bp, Homo sapiens
ttcagtctctcggtatcaaggttactggtccattctttttcttctgctagcacacagtccaagctgtcaatggatctaccattctggggtctagaggatggtggccctcttctcacagctccactaggcagtgccccactggggactctgtgtgggagctccaacctcacatttcccttccacactgccctagcagaggttctctgtgatgcagacacaggattagaagtagggatgagaatagaaacagcacctatggagaaattgtcacatccaggtaacatgaaaatgaaggaaggagctatagaactgtcaccctgtcttccagcactatggctagatcagccctcaacaggtgccaacttcacttggcacaaagacggtgttctcataactacagcaaggaaaacgtataaaaataaagtttctcagaatgtgattagcaatgtgataagcagcatcctgcccgttccacgtttctggcagaagctctaacagtgcattcgcatacttgtatattttttgtaaaattggcaaaaataagatattttaactggaatcctttaggaaactcttccctctcattatatttcccttcatgtcaatggcattgctatggctgcagcatttgcaggatagctttgtggaaggtgagttggtaatgtgtctctttatctgcaaatggagagacatttcatgtca

SEQ ID NO: 478448 - DNA, 794 bp, Homo sapiens
tgtgcgttgtatgaacagtgactgccaaatgaaaatctttggtgttaaaatagtgaggccccaaatcaaaatggccctttgtcctgtggtggagaaggtgggaggggcgccttccgttgcaggctggctgccttctcctggctgctgcaccagcgaggttcttgccgttacaaatggatgtcagggtggctgtccctgcttcatgtccagaccctgctcccagccatttccctggggtcctctcaccctcatggctctggttcatgctgtcccctttgccccctgcctggaagaattatccttttcctactcttcttccttgtcctgtccaacaggcacctcaaattcaacatgtacaaaatggatcctggtgtctttattccctgcatcagaagtagctcctgagttttcatcatggaaaggattcaaggaaggcatcaacctttgtgaaaagaggatgaaggaaccaggggatttatcacaaatctgttcacaccaccctatgcttgtccatagcaaagaattggggtgggggctgatgaggattgcagagggagaaactaatggctccttccaaggagtttcatggaaatgatgatcctgttcccgtcattgctcctcctgtgcttctgtgctggctgatgatgttggtttggatagaatccatgcagaggtggtaattttcaaaccagctcagtcccattatcttacaacaagcatttactgaaggcatgctatgtgcctatcactgtcaaccagacaaggacctgcataccttgtaggatggacttatc

SEQ ID NO: 478449 - DNA, 4624 bp, Homo sapiens
agtgggcaactcaggactgaccctcagaaagttagtgacctggctcatcatgacagcccagatttcaatggtagtgaaaagggccgtcgtcaatgctaagatgagtgatgatgaccaggatgaatttgactggcttcaaaggcaagtagtggaaatattcttggatatatttttagaagtggcaaaccctatttgtggcaaactcttaatgttaagaagtctggaggaagaggaagagtcagaaaaacagcctaaaaagaagtgtccagttagaagcaaaagatctgggcattggtcagtcatcagccaagggcagcccacaggcagagggtggatgcaggatcacctgggcatccctgggcaagaggctaatgccagtcaagggcaattcttcagagaagagttccagtgtgagccatgggcagtagaagaaattgataaatttctagacacatggaccctaccaagactgaaacctgaagaaatagaaaatctgagaacaatgtaaaataagaatgaatcagtaataagaattcttcaattaaaagaaaacatccttgattggatggcttcactgctaaattcactcacacattcaaagaagatctgatgccaattattgaaaatttccaaaaaaatgaaatggagggaatacttctaaattctttttatgaggctggaattacactgacaaaaaagacaaggacactacaagaaaaatatttataggcaattatttctgatgaaataatgcaacttattctcaccttgagttcagtttgagaattgaactcaaacacattacttcaaagactcattttcaagtgcacacagcacattctccagacatatgttaggttgcaagacaaatcttaataaatttaagaagattcaaattatatcaggtgtctctgtgtgtggcaatggtatgaaactagaaatcaataacaagaaaaatcttggaaaatacataaatatgtggaaattaataattaccacaataaagtggtatttgtcattggaatacaaagatggctcaacatatgcagatcagtaaatgtgatacacaacattaataaaatgaaagatgaaaattatatgaccatttaatggacatagaaaaatcatttgacaaaattcaacacccttttatggaaaaagttttcaacagcttagatatagagggagtgtacctcaacccaataaaggccatatatgacaaacttgtaggtagcatcattctcaatggtgagaagttaaaagcttttccttcaatgtcagaaataagataaggatgcccactctcaccacctgtattcattatagtactggaagtcctagccagagcaattaggcaagagaaagaaatacaagcatccgagtagggaagaaagaagtaaaattgtctgtatttgttgatgacatgatcttatatagagaaaaccctaaagatacccctaaagaatttgttacaattaaaattgaattaagtaaagttacaggatacaatattattacacaaaattaatagtgtttgtatatactaataacaaattatctgaaaaggaagttaggcaaacagttccatttacaatagcaacaaaaattaaatacttagttctaaattcagcaaaggaagtaaaagtcctgtacaacaaaaacactgacgaaaaagttaaagaagacacaaataaattgaaagatatcctgtgttcatgatatataaaaattaatattgtgaaaatgtctgtactacccaaagtgatttataaatttgatgcaatctctatcaaaatgccaatatcatttttcacagtaataaaaaaatcaatattaaatttgtatggaaacaccacaaatacccaaaacaatcttgagcaaaaagaacaaagtggaggcatcacacttcctgatttcaaaccatattataaagaacttataatcaaaatagcatggcgcctgcatacaaacaggcatatcggccaataaaacagtatccaaaacccataaatatgcccatgcatttatagtcaaaatatttttgtgtcagttttgatggctacatttttcattaatttgaccattccatctgaatagtcaaattcactacaaaaatgttattcacaaatttcttattttttaaattactgaagttcctctttcctgattattaaaaatttgtgttgtctctcattctttccttttaaaatagcttgttgaggtataataaccaaacaataggctgttcatattaaaagtatatagtttaataagtgttgagatatatgataaatgaacactacaattcaggtaatgaacattcccatcacttcctcatttcctcatatctctttttaatccctccgtcctaactgtcccaataccactcctttttctagacaaagcctaatctcatttctattgctatatagatcagtttccatttcctaaaatttatataaaggaatcatatattattcttttgtttgatttcttttactcagcaaaattattatgagatttatatatgttgctgcatgtatcatttgttccttcctttttatttctgagtaatattctattgtatgaatacatcaccatttgtctatccaacatattgtgggtgggcatttcaattgtttatagtttctggctattacacataaagtgttctgaacattcatgaacaagtctatttaaagacatgtgctttcatttctctggagtaaatacctaggagtggaatagtttctcctatggcaagtgtatgtttaactatttaagaatttgccaaagagctttccaaagtggttgtaccactttacattccagaaggcagtatataaaaactctggtctctccacatccttagtctttttaaatatagccattcttgtgatatccctttgtggtttgaatttgcattttcctagtgataactggtgttgagcatctttcagtgtattcatttcccatctgaaccttttacttgtacaaatctttgtcggttcaaatcttatgtccatttgttttttaaactgttttttaaattactgagttctgataaatttttatatattatggctatatctcctttatcaaatatgtaatttgcaaatattttctcccagtatgacctatatgttcattctctaaatacaatcatttttgaagagtagaagttttaaattttgatgaagtttaacagttttttttatggattgcacatttgcattttatcatagcaatttttgcctaactcaaagacacaaggaatttctccaatgtattattctagaagttttatagttttaggcattccagttaggtttatgatctattttgagttaatttttatatggtgtgagctgtgggttgaagtttattattttgtatatagatatccagtggttccagaactatttattgaaaaactattattttctctactgaattgcctttgcatctttgtagaaaatttgttcataaatgattgagtcaattttgggggtcttgttgtgaagacagggtaatagatgagtgaaacaaatagtgacgcaaactcatctactgtctttacaacaagactacactggcttgcttaccatagctttataataaataagtaatgtttgtcctccaaaattgctcttatttttcaaaatcattttggatattctaggtcctttgaatttccatatgccagtacttattttcatggttaatttacatctcagtgactccatatttttagaagtaatcataatttaattccaaaggcaaaatactaatatgaaatgtggtatgattccttgaataacacatgtaattacttttaacatctcaattaatgtggaagatacaggtagatttttatgggaaatttataggcttagaaagctataattcattttattaatagaatatgtgagcaagaagcatacattttgcttatttattgatttttttacttccttatttttatattatatataaattatatattatatttatattatatataaattatatattatatttatattatatataaattatatattatatttatattatatataaattatatattatatttatattatatataaattatatattatatttatattatatataaattatatattatatttataatatatataaattatatattatatttataatatatataaattatatattatatttataatatatataaattatatattatatttatattatatataaattatatattatatttatattatatataaattatatattatatttatattatatataaattatatattatatttatattatatataaattatatattatatttatattatatataaattatatattatatttatattctatgtaaattatatattatatttatattctatgtaaattatatatatttatattctatgtaaattatatatatttatattctatgtaaattatatatattatatttatattctatgtaaattatatatattatatttatattctatgtaaattatatatatttatattatatgtaaattatatatataatatatatattatatataaattatatatattttttattcta

SEQ ID NO: 478450 - DNA, 675 bp, Homo sapiens
gtggagtagtgacggcagggaggcagctaagcggattgtggatgattactgagtatgttagtgcgtggcgctgttcttcgcctacgtgttgtgagccaaaactgtggaagcgactttggaactgggtaacaggcagaggttggaacagtttggagggctcagtaaaagacaggaaaatgtggaaaagtttggaattcgctagagacttgctgaatggctttgaccaaaatgctgataatgatatggacaatgaaatcaaggctgaggcgatctcagatggagatgaggaacttgttgggaactggagcaaaggtgactctcattatgttttagcaaagagactggtggcattttgcccctgccctagaaatctgtggaactttgaacttgaaagagatgatttaggatattgggtggataaaatttctaagcagcaaagcattcaagaggtgacttgtgtgctattaaaggcattcagtttcaaaagggaaagagcacaaaagcttggaaaatttgcagcctgaccatgtaatagaaaagaaaatcccattttctgaggagaaattcaagatggctgcagaaatttgcataagtgatgaggagctgaatgttaatcaccaagacaatgaggaaaatgtcatcagggcatgtcagagacctttgctacagcctctc

SEQ ID NO: 478451 - DNA, 607 bp, Homo sapiens
tgtcttctgccatcaatgtgggacagaatggctagagtggggcagaggaagggaaatgtggggttggagccccaacacagagtccctactggggcgcaatctagtggagctgtgagaagagggccatcatcctgcagaccccagaaaggtagatccaccaacatcttgcactgtgtgtctggaaaagctgcagacactcaatgccagcctgtgaaagcagccaagagggggcttataccctgcaaagccatagggacagagctgctcaaggctgtgggagcccacctcttgcatcagtgtgacctgtattctcctaccaggacctttgaaaatccagtcctcaccagaagtctgctgacagcaagaaccatagggaaagaacaaggaatgaatctagtaacacacaggtcaagaatcagcaaaaaaaccttcagaattaaacatccaggaaataatcaactaagagccagtcacccttttaagtcctataaaaaacaatttacaacctgctgtctctaaagtctgctatctaagagcttcctctgaacaataaaacttggtctccacagtcctttacctttaacctgaacattcctttctatcaata

SEQ ID NO: 478452 - DNA, 658 bp, Homo sapiens
tgtcataagttaaggcaggaacaggccattttcatttcttttgtggtggaatgtcatcagttaaggcaggaactggccatctggatgtcatcatgggtggaaccggaggccattatcccaagagaaataactcagaaacagaaaatcaaatgctacatgtttccacttataaaaggagcaaaggcattctctgggaactcttttatcagggcactaatgctgttgatgaggactctaccgtcatgacccagtcacctcccaaaggccctgtgtccaaataccattacaatggggattcgatttcagcagatgaatttgggaaatgtgaaactggagtggaacaaatgtcccgtggtattgccctagaaagaaagtttcacaggcttcaccagccaaagttccctttccaacctggacaggagattgccttagactatggagctaaattcagcactgatgcccggacatggaagcagggaaagagggccagggcagcagcagaaatgaatgggaacatggacccagctgtgccctgctcctactggctaaggagataggttgatcaacccatgagggcagaccagcagccagttgataccacattcacatggcattgatgtctgtaagttatttgcaatttattgagcatattcagtac

SEQ ID NO: 478453 - DNA, 651 bp, Homo sapiens
tcatcagtaaaggcaggaacaggccattttcacttcttttgtggtggaatgtcatcagttaaggcaggaaccggccatgtggatgtgtatggcgtgcgatgggtatgtggctcacttcttcagtatcctgctgctcaaacctctaggagaacacacagatgggcaggctgtggggcttcgatcccatggcaatgtgaaactctacatcgttcccccagttgatggcctgctggcctaccggcatctgccagtgtgctctccacatcctctcgatgtccagcagcttgtgtgttcctcggttgatgtgtttcttttgacatctttcgagctttgccccctgggctatgaccttcacaagcgcttctccgtccccctccttctatgtgatacaggaagcctggaggaagctaaaattggatattttccttctctcatgtcagttaggctctggattcaaccaccaaaaaactcaagatcatttttcaatgtctcacctttatttatgttttcagggaaggagagttagaaagaaagtcagcagtctggaaaatgaaacattctgcccttgtctcctgaacacagccaggccaagttgtaactcaaatcactctttgtactgcttggtcgtaaatcccttcaaactgagttggc

SEQ ID NO: 478454 - DNA, 441 bp, Homo sapiens
tttttcctcctacgccctaggcctgtgatgggaggggctgccatgaagacctctgacatgccctggagacattttccccatgctgataagaagtttagctatcatactggaaagatcttgtggagatacaacagaatattcaaaaggagaggccttgagagttgcgagaaaggaaggagagaagagacagggaggaagaagagaggggagaggaagaaggagaggaagcagagaggagaagagaggagaggaaaagagaagagaggaaagaacaggagaaaggagaagaggaggggagagaagatgacagaagagaagagaggacatgatagatacctggctatttcagcatctcaaccttctctactgaggcacctgacatccagacatgtgaatgagccatctagggtgttccagtccagaagagctctcaaatgactg

SEQ ID NO: 478455 - DNA, 770 bp, Homo sapiens
gtgagtaccgcgcgaagccctggtttccgcccgcgcctcgccctctacacctccctggaagctgagggagctggctcccgcctcagccaacccagaaaggggctcccacagtgcagcggcgggctgaagggctcctcaagcgtggccagagtgggcgccgaggaggcgcctagagcgagtgagggctgggagggcgccagcacgctgtcacctctcacctctatctgtaaaacggaggcctctggacctgtgatgggaagggctgccgtgaaggtctctggcataccctggagacattttcctcatctttatctgagaccacctaaacctgactttactgtccatatcactatcagtattttggggactattctaaggcagcatgtttctgtcgggcctgatcggaggtgtcctgtacaaccaaatgactgttcacaactttgcattgagctcactcccttcaggacctcttataaggcaagtctgttggtaaggaattccattagcatttgcttccctgaaaagggtgttatgtctccttcacttatgaagcttagtttggtgggatatgaaattcttggttggaatttcttttctttgacaatgctgagtacaagcccccaatctcttctggcctgtcagatgtctgctgaatggtccactggtagcctaatggggtagcctttgtaggtgacctgcctcttctctccagctgactttaatattttttctttcatttcaaacttggagaatctgacaaccaggtgtct

SEQ ID NO: 478456 - DNA, 851 bp, Homo sapiens
cagcctaagaaagggacaaattccctatcggtcagcaagccatccccagtatggatacccagtgggacctcaactcagatcatggggactggagtcacaaacgtctgttgacctgtgttctagaaggactaaggagaattaggaaaaagcccatgaattatacaatgatgtctaccataattcagggaaaggaagaaaatcccaccttccttgagcggctacaggaggccttaagaaaatatagttccctgtcaccccactcactcaagggtcaattgatcctgaaatataagtttattacccaatcagccacagatatcaggagaaagctccaaaagcaagccctaggccctgaacaaaatgtggaggtgttattaaacctggcaaccttggtgttctataatagggaccaagaggaacaggccataaaggaaaagcaagatcagagaaaggttgcagccttagtcatggccctcagacaaacaaaccttggtggttcagagaggacagaaaatggagcaggccaatcacccagtaaggcttatcaatgtggtttgcaaggacactttaaaaaagattgtccaacaagaaacaagctgccccctcacccacgtccactatgccgaggcaatcactggaaggtgcactgccccagaggacaaaggctctctggaccagaagcccccaacagatgatccaacagggtgcccatggcaagtgccagctcatgtcatcaccctcactgagacctgggtatgtttaaccattgagggccaggaaattgacttcctcctggacactggtgtagctttctcagtgttaatctcctgtcccagagagctgtcctcacc

SEQ ID NO: 478457 - DNA, 1137 bp, Homo sapiens
ctgacttggtacagaagacagcaaaggtgatcaggtgtgtatcaaggattggaaagtagcccccttgtggccatggtggaaaggaccccagaccatcgtcttgaccactcccacagctataaaggacaaaagttgtataagagcaggacagggacagtcatctggtggggtctcaaccgcactgaaaataatccattcaataaatttcccaagttacagactgtttgggcccatccagaatctcaccgacactggacagctcccactggactatactggatatgtgggcatagagcctacaccaaattacctgaccaatgggaaattgaaaagattatgagtggacctccaaaaggatcatacagtactataggcctgccacatgggcacaagacagctcaggggataccaaacccccatctacatgctcaactggatcatacggttaaggctgtcttagaaataatcactagtgaaactggcagagctttgactcatttggcccggcaggaaacccaaatgagaaatgccatcgatcagaagagactggccttagactatttgctagcagctgaaggacgagtctgtgaaaaattcaacttgaccaattgctgtctgcaaatagatgatcaaggacaagtagtcaaatatatagttagagacatgacaaagctggcacatgtgcccataaggtttgccataggtttgatcctggatccctgtttggaaaatggtttccagctctaggaggatttaaaactcctatactacgaataataatagtgttaggaacctgcatgttactcccttgtatattaccctgtaagagtagtttacaccctacagttatgatatcataataataacttttgttttactgtgtacttactgttaccagtgcattttctaccttcagtccattaagtcttagatttgcccttttgaggctattttctagatcctgtagcgtgcttccttgttttttactcttttttcttttgtctcctctgactatttcaaatagcatgtcttcaaactcactaattctttcttctgcttgatccattctgctattaaaggactctgatacattcttcggtatgtgtgttgcattgttttaaaattatactttaagtt

SEQ ID NO: 478458 - DNA, 1662 bp, Homo sapiens
atctataatcccagcgcttttggaggcagaggcggatgatcatctgagtgagccaagatcatgccattgcactccagcctgcccaacaagagtgaaactctgtcaaaggaagaagaagaagaagaagaagaagaagaagaagaagaagaagaagaagaagaagaagaagaagaagaagaagaagaagaagaagaagaaggaggaggaggaggaagtagtggtggaggaggaggaggaggaggaggaggaaagaaggaagaagaagaaggagaaggagaaggagaagaaagaagaagaaagaagaagaagaaagattatgcaccgagggaaaatgatttggggctgcttttcattaaacagaaaagccttaccgaggacgcccatacccttactatctgcctaagtgatttcttcttaactcctgtagcagtagagaatggcaacatctgctggagtcgccaaaactgggaagaaggtatggtgagacacccaagctggcagagtgaagaatgcaggaaccggaacagtcaaggactggaggtgggaattgaacaatgagatcacatggacacaggaaggggaatatcacactctggggactgttgtggggtggggggaggggggagggatagcactgggagatatacctaatgctagatgatgagttagtgggtgcagcgcaccagcatggcacatgtatacatatgtaactaacctgcacaatgtgcacatgtaccctaaaacttaaagtataataataataataataataataaaagaaagaaattacagtaggtcttgcttgaagtttattttcttttttaaagaaacaactgcttctttcatcgatttttaaactttttctgtttttcattttattaatatatactttttatttcctcacctttatactttcatattaatatatgtttacatcatttttctaagttattgagatagaagcttaaattattgatttgagactagttttctttactaatttcagcattttagtgctataaatttcccctttggttgtgttctacaaagtttgatatattgtatatttattttcattcagttcaatgcatttaaataatttctttgaaattatttttgatccatggattacttgtaagtgtgtttactttccaagtgttttaatattttcctgttatatacctgttactgattcttagtttgagtccattgtggtcagagattaaactctgtatgaatttgattattttttcaggttgaggcttgttttatattccaggatatggtctatgttgttatatgtttcataagtgcataaaataatgtatatcctgcagttatttgacagagtattccataaattttgactaaattctgttgttgatggggtggttgggtttttctatactttcaatgtctaatttttcagtcaattactgaaggaaggtctccaaatataattgttaatttgtttttttctttcggttttatgagtttatgcatcacacattttgcatctctgctgtttggtgcatatatgttaggattggtatgttttcttggtggaatgaatcttttaccattgtataatatccttctcacttcctggcaaggaacttttctttgctaagaactatacttcatatgatattaatatagtga

SEQ ID NO: 478459 - DNA, 1521 bp, Homo sapiens
acctactgacctgtcttctaagttccctcccctcaaccccccaccccccaacaggccctgtaatgtgggcttcaaactatgatatcctttattccacttggtccatttggctgttgatgcttgtgtatgtttcacgaagttctcatgctttgtttttcagctccatcagggctcaggcccagggagatccaaattctgtccctgagcctctggctggagttattggagatcctgcaaggaagcctgactcactgaagaaggataggcagctgccagtcccagtgctggctgctgaccctcccccaaggagctcaaatggcttacacagcaggcaactctcacccctccccctggtaagcttaagcagattcccactgagaggctgtaagaatgcaggttccatggttgggtcgctagaccctggtggcttgggttttgctactgtaatgattgagtcagcaaagtgtccagagacagaatcccagatgctgtttttaatagaatggctagcgtaagaacacttaagatgtacttattttcttagcacatatcaagtatacaatacagtattgttaagcatagtcaccatgctctacattagatctccagaacttattcatgttgctctgttttcaaataaaattatgccacttcaagtataactgacaaatttaaaacatgtgctatgactatattttaaaatacatatgttataaagcccatgatacattgttattatttttgtttaaactgttagttactttttaaagagattgaaaagtttagtaacatcttctatacttacccaaattttgttttatatttatttattatttagtcatcatgcattctgcattcaatcttacccacattttgaatactttattcctttaagtagatccaaacttgtatttgttactattttccttttgccaaaggaaatttctttatcatttcttatagtataggtctgctgtagatacattttctcagcttttgtttgtccaatatatcatattttcatttttgaaagctatttctgctgaatatagaattctgagtagaccattttttctttcagcatttaaatatgttactgtattgtcttctaagttgcatacttctcattagatatcaagtaaaatttttgtctttgtttctttgtacttaatatttcttcttttctgaatgctttaaagacgttctatttatcataggttttcagtaatttgataatgatgtgtgttattgtagttttattttgcttattctatttggagtttattgattgagattctttattcattgcattctaagtgttcatcaaatttgaaaaatgaaatgacattatgttatcatttttttccatcattctactttttcctgctgaaattcccagtacatgtttcttagatcattcaatattgctccacatgtcaatgatctgtacacttttttctttcactttgttgttttcccctgtgtttcattttggataatttctatttctgtattcaaatt

SEQ ID NO: 478460 - DNA, 1047 bp, Homo sapiens
tcccttttttcctgtgtcacacaaccacagtaaatgctcccctggttacccaagccttttgaacctaggggaagatgaattactgccaaggcagaagtgcattggctccgacccttactgtgttctcctgtgattcccccaaacaagtttccctgaatctactccaggatatcacaggactgaaaacaaggtgttggtctgggctgtggttctcatctgatgctcgagaccttctttcaggctcacagggtgtgggcagaattcatttccttcgagttggagctaagttcctagttttcctgctagcttttggcaaggagctgccctcatctcctagaggctgcctgcagttctttgccccccaaggacagaaggggggtactgatccagaccccaagggagggttcttggatctcatgcaagaaggaattcaggctgaaacgaggtgctctgtggacattagttcagacttggaggcttggaatcagttctttgtaactggcttggtctcattcctgaggatgacggagcttcttcccatgaccatgcacagatgacatcagcactcagaatctcattcacaatgaaacccatctgcagggagccacctttaccccgagtatggatttcagctttgcttctatttaatcgtgagtgaccttgagtccattacttggcctctatcattctcagtttcatgatttgaaaaaggaggggtcaaaatgaaaaatcataggtctttttaaaactgagggctaacctgattgggcccgccaatgttaacttttctcccttgttttttagtcacttgcttttagtttattttaaaacccatagacctaaaagtcatgaagctaagcaatatataactaaccttgcactggcttccttataggtaatatctctggtgtataggtcaccacagtaacagttgcttaagttgttttgtgggaacttagagtccatttttgtttagctcgagctggctgagaccttttgactggcctgcattaatctctgatgggtgaccctttgatgtcagagggt

SEQ ID NO: 478461 - DNA, 494 bp, Homo sapiens
aagggggataagggaaaactcctccttgtcaccagaatgatgataggacctcgatttctttttcaagttttcctcttcactccaggggactccactgtgtccacaatgagtgacacagtgagtcacacatgtgcttctgatatgatcctggtcactgcctctgccactcactttacttggctacagatgaccagtcttgcctgcacacatcaacttccgtctgcacaagtctggggcagcaaatactaccttagaggggatctggccatggtcagcttagctaaacccagattgtatatttatcaaaagagtaaggaacatttgaagattaaggaagcatctaatgcagaagaaacttacaacttactactagatgacgttgttctcaggacctggaagcctatccccattgaatgtcaaatagggatctccctagatgtctacaaagcaacctccttgactaactagaggaatgctctgttgtagagcttccc

SEQ ID NO: 478462 - DNA, 1146 bp, Homo sapiens
gtctggtgggaaggatccaactctgccgtctccctcaacttgctgacactgagcagatctatgtgtctctttgctgttgcacagggacgcaggattagtcgtgtacctctcacaattctcagccctgtgctttgcacacagcagatgaccaataagtgtggctatgaagaaggcatggaagacaaggataactcagggaacagagaagatggcagcacagatagtgtcacttggggttttgagaaaggcgatagatattggctgccactcagatcatgtgggataatgatgctagaacaggtttccaccttcattcatatgcaggaggtaccattcaaatatttgatttcaatcagtaacgcattttggcattctgtgaaatgcaatgtgattttagttacatgttatttcatcatgttacaaatgtacattgaaataacaatacagttggattatctgcgatggagtttagatatttccaggaatgttgctgagtgggttgcttaggcaaaggagataagcaagcaatgtgacattcactgaaaataattctcatggaattgattttcacaggcattgactcgaatgctgtgccagctccataagacaccatggaatcatagaggaaacgatctcagttttaaagaggactgactttgtttcgatgctccttaatttccaaacttgttttaactcttctaccagagactgactctgttttatatctcagtccaattgtcccagtgattgttgtgctcacacctttacatcattaataattccatatgactgtggacataccttccattaactattgaagtatttcctaagtagagtagtaagacaaagcccagggtcatgaattgctgaaactctaaagccattgcagtttatcctggataccttttgttctagttcattctttcttggcttttaggtaggtataacttttttctcccatcaaattttacactcagggtagaatccagaattagttaactagactttgatatgagtttgacacgatgttcacagatatcattgacttttagatatgaaaatgattgtaaatatatcctagtccaatctccatgtgttatattgttatatataagaaagctgtgtctcagagataagctttggatt

SEQ ID NO: 478463 - DNA, 760 bp, Homo sapiens
tagttcacgtgtttttgtatcaatggcctcatcgagagttccctatgatcagttgacagaggaagagaaggctaggttcacagatggttctgcacgatatgcaggcaccacccgaaagtggacagctgcagcactgcagcccctttctaggatatccctgaaggacagcggtgaagaggtcttagttacagagggaagaatgctgctaccaagagacacaacaataattgcattaaactggaagttaagattgccacctggacactttgagctcctcctacctttaagtcaacaggctaagaagggaactacagttttggctgtggtgattgacccagactatcaagatgaaatcagtcttctactccataatggaggcaggactacaaatggtccagacccctcaggaatgaaggttttggtcactctaacaggaaaaaatccacgacttgctgagatgcttgctgaaggcaatgggaatacagaatggatagtagaagaaggtagtcatcaataccagctaccactatgtgaccaggtgcagagataaggactgtaattgtcatgagtatttcctccttcttttgttaaaaacatgcttgtgcatgtatacatttatactaagaaaatttgttcatttaattttattttcctttatcatgtgacataagatgtgttgacttcatatcagcatttaagtattgttaactttatgtaatagtatttggttaactttaacttttttgaatatcatggtgag

SEQ ID NO: 478464 - DNA, 592 bp, Homo sapiens
tttctgctagagcccatctgagcagcacagctcaggatcctgtttgtgatgacaattccagcttatagaggctgtgcacaaactgtctttgtgtcctatagttcaccttttgacataaagagccatattccacctcattttaatgctaaaactctgacccaagcaaaggaaaatgccaacagaatgaaaagacaacccatggaatgggagaaaatatctgcatactactcatccaacaggggattaatatccagaatatacaaggaaatcaaacattgcaacagcacaaaaaaccccaatccaattaaaaatgggaaaaatgatctgaacagacatttctcaacagaaggcatacaaatggccaacaaatatataagaaaatgctcaacatcactaatcatcaggaaaatgcaaatcaaaaccacaatgaggaaatgtttccagtttttgcctgttcagtatgatgttgtctgtggatttgtcatagatgacatttctcaaaagaagacatacaaatggccaacaaacatacaaaaaaatgctaaaaatcactaatcatcatggaaatgcaaatcaaaactacaataagata

SEQ ID NO: 478465 - DNA, 683 bp, Homo sapiens
cttaggaactagaatcaaagcaggggcaatagagaacacagacttgccatatatgtacaaagcgaaagcaaactttattgtcaattgtcacctctctggcccctgtgggaaggaaggagagtcccctggtgctgatgcggaatttgcttttcacccctgcaggcagggcccaacacataccgatcccagaggttcagagtttcagccaagagggaactgggagtccatctctccagatgagaagaaagaagaacagcacaggccagagtgtaagggcacacaaagaaatgagtcagcaaaggacagaaggattggccagtggaggaggaggagaactggaagacaagcaaagggagttagaggattggatggccatggatacaaaatgccgggtcagggtcaaggaagatgcagttcaacgaagagtaggattggtgtagctgcaagaagatcgcgagggccttttgccagagcagtttctgtggagtgcagggagagaaggagccaaactgcagtttgtttgaagaaggaaaactgggaggtggacagatggaaaacaagtcaagaagcaagaatttgtaggcttggatggtaagaaaagaaaaggaggtgtaggatcaggggaggactttaagatggacaacatgcttgatcataattttatgatatgaagaaggagccaa

SEQ ID NO: 478466 - DNA, 1282 bp, Homo sapiens
cgcttcactttcttgcccttcgcagaaattgcattttttacaaattgaagctggtaacctaagagctctggtaaagatgtacaaagagatgaatgctgttttcctgcctgctaacaaagaatccattcaacagcccctagatcaaggagtaattttgactttcgagtcttattatttaataaatatattttgtaagtctataagtgccctaggaattgattcctctgatgggcctgggcaaagtgaattgaaaattttgtggaaaggattcacaattatagatgccaaaaagaacactcatggcgcaggacaaagggaagtgaagccggaactgcagccactttttatgcccgtggaaagaccgtattatgctccacctctcaccccagctcctgcaacacaaatgcccagcacaccagggtttgtgagatacaatccatacagtcatctcacctacaacaactacaggcttgaagggaacccaggcaccaacagccaggtcacagcatcctatgctattaccataccaaaacccccaaagccaccagataagctgctgatgccctaccctcctgaagatccagatgattatgacgatggcttttcaatgaagcatacagccaccgcccatttccagagaaaccactgcctcatcagtgaaatccttagtgagagtgtggtgccagacgttcgaggaaatgacaaccaggagaagaggaggaaatacttggaaagcacagattcatttaatgatgaacttaaaagtttgtgtggtctgaaagtagaagtggatatgaagaaaattgcagcacagagcagcattgttcctaaggaaaagcaagcagccagcaaaggcgaggagaagaaagatgacaagaacattccaatggagatggaggaggcacgctttgaagaaatgacagagagccaacagaacagtgaagaaggcacgtttaatcctgaggacaaggagagtgggcaggagtgggtagacagtatggcagaggaaggaaccagtgatagtaacattggatcggacagcaacagcacaatagtgcaggagccaccaaaagatcccataccagaagatgagaaaaaaagagtaaatcttgccttgttttatgtgttgtaaatagttttttaaatgaaaaaatgtttttgattaaaaaaaaaagaacattcatgattaatgggaggaggtcaaaatattctcattaacaggagtctggaagaagttgattccagtcctcatggatgacattgagaggttcaaggcttcaac

SEQ ID NO: 478467 - DNA, 513 bp, Homo sapiens
ggctctttgggaaccatatgagacaattctggttaatgagataaatgcctaatttgctgctggtcagccatcttgtgactatagagtcaaacagggcaaaagccaatccctacgagattctaaaacagacatttagaaaactgatccggcacctcccacctctggacttccgttatgtgagaaaaaataaatacttctttgtcacagaaggcaggtgcaaggttttagtgaccatcgtgtgtacgaagcacactcagttggaacctctccaaggtacctggggaatgggagtgtggcaagggtgtgaggatgggccgtggaagtggagaagcctacatggcatctttagtgtgtcttgggaacctggatattcatccccccatgcctccagatattgctaaggagttgtgctactgtataaatcatcatgtttcacttcaacactttatattctatagtactaggtagcctaacctgcgttctggggctccaacgcaaggccagagcatctac

SEQ ID NO: 478468 - DNA, 1051 bp, Homo sapiens
gaaccacctgtaggccaaatcaagtgcctggtgtcctaccgtcactaccctgaatcactgccgactttacagacacacatctcccacctgctgggacccacaccaaaatgcctggtgccataagcatatctcctgcaagacttcacagtcaaccagaagagggaccgggactcatttttcttttctggactctaataggcccaattaattcagctacaacatgggcccttacaagcctgggacaagcctgggtggaattctatattgagggtaagaaaagggatggaagtagatgttttccagaaggttctgtggactctgggggtgacctgtggacagctgctgctgcccactacctggcagtttggctatgtgatacatgtcagccttacaaggagatcccccttaccctggaatctactttgggggagcagaacttgagcctcaggcaaatcagagacgagggggaaactttgctttttcctccagtggcagggagctctgggctggggaaatgtctttttgaacacaaagttccagttgcattcatccacaggaaaatgtaaagagcttaatttaatgccctctgggagtcatttcgatttaaaagtggtattatagcttgtggctagaagaatgggcttaacggttagtcaccttctgtttgggcatgtcatttaatctctttgaggctgtttcttcatcttaaaatatgagtgagaaggtagtacccaccttacaatgtggacaagattaatttagggaaaacacgtagcacagggcttcacccatggtgctttcattatgttgggtcctggccttgatggcctgggcagtcagagatcctggggaggttacttcagcaacactgcaggccaatgggattcctggctttgtggatctggaagtggagagctatttgctgattattttaatgatctttccctccacattctttgagatcaaaatctttgagcggcatttagggagttgctttagtttatctaggtggttgcttttgaacagaggagaaccttgcagcagcccctgc

SEQ ID NO: 478469 - DNA, 709 bp, Homo sapiens
accacagcagtcatgataataacaatggacaacagtgacaaagtgaggcctccacagccatgtggaactcatgctctgaatttgacttgcaactttcagtaccagcatggaggtgtcgtaagaagcttaaaacacataacccctgcaaagatggaaatgaatatttttcggcaaaagaggaaatagaggggcccacacattgtttgatgatttcagaaaaagatgacatttggactcataaacattataacttgtggaaaatggtgtccaatttctccaccatgatgtcagagccttggtgggagcctcagcgagagagcaggggagagaagtttctaccttttgtctcaaccgggttctacatgcctgatacttgggagctgcagcgacccttgtgggtttatctggcctccaggatgaaggtggatctatgtgtctgaagggatccattctgtccctgccttgttacgagattccagataagtcacatcgcctttctgattctctgaaaagtggagtgtggaataaataacttcccaagttcctttctaatataacactccatggttcctttaataatattgacatgttatgttagtataccattatagagcaataataataatcacttacataatgtcttgtattgttcttagttgtttgcatatattaattcaatgaatccttgcaacaaccctacttttgttgt

SEQ ID NO: 478470 - DNA, 1398 bp, Homo sapiens
gaccagaaaaatggggccaatatcatgattcctcagcagtgcctggagaagaccaggagaggaagcagaagaccctcctcaaagaagcagccttcacctccagacctcccagcgggacttagacaatggggttaggcagtcacatgtctgcacgtggaaactttctgggactgtgcttggatcctggctctgccttttactagccatgtgaccttgggaaaatcacttgacttctccgtgcaggattcctcatctgtaaaaatggtctaagattaggagccacctcaaggttgttgtaggaattaaattaattcatgtttataaagtgctttgaacagcgtttggcacatggtaagtgctatgtggtaagtgctgtctattgattacataaataaaagtgatcaccattagactttccatgcagatgatattatgcatatacatatctcccgcatatgacgtcattggatcgttttgcaatggtggggggtttattcttttcctttttgttttcttcttttttttgtcagatgaagaaactgatgggaagtgaattggtttctgtggtgtggtgtgatgatgctgggataggcactcagatggttgagtctgagtttggctctgatattatatcaactgcatgggcagctgtggtgtggtgtgatgatgctgggataggcactcagatggttgagtctgagtttggctctgatattatatcaactgcatgggcagctgtggtgtggtgtgatgatgctgggataggcactcagatggttgagtctgagtttggctctgatattatatcaactgcatgggcagctgtggtgtggtgtgatgatgctgggataggcactcagatggttgagtctgagtttggctctgatattatatcaaccgcatcattttggggaagacacaatttctcagaattttatttagttgtaaaataaagataatgatattacatgctctgtctaccatctagagtttttgtcaagacaaactgaagtaaaccgtgttagagaaaaatgttacaaaattttaagcgtgaattagacaaaacttaactggaagccaactgccaaagagatctgggaaatgtagttttcagacttccagccccattattatagagggaagttatgggaccatgcttaacaaagctcagttttggcttggggcagttttgtaaagagctacatattactagctattattatgaggctattgttcaagtcttaatggatctgccaaacaatcattttgacttatactctcttctaaattaattagtagtttgactaatcagtgtgatcatttaaggccaacatgccccaagggaaaacgtgtaaataagtttttttgaattattcaaataagagaaaattctatttg

SEQ ID NO: 478471 - DNA, 3260 bp, Homo sapiens
cacttgtcctgccagaggggccctggaaaatgcctgtgctgatctttgaagcctggagctggcttccattgctgcttctgctgctgctgctggagccacagctgcccgaggagcctgctgtcacggcattccctaataaagcactggcacacgaaacaaccaaaaaagagacaacgcccgtgaacccatggcctgtccttgtgaccatcgggaacggtggcactggcaccccctgccttgcgtcaatgctcttcatctttccgggagggcatccacctgggcagttcttggaagacaagaccctgcactgtctctggtggacttcagggtggctgggaaccacagtcagcagccccaggactgttcttattctgagggagatgctgggcctcctgagggcctggcctgaacgactgttgcagaacatgttcacctgggagctgcacactgcctaactgaatgcaacaggagtttcccagatagaaatggccaggtgggtggagctcacacggtaattgacaaccgttatatggcccctaagccttctctttttttcaggctaaacatgcccagttcctctaacaattacatatgtgacatgtctccttctttttgggaaataaatgcaaataaaaatactccaaacctatataggtggcttgattcatattcagaaagtggacacccagggatggctaaaatgggtggttttacctggagctatgacccgaatcagaacacccactccctccaaagtaaccactcttctgatttctgtgcaaatcattccattgcttttcctcatagatttctaatttatatattcatttccaaaccatatggtttgcccattttaaatctatacatgggtgacatcatcctatatgtacacttttgtgccttttttttttttttgctcaatgttatgttaatgtgatttatccatgtttttgcttactggtgtagctagttcattttttactgatccataaagttctgtacattttatatgtatatgtagatgtacttttattgacctgtgcttctttattgattattccatgatataaatgtaccataatttatgtaatgtgttctatcactgatgaacttttgagctgtttccagtttggggcccttatggacagtactgtgatgaatatttatctcagtgtacatgggcttgcatttcactaggatgcatacctaggagcagaatgctgagtaataggtcacatgcatcctcacctttaccaaactggggtccaaaatgcttgtgttacattacaatgccatcagcagagtaggcatgtttccgtggtacacccaaaggtgtgctgtgcagatttcccttccagaaagacttgctgcccaactcagctcctgcagagcctacctccactgcagagcagcctttcccagggtcttgccctgcctgggacagcctgacaatttgttccttttcattgaagtagtattccattgcatacacaaatcacagtttatccattctcttgttgatcggcttttggactgtttccagtttttggtaatgaagaacaaagcttctaagacatacatattcgaattgtcattgtcacggctgtgtggggtggaggtgggaaggcttggccactgtgtaccactgtgggatgattctgatgggcagcactggctccggagtgtggtctatctgggctcctctgcctcttcctgctcctcccctcctttcataggagctgatccctaataaacacttcctacaccaaactctgtctcagagcttgcttcctgggaactcaaactgcaacggttactggactctatccttgccagtgtttgatatcaacagactttaaaaatgtatcgctaatctggtgggtatttaagggtagctcattgtggttttttccttaattaaaaatttaaaaattaaatccttaattaaatattttaagcctttacaattattgaggtatagacgaaaaacagtaaaataatcccccttttgaagtgcacagttggatgagttttgacaactgtatgctgtcatacagtcaccaccataatcagatgcatttatatcgcccaaaaagttccttcatgcctctttgcagtcagtcccctgctcctgtcactgatctgctttctgtcactatagctttgccttttcttccggtggaaccaactagaacacactcttttgtgtcttgtttctttcacttagtggactgcttttgagatgcatccatattgctgcatggattggcagtttgttccttttcattgcagagttgtatttcattgcatacacaaatcagtttatccattctcttgttgttgggcttttggaatgattccagttttgggtaatgatgaacaaagcttctaaagcatacatttctgactgctttttgttgatcttcagtacttccaaatagttgtttaaaaaatatacatattatacatattatctgtgagagtgttagttcaatacagattactctgtcttatcatagagtggtacttagtatatctgtctatctatcttgaaatgtttttacaaattcaaataattcacttgtagattcttctagatttttaatgtgtacaattatattattggtgtataatgacagtattatttcttctttttcattcaatatcccttttatttctgtgttttgtcttactgcatggactggcatctctagtaaagggttgagaagaaatggagcactagaagtattttttaaaaatatatgaatggatattaaattatatcaagcttttttcttcatgtattgaaatgttcaaatgttgttttctctaatatcttagtatgtaagattacaacaatttatttactaacgtaatcaactttacattcttgcaataaatccaatttggtaagatttattatccttttttatatattgctgcattcattttgctagtattttgtttacgatttttgcatctatgtttatgagtgggattagaatatctatccttgttgagtttgatataaagtttttgtaagacatatttgtactggttattaggctcttgcttttattcttcaagtacatccttgtagcttctgctctgtgctgccagtgctgggagtctgcaaacaatctttctcctttattgtctggcttcttggtggtttctgcagttggcgactctagaaggagatggtagacaggagcgaagaaggtacttctgctctgttatttgcttctgtacttatccat

SEQ ID NO: 478472 - DNA, 912 bp, Homo sapiens
ctgagtgagctgggctgggggtcttgacagggtgaaagggacaggatctgctcagagccaggcctggcacttggagcccatatagaacaggggagtcacccccctggcccccgatttccaccccggtgatgcagtcggggaatcctgtgagcagaggctgcctagagaatgactcattaactctctccatccctctgagcagtaaagtggcgagagaggtctgggaatttcctctggttctggaccatctgtatctggctctgctttttgatgagggcagagcttccaagaaaggaggccagatgaccatggcaggccatgggggaggagagccaggaggccagctcaggtggtgtggatgtgccatgctggagaggaaggcccccaggccaggcgagagagccagggctttggagcaaaaaaggggattccttccttccttccttccttccttccttccttccttccttccttccttccttccttccttcctccctccctccctccctccctctctccctccctccctccctctctccctccctccctctctccctccctccctccattcattcaacaggtgatggatgcttactcaactttaaattctgttggagtctcttgtttccccccctcacccaccatttcaagcaggtccaagtcttggctgttggctgtatgataaaggtctaaagcaagacagtacacacaatgactgaaaccttgctatggcttggaaattcttggaatttaacgtaagagtaaatcataactcttgccattacagtgggaattgatggatgttgaaaacacaagataactgtaacgaattcacatttcttggaggtgtcacatgttttgaagcagtggggctctgaaaaacaaatgctgtcattctgctgaacttcagag

SEQ ID NO: 478473 - DNA, 938 bp, Homo sapiens
tttggctccttgttacttatgcaaatttctgcagctggcttgaatttctccccagaaaatgggtttttctttctgtctaatgaagcttcctcagacacctggtgaagtttctcttacaggaaccttaacttgtgaccaaatagttgaaggagtagtagatggagagttactccttttcgggaagtacggagggcaagaaaagagctcttgctttgaaaattccaggatttttagaagccctgtgccaggaaccgaggacaaagaccatacaaataattattatacaataaagggttcagtaggaacctctgaagagcccaagaaagcaccaggagagagagatccattttttaaacttctgccagtcccagaatgtgagaaagcagctgttaatgaaaatgaatcctacgtgggctgcaagggctgcaaggactgggccctgcagaacagagagaggcgaatgaatgggagggggactgcagagaggagtaagagccgtgcatccaagaatgagatgcagagtcagtctaaatctagacccactcccgagtcacagccatcccatttcacctgtgaacctcattactacagacctggtggtggccctgaggctagcaatagatcccattcactcaggccctgcttgacttcatggagcatccagatcccatctttgacaccgagagaagttaccgaacaaaaggctgctctactccctgctcaggtgcatacaaagcacaacctaagcgggaagctctggaggaagtggcagaagcggtactgccgaaaactagttgtgaaacgggagccacaatgttatgggaatcctgaaactgaggcagctctatttagtgaggaggggagagcttagagctgccaaagcaccatgaggtgactgcagataactctgaccccaaaggtggtagagcagtgggatc

SEQ ID NO: 478474 - DNA, 859 bp, Homo sapiens
tgaggggcactcttctcatgcagctcttgaccaagatttagaggggtatacatgtgccatggtggtttgctgcaccctatcaacctatcatctaggtttgaagcctcgcatgcattaggtatttatcctaatgctctcccttccctttcccccaacccccacaacaggccccggtgtgtggtattcccctccctgtgtccaaatgtcctcattgttcagctcccacttatgaagatgccctgcccagtgaagaggaatctggtgaggcagtctggctacagctgtgttgagttctacccagtccttagcactgtgaggggaaacccacctgctcaagcctcagtaatggtggacacccctgcccacaccaagctcaattgtcccaggttgacttcagactgctgtgctggcagcaagaatttcaagccagtggttcttagcttgctggactccctgggagtgggacccgctgagcgagaccacttggatccctggcttcagccccctttccaggagtgtgaacagtttttgtctcgctggggttccaggtgccactcagttggaaatgcagaaatcacctgccttctgtgttggtctcactgggagttgcagaccggagctgtttatattcggccatcttgccagatccttccatagatttttttttaaagggtacctgcccccatgtttctgctccttggtctttcatttgttatgggacctagcacaaaagttttttgtattaatcagaaatttcacaatgataaaagttacctttcctgttcaattttcaacctaataaatctaaaaaaaaaatttataatgtgttttctctttaaagtgtaaaatcagagaatat

SEQ ID NO: 478475 - DNA, 508 bp, Homo sapiens
tcattttatcagtgtccaggaatgttcaaggacccagtctgggggtcaagtctgctggggaaaacctgccactggctggattatagagtcaacaggacacagaaagaaagcgggggtcctgggggacccaacacagggttacttccttccctatttattctcatccatccaaggaaagcatttttccagtattcccaggaatattggaaattctcaggaaatattggaatattccctgagatttttcttattatccagaaaccacagccagagagtgaagtaagctgcgcaaggtcatcaacagccagtcaacagccagtcaatggccagtcaactcaacagtcagtcaacggcagacagactcaaaaagggaccaataattattttccagtaaccttgtatactcggccagtgctaaatagcagtgatagatacttcctgagaaggcgatagcaggaaagaaggggttttttagctggaagccctaaaagttgtgcaggatgtattc

SEQ ID NO: 478476 - DNA, 595 bp, Homo sapiens
agaagagttgtccctgatgcagattatgagattatggacttcaagcctgacgccttgtttagatgggaattgggagtcctagatgctggagggattgttttacatgtgggggagacattccacgggggcctgaagatggactgtgggagattaaaagaattcaagggcaaactggaggtagaaggcaacaactttactgaagcagcattgttacagctcctgcagaggaggaccaccccatcggtggagagcggcagctcagggcaaacttacacaaagcaaggaaaaataggtccacacaaaaataggaatagaattggtgctgatgcctggtttgttctagcgacaagttacattcactcttggatacatgatctaattgaaacaaccgtatcatttgtaattggactttgctttgtttgcttcataatttttaaatgctaaaaccaatgtgtaaccttcatatattaatttactaatttgcctgtaacttctgctttcctgaaatttatccctccctttaaaaacccttacctgtgattcatctgggaattctggactgaagctttagctgctagattctccttgcttggca

SEQ ID NO: 478477 - DNA, 1051 bp, Homo sapiens
aaactcagtaagctttaggtgactgagggaaaaatgaatgaggggcaagggatcccacgtgtgcggttctaactggggaaaacgtcaggctggcaggagcagggggaagcaaggagagacagcagagaaactataggtctacctttctttacggcgcaggacatatggccctcctgcgcagatagcggacataactcacaaacttcctgctcaccatcacgcacctcagttgatcagacaccccggctgaaagaagaataaatgatattccaaagtttatcttcaactatggctgaacgttcaactgtgtgtttgcacatacactttgtatacagcttcccacgtagtttcctgtgcagcctgcttcctgtacagccaggcttcccatacggcctgcagaactctacccaagacctggaaaccacacttcaagttgcctcacctttctggattaaaccaatgcacatctcacacctattaattgatgtctcatgtctccctaaaatgtatgaaaccaagctctgctctgaccaccttgggcacatgtcatcaggacctcctgaggctgtgtcatttatttcgaaagtggagaggccggagtggaatccagggctatttgattccacattccagggtcttctcatgagcctctcttcctcccagtacagtgtgcagcacagccagctggaggctctcagccctggggcatttttcaccctggttcttaagatggatgaacattctctactgtttcctgtgttcctgattacatacagaacgctataaaagccacatgttttttgctggcaacactcaccagttttaagcattttcaaaaccacagaaatgtgtaaagaacaggacaaaacaggtgcatgaatccagcgcaggagggggagatgagacagggctttgggacgtgggaaatgtctctttgttagtaagaaaatgggtagcttttaatttctccttgactctgaatgtctccaaattttctgaccagttagtgttaacaaatgggtgagtaggtgataaagtgaataaagtttcc

SEQ ID NO: 478478 - DNA, 1087 bp, Homo sapiens
aaaccatagcacatcacctcagtcacgtgaagcagtcttcctcccccaaacccacaatccttgtctaatcatgagtaaaacatcagaagaggctgaaattgatgagaatgtaatgaattctgagatgcaaatgaaaattgagactttgatacctgctccacctcatgttggtagagcagccagtatagctcagaagagtaaagactcttctaaacaagcacacagtgacagaaacagcccccaaagaataagaagttggaggaaatcaaaacgggcttgtttagcaataactgaaaactggacatcatggggccacatctttcatccccaactggatggaaactttcaaactggcttcatgatatctcactcaggaataaagctctcttcaggaagatgcagaattctctatcctgtgttccgaggcctcgtgggtgcacaggatggtcatacggtcgagaacaaggtgtgcccagagtccattcagaacacacactgcgtgggttgttgctgcctgctggcaggtgaaggaccccctgggatggccacagaagatgatctctcatctagtcgctggggtccactggtgctcatgctacagattctatctacatcccctgctcttgggcccaatgccctcatcgcccttattgattctacaggcttgagagatggctgttacgcagatgtgccctctgctattccaggcaagaatacttcggatggcttcatggtggaggaagcacgtggaaatgagtgtggatttggttgcgaaagacagaagggtacttcacacccagagaatgacatgaatgagtgtggcagacatggcattgaacagctaatatgcaaagatggcccagagttggaaagatgatgctctgtttacggaaagatttgtgtgggagataagcagtttggaattcttgtgtaggcaaccaggagccatggggatgtttgaaagataaatgtgacgataaaacctgtgtttaaacaaaataattgtcagaaatacatagaaggcctttgaatggggaaaaaagggacacaggaaaatatgtaggaagaaattactgcagtgtgaaat

SEQ ID NO: 478479 - DNA, 710 bp, Homo sapiens
ccttttcagaatcttcaggctgcttcgagcaggattaggggtggcgtgggaacctagagtgggaaggattaagctgaaggaagattttgtggatagatttccacgatgggaaggaaatgagaggttctaagaggcgggctagtggcttatattatagcatagcctgcctttgctggtgtgtggcgattaggcctggtggaactgccatcaataaaccaagtgtgttcagagtgaggaacagggaagaaggaaatacggggaaatgggatgaatgccaggtggatcagagagatacagtcatgggggtcaggtgtggtatcaggaataacatgggagcccggattgaagtctgggccaggaacaatggtaactgtgggagacttaacaaagagacagcagcagctgctgcacggagacatgatggctggcctaaaacagtaaggtcaagttgtatggacaaaaaggctacaggacacaatcccggtccttgtgtaagaattcccactgcacaacctgcactttggctgtgggtaatgaaaaaggttgggatgagtcagagagagctaggttgggggcagtttctaaatctgtcttcaaggaatggaaacagaagtggggaaaggatttagggtctatggggtcagctaggtttctttttgtgagtttaaataacggttttgttaggatggcaaaaccaggtatctaaagtc

SEQ ID NO: 478480 - DNA, 668 bp, Homo sapiens
tttctcatctacagccatttcttagagaatgatgctgtcagagattctctcctacactctctggaagctcacacctacccctctggacctggccaacagcccacagtacaacggtgctgtttctttgttcccaggcagaggatccgcaggtcgagaaataatagacacacacaagatagtgaaagctgggtccagggggatcaccgccttctcgtcctatggtgccaccaatgcactggatataccagcatttattattaagtttagtgaagtcagggttaggccttcacattcactcattgactcacctcgagcaacttccagtcctgcaagctccattcatgatcataaaggtcttgtgcctgttaaaattgcatttcttctaatccagcccggtggcttcagctccgaccatcacgttcacacaggatctcaatgttctggactcgagagattgctgcacgaaaaaacagaatatatggggttcagtattatccatggttactgacgtccagtgggtgccttggaatgtacccctgcagataagaggggatgaccgtatacaatttctatttgtcaattatacttcaataaagctgaaatgttcgtaatgtgttagctctattgaggcatataaataaaactttatgtttggaggacactctgat

SEQ ID NO: 478481 - DNA, 2177 bp, Homo sapiens
cttccgttaccctcactttggcctgtctggttcattgcctgttactgccgagccatggaggtgcgaagaggcttccatgccatcctttcccctgccagcctcctcgatgctggccacccggcctcttcacggtcattagggtcaacattccagccagtggagcaactgccttttcactcacggatcctttgccgtgaggatctaaaggtggccaggagaccctgttcacagcatgtgctttgggccattgtccatgaaagagagaaacaatgtgagtcccagagatctcatcgcaggaggaaaagatcaactccgtggctgtctttgtggtgcccagcaagaaatgatgcctgtaaatgtgactgtgcttttctggggcagtttcctgaaaaggtgcaggtggaatggtgggcagaagtcactcacattttaagccttgggaatgaggaaagtgtgacgagctggttatctactctggagttctcttgtcaatgtcagcaagaggagccaatgcagtcacaggaggactcatataaccggccgccccggctcacaggtaggctccattgtgcctgctcttcaatcggccagacggacgtggctgcttgtacacccagagagcagttcacctggagcttgttagaaattcaaatcgtcagtcccctccctggatttactgaatcaggaactcagtttgatagaccctgcagcaaatctatcccccctcctcacccttctcccggtgaggacccctgcacgccgctgccttccttgcgagcaaggtgtccatccacagcaatttcatgtgctctccactcacagccagagactgtggaaatggagctgaaaccatcagatcacgtgaaacttattcactattatgagaaaaacatgagaaaatccaacccccttgattcaattacctttcatccggtccccccacccatgacatatggaaattattacaattcaagaaaaaaatgcaataaaaattcttattacaaaaaagtgacttctggccctagctacatagtgaacctcctgactctggggaaagccgccccgtggtgtgatcctgttcacaggctggcagcagtgggccaggaaagaagagatgatgaaaaggaaggcatggaaattgcccaatgtattatgtgtcaggaaaatctacaatgaattaatgctcttagaagtctgtaatgccggtgtttaatttaaatgttaaatcagacatttatttaacgttattattttttccagtgtgttcgtgtaggtggatgtttccactttctagttctaaattaagatttacttaaaacccattcagatccatcggttgtacgggacctactcctccccagtcccactctttcaacaattttgtaatcaagctgttttgttctctattattaccttgaatttgacacagtatgagaccagaatgaaaagaaatcaattagcatcagcgaataacatttattttgcatgtttttctagtgtaattgcctttgcaggctatagttataaaagttggttttctctatatcttatgcatcaaatgctgacctataatgtaattttataacctttttctattaacagatttcaatgctaccgttcaatgcttcttttttattttttctaatctattatgccatctattagaattgcattcagggggcctgtaagtggtgagaataccagcttttatacataacattccatttgtgggtgtgtgagtgaaatgtgggcagttcaactttgaaagagaactatttcccttttaaaagtttagactccattaaacaatatggaaacaaaatgaccaatattttctaaaatgatcattgttatttttaaaacattctgtttatttctaaatttcaaaactaaaaaacatgagtgggggtaatatggactgcaggatgatagttcaacaacctgtttttacgatagactatttaattgtgcaagacatgctaattccttgcttcataacaaaagaatctcatggtaataaatttaatatgctattgaaataaaaccagatgttaaaaagcaaaacaaaatagtttttacatgtactgataagggtctgattaaagccaatgtaaataaggtattttactgttaacaaataataagatgcattttattctgacattcactctgtcaga

SEQ ID NO: 478482 - DNA, 1718 bp, Homo sapiens
gggtaccgtgcttattacctggaagggtgtcactcgcgaatggagtaatggcgagagcacacctggacaggggaggggaaggagttcttgttcctgatacagagggaattgatgcaggccaggtaagccccaaaactggggcttttcctgggagggttctcagcttcacccaggaaagaattccagggcaagctggtggtgtcaaacagcaacttgaactgaagcggctgtgcacagaagcagcagagcgatttctccttgcagagcagggctaccccataggcaatgtcccagattctgtgagtcattttattcaactaccaaaaatgaagacgtttatgaagatgtcaacatttgcagccaactggcctgaagtgaaggtgggcctggagacccctgaaattgcagctggggtcagaatcttaggtatatttggcagttcggatgactgtgaattttaagttcaagattggctaaatcctgttagggtctttgatcaaatattaaggtattaactcctagtgcattcctgatgactcaaatgatagagctgataaaagtaagcacagtaaaacttgcatttctgaaaataagtatgactgtaatttttaagcacattgagtgttacaggaaaagagaaatatctggttaatacaacccaaaatagaaagcttaagctgggacagcttttacaatcttttcttttataaaaaacaaaatcaaagcagaaaattttatactaatttcagtagtggtgaaaagctaatttaatgaaatttaatgatctttcagggttaaaacaaacattttccaaaaaatagaaaaaaaatttgttgataagctgcatcaattaaatacctaccagtaatatcaaatttctggttgaaatattgagcactctcttcccaaatcaaaaacattatattgatgtttactttccatataatgtgtggaacttctgctaaacattgaactggtcatcacagctgatgtagtaaggcaaggaaaaagtaaaaggcataaacctgagaaaaagaagaaagctgcagaagatatgatttggtagttgcaaaatccataggaacagtcaaattcccagtggaaattactatatgtaaatgtgatacaatcacaatatgaaaacattgtatgtctatactctagtgacaattagaaaatgaaattttaaaatacatcttacaatgaatcagaaataccaaataccaaatttgacaaaacttgtttacaatctatacattggaaatgaaataagtaattgctaagaattttttacaacacctaaataaatggttttgtcatgtttgtaaattgtaggactgaatattgtacagatatcaattatctacaaataattgtatgaagcttcgggaagccaaaacaaaattccaaaaaaattcataaaaagtacaaaggtgatactgtactgtatatgaaaatgcaaagacctggaacagtcaagacattcttaaagaataaatttgacagatcactaatttcaaaaattaaaataaagcaacagtaatcatgacagtgttacattagtatcaagatagacaagaagatcaatggaaggcaataggaccaatatagatcgacacatataaagtccatcgattttcaacaaatgcattcatgcagttgcaggaggaaaggaaatcatttcagcagacagtgcaagaagagctagaaattcatac

SEQ ID NO: 478483 - DNA, 1029 bp, Homo sapiens
tcctttctcaagagcccagctggcttgaagggagaatgacagtgactgcttatgagcatgggctggacaatgtcaccgaggaggctatttcagctcttgtctatgctgtggagaatcatcctaaagatatactgacatcagttgtgtcaagaaggaaagcttatcggttacgagatgaccattttaaatatgcctttggcacttttactgctccctgtgctggtcagaatccggcttctcacccacctcctgatgaagccgagcagcaggctgcattccttctggcatgctctggagacactctatctgcatctttatctgcagcgaacatgtatgaactttttgaagctctgcgggtacacagggaagtcatacctacacatactgtctatgccgttaacattgaaaggattatcatgaaagtctggcatccaaatcatgaagagctgaagacaaagttcaccaccagtgcttggcaaccaaggaggggcttttgctgtgctaaatgaggatttgaaggtgcgggactctcatcaaattcattgattactgaaaattgaattttagtgggggggtctacatttcaaggctgaagtgtatggtatatatataaccgttcatatggaaatgagacaatgagtaccttttgtgttgctcttgtgaagccactaatataaatctttggtaatgacccatatctctatatgttcttctgtgtataatggagccagggccactctaaataaggcccatagggttagggctgttattgggacccgttgcccttgtggataatgttgtttaagatttctccccacttgttcacagagctttatgtttaacataccttctttcaggacccatggattatggtttacaacagttcgcattagatcccttatatgagcctgcaaaactgaggctccacgagccttaggcagctgtttcaatacttttatatactgtttctgttgagctaatagctgttgtcccatgatgaaactttagcctaaacactcccctccaaaa

SEQ ID NO: 478484 - DNA, 716 bp, Homo sapiens
agcaactcaaccatcagtttctatccccttcccttaggctggaagagcaaatggagtcatacagccattatgacccacatctcactcctcctggccccacgtgttcctctgggccatctgcccctgtgtgtatggtagactccaattttccaggaggctccatgggctgcacacgcggtttgagcttcttcacgctattgtttctctcaggcattttaacaggaaacattctagatcaggagtccccagtgggccacagaccattaccagtttgtagcctgttaggaaccaggccacacaacaggaggtggagacccagcgtgaaggaggctgtgtctgtaaggcagggaaaaaagccttcaccaggaaccagtgctggcaccctgatgtcagacttcaagcctccaaagctggagaggatgggcatctatgaacatgggccctcaccagacaccaaatctgccaccaactggaccttggacctccagcttccaaaacgagcatagaatagcacctttaaatgtattctgggtatacagagagctatttaatgtttcgttaggatttctcaattattctagtttgtgtagacagtcactctacaaatgcatattcatataagcaaatagtgctaatgaatacttatagtcaatatcaagtattgacacagcctggtgtctaaattatctttctggtaaggtacactttatgtaccc

SEQ ID NO: 478485 - DNA, 598 bp, Homo sapiens
gccgccaaagtgggagccgaggcagaggaagcgcctagagcgagcgagggctgtgagggctgccagcacgctgtcacgtctcacttccacttatggaaaagttgctgatccccagattacataagatctgtgcagaggagggagactgggtcctgagcagtcatggggccacagtgaccacagcatcttcctcggattcatcaccagcttctccagcaccattaccaaagcaccactgcaataggccaggcagcagatgccctcctgcaggtgacatgcagatgatgcccttagtcaacggcattgatgtggagaggctgaatgcagagggagataccagcttcccggcgcgtggtcatcaggctgctgtgtgcgtgtgggagaatgtgtatgtgattgttactctaaatccacttcccacagcacagtttcagtcatttgcttatattccttatctctatgaatatccaaattctttaaaaccctccagagttttccagggtgaagtctaagccaaggactacagttgtgtgtctttgtgctgagaagccagataagaagaagcttgtacccactacagggatgctgccttcttttc

SEQ ID NO: 478486 - DNA, 473 bp, Homo sapiens
accaattataaaatcacatcatgcatctccttgaaaaggataccccctttcaaagaggccaatctgtgccaggaagggaagttgaccagagactgggagaggctcataattacctcttgcaaaacgctgcaggaatcctctcatcatgcctgaagagggaaggtgtagcgactgctcaaagcccacacacctgtgagcatcgaccatcagttagcaaggccttctcatatgatttgaaaatgagcattgctgcagaacaaccacttataaaaccatcggatctcatgagaattcactcactaacccgagaacagcatgggggaaaccacccccctgattcaattgcctccacctggtctctcccttggcacgtggggattatgggaattacaattcaagatgagattttcggtggagacacagccaaaaatatcactgcctctttctcatagtggttttcataagctctttgg

SEQ ID NO: 478487 - DNA, 524 bp, Homo sapiens
agagccgcaggctggagtgaggtggtgggactgaaagagctgtgatgagcagagaagagctgtggcccttcagggagcccagacctccaggctccctgagccagggctgtgacatgctggatggctgcagcagaagccacttgcagtatatctggtccagccacagccttgtacagagctggcaccagtgcctggcccaccacagcagccagcatgctggaccccatgctagtttgctcacactccccttaccactctgcacctggcttgtccttggcaggcatgggatccaggctggtagcacaagtgaagcacagtctactggaacaactgctgggcagaatgagcctagtgagtgtgagcaaaactcaagcagaggtgctgccatccatggaagtttctggctggcaaagcaacacatggaggattctgtgacacttgctctggatccccagtggtgactcagctgtgatatttctctgctgactagacttttggagaaggtaactgccattgctgctggt

SEQ ID NO: 478488 - DNA, 531 bp, Homo sapiens
cttgatccttgaacaacatgggtttgaactgggagggtccacttatacacagattatttgccattaatgcagttggccctcggtattggcatgttccgcatctgcaaccaaacctgaggctggaagattccacatttacaggattcaaaacttgcttatacagaggactggctgttcctttcctatcctcaagttccgaaggacctactgtgacacttgagtatgcgtgcactgtggtatgtgcaggtggtcctaaaaccaatcccccaaggatactgagagatgactatactagctttgtgatgatgcacaactctctgtgtgctggtgatatggaaggggggcagggaagtcgtgggaaaggaagggcatggtccccggtgagggctcctccccggcctgtgcccatggacttagaagccatgctgttttcattataggatattcatttttgaattaggctttgtaacaatttttacattgttattaagccctcaggccaacttatttactgtgctgactttattaaac

SEQ ID NO: 478489 - DNA, 735 bp, Homo sapiens
gaggcatttccctgtacaagctctctctttccctgcagccatccatgtaagacgtgacttgctcttccttgccttctgccatgattgttagacttccccagaaattgaccctcttatgcaatagaacaccagaacttattcctcctgtctgtaattttgtaccccctgaccaatctctccccattcccttcaccccttatcctcccccagtctcagtgtgtactcttggcatctttgtagaaaatcagttggctataagtgagtggatttattcctgtgttgtctcttttgtcccactgggcttgcagggaggagggagcagacggagacaatgtggcctgaaggctactcctgctttacagagaacgaatatttatcaggtcacctcctccaaccatcacaaaggtcacagtgactatgcccatcttcccccatcctggcccgattttgtccacctgtcaatcctcatctcccatccttctctccagtcaagccacatgtcaaccaaccataaacaacttagagattccccagatccactgcacgccctctcacctggcatgttgtccatgtccttctgtctacctggaaggctgttcctcccctctatctggcaagcgtgcacacttcctgaggactcagctccgatgtcacttctgcaggaagtgatccctgcaatcctgggctgtgatcaagaaggctttggccactgggatgactttgaggcctagaacc

SEQ ID NO: 478490 - DNA, 2449 bp, Homo sapiens
gcagacacagcttttccagtctgcaaaaggttcccaaatggccttgggggaagaaagatcaaatctaagatgctaccagtaaaatggaacatcaccggaattccgtactacaccgtgggccagctccttagagcctgcctgggccctgagcgagttctcacaagagctgatggtttttataaggggcattccctgcccagtgcccccgccccaccaccttcgctctgcgttattttcctgccatcatgtgaagaaggacatatttacttccccttctgccatgactgtaagtttcctgaggcttgcccagacatgcggaactgtgaatcaattaaacatctttcctttataaattacccagtctcgagcagttctttattgcattgtgagaatggactaatacaggtgggttgggattttcctttacttgttcggatcattgggaaatttttgattaccaaaaggctaaattatgatgtcatatgtggccttggaacagattatctgggccttgccctgtttccactaactgctgtttctctaactttgtggaaaatgctaagacagttaccaattcttcttggtccattttgaagatttgctaaacctctaaaagccttgtgagaccccttcagccactgcggagctttttaatggagaacaggaaaggatcgtaactaggccacaggggggtattttagtccgagagcaggctggttttatgaaagtccaggctcccagcagcttttgtgaatattaacgtataaaccagggcagaaagtggcgtcagcagtgccctgagcaggaaagactgtggctttatgtagcagaggcatgtccaggtcagcagcagggacctgaattccaggactctcagctctgcctggaacttgtgagatcttgggtcaagctctcaatccgtgtgggcctggttttttgttttaaattcttctaatactacctctcctgttggtgaacgagggaaatggacatgaatgtctgtgaaagaacttatcataggtaagctgttctgagtggcgctccatcagccatctttactggctgtttgtggttttccaacaaaacatcatagcttatgtggttaagcagtgtcgtgttcacagcaggaatgcaaccagcatttggtggaattgtactgctgaatatttataactgaaaacctcaaagaagagtccacctcacagatgtcacccttattgcttgcattccaactatttaagagctaacccgttttggtcacgccctgagagccgactgctgccaccacgaccccataccttcctcacaccccaccatactaccattcccctccctgcccccagttttccaggattcttagttgggggaacccttccctggctctgtggtggacttaacgtccatcccacctcaccggtccagggacttcactgtcagtagtagcacgccctcctcccctagcatgtcaaagttttagggaaatggaaagtcacacacttactatttagctcaacccccttgggtgacagtgctccaaaaagcaacatctcctacggaaagcaatatgaatactgtaacaattcacaaatcaaggctacaaaactttgcttccaaatttgcactccagctttcaactaatttagaattcaaaataaggtttgcaaaatgtctatcatttcacattttctgtagttaacgaaaaatttaactttcatgatgggtcttgtcatcacttgtactctatgtctgtcagggaccaaaggggaccccagaggatactgtccaagggtaacagaagagttagaataatccaggtcaaaggcaggcagggtagactacttaataagctttcttcacagatatttttagacctgcttttgaatatattgtatcatttatggagcagctactatgtttctagcatcaactggttatgtttacatattatgatattcaacactctcaaaaccttaggaaataatagtaactactatttatcactcaccgactatgtgtcatgaattcagcgttcattactgccaatcctcacaaagcccctgtcttcctcagggccagaaacccaagtcagagttgactatttgccactggtcctcagagtaaacatgatcaatattccaactttacacatgagtaaactgaggtctggagagatttggcgacttgtctcccagtttgacctggaaggaaaacttaccgaggtcatggccgttggtagagtaggaagtgaacaggctgggctcctctggggtcaatgcacaacttccttgtgttcttggacaagtttctaagtgtccaagtttctgcagcagatggcaggaagtgcaaggggtcgaggaactccctcccgtagccaagggaagccatgagggattgtgccatgagggacggtgctatctggcccagatactacggttttcccatggtcttc

SEQ ID NO: 478491 - DNA, 782 bp, Homo sapiens
aatgggccttataggtgtgaaattttgcccataatgacctcaaggcaaaacacagcagaatccaccagcaattctttctctcctttccccagaagagatatgaggactcaggctttgagatgcactggggtcagaggagtgcagacagacagcgcttactcagagggggacgggatgaggaacaatactcctaaaagaaggtggctgcatttccaccgagaagcggacaagttccaggcagacaccacaatgaacatccaccaagagaaacccgatttaacacaacagtggatgccatggcactgtgataattacagttgcttctgcaagctatttatatgccttcctccctggttacatttctggaatcttggaaacagagacaatgcctttgttatggtcctttctcctatgctagcagagtctggggcacacgaggctgtgaatagtgcctgaataaatgaatgaacaaagaaaaccctccagggctcctttaccaagtaccagctcatagaaacagctaaagaaaaatctattaaagtcatttatttacaatcatagaaattttagagctagaggaaaattcaaggtaatctggtcccaaactgttagttcacaggagaggaagctagatctacaattacacaattataccatcactgtggtgtgcaaactgtccccaagactgtcatcttaataatgcatgtcatttgctgttggaaaaaaaaaatacattgaatatttaggtgaggccccaagctacacataccatgatcacattc

SEQ ID NO: 478492 - DNA, 1172 bp, Homo sapiens
aggaaccaggatccctaagtcaaacacaaaaagacaaatatggaaataaaactcatacctctcttccagtccagatatctaagtctgctgttgctccctgaagctccccagccaacagggcaactggaggaaaatgggaacaggaagaacaagtccagtggattccagaatttcattccagaagatgggggacttctctgctcagctgatgaagttccaggagcttttaatgaattaaaacggcatttgtctgaagaagccagtgaagttaccgactggtttgaaaataattatgtgcacagtaggataagaagacacttacacaacagtgacagacacacacagatgaaagaccctgtggagacacggagaagatggccatttataagccaagaaaataaagaggcttcagaagaaaccagccctgttgacaccttgatcttgggcttcttgtctccagaattttgtgaggatggaagtgacaacttccaagctgttcatatgtcagaccaaaaactgaagttgcatcagtgtgtccattatagtacttttaaggcaccagagagagtaaatcgattggaacacagtgatataagctgcttttaacactaaatgtgcacagtaactataccttatttgatttttagacttttctttaaagtgcatactttatatccacaagaaaaaaattaaaatattatcggtttcatacttcaaagatggctggggatagataaaccctatccaagtttgaatctaggcttctcctcaaactgcctttgggtcgatgagtacattgtagtatgcttgacacaaaatcagtatctgtcatacactcttaggcaaatgataattttctactgaaaactatttccttagtgatagtaaatctccaactactgttgacagatccaatttttgcaaagtgccaaaaagcctaaaacatgtagggaagaataattcagcttcacaggtattattgagcagcttgcttgtttgctctcagatttgcccctctcccattctttttcttgcaaacaggttctctatgtttgactttatgagtcaagttcagccaaagggaagtctgttaggagataggagaataggaagtgtgtaattgacattgttagtgcctcactcagattcctagggtcccttttcagttcagc

SEQ ID NO: 478493 - DNA, 8740 bp, Homo sapiens
tcgaatgggatggaattgactcgaatggaatggactggaatggaacggactcgaatggaatggactggaatggaatggattgaacggaatggactggagaggaatggactcgaatggaaaggaaacgagtggaatggaatggagtggaatggcttgaaatggataagaaatgaaaagaatgtaatggaatcggatggaatggaattgaatgtattggagtcgagtagaacagaattgaatggaatggcatcaaatggaatggaaacgaaaggaatggaattgaatggactcaaattggaatgtaatggaatggaatggaatggaattgaaatgaatggaatggaatcgaatggaatggactggaatggaatggattcgaatggaatcgaatggaacaatatggaatggtaccgaatggaatggaatactaatggaatagaatcaaatggaatggcatcgaatggaatggactcgaatggaatgtgctcgaatggaatggaatcgaatggattgatatcaaatggaatggaatggaagggaatggaatggaatggaattgaaccaaatgtaatggacttcaatggaatggaaacatatagaatggactcaaaagcaatgaatggaatggatcgttatggaaagacatcgaatgggatggaattgactcgaatggaatggactggaatggaacggactcgaatggaatggactggaatggaatggattgaacggaatggactggagaggaatggactcgaatggaaaggaaacgagtggaatggaatggagtggaatggcttgaaatggataagaaatgaaaagaatgtaatggaatcggatggaatggaattgaatgtattggagtcgagtagaacagaattgaatggaatggcatcaaatggaatggaaacgaaaggaatggaattgaatggactcaaattggaatggaatggaatggaatggaatggaattgaaatgaatggaatggaatcgaatggaatggactggaatggaatggattcgaatggaatcgaatggaacaatatggaatggtaccgaatggaatggaatgtaatggaacggaatggaatggaacagaatggaatggaactgaatggaatggaatggaatggaatggaaatggaatgcaatgaaatggaacgaagtggaatcgagtggaatggaatcgaatggagtgaaatggaatggaatggacgcgaaagaatggactggaacaaaatgaaatcgaacgtggaatggaatggaatggaatggaatggaattgaaatgaatggaatggaatcgaatggaatggactggaatggaatggattcgaatggaatcgaatggaacaatatggaatggtaccgaatggaatggaatgtaatggaacggaatggaatggaacagaatggaatggaactgaatggaatggaatggaatggagtggactcaaatggaatgaaaccgagtggaatggaatcaaatggaatggaattgaatggaaatgaaatggaatggaatgcagtggacacaaatggaatggactggaatggaatggacacgaatggaatggactggagtggaatggacacgaatggaatggaatggaatggaatggaatggaatggaatggaatggaatgaaatggaatggaaaggaatagaatggaatggaatcaaatcaaatgaaatggcatcgaatggaatggactcgaatggaatgtgctcgaatggaatggaatcgaatggattgatatcaactggaatggaatggaagggaatggaatggaatggaattgaaccgaatggaatggaatttaaccaaataatggaatgcaatgaaatggaacgaagtggaatcgagtggaatggaatcgaatggagtgaaatggaatggaatggacgcgaaagaatggactggaacaaaatgaaatcgaatgtggaatgtaatggaatggaatggaatggaattgaaatgaatggaatggaatcgaacggaatggactggaatggaatggattcgaatggaatcgaatggaacaatatggaatggtaccgaatggaatggaatgtaatggaacggaatggaatggaacagaatggaatggaactgaatggaatggaatggaatggagtggactcaaatggaatgaaaccgagtggaatggaatcaaatggaatggaattgaatggaaatgaaaaatcaaatggaatggcatcgaatggaatggactcgaatggaatgtgctcgaatggaatggaattgaatggattgatatcaactggaatggaatggaagggaatggaatggaatggaattgaaccgaatggaatggaattgaaccaaataatggaatggaaggcaatagagttgaatagaatggaatgcaatgaaatggaacgaagtggaatcgagtggaatggaatcaaatggagtgaaatggaatggaatggacgcgaaagaatggactggaacaaaatgaaatcgaacgaatggaatggactggaatggaatggattcgaatggaatcgaatggaacaatatggaatggtaccgaatggaatggaatgtaatggaacggaatggaatggaacagaatggaatggaactgaatggaatggaatggaatggaatggagtggactcaaatggaatgaaaccgagtggaatggaatcaaatggaatggaattgaatggaaatgaaaaatcaaatggaatggcatcgaatggaatggactcgaatggaatgtgctcgaatggaatggaatcgaatggattgatatcaaatggaatggaatggaagggaatggaatggaatggaattgaaccaaatgtaatggacttgaatggaatggaatcatatagaatggactcaaaagcaatgaatggaatggatcgttatggaaagacatcgaatggaatggaattgactcgaatggaatggactggaatggaacggactcgaatggaatggactggaatggaatggattgaacggaatggactggagaggaatggactcgaatggaaaggaaacgagtggaatggaatggagtggaatggcttgaaatggataagaaatgaaaagaatgtaatggaatcggatggaatggaattgaatgtattggagtcgagtagaacagaattgaatggaatggcatcaaatggaatggaaacgaaaggaatggaattgaatggactcaaattggaatgtaatggaatggaatggaatggaattgaaatgaatggaatggaatcgaatggaatggactggaatggaatggattcgaatggaatcgaatggaacaatatggaatggtaccgaatggaatggaataatcaaatggaatggcatcgaatggaatggactcaaatggaatgtgctcgaatggaatggatcgaatggattgatatcaaatggaatggaatggaagggaatggaatggaatggaatggaattgaaccaaatgtaatggacttgaatggaatggaatcatatagaatggactcaaaagcaatgaatggaatggatcgttatggaaagacatcgaatgggatggaattgactcgaatggaatggactggaatggaacggactcgaatggaatggactggaatggaatggattgaacggaatggactggagaggaatggactcgaatggaaaggaaacgagtggaatggaatggagtggaatggcttgaaatggataagaaatgaaaagaattatggaatggaatcgaatggaatggaatcgaagggattggaacgaaatcgaatggaacggaatagaatagactcgaatgtaatggattgctatgtaattgattcgaatggaatgcaatcgaatggaatgcactccaatggaatggaatgcaatgcaatggaatggaatcgaatggaatgcagtggaagggaatggagtggaatcaagtggaatggaatggaatggaatggaattgaaaggaatggaatggaatcgaatggaatggactggaatggaatggattcgaatggaatcgaatggaacaatatggaatggtaccgaatggaatggaatgcaatggaacggaatggaatggaacagaatggaatggaactgaatggaatggaatggaatggagtggactcaaatggaatgaaaccgagtggagtggaatcaaatggaatggaattgaatggaaatgaaagtaatagaatggaatggagtaatggaatggatcgttatggaaagacatcgaatggaatggaattgattcgaatggaatggactggaatggaacggactcgaatggaatggactggaatggaatggattgaacggaatggactggagaggaatggactcgaatggaaaggaaacgagtggaatggaatggagtggaatggcttgaaatggataagaaatgaaaagaatgtaatggaatcggatggaatggaattgaagggaaatgaaagtaatagaacggaatggagtaatggaatggatcgttatggaaagacatcgaatgggatggaattgactcgaatggaatggactggaatggaacggactcgaatggaatggactggaatggaatggattgaacggaatggactggagaggaatggactcgaatggaaaggaaacgagtggaatggaatggagtggaatggcttgaaatggataagaaatgaaaagaatgtaatggaatcggatggaatggaattgaatgtattggaaatagactcgaatgtaatggattgctatgtaattgattcgaatggaatggaatcgaatggaatgcagtccaatggaatggaatgcaatgcaatggaatggaatcgaatggaatgcagtggaagggaatggagtggaatcaagtggaatggaatggaatggaatggaattgaaaggaatggaatggaatcgaatggaatggactggaatggaatggattcgaatggaatcgaatggaacaatatggaatggtaccgaatggaatggaatgcaatggaacggaatggaatggaacagaatggaatggaactgaatggaatggaatggaatggaatggaatggagtggactcaaatggaatgaaaccgagtggatggaatggaatgcagtggacacaaatggaatggactggaatggaatggacacgaatggaatggactggagtggaatggacacgaatggaatggaagcgaatggaatggaatggaatgaaatgaagtggaatgaatcaaatggaatggaatcgaatggaatggactcgaatggaatgtgctcgaatggaatggaatcgaatggattgatatcaactggaatggaatggaagggaatggaatggaatggaattgaaccaaatgtaatggacttgaatggaatggaatcatatagaatggactcaaaagcaatgaatggaatggatcgttatggaaagacatcgaatgggatggaattgactcgaatggaatggactggaatggaacggactcgaatggaatggactggaatggaatggattgaacggaatggactggagaggaatgcactcgaatggaaaggaaacgagtggaatggaatggagtggaatggcttgaaatggataagaaatgaaaagaatgtaatggaatcggatggaatggaattgaatgtattggaaatagactcgaatgtaatggattgctatgtaattgattcgaatggaatggaatcgaatggaatgcagtccaatggaatggaatgcaatgcaatggaatggaatcgaatggaatgcagtggaagggaatggagtggaatcaagtggaatggaatggaatggaatggaatggaaaggaatggaatggaatcgaatggaatggactggaatggaatggattcgaatggaatcgaatggaacaatatggaatggtaccgaatggaatggaatgcaatggaacggaatggaatggaacagaatagaatggaactgaatggaatggaatggaatggaatggaaatggaatgcaatgaaatggaacgaagtggaatcgagtggaatggaatcgaatggagtgaaatggaatggaatggacgcgaaaggaatggactggaacaaaatgaaatcgaacgaatagactcgaatgtaatggattgctatgtaattgattcgaatggaatggaatcgaatggaatgcagtccaatggaatggaatgcaatgcaatggaatgcagtggaagggaatggagtggaatcaagtggaatggaatggaatggaatggaattgaaaggaatggaatggaatcgaatggaatggactggaatggaatggattcgaatggaatcgaatggaacaatatggaatggtaccgaatggaatggaatgcaatggaacggaatggaatggaacagaatggaatggaacagaatggaatggaatggaatggaatggaaatcaaatggaatggcatcgaatggaatggactcgaatggaatgtgctcgaatggaatggaatcgaatggattgatatcaactggaatggaatggaagggaatggaatggaatggaatggaattgaaccaaatgtaatggacttgaatggaatggaatcatatagaatggactcaaaagcaatgaatggaatggatcgttatggaaagacatcgaatgggatggaattgactcgaatggaatggactggaatggaacggactcgaatggaatggactggaatggaatggattgaacggaatggactggagaggaatggactcgaatggaaaggaaacgagtggaatggaatggagtggaatggcttgaaatggataagaaatgaaaagaattatggaatggaatcgaatggaatggaatcgaatggattggaacgaaatcgaatggaacggaatagaatagactcgaatgtaatggattgctatgtaattgattcgaatggaatggaattgaatggaatgcagtccaatggaatggaatgcaatgcaatggaatggaatcgaatggaatgcagtggaagggaatggagtggaatcaagtggaatggaatggaatggaatggaattgaaaggaatggaatggaatcgaatggaatggactggaatggaatggattcgaatggaatcgaatggaacaatatggaatggtaccgaatggaatggaatgcaatggaacggaatggaatggaacagaatggaatggaactgaatggaatggaatggaatggaatggaatggaaatcaaatggaatggcatcgaatggaatggactcgaatggaatgtgctcgaatggaatggaatcgaatggattgatatcaaatggaatggaatggaagggaatggaatggaatggaattgaaccaaatgtaatggacttgaatggaatggaatcatatagaatggactcaaaagcaatgaatggaatggatcgttatggaaagacatcgaatgggatggaattgactcgaatggaatggactggaatggaacggactcgaatggaatggactggaatggaatggattgaacggaatggactggagaggaatggactcgaatggaaaggaaacgagtggaatggaatggagtggaatggcttgaaatggataagaaatgaaaagaaagtaatggaatcggatggaatggaattgaatgtattggagtcgagtagaacagaattgaatggaatggcatcaaatggaatggaaacgaaaggaatggaattgaatggactcaaatggaatggagaggaatcaagtggaatggaatggaatggaattgaaatgaatggaatggaatcgaatggaatggactggaatggaatggattcgaatggaatcgaatggaacaatatggaatggtaccgaatggaatggaatgcaatggaacggaatggaatggaacagaatggaatggaactgaatggaatggaatggaatggagtggactcaaatggaatgaaaccgagtggaatggaatcaaaaggaatggaattgaatggaaatgaaaaatcaaatggaatggcatcgaatggaatggactcaaatggaatgtgctcgaatggaatggaatcgaatggattgatatcaactggaatggaatggaagggaatggaatggaatggaattgaaccaaatgtaatggacttgaatggaatggaatcatatggaatggattcaaaagcaatgaatggaatggatcgttatggaaagacatcgaatggaatggaattgactcgaatggaatggactggaatggaacggactcgaatggaatggactggaatggaatggattgaacggaatggactggagaggaatggactcgaatggaaatatggaatggaatcgaatggaatggaatcgaatggattggaacgaaatcgaatggaacggaatagaatagactcgaatgtaatggattgctatgtaattgattcaaatggaatggaatcgaatggaatgcagtccaatggaatggaatgcaatgcaatggaatggaatcgaatggaatgcagtggaagggaatggagtggaatcaagtggaatggaatggaatggaatggaatggaaaggaatggaatggaatcgaatggaatggactggaatggaatggattcgaatggaatcgaatggaacaatatggaatggaaccgaatggaatggaatgcaatggaacggaatggaatggaacagaatggaatggaacagaatggaatggaatggaatggaatggagtggactcaaatggaatgaaacc

SEQ ID NO: 478494 - DNA, 3822 bp, Homo sapiens
gaaaggaaaggaaacgatatggaatggaatcgaatggaatggaatcgaatggattggaacgaaatcgaatggaacggaatagaatagactcaaatgtaatggattgctatgtaattgattcgaatggaatggaatcgaatggaatgcagtccaatggaatggaatgcaatgcaatggaatggaatcgaatggaatgcagtggaagggaatggagtggaatcaagtggaatggaatggaatggaatggaattgaaaggaatggaatggaatcgaatggaatggactggaatggaatggattcgaatggaatcgaatggaacaatatggaatggtaccgaatggaatggaatgcaatggaacggaatggaatggaacagaatgaaatggaactgaatggaatggaatggaatggaatggaaatcaaatggaatggcatcgaatggaatggactcaaatggaatgtgctcgaatggaatggaatcgaatggattgatatcaactggaatggaatggaagggaatggaatggaatggaatggagtggactcaaatggaatgaaaccgagtggaatggaatcaaatggaatggaattgaatggaaatgaaaaatcaaatggaatggcatcgaatggaatggactcgaatggaatgtgctcgaatggaatggaatcgaatggaatgatatcaactggaatggaatggaagggaatggaatggaatggaattgaaccaaatgtaatggacttgaatggaatggaatcatatagaatggactcaaaagcaatgaatggaatggatcgttatggaaagacatcgaatggaatggaattgactcgaatggaatggactggaatggaatggactcgaatggaatggactggaatggaatggattgaacggaatggactggagaggaatggactcgaatggaaaggaaacgagtggaaaggaatggagtggaatggtttgaaatggataagaaatgaaaagaatgtaatggaatcggatggaatggaattgaatgtattggagaatggaatcgaatggaatggattcgaatggaatcgaatggaacaatatggaatggtaccgaatggaatggaatgcaatggaacggaatggaatggaacagaatggaatggaactgaatggaatggaatggaatggaatggagtggactcaaatggaatgaaaccgagtggaatggaatcaaatggaatggaattgaatggaaatgaaaaatcaaatggaatggcatcgaatggaatggactcgaatggaatgtgctcgaatggaatggaatcgaatggattgatatcaactggaatggaatcgaagggaatggaatggaatggaattgaaccaaatgtaatggacttgaatggaatggaatcatatagaatggactcaaaagcaatgaatggaatggatcgttatgtaaagacatcgaatggaatggaattgactcgaatggaatggactggaatggaacggactcgaatggaatggactggaatggaatggattgaacggaatggactggagaggaatggactcgaatggaaatatggaatggaatcgaatggaatggaatcgaatggattggaacgaaatcgaatggaacggaatagaatagactcgaatgtaatggactgctatgtaattgattcgaatggaatggaatcgaatggaatgcagtccaatggaatggaatgcaatgcaatggaatggaatcgaatggaatgcagtggaagggaatggagtggaatcaagtggaatggaatggaatggaatggaattgaaaggaatggaatggaatcgaatggaatggactggaatggaatggattcgaatggaatcgaatggaacaatatggaatggtaccgaatggaatggaatgcaatggaacggaatggaatggaacagaatggaatggaactgaatggaatggaatggaatggaatggaaatagactcgaatgtaatggactgctatgtaattgattcgaatggaatggaatcgaatggaatgcagtccaatggaatggaatgcaatgcaatggaatggaatcgaatggaatgcagtggaagggaatggagtggaatcaagtggaatggaatggaatggaatggaattgaaaggaatggaatggaatcgaatggaatggactggaatggaatggattcgaatggaatcgaatggaaaaatatggaatggtaccgaatggaatggaatgcaatggaacggaatgaaatggaacagaatggaatggaactgaatggaatggaatggaatggaatggaaacggaaagaaatggaacggaatggaatgcactcgaatggaaaggagtccaatggaagggaatcgaatggaatgaaatagaatggaatggaatcgaaagaaatagaatggaatggatcgttatggaaagacatcgaatggaatggaatggaatggaacggactcgaatggaatggactggaatggaatggattgaacggaatggactggagaggaatggactcgaatggaaaggaaacgagtggaatggaatggagtggaatggcttgaaatggataagaaatgaaaagaatgtaatggaatcggatggaatggaattgaattatggaatggaatcgaatggaatggaatcgaatggattggaacgaaatcgaatggaacggaatagaatagactcgaatgtaatggattgctatgtaattgattcgaatggaatggaatcgaatggaatgcagtccaatggaatggaatgcaatgcaatggaatggaatcgaatggaatgcagtggaagggaatggagtggaatcaagtggaatggaatggaatggaatggaatggaaaggaatggaatggaatcggatggaatggaatggactggaatggaatggattcgaatggaatcgaatggaacaatatggaatgaatcaaatggaatggcatcgaatggaatggactcgaatggaatgtgctcgaatggaatggaatcgaatggattgatatcaactggaatggaagaatggaatgcaatgaaatggaacgaagtggaatcgagtggaatggaatcgaatggagtgaaatggaatggaatggacgcgaaaggaatggactggaacaaaatgaaatcgaacggtaggaatcgtacagaacggaaagaaatggaacggaatggaatgcactcgaatggaaaggaaatagactcgaatgtaatggattgctatgtaattgattcgaatggaatggaatcgaatggaatgcagtccaatggaatggaatgcaatgcaatggaatgcagtggaagggaatggagtggaatcaagtggaatggaatggaatggaatggaatggaatggaaaggaatggaatggaatcgaatggaatggactggaatggaatggattcgaatggaatcgaatggaacaatatggaatgaatggaatgcaatgaaatggaacgaagtggaatcgagtggaatggaatcgaatggagtgaaatggaatggaatggacgcgaaaggaatggactggaacaaaatgaaatcgaacggtaggaatcgtacagaacggaaagaaatggaacggaatggaatgcactcgaatggaaaggagtccaatggaagggaatcgaatggaatgaaatcgaatggaatggaatcgaaaggaatagaatggaatggatggttatggaaagacatcgaatggaatggaattgactcgaatggaatggactggaatggaacggactcgaatggaatggactggaatggaatggattgaacggaatggactggagaggaatggactc

SEQ ID NO: 478495 - DNA, 4082 bp, Homo sapiens
gtacagaacggaaagaaatggaacggaatggaatgcactcgaatggaaaggaaatggaatggatcgttatggaaagacatcgaatggaatggaatggaattgactcgaatggaatggactggaatggaacggactcgaatggaatggactggaatggaatggattgaacggaatggactggagaggaatggactcgaatggaaaggaaacgagtggaatggaatggagtggaatggcttgaaatggataagaaatgaaaagaatgtaatggaatcggatggaatggaattgaatgtattggagtcgagtagaacagaattgaatggaatggcatcaaatggaatggaaacgaaaggaatggaattgaatggactcaaattggaatggaatggaatggaatggaatggaattgaaatgaatggaatggaatggaatggaatggaatggaatggaatggattcgaatggaatggaatggaacaatatggaatggtaccgaatggaatggaatgtaatggaacggaatggaatggaacagaatggaatggaactgaatggaatggaatggaatggagtggactcaaatggaatgaaaccgagtggaatggaatcaaatggaatggaattgaatggaaatgaaagtaacagaatggaatggagtactaatggaatagaatcaaatggaatggcatcgaatggaatggactcgaatggaatgtgctcgaatggaatggaatcgaatggattgatatcaaatggaatggaatggaagggaatggaatggaatggaattgaaccaaataatggaatggatggttatggaaagacatcgaatggaatggaattgactcgaatggaatggactggaatggaacggactcgaatggaatggactggaatggaatggattgaacggaatggactggagaggaatggactcgaatggaaaggaaacgagtggaatggaatggagtggaatggcttgaaatggataagaaatgaaaagaattatggaatggaatcgaatggaatggaatcgaatggattggaacgaaatcgaatggaacggaatagaatagactcgaatgtaatggattgctatgtaattgattcgaatggaatggaatcgaatggaatgcagtccaatggaatggaatgcaatgcaatggaatggaatcgaatggaatgcagtggaagggaatggagtggaatcaagtggaatggaatggaatggaatggaattgaaaggaatggactggaatggaatggattcgaatggaatcgaatggaacaatatggaatggtaccgaatggaatggaatgcaatggaacggaatggaatggaacagaatggaatggaactgaatggaatggaatggaatggaatggaatggaaatggaatgcaatgaaatggaacgaagtggaatcgagtggaatggaatcgaatggagtgaaatggaatggaatggacgcgaaaggaatggactggaacaaaatgaaatcgaacgaatagactcaaatgtaatggattgctatgtaattgattcgaatggaatggaatcgaatggaatgcagtccaatggaatggaatgcaatgcaatggaatggaatcgaatagaatgcagtggaagggaatggagtggaatcaagtggaatggaatggaatggaatggaattgaaaggaatggaatggaatcgaatggaatggactggaatggaatggattcgaatggaatcgaatggaacaatatggaatggtaccgaatggaatggaatgcaatggaacggaatggaatggaacagaatggaatggaactgaatggaatggaatggaatggaatggaaatcaaatggaatggcatcgaatggaatggactcgaatggaatggactcaaattgaatgtgctcgaatggaatggaatcgaatggattgatatcaactggaatggaatggaagggaatggaatggaatggaatggagtggactcaaatggaatgaaaccgagtggaatggaatcaaatggaatggaattgaatggaaatgaaaaatcaaatggaatggcatcgaatggaatggactcgaatggaatgtgctcgaatggaatggaatcgaatggattgatatcaactggaatggaatcgaagggaatggaatggaatggaattgaaccaaatgtaatggacttgaatggaatggaatcatatagaatggactcaaaagcaatgaatggaatggatcgttatggaaagacatcgaatggaatggaattgactcgaatggaatggactggaatggaacggactcgaatggaatgtactggaatggaatggattgaacggaatggactggagaggaatggactcgaatggaaaggaaacgagtggaaaggaatggagtggaatggcttgaaatggataagaaatgaaaagaattatggaatggaatcgaatggaatggaatcgaatggattggaacgaaatcgaatggaacggaatagaatagactcaaatgtaatggattgctatgtaattgattcgaatggaatggaatcgaatggaatgcagtccaatggaatggaatgcaatgcaatggaatggaatcgaatggaatgcagtggaagggaatggagtggaatcaagtggaatggaatggaatggaatggaattgaaaggaatggaatggaatcgaatggaatggactggaatggaatggattcgaatggaatcgaatggaacaatatggaatggtaccgaatggaatggaatgcaatggaacggaatggaatggaacagaatggaatggaactgaatggaatggaatggaatggaatggaatatagaatggaatccaatggaatgcaactgtatggaatggaattgaatggaatggaatcaaatggaatggaccagaatgcagtggactggaataaaatggactcaatagtaatggattgcaatgtaattgattcgatttcgaatggaatcgcatggaataatggaatggatcgttatggaaagacatcgaatgggatggaattgactcgaatggattggactggaatggaacggactcgaatggaatggactggaatggaatggattgaacggaatggactggagaggaatggactcgaatggaaaggaaacgagtggaatggaatggagtggaatggcttgaaatggataagaaatgaaaagaatggaatggagggaatggaatggaatggaattgaaaggaatggaacggaatcgaatggaatggattcgaatggaatcgaatggaacaatatggaatggtaccgaatggaatggaatgcaatggaacggaatggaatggaacagaatggaatggaactgaatggaatggaatggaatggaatggaatggagtggactcaaatggaatgaaaccgatggaatggaatcaaatggaatggaattgaatggaaatgaaagtaatagaatggaatggagtactaatggaatagaatcaaatggaatggcatcgaatggaatggactcaaatggaatgtgctcgaatggaatggaatcgaatggattgatatcaactggaatggaatggaatggaatggaatggaatggaaaatggaatggaattgaaccaaattatggaatggaatcgaatggaatggaatcgaatggattggaacgaaatcgaatggaacggaatagaatagactcgaatgtaatggattgctatgtaattgattcgaatggaatggaatcgaatggaatgcagtccaatggaatggaatgcaatgcaatggaatggaatcgaatggaatgcagtggaagggaatggagtggaatcaagtggaatggaatggaatggaatggaattgaaaggaatggaatggaatcgaatggaatggactggaatggaatggattcgaatggaatcgaatggaacaatatggaatggtaccgaatggaatggaatgcaatggaacggaatggaatggaacagaatggaatggaactgaatggaatggaatggaatggaatggagtggactcaaatggaatgaaaccgagtggaatggaatcaaatggaatggaattc

SEQ ID NO: 478496 - DNA, 3247 bp, Homo sapiens
gaatgggatggaattgactcgaatggaatggactggaatggaacggactcgaatggaatggactggaatggaatggattgaacggaatggactggagaggaatggactcgaatggaaaggaaacgagtggaatggaatggagtggaatggcttgaaatggataagaaatgaaaagaatgaatggaatggaatcgaatggaatggactggaatggaatggattcgaatggaatcgaatggaacaatatggaatggtaccgaatggaatagaatgcaatggaacggaatggaatggaacagaatggaatggaactgaatggaatggaatgaaatggaatggagtggactcaaatggaatgaaaccgagtggaatggaatcaaatggaatggaattgaatggaaatgaaaaatcaaatggaatggcatcgaatggaatggactcgaatggaatgtgctcgaatggaatggaatcgaatggattgatatcaactggaatggaatggaagggaatggaatggaatggaattgaaccaaatgtaatggacttgaatggaatggaaacatatagaatggactcaaaagcaatgaatggaatggatcgttatggaaagacatcgaatgggatggaattgactcgaatggaatggactggaatggaacggactcgaatggaatggactggaatggaatggattgaacggaatggactggagaggaatggactcgaatggaaaggaaacgagtggaatggaatggagtggaatggcttgaaatggataagaaatgaaaagaattatggaatggaatcgaatggaatggaatcgaatggattggaacgaaatcgaatggaacggaatagaatagactcgaatgtaatggattgctatgtaattgattcgaatggaatggaatcgaatggaatgcagtccaatggaatggaatgcaatgcaatggaatggaatcgaatggaatgcagtggaagggaatggagtggaatcaagtggaatggaatggaatggaatggaatggaaaggaatggaatggaatcgaatggaatggactggaatggaatggattcgaatggaatcgaatggaacaatatggaatggtaccgaatggaatggaatgcaatggaacggaatggaatggaacagaatagaatggaactgaatggaatggaatggaatggaatggaatggaatggagtggactcaaatggaatgaaaccgagtggaatggaaccaaatggaatggaattgaatggaaatgaaaaatcaaatggaatggcatcgaatggaatggactcgaatggaatgtgctcgaatggaatggaatcgaatggattgatatcaactggaatggaatggaagggaatggaatggaatggaattgaaccaaataatggaatggatcgttatggaaagacatcgaatggaatggaattgactcgaatggaatggactggaatggaacggactcgaatggaatggactggaatggaatggattgaacggaatggactggagaggaatgcactcgaaaggaaaggaaacgagtggaatggaatggagtggaatggcttgaaatggataagaaatgaaaagaatgtaatggaatcggatgcaatggaattgaattatggaatggaatcgaatggaatggaatcgaatggattggaacgaaatcgaatggaacggaatagaatagactcaaatgtaatggattgctatgtaattgattcgaatggaatggaatcgaatggaatgcagtccaatggaatggaacgcaatgcaatggaatggaatcgaatggaatgcagtggaagggaatggagtggaatcaagtggaatggaatggaatggaatggaattgaaaggaatggaatggaatcgaatggaatggactggaatggaatggattcgaatggaatcgaatggaacaatatggaatggtaccgaatggaatggaatgcaatggaacggaatggaatggaacagaatggaatggaactgaatggaatggaatggaatggaatggaaatggaatgcaatgaaatggaacgaagtggaatcgagtggaatggaatcgaatggagtgaaatggaatggaatggacgcgaaaggaatggactggaacaaaatgaaatcgaacgaatagactcaaatgtaatggattgctatgtaattgattcgaatggaatggaatcgaatggaatgcagtccaatggaatggaatgcaatgcaatggaatggaatcgaatggaatgcagtggaagggaatggagtggaatcaagtggaatggaatggaatggaatggaattgaaaggaatggactggaatggaatggattcgaatggaatcgaatggaacaatatggaatggtaccgaatggaatggaatgcaatggaacggaatggaatggaacagaatggaatggaactgaatggaatggaatggaatggaatggagtggactcaaatggaatgaaaccgagtggaatggaatcaaatggaatggaattgaatggaaatgaaaaatggaatgcaatgaaatggaacgaagtggaatcgagtggaatggaatcaatggatgaaatggaatggaatggacgcgaaagaatggactggaacaaaatgaaatcgaacggtagaatcgtacagaacggaaagaatggaacggaatggaatgcactcgaatggaaaggaaatggaatggatcgttatggaaagacatcgaatgggatggaattgactcgaatggaatggactggaatggaacggactcgaatggaatggactggaatggaatggattgaacggaatggactggagaggaatggactcgaatggaaaggaaacgagtggaatggaatggagtggaatggcttgaaatggataagaaatgaaaagaatgtaatggaatcggatggaatggaattgaatgtattggagtcgagtagaacagaattgaatggaatggcatcaaatggaatggaaacgaaaggaatggaattgaatggactcaaatgttatggaatctaagggaatggactcaaatagaatggactcaaaagaaatggtcttgaatggaacttattcgaatataatgtaatcgaatggaatgcaatagtatggaatggaatcgaatggaatggaatcgaatggactggaatgaaatcgaatggaacggaatagaatagactcgaatgtaatggattgctatgtaattgattcgaatggaatggaatc

SEQ ID NO: 478497 - DNA, 1216 bp, Homo sapiens
aggggctttccatgagagacacagatgacccagcacccactgaggcctcgctgcttctaccctttgcctatctgaacctcccccttagtttctgcctgccagcacagaccgacctgtggcccttccgccacccgtgtgggccctccaccagagacacaggcaccatcggctggatcccaaaagacctgcctgcagcccccatgctgtgtgtgggtgccttccccaagagtcacaagcaccctgggctggagcccgtggctctagccctgacactgggggtgccttgtgggcttctgggaagggagacgcctccctgggactatccagcacccactcagtcctcactgcttctcctttctgcctgcctcaatattcccctgagtttctgcctgcacgtgctggccctcctgcatccccactgcctgcccatggagccatcctagggacacacaggcaaccggggccagagcctggggctccagccaccacctggggggcaccctgggggcttctgggaagggagaggcctccctggaggacacagcactcaaggccttgctgcctctcccctctgcctgcgtcaacatccccatgagtttctcccacctgcacaacccacctgcagcttcacccttgcccatggaggacctcagagagatacagacatacttggccagagcccatggctttagccccgatctgggatgcaccctggtgcttctgggaagaaagaagcctccctgggacaatccagtacccattcaggctaagccacttctcttctctgcctgcctcaacgttcccctgaatttctgcccacccatacaggcccgtctgctttcccatagccacccccgggggccatccatgagaaatacagccaccctgggccttactccattgttctactccaacccgggggatgccccaggggcttctcgaaagggagagaccaccatgggaagacctagcaccttctcaggcctcactgcttctcccctctgcatacctcagcatcctctagagtttctgtctgcccacagaggcctgcctgaggccctgctgccacccgtggaggccctccatgacagacacagtcaccctcggttggagcccatggcactacctagacccggtgggcactctggggcttctgggaagggagaggcctcccactgtgtaaataaaagaaaggtttaactctgaactgaaggca

SEQ ID NO: 478498 - DNA, 1096 bp, Homo sapiens
ccaggaccagcatgggcttgcaactgggctgggattggcgtccgtggccacccacaccatgcccaataggtcgccatgggtctcggcttgggctttgggagttgcggcactctggtcgaccagccaggatggagccagacagccgtcgacaaccgtcgcgaacatcagcaaagcagatccggatggcgtggcagcctgtgaccgcaatacccaaaccgtgagtcgaagtcttctcgaggccgaaaacgcagcccctccacgccaacttcacagaaaccgttccccaaaagtgtctctgcatagactgcgacagaatcaaaagacaaccaatggcgtgtgggtgtttgaagatgcatctcagaaggagaaagaagaaacaggacttggtcgtggatcacctacatttcttggattctatgtgggtttgtcgcagatgcttaatgtgacaaattacacagcttctatcacttcatttgatcagcctcctgttgacttttagccaagtcctgcagggctgcttctcagattttatctttctgcaagacaaagatgttttcacagtctctctctaacttcccccttttgtggctattaatttatacttatatgtttttcaactccttatttttgttttctctttatgaaagctttaacctgtgtgaattttgtaaatatataaatatatcatattatattataaatatatatttatatagatatataaatatatcatgttacattataaatatatatttatatttatataaataaaacaaaatatataaagaaaatataaacagatataaatgtaaaaataaatataaactatatacaaaatataaaatatattttataaaaatataaaaatatgtaaaaataaatataaaaattttaaataaatataaataaaataagttatataaatatttatataaatattagaaatataatattatgaatatatattttttaaataaatgaataggattcatcacctaacttctaaagctacttctctagatgaaattccaggtactttggagtcagcaatggtatattgagtgcatggctcttgctcacaggtgtttctttcctg

SEQ ID NO: 478499 - DNA, 498 bp, Homo sapiens
ttcttgaatttgttttgctagttgtttgactttggtgttttccagtattcacatcctgcagtgaactgacatcatgcatggaaaaatcaccccttcctatccaaccagtgctagagagaagaatgaaggcaagaatggggaaagaagatttaccaatgcgatgaaatcaggaacagcaacccagtggagctattgggctccaggctggctggggagtgtctgcaaagagtcctatgatgtgatctgtgttcaggtctctcagctgtggatcctagcatctgctctggtggaggcgtatctgagctcagacactccttgggtgaggcttgctgtggctgctgtgggggatggaaatgtggtccccaggccaatggagttatgttcccagggggttatggctgtacctgaggcatcactcaggtcaccagtgaagtggaggagagccggtagccacaggcctcacccagctcccacgcagctcacaccctgaaaggatgg

SEQ ID NO: 478500 - DNA, 956 bp, Homo sapiens
gagacagtgggaaaaaagtaattatgagacaacttctacaagaaccggctgataccctgaaaaaaaacctgtcagagccttccctagaggctacaccacattgtcacattaatttagaagagacacaagattcaaagaaggaattagctactgcattatcaagctgtattatttcattcatgcagtttgatgatctcacagcagaattggaagctgtatctttacaatgtgtctatttggctgaaaacaatcaagttactcaacaggagttatctatgaaaaaagtacaacaggaatgtgaaaaacttgaggaaaataaaaagatgttggaagaaggaatagtaaatcttatgacacatatggaaaaatatggtagaacttgcctgaaggggtgtgtggaagacagaaagaaaaaaccccatctccagtgccttggtcacaatgttaggggctaattgtcttcagagatgctttagttctttttgatcaccaaccaagccatctacttctctactatgagttgttgctcagaattattcatcattgccaaatgcttaattgttcctagataatgggtgaaatgtacaagggtgaaacctgaaactggtttactaagcacaagtatttctagcggtttttttttttggttcattttagatttcttaaatgtatattatttaaggagtacaacaagccgttttgatataactatttatagtgaattggttcttatagtcaaacaacttaacatattcattttgtcacatagttaccctttaaatacaagtatttctaatagaatcttccaaatcttacaagtagagtcattttagaaagcagcaagtgttacctgttcagccccacattactgatagccatttctcttccctctctactttgtttgaattgcttattcagtagaaatcaccctagaaacacatgtacttcttttgaac

SEQ ID NO: 478501 - DNA, 853 bp, Homo sapiens
agccagttcctgctacatctgtagttaagttaatctggaaaagctgtggagctgtgaggagttcagttagttgagagcctccagatgcatcacttggagatttgcccattcattccaagatctctgtccaggacagcctacagccagtgtgagatcacacctgggacaggaaggcctgatcatttctgcccaatttgggactcctctaatgagtgtttgccagttgggttggctgacactgtccaacccgcatcccatctgaagctctgctgttcaattctgtttcatccttcctcttctttcatagatagtggttacagcaggccttgggtgagactcagtactctgctggcttcagatctgacccaacagagtcccagtggtagtggccacaggagtgcttatgtcaccccacccccaattccagtcagcatagaacagagagataggctctgtttgggagaaagtaagggaagagaacaagagtcttggcctggtaattcagagaattcttccaaatcttatttaagaccatcaaggcagtatgtctacaagtttgcaagaaccacagtgttcctggccttgggtgccctctaatgcagatacagcttagattaaaatacccaagtcctttcaaatacctggaaagccttctcaagaaggattaagtacgagcaagcccaaactgccaagactacaatgaatacctaactcgtcaatgccaagacacaggtgaacattcacaagcatcaagaccatccaggaaaacatgaccttaccaagtgaactaaataaggcacattggaccaattctggaggagagacatgtgacatttcagacagaattcaaata

SEQ ID NO: 478502 - DNA, 525 bp, Homo sapiens
caacagcacatggaaaatataatgcaccatgatcaagtggaattcatcccagggatgcaaggatggataaatatacacaactcaataaatgtcatacatcacatcaacagaataaaggacaaaaaacataggattatttcaatagatgcagaaaagctgcatttgataaaatgcaacatttattcacagcaaaagacagtcaacaaattagaaaaacctaaagatcaccaaaacactgttagaagtgataaacaaattcacaatgatatcatacctgaattttgtattcaattttggactgatgactatacaagagaattagcaaatttgtgtttgtcatttttggagtggattgatgagtcatcaaagaactatcatttgaagaaagatgatgaaattgatgatgctgacatcatagctcacttctcttaacatgctgtgcacatgaaaattgccacgattgatcatttttatttactgtacttaagttataggttctctaaagacatctatctcaggtatgtt

SEQ ID NO: 478503 - DNA, 641 bp, Homo sapiens
gcgctttaagagctgtaacactcagcgcgaggaaaaatatcactaaccatgcctggcttcattaacacattggtgtttacaggaagtgaggtatgtccagcactggaatggaagcacaatgcctggtgtaaacagtcaagggaagattaccagctctgtgagtttgcagccaatgtctggatggaactggggttgctatcacacagtggggttgacgtcaataaggaaagccagaacctctgcttctgttcgacactgccttcacccaggatgtcctttaccattaatgtcttctgctgtattttaaatctcatgaaaagttttattgtgtctcacctttacccaacacaacacaaagcagggatatgtggaaaatatcggaaaatcaccagaaacacaattgctttggttattcaggctctttttgactctatatgaattttgtcatagttttttcctaaatctgtgaaaaatgacattgggctgtgacagaaatagtgttgaatttgaagattgctttgggcagcatggccattttaatgatagtgattcttccaatctatgagcatggaatatatttttatttatttgtgtgacctatgatttctttcagcagtgttttgtagttttccttgtggaga

SEQ ID NO: 478504 - DNA, 621 bp, Homo sapiens
attgctaggattttaggagtccatggttggcatctggacagttgagaatacctcacttacctccccactatccatctgcactagggactactcttcttttagcttttattctaggtctagaggcacatgtacctttgttacacagtcaataaaagaaacatcttttgcagatactactactgctaccaaaacaccaggggttttctctgggtccttctactcactccatagaaagccaatcactgagacaatgagtattaccaaggaagaaggctctaattggaagaggcaaaggaggagaaaaggcgcatcttacgtggcatcaggcaagatagcctgtgcagggaaattcccctctataaaaccatcaggtcttgtgaaacctattcactatcataagaacagcacaggaaagacccagtgccatgattcaattacctccttccagattcctcccacaatacatggaaattatggaagctacaactcaagatgagatttgggtggagacacagtcaaataatatcattccgccaccagcccctccaaaatctcatgtcctcacatttcaaaaccaatcatgccttcccaacagtccaacaaaagtcttaactcatttcc

SEQ ID NO: 478505 - DNA, 770 bp, Homo sapiens
gaggggtccttaaggtaggacatgtcaatgcccaccagaagagctctcttccaggtctggaaggtgattgaaatcgacaagcagatatccctgtgtgctcactgggtggccacctgggtgcatgaaatgagaggacatgagggcactgcagcagtgcagagatgggctgaatctaaatatgtttctattgcaccctctcaggcacataatgccaataagaactgttctgtttgccagcaggagagacagaagctgcagatggctatgggccagattccctggtgggaaggtcccaagcacagctggcaagtgaggctgatgctggtagccctggggggctacaaatgggtcttgacaggaatagacgctgactctgggctggcctttgcttacccagtggaagatgcaaatgctcagagtgctgtaaaagaatcagaacagaatatattacacacatttgcacaggctgccgtcatttcttccgaccaaggaacacactaattccctaaaggcctgatagaggcagattgtacctccaccctatctggcaaaactggggctaatagtggatgcagctatattgtctggtagtgaaaccagcccactggttctgcacctgtgtaaccttacccagtctgaatgggagtggattgtggggcaggtacttgctagactagtattgctgcctgcagtccagacaagcacagtgttccttgcaaagatggaaaagtttgtatataaatgaagagaaggaagaatggtagctgaag

SEQ ID NO: 478506 - DNA, 1054 bp, Homo sapiens
gacctcgcccctgtcttcctgtggggcctcctctaagtcttgagccctcagttcctgagagaagaaccctgaggaacagacgttccctggcagccctggcacctacaaccccagacatgctgctgctgctgcccctgctctgggggagggagggggtggagggacagggacagcaagagaatggttacacactgcaagtgcagagggaggtgagggtgcaggagggcctgtgtgtccacgtgccctcctccttctcccacccccaggttgccttgactaactctccccaagttcatggctactggttccaggaaggggctgacacagcccaggatgctccaatggctacgaacaacccaaaacgaaaagtgaagaaggagacccagggccgattccgtctctctggaaacctgcagatgaacgactgctccctgagcatcggagacgccaggaggaaggaccaggggcccaatatctcctccctggggaccatggagtccggccgcccgggaaacctgacctgctctgtgtcctgggccttgctcaccctcatcccaaagccccaggaccatggcaccaacctcacctgtcaggtgaccctgcctgaggctggtgtgaccttgaccaggactgtccaattcaatgcgtccttcctggagggccagtctctgcgcctggtctgtgctgtcgacagcaatccccctgccaggctgagctggacccaagggagcctgaccctgagcccctcacagtcctcgaaccatgggctgctgaagctgcctcgagtgcacgcgagggatgaaggggaattcacctgccgagctcagaaccctcggggctcccagcacatttccctgagcctctccctgcagaatgagggcacaggagtgatgctgggggtggtcgggggagctggagccacagccctggtcttcctgtccttctgcgtcatcttcatcgtgtgagcattgaccctggggagggagggagacccctgagggagggcaggccaggaacagaatccctgaagccagagctggagggacctgcatgg

SEQ ID NO: 478507 - DNA, 603 bp, Homo sapiens
cgcggactggggctgggagcctgggtgtgactctccctgggctaccatgattttgcgtgtgactttaaggatcctaataagcctcccaagaggaactcctggtgacctgcagctggagggcagggcctgggctgacttggtcccaagtgccaggccacagacctctacgtggcggctccaaacccacaacccacactgctgcccatccctcccagccttcgggtccacccagagggaacagctgggccagacacgccacccagacttgccaacagccagcctccctgccgtcccctgggacatgtgtggctgtgtcttcaaagggaaagataattgcaggggctctgaggtaggccctcttcccgctgagggaagattcaggactgcccccggatgcccctccgagctgtgtgaactgggaaagtatcagtacacctaccagactaatctccctgatcatggccacaaacccgtctgcaaggaggaactgaccccacattacagcgagaaccacaggtgaacaataaaatgggaaaatgaatctcctcacacaaaagaagcctccctctactcccaccctcagtcgtattggcaagtggaagc

SEQ ID NO: 478508 - DNA, 998 bp, Homo sapiens
tttgggtgtagcacaacacacagcataacttaagtgatgtctttatttggtttacatacactgtcccgtttgaaaatgcaagcgctcttaagtttgcaattgaccttaagttggcactggagttacgctgttctgtgttacttggcagatggagtccggtgtgcttggtgtgcacatcctgctggacatgatgggacccacaggacccttccccagtatttgtctcccgctgattctaggtttatctttcccgagggtcagaggggtggtgttcagcctgccctttccatgaatgactgcttgctaggcttccttgctggagacatcccctctgccagtccccacccacatgaagttactacccctcagggcccaggattagaccctcctggtcccaagcctgagaactgcaagcaacttacaagagagctgggagagccggggctgccgggtgaggtcggcatgcgggggccccaaggaccacctggactccccggacctcctggacgtgtcggagctcctgtaagtgaaggcacttgtctgggcaggggttctaccccttctccaggaatcaaaaaccaggttctagcaagttcctccacctgcatctagacagtaatgctgttttgccttactgatgccaatgaagtgttggtatctcctttcttagaccagaaattattagatgttacagtccataagaatcacccagagaacaagtttaaatgcatattcctgggacccctttctcacatcaagaagcagggtagatcccaggaatctgcatttttaaccagcaccacaggatttttgacacttgatctaaagaattcattttccccagcctgtcctgtactgtactcttgtaagaagggtggagtctactgaattcttagcccctggaacagtgccagactgtccagtatggtgttcagtatgtccagtgaataaagagatgaacaaacagatatggtgtatgaggaacaaagtagcttctc

SEQ ID NO: 478509 - DNA, 740 bp, Homo sapiens
tcattgttccgatggagacggttcctgctgtggacgctcagtgagtgttttctccctgtgatgtttcctggctcaggccgtctgcacgctgagttcgatcttggttcctgcatcgtctctcgcatgggcccggtgctcacccatgtgtcaacagaggactggccacgggccatgctgcaggtaccagctcacgcagggaagacccagagcccagccctgctgcggggcagttcctcaaaccccactctccgctacacggggattgaaataagacccctgctccctccagcaccagagctgcacagcaactcacgctcctgtgtgcccagagcctcagttactccaaatgccacttttatgtcctcaccatgtgagggaaggagcagagggcccacagagagagctgaccagcaaacaaatctacagaaacatgtgaaagctctcggaagaggtaacgcacatatggcggaatccaatcggagaacccttccactgttacctggcagcagtcatgaaggagcctccacctaggcctcctcagacatgttggttgcatggcaatctacatttaagagcccgagtgtgggccagttcacaacgtttggtgactgtggctcaaatgcaggtcaccaatgccactcttgtcaccactcattcttccatttgtttgagagccagggtaactgaggaccagagaagttatgtaacttgccaagtaagatacgagtcctctgaggcag

SEQ ID NO: 478510 - DNA, 2140 bp, Homo sapiens
gaaaggacaggagggccggttctggcgccagtgccagcacacccagctgggatgaaaaggtcaggaggggacactgaatctgagccccgaagggtgcaggggaggcagcggagggaataggaggcagggaaggcagaagccggaacaaagtggctgtgtctgaggagcctgatgaaggaagccgcagctgctggggtgcagggagagcgaggcctggatggattccctgggaagcctggggacacaggacagcaggccctcatatccctaaggaaggggtcctttgttttctcagaatgtgttatccatgctgcagaaccagcgcaactgcagatgagaaagcatggagatagggagcttaggttagttgaggaagaactttctagcaataagcacagtccagaaagtcagggcaggcccggcccttctggtgtggcaggaccccagggagaaaagaatcagaatcctgaaaatgccctagaaggtggcaccagtaactatgctgaaatgtttgtcgtttctgtgcagggtgacgtgggacctgcggggccacctggtgtaccaggctcagtggtcacagcagaaacagaaaagccacaaccatgatctcaggctgaactcagatggagcctttcagacttcagttgcctttctgccagaaatgcaaatacccactcccatacctctactccctatcgagaacttggaaagtaaactttgagtcaggagagggccatgggtgatggtgggcctgatcatatgggggaaaagtcatgactaaacatctgtttggcttgtgttaccagggagctccaggacccagaggtcaccaaggcgcccccggtcctccaggagctcgggtaagttgtccctctcctgcgcagggtttgctctgcacgcttctcttaccaatgggtttggaagatcagagtcattcccggcgctgagcatggcattatctcaagcgccttcacatcacctgagtgggttgtgctgttgtggtcacgtctcacgtaggaaaaactgagcctggaagaggtgggataactctctccacgtcaggcagctgccatgtgtggaatgggattgaagtgtgggcaccctgccttcagagcccccagtccccagcgggccatgatgggggtttctggggattcagtttgatgttttattttccattcagataaagtagaataaaaacattggacacttacatgccgactgaatcacttccaacgcactcacttttcccatgtttctggtcagttctgactttgcagtggcctgggacgtttcagcctctggtttctccccctgctaagaatttaatgatatgtaaatcaccagttgggaagcggccatccaaagggcccttgtgattatcttatgatgtgagttcagatatcgagaataattagtaagaatacagtaccctccacagggtccctgctttaaagttgcttcttctggcaatgtgctgctgttgctttcaagttactgtattttattgaaaggaataaaataactgacttataaatgaacatagatcagatttattttaagctattgaggcccactctttatgaggatatatttatatgtttttgctggggtaaaactagaagaaacttaagggatgtttaattctaggaaaattagaacaattttatatcaaagattttggatcagaaaatctaacttatgtctctgtgacctctccaggttcggtttccagagctgcccacaattgtaactgttgagagatttaaactagataatgcagagaatgcagtgtgttccaatatttacctttctatgcatacatacatgtatatttcagatctattattggcaagtattgaaggtctatactatatatgttttcttgtgcaaatatatgcatattaagtctgcaagggtgaagatgttatttttcatcttttaccaatgaaaacattagtgcagagacattgagtggtttgcacaaagtcacatagctcttgagaagcagaactgaacttgaacctagatctgactgtgcagcctctcctgttttcaccacggagtatacaatccttcctctgagctccgtaaaggggaattactttacttcatggtccccattacagaagaagaagct

SEQ ID NO: 478511 - DNA, 1918 bp, Homo sapiens
ttccaacagctgctcctcactgggcctgcctgggagcccagagctgtggggactctccatgcttctgtccccaggcgatgctgagactgcagcctctggggcattgaggtcctgttcaggtgggctgggggctttgtcaacagcagtgcaggggagagatgagggacagggagtgctcccagcatgcatttggtgaatgtctcccaatgtctgggtgactggcctcgtccaacttgggatctctcggggactccccaggactccctctccggtaggaaaattaaaagctgccaaactgttacccacgtaaagtccagatgcaaggcaaacatacggctgcaggaaggaaagcctgtgaaggaaatcttggggaagagagagaatggagctcagagttcctatgtacggatgggatccttccctgtggtgcaaagtactgaggatgtgttcccccaaggtttacctgatgagtacgcctttgtcacaaccttccggttcaggaaaacctctcggaaggaagactggtatatctggcaggtcatcgaccagtacagcatcccacaggtctccatccggctggatggtgaaaacaaggcagtcgagtacaacgctgtgggtgccatgaaagatgctgtcagggtggtcttccgaggttctcgggtcaatgacctctttgaccgggactggcacaagatggccctgagcatccaggcccagaacgtctccctgcacattgactgtgcgctggtgcagacactacccatcgaggaacgggagaacattgacatccagggcaagactgtgattggcaagcgcctctacgacagtgtgcccattgaccccaggttccaggccaccggggagaagccttgggagctaagtgccctcagtgttctccacacctgcatgaaccagtttgacctacagcggattgtgatctattgtgactcgagacacgcagaattggagacttgttgtgatatcccctcgggtccgtgccaggtgaccgtggtgacagagcctccacctccacccccaccccagcggcctcccaccccaggcagtgaacagattgggtttttgaagaccatcaactgctcctgcccagctggagagaagaaagccagaccgtgagttattcatttagcacctgctatttccatgacagcatattcctttttctccctgtacttctatttgttataacaattatcacattagattgaaaatgtctccttatcgttacttccataaaatcataagttctggatagcagagattggatctttccatgtctgtattttcagctactaatacatagcctggcacagagaaagccaataaataagagctgagttgatatataagtcaatcaggcaattggttgaagctgctgtattccagaaacttttaggggttgggcttttaagattcattaaactgcatgaccctttaaacacatgatttccaaattcactaattgcaccaagccagcctttgcctctctttatgtgtcactgtctctctctgtctttatctctcactctctgtatctcttttcatctctctctttccttccactctgttctcccccctatttctcctcctgcatttcttagtttgaataatgtattcagtgcatcattagtgaaacctgctgagggccaggccctgagatgagaaatcaaaagccgaaatggtgaaatgactcgcctgagcgatgctttcttcctgtccacctttgctgggcattcttcccttcctatgcgtccctccttgcttcctctcttgccttgtctgtttctcctctcctctgccttttctctttctcttttctctctctcctgactgtagatatttccttggcatccctccctccctcatctcacacccttccctgctttgcccccactgtgct

SEQ ID NO: 478512 - DNA, 668 bp, Homo sapiens
acacttctctgcggtctgtaaaactctctgctacggtttgaatgtgtctcctccaaaatttaggtgttgccaacgtaatagtattaaaaggtggagacgttcaggggtgattatgccatgagggctcctcccttgtggatgcgattaggtgcctttagaaaagggcttgatggaggagccaaaaaatttattgccagtggtagttctggcaaggcctgcatccaaatagcaggtaaaggcacttggctgaccatcaatgttttccacattgtattcattgccagtcacctacacttggccttcatagatgttgtctgtgccaaacctattgagaagcctgcgggccagcagcaggccagtacaatactctgcagcataatttgtcaggccaaccttcacaccatattttggcagttcgtgtgcgtatgctgcgcagactatcatatccccctctatacgggcataagcaatctgactaatgatatctctgttgataattccaacattggattcttcttggtatccgcatctattgactttctcatttaagttgcaattttcttggttcctttataatgtgatgttttgttgtacccagtgtatttagatatgatattatgagatgacatttaatcttgaagggtagcaaaaggtcctgatgggtatat

SEQ ID NO: 478513 - DNA, 632 bp, Homo sapiens
aggcacctggaaatccagacttctaagacccctgtggccattttcagaaatgaagcaggtcccccaggcatgaaaggtacctggagattcaagagtatgactgcccctgggcctctagctaaagtgctcactgcacatactcctgggagaagtaacaggacagtcagctctgacgtgactgacacaggcagaagtgatttgtggaagcaggcttggacgggggagcaattctggatatttcatggggaaaacaaagagctggaagaaggaggtagtgcagaggccctcagaaggggaaggacctgggacccacacaaagacaggctttgcttctttcatgttttacttggggccaaacttactttctcctgtgtagctgattctctgggttacatgatggaaaatcgaatctcaggcttaaagtgtgacacagatgtgtttgccacttttgaaggtgacgatgttgttatgcttcagtggctgtactaatttaccttcccaccaacagtgcctaaaacaatttttatgtttaagtatttgcatatggaagcacatcaaagcatagataaggtgatgtgttgtgctatgacatcatgatggcaaagatatcgctaggtgatgggaaatttttc

SEQ ID NO: 478514 - DNA, 663 bp, Homo sapiens
cgctatttgaggaaagaatatgatgtcattcacagtccagtggggtggtcaaatctgaaagctccaaaatgatctcctttgactctttgtctcacgtccagatcacactgatgcaagaggtgggttcccatggtcttgggcagctctgctcccctggctttgcagggtacagccccctaccccagctactttcacaagctggcagtgagtgcagcttttccaggtgcatggtgcaagctgtcagtggatctgacattatagggtctggaggacacagctctactaggcagtaccccgatggggactctccctccaaactgttccaacctctacctattacccagtttcaaagtcactggatatgtttacaacagcacaacaccctactgggaccaatttactctattagtccgtttcatgccgctgataaagacatacccaaggctaggtattgggtaaatggagattgcccaagagaacaagtgaatccagttgaaagatagcagcagggacagtgctgtggcccctccttgcctgagatgcatcctggactgcttgagttgctcgcctggaataaagaggagaggcagaccctaaaatactcactttggctggtggactgcaaatattgattttttaaaattgttaatcattttctaagtt

SEQ ID NO: 478515 - DNA, 674 bp, Homo sapiens
catctggcttcttattatcagtatgataccaaaagcaaagataagctggacttcattaaaattaaaaacttctgtgcttccaaggatgtcgtcatcaagaaagttaaagaaaatcatcaagaaagtgaaaagacaatctacagaatgggagaagatatttgcaaatcatatctctcatcatggaatgatatctggaatatataaagaactcatccaactcactaataaaaagatcaataacaaaattttaaacatggataaagaatctgaacagacctttctccagagaaggagcatattcacactagccaaaaagtggaagcaacccaatgtccatcagttgatgaatgggttaataaaatgtggtataggtatacaaaggaatactatttggaatataaaaagaaatgaaattccaatacatgctgtgacacacttgaatctggaaaactaaatgtaaaattagattgtggtgatggctgcacaacacattgaagacactaaaagccatcatatggcataccttaaatgaaacaattttacacaatgtggatgatatatcaataaagctgttgttttaaaaaaaattagttggggtggttaattttacttcaccatgggctcttgaatttccacttgctgctactgatgaggcactgcctgcatctcatcat

SEQ ID NO: 478516 - DNA, 591 bp, Homo sapiens
tcagttaactaaatgggcacctgaattttctgtcccaccgggaaaagccatatgcatttccagtgatgcagataagcccggctgccacttcctgagtgctcttctacacatgtgcttgacttgcagcagatcacctagacatgaactcgagtctctctctccaaagctcctggtctctgcactgaagatctggatagagttctggccagaaaggaaggctcttgggtaccccaggcactccatcttctgcaccaagattcatcgtggtgaattaagtacacacactgatcttttcccgaagaccagtaagcaagttggggacagcaagcaatgtctcagcccaggccaggctcagagtggccactccgaaaaggtccaaatgaccaaggtgatgcacagacaccccagcctcttactgcagctgcggtggagccttttcctgggtctctacacaggattagaaaatggctattcaaggctgggcgcggtggctcatgcctgtaatcctgtaatcccagcactttgggaggccaaggcgaatggatcacttgaggtcgggagttcaagaccagcctggccaacatggtgaaa

SEQ ID NO: 478517 - DNA, 559 bp, Homo sapiens
ttaagtcatctttatttgacttcatatgtccccaaaacacaagagtcgtgatgctggcaattgggatatgccaaagagaagccataaagtgtttcctttaggtaaaaaagtgaaagttctcgacttcataagaaaagaaaagcaatcatatgctgcggttgctaagatctacagaaagaaggagtcttctacctgtgaaattgtgaagaaggaaaaagaaatttgtgctagttttgctgtcacacctcaaattgtaaaagataaacccatccgtccattcctaaggccatcaaaggcaagaagcattggggtgactgtgattggagaacaggtgtcctgggaagtccgggtggggaacaggggatccttcctactccccgagacagacgtggagctgagtggaagttccgcatctcgtttgtcatttcccttctcacgctgatgaggccaatgctttctaagagtgggttttggttgggtgacacttgtttctgcatgttaatagatttctgggttttgaaatatttaatcctttgaagagagtttgcatgcttcgtgc

SEQ ID NO: 478518 - DNA, 1650 bp, Homo sapiens
gtggacgcccctgaagaagcatcgttaaagtctctcttcttcctgctgtcatgtctaagtcagagtctcctaaagagcccgaacagctgaggaggctcttcattggaggattccaacaccaagcgttccggcgggagttttgggtttgtcactatgctgctgcggaggaggtggatgcagccacgaatgcaaggccgcacaaggtggatggaagagctgtggaaccaaagagagctgtctcaagagaggattctcaaagatcagttgcccacttagctgtgaaaaagatatttgttggtggcattaaagaagacacagaagaacatcacctaagggattattttgaacaatttgggaaaattgaagtgactgaaatcacgacgggccgaggcagtggcaagaaaaggggctttgcctttgtaaccttggacgaccatgactctgtggataagcttgtcattcagaaataccctactgtgaatggccacagctgtgaagttaggaaagtcctgtcaaagcaagagatggcgagtgcttcatccagccaaagaggtcgaagtggttctggaaactttggtggtggtggtggaggtgattttggttggaatgacaactttggtcatggagaaaacttcagtggctatggtggctttggtggcagccatggtggtggtggatatggtggcagtggggatggctataatggatttggtaatgatggaagccattttggaggctacaatgattttggcaattagaacaacgagtcttcaaattttggccccatgaagggaggaaactttggaggcagaagctctggctcctatggtggtggaggccaatacttcgcaaaaccatgaaaccaaggtggctatggtggttccagtagcagcggtagctatggcagtggcagaagattttaattaggaaacaaagcttagcaggagaggagagccatagacgtgacagggaagctacgggttacaacagatttgtgaactcggtcaagcactgtggtggcagggcctagctgctacaaagaagacatgttttaggcagatactcatgtgtatgggcaaaaaaactcgaggactgtatttgtgactaattgtataacaggttattttagtttctgttctgtggaaagtgtaaagctttccaacaaagggttttaatgcagattttttttttttttgctcccatgctgttgattgctaaatgtaatagtctgatcgtgatgctgaataaatgtctttttttttttttaatgtgttgtgtaaagttagtctactctgaagccatcttggtaaatttccccaacagtgtgaagttagaattccttcagggtgatgccaggttctatgtggaatttatgtacaacctgcttgggtggagacgccattgtcttcagaaaccttggtgtagttgaactgacagttactgttgtcacctgaagttcaccgttaaaagggatggcccaagaaaagtcatggaattaattggttataaaaatgattgttggcacatcctatgaaatatatgtaaattgaataatggtaccagataaaactatagatgggaatgaagcttgtgtatcatccattatcatgtgtaatcaataaatgatttaattctcttgaaaaaaaaaaa

SEQ ID NO: 478519 - DNA, 624 bp, Homo sapiens
agccagtaacctatcagcaacatctcagttcccagaagtgtagcccccagaatactccttcttcttaaggcctatatctgttgggaatgttcttatattaatggattccacaaaaatgaaagatcaagatttcggggaacttaaaacccgcactgctacagtcagaaaatcacaaatactggtccatcggcatttgatcatatatgctattgttattgaaaagctaatatttgagggacttaacgcttcacccaatggtgaaagccttgaactaactgaagggaacagtgcctggggtaataccttgataagccatctgaggaaaggcgtgccctgccccaagactgtggcaaagaaagaaaaggcaggtggtatgctgaaagaaggcattgttgtcataggagaggacagctccatgcgtgttattgcccctgaaaaccttccagtaggacaagatgtggaggtggaagacagtgacattgatgatcctgacccagtgtagtcctaggctaatgtgtgtgcttgtgttttagtttttaacaaaaaagcctaaaaagtaaaaattaaaataaaaaattttaaaaatagcatatggattctatacatgttttgttagatttataa

SEQ ID NO: 478520 - DNA, 440 bp, Homo sapiens
cccacaggaatctacctttttaacaacatgtggctacctgcagaagaagctgacatcctgcgcttccacacacactcctgcacagaacttgaaggtgaacgaggggagactcagctgggaggtcaaggtctgatctcagttctgcagggtgtctgctcagagctcctggggcaccagtatcagccagtgcccccctcagaggagaaagaaaaagaggataatgggacgcagaaaaacaaaaatgacaagaaacgttctgtcagcagcatgcgattaaaaaaccccatacagatctggcagagcatggttatttctgaaaatgacactcactttgaaggctgttcttttagtcagacctctgttaggctaaggacctctcccactgctgacatgatagatcaaaggaagcaccttgcactgtctgaggtgcatgactagca

SEQ ID NO: 478521 - DNA, 904 bp, Homo sapiens
cggtctgaggacctgaggtcgtatgtggatctttctcacggagcaaagagcaggaggacgggggattgatctcccaagggaggtcccccgatccgaagctgtaacactcactgtgaaggtctgcggcttcactcctaaagtcagcaagaccatgaacccaccggaaggaagaagctctggacacatctggacatctgaaggaacaaactccagacacaccatctttaagaactgtaacactcacagcgaggggcaatccaacttttcccccaagtggagcccctcatcctgtgccacagccacagtatccaggatgccaacccttggttccccaccctctttcacaccccctcctgcccctggaatgcctcctgtgaatcccttggctcctgacatggttggaccaggagtgatagtggacaagaagattcagaagaaaatgaagaaatttcctaaaaagtacctgggactacagatgtgtgccactgatggcagcagtgggccatctggtgcagccactgccatcacaccagcagctgccgggaaggcacgggaaggaggtggacagcccaccatcctggagaccactatgatggggccagccaccactgagtgctggggccacaggaggagcttgtggcaacatcgcccctgccctgaatgccagcgcagacccagcgagggcctggagcccctgtcccaggaaacaagggagcatgactgggtgccaggctccatggagccagtgggaattggggacaagtgggaactctgccccttccaagttggcagagcaggagctccccaggtgcagctgcagattcccaagccatggctgaaactcaggcacccctgttctcttgggagctgggagtaggcagggtacatgtgcacaatgtgcagg

SEQ ID NO: 478522 - DNA, 597 bp, Homo sapiens
gtcatagagtggcgttggcgggccgcagaaactcaggagaacgttgaggcaggcagaggggtgaagtaggagactgcagggaatgctgggagcctcccaacaatgtctttcccatcccagaagcccccagggctgtcccaggagggctgtaaagaaccagactttggagaagagtgcctgtgtctctcacggaaggcccccacaagtgaaaacaaactgcagggtggtgggggtgggccacagaaacttcaaggtgtgtcctggatgggctataactccccaggcattggagcatgatgactatgtctcacagaaggccccaaaagcaaaaacagggcagcagaatggtgtggttaggccacagggacccatggggactttgaggcaggcagaggggagatgcggccagaccaccaggaatgctgggagccccccaaggaggcctctcccatcccagaagcccccagggctgtcctgggcaggctgtaaacccccagactttggagaaggttgactgtctctcccgaggaaggccccccaagcaaaaacgaggccacatggctgtatgggccggctcaaggtactatgggcatcgct

SEQ ID NO: 478523 - DNA, 5097 bp, Homo sapiens
ggatgcctctcccttccaagaagtccctggggtgacccttcgggttggagctagagccctgaacttcaattcagggtgcctggggctctcacagagggcccccatgggtggcatctgggctgcaggcaggcctgtgcggttgggcagaaactcagcgtgatgctgaggcaggcagagtggagaagcggcaaggtctgagcgggtgatgtttcctcccagggaggcttctcccttccaagaagaccccagggcccccccatcatgggggctagagccttgggttccatccccggatgcctgtttctctcgaagcaggacaccaagggcagcggcaaggctgcagaatcccgtggagcacatcctgggttggatctacagcctgggatctggcccagggtgactgtttgggggagggcccccatgggcggtggtggggccacagacatgcctatgcgggatggcagaaactcaggggcctttgaggcagacaggggtgagaagtaccaaggcctgagcggggtgaatgagtctctcacacagggcccccacgggccatggtggggccacaaacggggctgtgtgggcagagggcccccacgggtgacagtgtggccgcagtgtggcctgtatgggtggggagaaactcaggggtatgttgaggcaggcagaggggagaagaggtgatgcctgagccagtgctgggtcatcccaggatgcctctccattcccagaagcccccagtgtgccccaactgtgggttagagctccgggctctggaccagggattagtgaagggatatttcaaatcccactgaggtctaaagtgaaaaaccgaatatcctggaataaaacctagaaagagctatctttgaaattgctttgtgatctttgcattcagctcacagaggtaaacttttcctttgattcagcaggttggaaacactatttttgtagaatatacagaggaacattttggagcccactgaggcctatggtgaaaattcaaatatcccatgataaaaactagaaagaagctaactgtgaaactcctttgtgttgtgttaattcagctcacagagttaaacctttattttgattcaacaagttggaaacactctttttatagaatctgcgaagggacgtttcaaagcccactgaggcctatagtgtaaaacagactatcccacagtaacacaacaaagaagttgtctgagaaactgctttgtgatatgtggattccattcacagaggtaaacctttctttaaaatcagtagattagaaacattctttttgtagaatctgtgaagagacttttaggagcccacttgggcccatagtgatgaatcaaataccccaagataaaaagtagaaagaaggtatctgtgaaacttttgtgatgtttgcattcagcccacagaaataagcctttcctttgattcagcaggttggaaacactctttttgtagaatctgtgaagggacatttcagagcccactgaggcatatagtaaaaaataaaatatctcacaataaaaactataaagcagctatctgttaaaatatttgtgatattcgcattcagctcacaaagttcaatttttttttttgattcaacaggctggaaaccctctttttgtagaatctgcaaagagaaatttcagggcacactggggccttggtataaaaccagacattccttgataaaaactacaaagaatctgtctgagaaacttctttgtgatgtttgcattcagctcacagagttaaaactttgtattaattcagtaggttggtagaacattttttgtagaatctgtgaaagacattttggcagccactgagggctatagtaaaaaatcaaatattctgcaataaaaaggagaaagccatctgtgaactgctttgtgatgtgaggattcagctaaaagactttaatgtttctattgattaagcaggttggaaacactctttttttagtatgtgcaaagtgacatttcagagcctgtgggggcccatagtgaaaaactgaatatcctatgataaaaactagaaagaagctatctatgagactgatttgtgatgtgtgcattcagcacacagagttaaactttacttttgattcagctgtttggaaacactctttttttcagtatctgcaaagggacatttcagagcactttgaagcctacagtaaaaaacagaacatcctctggtaaaaactagaaagaagccatctgaaaaactgcttgtgatgtgttgattcagctcacagagttaaacatttcttttaattcagcagtttggaaacattatttttgtagaatctctgaagagatgttttggaacgcagtgaggtctatagtgaaaaactgaatatcctgtggtaaaaactagtaagaagctatctggacacctgctttgtgatgtatagattcagctcacagagttaaacttttttttttttattcagtagtttgaaaacactcctttgtagatctgcaaagggacacttcagagtgtaatgaggcctatggtgaaaagttgaatatcccgagataaacactagacagaagctgtctgtgaaactgctttgcaatgagtggattcagctcacagagttaaacctttgtttggatacaactggttgtaaaaactcttgtagaatctgtgaagggacgttttggagtgcactgaggcctatagtgaagaacaaaatatcctgcgataaaaactagagaggagctatttttgaaactgctttgtgatacatggattcagctcagagagctaaaccatagttttgattcagcagtttggaaacattctttttgtagaatcattgaaggggaattttggagcattttgaggcatataatgacaaaccgaatatgctatgatgaaaactagaaagaagctgtctgtgacactgctttgtgatgtatagattcagcttcacagagtcaaatctttcttttgattaagcaggttagaaactttttttgtagaatctgccaatagacattttgaaatgctgtgaagcttatagtgtaaaaacagaatgtcccatgataaaaactagagagaaggtatgagtgaaactgcttactgatctgtggattcagctcacagagttaaaccttacattatttcacctgttgagaaacactctttttgtagaatctgcaaggggacattttggagtgctttgaggcatataggaaaaaattgtatatcccatgttaaaaactagaaagaggctctctgggaaactgctttgtgatgtgtacattcagttcacagagttaaaacgtaggttttattaagatgtttggaaacactctttttgtaaagtctgtaaaggaacattccagagtacactggggtctccatagtgaaaaaatgaatatcccacgattaaaaactacaaagaagctatctgtaaaactgctttgtgatgtgtacattcagcttacagagataagcctatgttttgattctgcaggttgaaaacacattctttgtagaatctgtgaagggacatttcaaagtgcagtgaggcctgtagtgaaatacagactatcctgtgataaaaactagaaagaagctttctgtgaaactgctttttgatgtgtgtattcagctcagagttaaaggtttctcttgattcaggaggtaggaaacactctttttgtagaatccacaaagggacatttcagaactcactgaggcctatagtgaaaaatcaaatatctggcaataaaaattaaaaagatgctatctgttaaactggtttgtaatgtgtacattcagttcacagaggtaaatttatattttaattcaccaggttgaaaacactcactttgtataatctgcaaagggactattcagagcccactgaggcctaaaccaaaaaacgatatccagcaaaagctactagaaagaagatatctgtgaaactgctttataatatgtggattcaactcatagagtttaatctttcttttgattccaccgtttggaaacagaattttagtagaacttacaaagggggattacaaagtcctttgaggcctacagtgaaaaaccgaatatcacgtagtaaaaactagaatgaagctatctgtgaaactgctttgcaatgtgtgcattcagttcagagagttaaatcttacttttgattcagctgtttggaaacactctttttgtagaatctgcgaaggtacatttcagagcgctttgagacttatagtataaaactgaatgtctccttgtaaaaactagaaagaagctatcttggaaactgctttgtgatgtgtggattcagccccacagagttaaacctttactttttgattcagcagtttggaaaccctctttttgtagtttctacaaggggcatttcagagctcaatgacacctatagtgaaaaacttaatatcgcatgataaaaactagaaagaagctatttgtgaaactgctttgtgacgtgtgcattcagttcagagaattaaaccttattatgattcagctgtttggaaacactctttttgtagaatatacatagggacatttcagagtgctttgagacctatagtaaaaagccgaatatcatgtggtaaaaactagaaagaagctatccatgaaactactctaggatgtgtatattcaactcacagagttcaagatttctcttgattcagcagtttggaatcaatctttttggagaaccttcaaagggacactttggaatgctgtgagatctagagtgaaaaatcaaatatcctgtgataaaaactagaaaaaagctaattgtgaaactactttgtgatgtgtgcattcatctcagagaggtaaacctcacttttgattcagcagtttggaaacacatttttggagaatctgtgtagggacttttcagaaggcactgaggcctatagtaaaaaaaacaaatatcctgccttaaaaactagaaagaagttatctgtgaaactgcttcatgttgtttggattcagctcacagagttaaacttttcttatgattcagcagttgggaacactctttttgtagaatctgtgtagggacatttcagagcacag

SEQ ID NO: 478524 - DNA, 669 bp, Homo sapiens
agcgaataagtctcacgagatctgatggttttataagtggaattcccctaaacaagctctctctctttgcctgctgccatccacgtaatgaatggtttgctccttcttgccttccgccatgattatgaggcctacaccgccacgtggaactaccctaaagtccattacatcattcttatgcctttgcatcctcgaagcttagctcccatttataaaaaggaaagaggtttaatggactcacaatcctacatggctggggaggcctcacaagccatgggcagaaggcaaaggaggagcaaaatcacgtcttacatggcatcagccacagacatttgcattttcaccatttgttacatttgccaaatgtatcatcatcatcttattcactttattcaccatcaccaaattcatcatcaccttattcagtccaatgatgcaatcatcatcacagtcagccttcaacatttcttgagtgctttccgctttcagggcactccactcacaggaacaccagatgtctacaagaaacttcttgggagcaaacatataaaagactggataaatatgaatagcatattttataatacatgaatgaacagttacttaagtaaagaaaagcatcgaaggacagaaattctgaaaaaaaaaagaagtggaaatatagaaagc

SEQ ID NO: 478525 - DNA, 429 bp, Homo sapiens
tagtaccacagctcatgctctctggaaagtgccacctcctggcaggaggccaaccggcacaaaaacagagcattaaaccaccaaagctaggaaccttcacagagtccattgtacccaccccaccacctccactggaacaggcactggtatccatggctgagacccatagacagttcacatcacaggactctgtgcagacaaccctcagtatcagcccaaagctgggtagactcgctgggtggctagacctagaagaggccacatccacagggaaagggggagagtactacatcaagggaataccccatgggacaaaagaatctgaacaacagccttcagccctagaccttccctctgacagagcctacccaaatgagaaggaaacagaaaaccagccctggtaatatgaaaaaacaaggctcatcaata

SEQ ID NO: 478526 - DNA, 1328 bp, Homo sapiens
ctaatgcagagagaatctggcgtggcatcattggggtgatacctgaggtttattgtcccacgggcatggaaaactaggacgcagatacaccaggatgagattcagagaggaagtctaataggtgaaagaaagaaaagctctctctgctgcagagaggggggtcccagcgaaaatgggttgccgcttccacagtgaacagattcggaagctcaaggacatgacccagaaggttggtggccaaagagacttcttgtctccagatctcggcaagatgtttgatggtgtccacacacagcattcctctcactggctccatcacagccacacaaaagggaatgaccggacttggatagaagtttctgaaaaagtgcccataagaataaaatcaaccagcatgaaatcagtattcacatgtgggagtgaatgtgggctggagctgcctgaggtttatgggctgaccatcattggtactgagcacacacatagaactctgcttctctttaacctgcaagctgttgggggcaaagagcacaggaaattcaattccaagcttcagttgttgctgatcagacttgacatgtatgcctggacaataagatttgtgacctaagcagaataaatgaatattccaggagtgtttgaagaacatacaagaagccaatgtgacaggactgagcagatgaaatcagagatgttaccgagggctagattatgtagtaagacaggatgcctttgagaattcgagtgggggaatgagacaaacttttctatataattttaatttttaaaaaaagttgggttaattttaaagttagggaaaagttgcaaagatagcacaatgttcccataatttgcttagtttcccctaatgttgacatcttatatgaccatgatacatttgccaaaaccaagatattaacattgttacgttactgtaacccaaattgcaaactttatctggacttcacccatgtttccacggtttatctgttcgaagataacatgctgcgtgtatttatcgtgtctccttagtctttttgggtctttcttcaatattttcttttacttcaagactgagatttttgaagagtactggttatgatgtagaatatacctcaatttgggtttgtctaatgttttctcatgattagtctgggtttatgattttggagaagaatgtcacagaggtcagatacatttcttgctgataatggataatctatttccttacagtaagcagcagttggaaaacagcatattcagaaagcatgttaatggatgtttggataggcatttcaatgatgattgctttagtaaagcaataataa

SEQ ID NO: 478527 - DNA, 639 bp, Homo sapiens
ggaaaggggattacgcaacatgccacccttaagagctgtaacactcactgcgagggtctgcggcttcattcctggagtcggtaagaccacaaacccactggaaggaacaaagtctggacacaccatctttaagagctgtaacactcaccgtgaagaagaagaagtttcccaaggactgaactatgagagaagaggagttcaagaaactgtgaagctggaatacgaagagaatcatctaaatggatatttaatgtcccgtgatgtcatactgaaagaacacaggtggagatcagcttactcacaagagctggctgctgggtgtcgctgtaacctctgtcccactcctcatggaagccaaatgtcagaggtgggttctgaggtcagtctagtagggggaacttgcttcttcaaactcagtgcttgggaaaaatcccactttatgtcagataattttctagaagtgtctatatgtcttttcaatcaaattggaggaaaagatcgactggtatgatggaaggtttatttactcaaatcaatatagagtaattattatatccagatcaagtttgagagctagctgaagtgtattgaccagtcagtcttgctctttgaataagtgatgggtgctgggaagaagcc

SEQ ID NO: 478528 - DNA, 548 bp, Homo sapiens
ggtgatacccaggtaaacagggtctggagtggacccccagcaaattctagcagacctgcaaaagagaggcctgactcaaagaccaaaggtagataaatccataaagatgaggaaaaaccagcacaaaaaggctgaaaattccaaaatccagtatgcctcttttcctccaaaggatcacaactcctcaccagcaagggaaaaaacctggatggagaatgagtttgatgaattgacagaagtaggcttcagaaggtgggtaataacaaactcctccgagctaaaggagcatgttctaacccaatgcagggaaactaagaaccttgataaaaggttagaggaattgccaaccagaataaccagtttagagaagaacataaatgacctgatggagctgaaaaacacaacacaagaacttcacaaagcatacacaagtatcaatagccaaatcgatcaaggagaagaaaggatatcagaaattggagatgaatttaatgaaataaagcatgaagacaatattagagaaaaaagaatgagaagtaattaacaaa

SEQ ID NO: 478529 - DNA, 1315 bp, Homo sapiens
gaacagctgaggtgtttgctaaaggcagaggtaacaaagaatggttaaaaaagacaacaatctaatctcttatcacttctaccctaatgctttaacggcactttggcagaccatttcaacctgccattcaggacagcgggttctatatggtgtgctggtgcatgatcacctatctcagctttcaaaagagtttgagcattactccccaaccacaaaagaccccagaactaagaaggaatggatccgtgctccatctgtgaataagccaggtgaatcgattttgtctgtcctagaaaaggatcaactgtttgagatagcacatgacagtggccttaaaatgaccacaaccaaaatgagattacagagtacactggacataagcaagacacttcggtgttactgtctcccatcaccaccaaatgggactgtcttgttgcaggaaaagaagctcagggctcccactgtttctacattatggtgatttgttaaattatttgattatgtattacaatttaataataatagacataaggtgcacaagaaatataatgctcttgaatcatcctgaaaccaccccccaccaactctggtctgtggaaaaattgtcttccaccaaatgggtacctgctatcaaaaaggtcagggaccacgtttctttgcagtcatttatctgctttatatattcgtacataacttcaggcaaaatttgctttgtcctatttttttccctgcagttttcagagtcactttcactctcaaatagtgcacaccattcagaaatggggattgaacgtgcttgagcgacagtgaagcactcattcctagggagtacagacatagcagaaactttctcaggttacttccattaaaaaaaagaaaaagaaaagaaaagtaaagggacttgaacaactactgtattttatgatatatttaaacttaaggtctttttgctgcattttagcatgtgtgttcaagtcttggcttaggagaaaattgcaaacatctggtttcagagtaagaggatttgatagttgttaagggttgttagtaaaaagagaaattcttcagctaggcatcaatatattttcaaagacagtattgaatgtattgttgtaacttgtcttaaaggcttaactggaaaattaaaaacataatagttctctattatggattgtgtaactaattatttaattaattcttttaagcaaatttcagaacaaaagaatttcctaaaggagtagcaataaaagggaagatcaaggtggacaatagaggaagaaaagcaagagattgagaggtgggacgaaacactggc

SEQ ID NO: 478530 - DNA, 684 bp, Homo sapiens
actcgatctacactgcagttaaaggaacatgcacacacagaaagcagaaagaaccaatgcaagaaccctagtaactcaaatggccagtgtcaaaaatccaccgaatgatggcaccaaagtatgggattatatgaagaggcaatgtctacgaatctttggcatccctgaaagggaggggaagaaagtgaacaatgtggaaaacatatttcagaatataattcataaaaacttctccaaccttgctagagaggccaacattcaaattcaggaaatacagacaacacttacaagattctacacaagaagatcatttccaagacacataatcatcagattttccaaggtcaaaatgaaagaaagaatgttaaggaagatagaaagggcaggttatctacaaaaggatccccatcagactaacagtggacctctcaactgaaaccctgcaagccagaagagattgggggcctatatttaacattcttagaagaaaacgttttcaaccaagaacttcatgtgcagccaaactaagcttcctaagatgacttcggctatctattacacaaaatacttatctaaaataagtattttgtgcttccaaataaaattcaggatatttttatttctataaagattgtcattgctattttaatagggattgtattaaatctgtagattgtttggggt

SEQ ID NO: 478531 - DNA, 1018 bp, Homo sapiens
tggagagtttcaggggtgggcaagaggagcatgttgtttaatttcgatgtgttgcatggttttgaggaatttgcttagtcttgagttctatttttattgtgctgcaatccaacagtatgtttggtataatttcagttatttggatttgatgaaaatcattttatgtctgattatgtggtcagctttagaaagcagtgcagagaggctttcagttgcccctggagtctctgttttggaagttgcagaactgctaccaactcaattgccccagcagggggtgcctgtcttcaagctcactaattctttcacctgcttgatcaattctgctggagaagagcctcacctcatagacatcatagtcccacacccacagataggccccaaggactctttagtttcctgcccaaactgggttgtttccttcaagtcctcgggttactttctggccaaaggtgtgtctagaagtttcattcaggagctagcctggaatggggacctcaggactctgccaacagcccttggatactgaactggctttcataatctgtatgtcttggcacaaatgtattctcttctttctctccatttcataaatatgtacaaaatcattataaattatgtaataaatcgttattatatttatgaaagcagatctcacagaatagattttttaaaatatgacttatttttttcttccatttgtccccatcaacggtagccttattgaagatctaatcaaattgacttcgttaataatatcttaataatgttttcatattgacattaattcatcactacaattaattaaagggttattgtgagaattaattaaaataatagatgtgggtgcttagcatatactatatactcataacattggagacgatgtgtaccaagagcaatactgacagcaataatcattttttgaaaatctgattctcttaaatatatcaaggcattcgatgcttttatcaaaagcaaataagtaattcagtacaatttcagtggttgtagaaat

SEQ ID NO: 478532 - DNA, 570 bp, Homo sapiens
aacaggatacgggccaaaactatgaaaacagataatgacataaagatgacaccctatggcaccttgaaaaaagacaggatctctctctgttaccgaggctggaagtacagcagcgtgatcacagctcgctacaaccttgccctcctgggatcaaagaagccaattacgcacagtgaaggatttcctcagtaccagaaatgcaattattatcaaatactagataacatcattagaatccagggttcaaacgctcctgcggccactaactgctatggtgatagatggcttcaagctggtctgactgttccagaccccagctcagagaaggttggtcgtctgaagccttcttctctcaaatcgtcaaagtcattctccgtccagctttgttccgttgctggaccctcagctgcaggtctgttggagtttactggaggtccactccagaccctgtttgtctgggtatcagcagcagaggctgcataacagcgaatattgctgaacagcaaatgttgctgcttgattgttcctctggaagttttgtctcagaggggtacctggccgtgtgaggtg

SEQ ID NO: 478533 - DNA, 486 bp, Homo sapiens
gcagccatacggactgtttggaatgatgccggagacataccagaaactgagaaaatggcaatcatataccgatttggtgcagctgctgttctcaccccatatgtggggcactgaagtgattaccgttatggtagccctcagggaggcagaagaccatccgcaggaccggagagtccacgccataaagaaggggaaagtgcatcctctgcaggtgaccaccccacaagataaaaaggggccccagcaggtgacctgcatgcagaggtcgattgatttaattgcaggtggggttgcacaagagaaaattggcagtccaccaatggaatgctgttggctctatggcagcaactgtcccagagcaacaattccggaaaatgcccaagaggggacaaaacaatgttgcttaacccagccccgcctggatgctgcagctcaactttttgcagacaggcgaagagactgggcccttcctgtttgatttgggaa

SEQ ID NO: 478534 - DNA, 831 bp, Homo sapiens
cgtatgataccattagttgctaaactttgttgccctcatccttaaccaagacacattatagttataagcaactgctctgaatttggagcaaagtcacggccaaacccaggtgttatcatgacctcgctatgtgtgcatatgctcagggtggcactgacaccagccccctgctgtgtctgccccctccaaactttggatgccaatgatcatgagaaggaggccaaaggggagctgagggcagcttggtgtaggccttcagacactccttggcatgaacagcctggaaactgtagacaggatgttgatgacagcaggaggcagacaggctcctgggccaaaaggggcagccaagagctgagcagatgtcaaaatgacctgcctgcagagaagagctatccactgagtatctcctctcagctgagatctgagcagaagtcaggacaacctgcctacagtgaggagctacccactgtgggtctcctctctgctgaaagctgtatcctcattgggatgacctgtctgcagcaaccctgccataaaaagccacaagggctggcaaaactcaatcttgatttttggacctctgctttcccacgttaaaagcggataactaaagctatcagagaaaatgagattttgtacaaaaataggcgtagattgctctactctggggtaccaaaaactctatgcatgtattttagaatacctatacattacagattctttatgctataactctttaaaattccttttctttctttttttctattccccagtccatacaagttcaataatttctgtactaataatatttaaagcacattatttaag

SEQ ID NO: 478535 - DNA, 583 bp, Homo sapiens
ctgagcagtatgagtctgggaaaacctaacacaatgctggatttagaggggatgctcattaaattcaatttaattgacaccaacacagaagaaaggcagttctacaaccaatatagaatattattccttaaaaaagtcaaaaagcacaagcattcccttttgggcgctgcagcgggcagggaagtggtcatgggcgaggctgtgctactgcgtgcgcacgcgcaggaagctatggcctctttgcaatcttccagtaacaatagaagatggagaccaggccagaagacctggaagatttcattattcagaggcaactcttggagcccttctgagaccataggaacaatccagcctagtcccggagatgatgagagacccttggagcctgaagtagccaccccaggtgaggcccccttgagcaaccaaccctgagctgatctggaagccaactagatagaggcacatgaatgagcatatgccaggccagccaaagaaccacccagcgaagttacagaatttcagcattatttcctttttttttttgctgactttgtgtttattttagttctttcagttgtaaaat

SEQ ID NO: 478536 - DNA, 948 bp, Homo sapiens
caccattagttgaactacttctgctttctgctccgtgggggttgagtccttttcatgatgtatgctaaattctggtgcctcctgcttgctttctgtcctcacagcatcacaatgaggacaaaagcccaagggagaaagattggtgactgtggcagtgagaatccatgggtcaactgtgagggaagacctgaaaagttgcatggcagaggtactgaatacatgctgaatacagatttgggaccaagaatccaatcaaccaaattctttgatgctgtgaggagtttccttgttgatacagagttcgatagtagttgtcagattgtgccatgtgattggtctacacataactcagatggaggtaatagcggaagaggactaggcgtaaactgctgtgaatgtgaaaaggtacttcctgcccatgctaaggccttggtaaaagctagctgcaagtgtcacactctggagatagtaactgtactttctgttctttttgctgcctttctaggatggaatgccgttgaatgattcccaaaaccaacttcgcagtactcatggtatctgaaatgtattagagaggtctttcactgaaggtctggagatagtaactgtattttctgttctttttgatgcctatctaggagggaattccactgaatgattcccaaaaccaactttgcaatactcatggtatctcaaatttattagagaagtatttcaccgaaggtctccaaacaaagttaaattttatttgtgtcaatttagaggaaaattatgtttcatgtggcaccatggaagggaaataaagaggcaaaggaaacagcatcatatctcctaagggttgaaagtcattgtaaataggtgctttaattaaggttagttagtgacaagattaggacttatatatccccttttatttattaacagtttaggcagcatatattttaagga

SEQ ID NO: 478537 - DNA, 697 bp, Homo sapiens
tgacaagttaatgggtgcagcacagcagcatggcacatggctctggtgacgtggaagcattgggctgcggccctggaatgagaataaaggtgagaccagatccagagctctcccttgcatttcaaacaaatacttttagtgccttctggatgattccatgtggatgcctaatgaatacctcaaatacaaccaacacaacatgtcctctgactctgcagacacacacctcagtcaagagatgttctgacttttcagttgctcttgcccaagaccttggagtcactcctgaaatgttttatcatgacccatatctgacacatcagcaaaacatatctggaaccactgttgtgacactggtgttagaaacaaatgcttgttgcgttggcaccaaaaagaagaaataccacttgaacataaatttaattttctcggcaagtcaatctttacttctatagcagggggcgacttgcagatggagtaaaggtaaagcaactaaaactcagaaataaagaattaatttgtatatatgaatatttatttggttttaaaaataatttttaaaatatcccaaatgtaatgttttatttacaattatttaaaaatttatttaaaattaataattgtaaaaataagttactttttttcagtggttgaaaatgttttcaggtataaagtagttttatgcaatcaaagttgt

SEQ ID NO: 478538 - DNA, 872 bp, Homo sapiens
gataggaaaagaatttggacgatgcggatgtaatgtctccaggtgagggagcacagctgctcagtggctgcgcatccctaacagagccagtggctgcctgctgctgtggaaccgcagtgtctgtcaggctgccctccagcaccgtcacagaagtacagtcagattcattttatggcaaggatatgtgcatatctctctcaggagtcctgccactgaaaaaagactttcagaagtcacttcctcctgggctccggttttccagtaggcagtgtgaggaacatctgggtgcaaaagaaactatccacagagtaaacagaaaacccacagaacaagagaaaatatttgcaaactgtacattcaaagatgatctaatatccagagtctataacaaacttaaacaaaccaacaggcagaaaaccaccccatttaaaagtgggcaaaggacatgaacagacacttctcaaaaaaagacatagaggcaatgcaaattctaggcaaaagcctcaagaatccttgcagtggcttttagacttctctggattaatccttttgagaagtctttcatcacctaagagaaactaaatcttatcttagagggaaaatagccagcgataattgaatagatttgtacatgggaatgagagagagtctgaaggtagggataaatgacaggtagctattccagtagtgagaacatcaaggtaatcaaccagggaagaaaatgaaagatataaaaagagaaatgtagccaaaaatataaatttttcctagtaagagggtcttcagtgcagcaaaattcatgtattctctgttagggatattgcaatggggaattttggaaaaagagggaagaaagtttttggaactacttt

SEQ ID NO: 478539 - DNA, 564 bp, Homo sapiens
gaaaacaaaagtaaagtaagcacctgattgattggctatagccagacatttgcctcaaaggcagaatgatgacccaccaaagatgtcaaatttctcatccctgtcatctgtgggtaaagggaattgatgatatgaatgatattaaggctgatgatcatctgattttgatatgggtggattattttggactacctggcaagaagcagcataagaaagaattgactggcattgctggcctcgaaggtggaggaacaggacatgagccaacgaatgctctggtgtctcatacctcgttgatctattcaggccctctaatcggtaatgacttcaccaagaccgagccctgggattgtgtactacccttgtgttacaaaggtaacatgaataagaagggatatgacaggggtccttacaatgtcattgccttctttttgcgtttgaagcaggccctagttggaaaagaaaacatgaactcccgcagctgccacctactcattttatagctatttaaggaaatatgataatcccaaatattactgtcagagcagtattttcaaatcaaag

SEQ ID NO: 478540 - DNA, 831 bp, Homo sapiens
ttataaggctttgtcacttgctctgggcgcatgatttaagcaaatactgaagactcatgaatgtttgagaaactgaagcttacatatttgaaattactcacctatggtgacctagtatatcagctggtgcaggctttttataccacatgtgtaactctaccctacctcaggtgtcagagacgaggaagagaacaggagccagggttcctggaagctgctgcagctctgagtgaccagcttactggctgttgcgatgttagcttgttaattggagatctttctaacctcttgatgaatgtgtttagcactataagttttcctcttaaaacttcttggctgtatcccataggttttggcgatgaaataaacagagacttgcaacaaataggagagcagcaattgaagaaccgtggttacactgcaaaggatatcaatgctcacagcatctcagatcattacttattacataccatgtttgctaaatattgacataatattatactgatatgttattgagcagcactgcaaattacagataaacatgagaaaatcaatgttaatattggcaaatgttggtggaatcattaataaatttggagattttagtgtaagttaggtttatataacataatgggcttttcctttaatttataacatgtaaatttgtgcacatgtagcatccattgtatttatcattataatatttggtggttatgtctcatagattgtatttcattctttcagggttaaatttatgttcctagaaatttctttatgatattttaattttattctttttactatttgtttttgtagcaggaatcgagtcag

SEQ ID NO: 478541 - DNA, 624 bp, Homo sapiens
gaaatatacatgaatactacatgaccatgaatgaacattataaagattctctaaaagtggtgagtgctaatactcacgcatttgaggaaataagtagacacagtgtgtggtgctaccttgctcctgaagacagcagacttactctggcagtcagtgtctcagcaggagccagaaacagggcttttctgcctgtctcctctccagttagagatccagcagagaagaggacaccaattgtttcaggaagatgcgcctctgtgcccctttccttgtcctcagctggcttagttctgcatgcaacaggtctggctgtaccccatggtgctctctttcattctccgcatgacagctctctctctggagagaagcagaatgggaaggagagagaagaattattaaagttggagaggcaatgcaattttaacgcttcaactgatggattattttacatgtttcctatttgaagtttaagttattaatatattttactgtacatatcttacgttcttaaaaatgtttgagggcactgccaatcttagagtttgaagtgatattaatagtcattcggttcaaaactttttcccaaagacaaaacatgtgaattgcaatgaagccaaagcattt

SEQ ID NO: 478542 - DNA, 2682 bp, Homo sapiens
cctgctcatgcagaccaactttgatatgatacatgaatggtaaatgagcactgatttcaatgtaaagtcagcaactgcattagtccctaacaagaaagtcatcatctccttccaagttttaaagtcaggcattgacttctccttcttagccatggatgttctatttggcatcttctttcaacagaaggccgttttgtttacaccgaaaatctgtttgaaaccaaaatgtctcattgtcaaagttgatgaccactgcccctgttctatgccaatgttctttaagttcaaaggcattgtcaaatatttcttaaatgttgcacaatggtctcagggcttccatacacgatatggatattcagaaagtattagaacagaaaatgggagcaggaaaagaaagaagagagtggaagatgaaagagagggatccgagatcaaggctttttctatgtaaatacacaaattttttgtacagcatgttaaatgcagtcaattatatgtagcacaaaatgcaactcatacaagcactccttctgaggcaatgtatattattacatgcattgaatataaactttaagtaatagttctaagaaggcaatagctaaaacaaagactttttgatttttttcatttttctttattctcttttctgttcttcatattatgtaatatttattgacatgatttcaaactcactgtttctttattatttcaaatcttgtctttatcatgtttagtctagtttgctgtttttatagctttaagctggaagtttatgttaccaatgtaagatgtttctagttttcagtacatatgtttacagcaataaactgctttctaaatactgttttagctgaatttcataagttttaatatgacatttttctttaaatttatctcaaattgttttctaatttcccttgcgatttcctcttcttttttttttttttttttttgttatttaggggtgtgttaattatgacatatttgtaaattttttctacttttatttcattgtggttagagaagatatagtttgtatcattttagtttttttacatgtagtgatacttgttttacggctgaacatatagttcttattggaaaatattctatgtacacttgagaagaatgtgacttctgctgttgttaagtgcttggtggattcatttaaatacattggttaaatttacttcatatgttatgtttcaggtcttttagttctttcttgatctgctgcatcattttctatcattattgaaagaaatattgaagtcaccaaatgttattgcttaatttcatatttctctctttaattatgtcagtttttactttctgtatttggggttgtgttggtagttgcatgtaagttttcatcagttatatcttgattgattgacattataatcacaataaaattatcctcatctctagtaacaatttatattgtaaagtatatttttcttaaattagtacagcccttccagctctcttctgtttactgtttgcatgttatgtattttccctcaacttatttacaatctacttgtgattttgaacatgaatatgactcttttaaacacctaatatttgggtgaggctttttattcattcctccaatttctatctttttaattggagtgtttaagttatttattgataatgaaatagtgataaaataagattcatgtctgtcattttattacttgttttctggtcttaggacattttttattattacattcttctattactgcctcattttgtatgccagcgaaattttatcagaagtgacaccaacaaaatgctagagcagatagctccaagattctgttcttccacaaaggggctttgaaaaacttgcagctacttttagagctaactttgtcagaatctggaacacagtcagatgtttagagcaaccaaacaaatgttgcatcaagaaaatgacatttcagaaatttaggtaaaactttgtggcatttttacttgcccttcttctacatcctttccagctcagtggcattgctgaagattccaacctatcctctcagtgtgaaaatccttgtccctgattaaggagaaagcaaagtccaacttatttacaaggtattatatatatatataataaatatatatatatataatatttatatatataaaaataaatatatatataattaatatatttatatatatataaataaatattatatatatatattttctaacttgcataggagctaccagaaggactgatgtaaagtgaacatgtccattttgcctaagtcatggatcacacagttcagcaacatgttagacattgcttaaaaatattgtaaggtgaacaaatacccccaaaatgcatgacacaaatgattatagttgaggaaggatacagtttctaaggcccagggagaaaagctggacagagtttatttgggaaattagggaatacataaacacttagaaaattatatacatgccaaggttatgatgtgtaatcataaaagaccaaagaagaccctatgctttcaactccagttaatgattaagttcagtgcaagcttggctaagtcagcacagaatcgatcttcaaagagtgtgagaagtggcttactttgttttgctttgctttttattagtttaaactctttcagctcttggcattcaaagataactgtc

SEQ ID NO: 478543 - DNA, 1580 bp, Homo sapiens
gtactaaagggctctgatgctgtcttggtgatctctacactgggtgttacttctgctggctgtgtgaccttggaggggttgcttaacctctctgagccacaagtaggccgatgacatcttctcacctgctgcccaccctcctcctctgttttgtccacagggtttctcaatggactgattgccagaggttggggtgtcaagaatttggggtgtcaaggaaatggacaaagctctatgaccagaacaagcactttggggaatttaaatttgctttccctgacacgactccactgtcatcactacccctgaacttaaggggcatccaaacctcagtctcagcaggtgtgagctaccgcgcccagccaaaagtttatgtttttaagagaaatgtgctgaagcactgggctcgagtgacagtatggtggtttattctgaaagggctcagctgtgtgtgcaagagtgtatgtgagtgtgtgtgtatgtcagcatatgtgtgtgagtatgtatgtgtctgtgtgaacgtgtacgtgtgtgtatgtgtatgtgtgtgaggatggtgtgtatgtgtatgtgctgaagtaaatatgactgaacaataagaatcgtcgatctggttgtttggtacatgagtattcatcttatttctttttcactttttctgtgcatttgaaagctttcataggaagtcagaaaatgtatctggttgttaaaacaatattgtaacgtacacacacagtccatttccagtcccagaattgagacagttagtgcagaggccactggctcagctgtggaaaccagactgcacggtccatctgcacccatgctgtctgtgagccctgggaatgtcgcttcctgtctctgggcctcagtttccttctctataaaatgggctgatgctgttcctgccacagaggctggtgggattcaggccacataccccggcacatcagcgttccgttgttacacatttggatactcccaagccagttggtaaacagttgactctccgggaccccttgcacgtctccacgactcagcaatcaacgtggagctgaactggctgtgaagcgttttgagcactgcccgtgtttgtctcacagccctcacgggaatcccggttaatatactcaatgagcggggccctgaaaaccccgcctgccacctcgtaagtgttctataagcgtttgccattttagtaagtccttgtatttttatccaatctttgttttatgttaaaaagatagatggaaggttaacgttgaagtaattaacttcttaatggaagtgtagaattacaaagtaattgaaaagaagaatagatgagatctgtgagagtttcttgtctttctgcctcatgctaaaatgtaagctcttgttgtaaacgaaagcctgcgtgcaaatggtttgcaggctgattagcgaatctggggcacggagctatccaggagctctcactgtcgatttaacatccacgcattttatgtagcttcttgatgctgatgttggtaagagacgctaaattgtcatgggcattatgtggaaaacccgtagatgatttctggagcacaaaagccaaa

SEQ ID NO: 478544 - DNA, 1042 bp, Homo sapiens
ccagctcctggattcatttttttgaaggcgttttcttttgttcccttgctggcgaggagttgtgatcctttggagaagaagaggcgttatggcttttggaattttcagcctttttgcgccagtttcttccatcttcatggatttctctacctttgttctgctggttttcgtgtcacttgacactgtttttaggcacaggcacattgagcattgtcatgcctttgtggagaactggcctctttatcattatgtcatgtccttctgtgtcctggaggagatttcttgtctgaagggtgccctgtctggtgttaatgcagtgactgcagcttgctttggattagtgttagcatggtttacactgctctatgagctgcactgtgcccctggggagactgcagagcaatactcagagtatccaggcaaggagtgcatagaaagaaggtgcagagacatgaggcagcaggatttctcactgagaggggtgagactagctggtcacaggcaagagaaagaagggcaggtgcaactgatcaaggaggtggaaggcagggagcaactgctcagagtggtgacgtgtggtccacctccccggactggtccaccttctctaactggtcacttccccagactggtctacctcctggactggtccaccttctctaactggtcacttccccagactggtctacctcctggactggtccacctcccgggactagtccacctcctcggactggtcacctccccggactggtccaccttctccaactggtcacttccccagactggtctacctcccggactggtcccctccctggactggtcgcctccccggaccggtccacctcctagaccggtcacctccctggatggactggcttgcactgcttcctggcagttgcaggctcactggggactggaacccacttgtcctcctggagtttcatcaccaagtccacatcccaccctgtctcactggagccaggatccataaggtcccgtgagctaatgtgcgtctcttttcaatgcaactcaaaagagc

SEQ ID NO: 478545 - DNA, 3773 bp, Homo sapiens
tctgtttcctcttttggtgtcccctgaactgtgagcctgtgagatgtacacatcagtatttcctgtgggggttccccaatcaaaggagcttccaggcctgcgggtgtggcacttcgttgagccgcagccgctgcagctcgtcgaacttcatgctgacgtcctcaatggagagctgcagcatgtcccagtagccggccaggtcctgcgacgtgtggctcccttgattcagtggggatttaaaagagtcagaggaggttctggtgggtcaacattcaactggatttgcttatggtttcagcagtgcacactcagcatgctcagtgaagagcatgctgaacggacagctctgcgattcctcacccagagccaggacctggggcccccagctgccctccgcgcggctgagcccggccgggcacggctgtgcctgatggtgtgggggaagcggaatggcttctcctccctcgcccgcagctgggtggtcctggtcacatctcctgggggatgaaggaggaacatggccggccactgtggcagaggctgcctgagagcaggcatcgccttccccaaactcatgcagggcctctttccttgtgaaattgccgtcttttaaattcacacagctctgtggctctggcatccggcgtccattggataggaacttcggtgccccgtgtggcctggggcagctctctgcctgtctcaggcaccacccctccctgtaccactcttccgccccaaacgtgtcaaagtgtttttctactaatcctgaatagaagttgaaagaaaaggatgtagccaagccagctattttaaaattcaaaaggcataacaaatattaggatgaacaattttaagccaaatattagctatttctggcagagcagaaaggaacatttagcaggtctgaatatgcaccttgggctgtgtgtgggaagctttggatgagcattcctaaagacagtgcctgcctaggctcacgcgagtttgcataatgttacacagagttcgtcagtggcccgaatcaattcctttaaaggtaataatcaaatagatactatggaggaggcaagaacgttcacaggtgacatggcagctgaatgtttacacagttacaggcttctttcgaggcactcaaaacctttctatttccctcttttaaatgatgattataactttgtcagagtgatgtgttggtgactctttaaaatcgccgtgaacttcagtggggttgattggaaagtattagagaaggcatactttttaatgatcctaaggaaaagacatgagatggcaactctggcttgcttgtgcatcctttgatgtgtaagaatattcttatgtctccttgcacgtgaaaaagccaaggaaaacatcatcaaaacacctggcaccattgctacgcgaggcctagagaagacctatttgcatttgactgaaaatgtttggtctgaaaagaaatcgatgtatgtattataaaacaacttattaagtagcataactattatttactatttctcaaaatagtgaatactttagtcagccaaggaaaagtatacatgtatgtgtgtaggcaaatatatagtatatataaaatatattaacatgtatatgtaaacttagatatacagtatatatagaatgtatatgtatgcatgtgtgtaggcaaatgtatatataaaatatattaccatgtaaacttacatgttttatatatactgtatatttgcctacacacatactatatattttatatatactatatatttgtatttataaaatatgtagttaatatgttatatatttgttatatgttaatgtttagcatgtatatataaggatacataagtaaaatttcatatacatgttaatatatatgtttatatataaatacacctatatatgtttatatataggtgtatatataaacatatagatgcatatgattataatcttgtatacatctaatatatatgagatgtatatatgagcttttctgctctgccagaaatagcaaatatatatttatatattaatatgtgtatatatatttatatataagcatatgtaagtatatattaacatgtatatatgtaagtatatgtaaatatatatgtggtttttctttttgtttgcttgtcaggaataaccaagtttaacgtcaactgtattaatcatctagttcatggtatattcgtttcactaccgactataaaatacaaaggctaaattatttgcaaaatctcttcttaatctcttcattgtagttgtttatgtatttttaattccaggcaccttagatcattttcttcatttgtgacattagccgtaatagaaatttcccttgtttctcctcttctaagatgctctggtggggcatccagttgcaaagacacagtgtcacgccgcgctgctgcagcccgcctcttcctgttctccactcccccttgcagcctccctgcctcggtactgcttaaaccagggccatatccacctccctgcctcggttcttccacaacagctcttcccccaaacattccttaacagtcagtcctagagacagttactggtgagattcattgcacacgatccagaaactggcatcctgctgcccaagccagggtgctgcagtgtctcctccttagcccgactttcgggaaaaagaaccgcatttcatgggcacaaagggtcttaatgttcatgtaataaaatgctatgagccagttgaaaatgacgttgcagagataaccttgatttgaaagggcttatggcacgccgtgacccagaagtcaactacacagcagtgtgtgcggtgcctccctcattttttagaacatgaaggtctggcaatctgtaccatgtgttcttcaaagtgattttctcctgggtaggataatggacttaaaaacctatttttctgtcttgtcttatttttctaaaatgaagattgttttgctccccaaagttttattatgaaacctttcacacatgcagaaaatgggaaagaagagtataacccacagctccctccccattccgtggagacggcagtaagtgttgtcctgtgttctctcttcctgaggcctttacctgcgaccaccttgtagacccagggccactgtcacccccacgaaggtgacaatagttcctgaatatcacctaattctccattgcttctagggtatgaaaaagatgaaaaaagcataacttttaataaaagcaagtaactcggataacactttggcattgtttctgtcttgaaaagaaggatggaaggttgtctgtcgggcatcttaacaccggggccttgtgccgttcacaaatccacttcaagacaggctgctcttccttggatctgatttaccagccagcctgggaacagagaagggaggggaggactggagaaggaagccaggagcccctggccacatggcacgggatggagctggcagggctctgagttggggtgagtctgggggtgaggggagtggaggggccgctgcagtcggtcgagaagcagctggaggcggtggggtttgagtggtttcttgacaggggtgacagtgaaagctcctcatccttcctgtgcattccactgcccccaaaatgaacgtgttctgcagccctggactcgctgatgacgaggggaggaatcatctttgcttttgaaatgttgaatttctatttcttttgtattctaaaacctgggtaattaatgaagatatttaaagggactattttaagtaagtcgttgctgcagaaatatatagaag

SEQ ID NO: 478546 - DNA, 1221 bp, Homo sapiens
ccggctgtcaagagacctgttcaatctactagatgctaaatcttgccgccgctgtgttccgggcacacgtgtggtctggcgccccggaggactgcgagcacctgcaccacgggcccgacgcgcggccgccctacctgctgagccccgccgacagctgccccggggggcgccaccgctgctcgccgcgcagctcggtgcactcggagtgcgtgatgatgccggtggtgctgggcgaccacgtgtccagcagcaccttcccgcggatgcactacagctcgcactacgacacgcgcgacgactgcgctgtggcccacgcgggcgccaagatcaaccgcatcccggccaacctgctggaccagttcgagaagcagctgccgctgcaccgggacggcttccacacgctgcagtaccagaggacgtccgcggccgccgagcagcgcagcgagagccccgggcggatccgccacctggtacactccgtgcagaagctcttcaccaagtcgcactcgctggagggctcctccaaaagcaacgccaacggcaccaaggcggacggccgggcggacaaccaccaccacgcccaccacgccaagcacagcaagaggagcaagagcaaggagcgcaagccggagggcaagccccggcccggcatgagcagctggtggagctcggacgacaacctggacagcgacagcacctatcggacgcccagcgtgctcaaccggcaccacctgggccccgtggcccactgctaccccgacgcgctgcagagccccttcggggacctgtccctcaagacctccaagagcaacaacgacgtcaagtgctcggcctgtgaggggttggcgctgacgcccgacgccaagtacctgaagcgcagctcctggtctacgctgacggtcagccaggccaaggaggcctaccgcaagagctcgctgaacctggacaagccgctgctgcaccaggacgccaagcccgccctgaggccgtgccactacctccagctgtttcagatgccacccgtgagagggaccatgtggcctctgtctgtgtgcgccgggctcatcctgctttgcagtttcttccagctcacctgtgttgtggagaatggcagatctccttctttcaaagactgagtagtgtcccctgtgtatgtaccgcatcttctttatccatcatttgccgggagactcgaggattgacggcacgctatggctttgt

SEQ ID NO: 478547 - DNA, 718 bp, Homo sapiens
agcagaaaagggaatgaataagatattggttctcgggtatgaaatgagaggcagttttcatggttgtcggcatggtgctgatttcatgtggttctgctaacaatcccaggaagtcgtcagtcactacccatgactggcagatgacaacattactgctccaagaaggtgactttcccaagttcagatggcttgtaggtgcccaagttccagccagaaccacggtgccctggcttctgtctcttccactccatcaaccaacagttctcctgaatactcagggtgcctccacctgccctaggtgcttgtcctgctacaccgagttgactgtcacaaacggtttaattcctttaatggagaaactggggctaatgctactcatgtgtcatgacttttacattatagccgacacactagactctcaggtgagcctcggagaggatggcaacgtgtctgccacgcaagggatgtcagagcagtgcttgtggtgcttgtgctggctgaccaccaacaccatccatccacagcaccgtccatgccctagtcatccaggcttgggccctgagagccggcacagggcagcccactgtctgccttcaatgccctgcaagtctctggcacacatcgatgctcaacaatgtgtcctaagtggagatatgtgagaattctgctcagagctcacctcctcttgcaacaccagggccgttgcaccaaggtggac

SEQ ID NO: 478548 - DNA, 1576 bp, Homo sapiens
tgatcatgttgtcaaggctctgataagacttggagcctaatgtttctctttccaattcctaaacagattttggggttcacctttgctcatgtgacctactgtcttacactaaacagcccttacatctatggaagatggtcatctactgattgtcctacactagacagaccttacgtccatggaagatggtcatctattgattgtcttacactagacagcacttacgtccatggaagatggtcatctattgattgtcctacactagacagcccttacgtccatggaagatggtcatctactgattgtcctacactagacagaccttacgtccatggaagatggtcatctattgactgtcttacactagacagcacttacgtccatggaagatggtcatctattgactgtcttacactagacagcacttacgcccatggaagatggtcatttattgattgtcctacagtagacagcccttacgtccatggaagatggtcatctactgattgtcctacactagacagcccttacgtccatggaagatggtcatttactgattgtcctacactagacagcccttacgtccatggaagatggtcatttactgattgtcctacactagacagcccttacgtccatggtagatggtcatctactgattgtcctacactagacagcccttacgtccatggaagatggtcatttattgactgtcttacactagacagcacttacgtccatggaagatggtcatttattgattgtcctacactagacagcccttacatccatggacgatggtcacccactagggaaatttattttcggttccacagtgtggtgaaaatgacgatgctttttcctcacctgcagaatgagaatgcgcgtcctgtgaccttcatgtttgctgtggcgttaagcatattgaccaaggcaccagaacgcagggagcccacgcagagtgacaggtgggaggcagttcctttccttgtccctccttcgtcgtgttcaacccttggacctgccacaaaactggaccttcccatccttgacagcactttcacggagtggcccaggcatcacaaactgatgacgtttctcagctcttcagaggatgcaacaatacgttcgtcacgcactgcagagttcctctggaagcctgacatctggggcaacgaggctggcaaggtcccgacagcggaccttcacttcctatgagcctggaagccacacttcacagccacaggctgacctccaaacacatcagcaagttatcgctgttgtccagggaaagccagcctgtttctatttaattttccatctaaatcacaaatacctcccagggacaaattccgactccttttcgaatgcccatttgcacgggagcgtgcttgtaatttacaggcagttaaaggggcaaatccttacaaaaaactcttcagaatctaaaattacagaagtctgtgttttcagttactgcaatatgcaaataaattagttgtcatggaaatcatgttcgggaaacacatgaagttaacgtggacatctgtctggagtattacaccgactcctctcc

SEQ ID NO: 478549 - DNA, 2143 bp, Homo sapiens
tgtctccctgtgctgaaactaaaaatgaagagccagcagcccacggtagtggaggagactgtgagagaggatgcctcctccccaggagcatatggcttcctattaactgaagaactgcaggttgcaggggacgtaactccagggagccttcccagaggaggcaatcagagctgggcatggaaggatgaccggcagcaaggaggagacggtgaacagccgacttcaagtcagaggagcgaggaggaagaaaattgtcaggggaacaaggctttccgggggcagatcacgaaggatctgcactgggatcaggcaaacccctgcaaccagcgcgtggagggtctcaaacagaaagctgagacctctggttcagatgctgaatgggtcagtgcgtctcactttctgcatggctgtaagaatttccgcaaatgcacggtcatgcagccaccaccaaaaccgagacatgcagccctccctctcactgcagttctaagttcctgctgccctcttctttcagagccatgcttaaagaacttcctttcttaggaagccgaggagggtgggccatttcaggttttatctgtatccttcacttctggtagtttgactgtggtgtgtacatgtgtgtggggcttgtctgtatccttcacttctggtagtttgactgtggtgtgtacatgtgtgtgggggtttgtctgtatccttcacttctggtagtttgactgtggtgtgtacatgtgtggggttttatctgtatccttcacttctggtagtttgactgtggtgtgtatgtgtgcggggttttgtctgtatccttcacttctggtagtttgactgtggtgtgtagacgtgtgtggggttttttctgtatccttcacttctggtagtttgactgtggtgtgtacatgtgtgtggggattgtctgtatccttcacttctggtagtttgactgtggtgtgtagatgtgtggtgttttgtctgtatccttcacttctggtagtttgactatggtgtgtatatatgtgtgggggtttgtctgtatccttcacttctggtagtttgactgtggtgtgtagacgtgtgtgggggtttgtctgtatcgttcacttgtggtagtttgactgtggtgtgtgtatgtgtgtggggttttatctgtatccttcacttctggtagtttgactgcggtgtgtatatgtgtggagttttgtctgtatctttctggttgactgtggtgtgtagatgtgtgtggtgttttgtctgtatccttcacttctggtagtttgactgtggtgtgtgtatatgtgtggggttttgtctgtatctttctggtagtttgactgtggtgtgtagatgtgtgtggagttttgtctgtatccttcacttctggtagtttgactgtggtgtatatatgtgtggagttttgtctgtatccttcacttctggtagtttgactgtggtgtgtatatgtgtgtggggttttttctgtatccttcacttctggtagtttgactgtggtgtgtgtatatgtgtggagttttgtctgtatccttctcttctggtagtttgactgtgttgtgtcgatgtgtgtggggttttgtctgtatccttctcttctggtagtttgactgtggtgcatatatgtgcggggttttgtctgtatccttcacttctggtagtttgactgtgttgtgtagatgtgtgtggggttttgtctgtatccttctcttctggtagtttgactgtggtgtgtagatgtgtggtgttttgtctgtatccttcacttctggtagtttgactgtggtgtgtagatgtgtgtggggttttgtctgtatccttcacttctggtagtttgactgtggtgtgtgtgtatatgtgtggggttttgtctgtatccttcacttctggtagtttgtggtgtgtgtagatgtgtgcagggttttgtctgtatacttcacttctggtagtttactgtggtgtatagatgtgtggggttttgtctgtatccttcacttctggtagttcgactatggtgtgtagatgtgtggggttttgtctgtatccttcacttctggtagtttactgtggtgtgtagatgtgtggggttttgtctgtatccttcacttctggtagtttgactgtggtatgt

SEQ ID NO: 478550 - DNA, 3150 bp, Homo sapiens
agttcacccctctctcctctccatctcatcagacgcccccacagttcaccctctctcctctccatctcatcagacacccccacagtccaccctctctcctctccatcccagaagatgcccctccagttcaccctctctcctctccatcccatcagtcgcccccacagttcaccctctcctctccataccagcagacgcccccacagttcaccctctctcctctccatctcatcagacgcccccacagttcaccctctctcctctccatcccagaagatgcccccacagttcacccttctctcctctccatctcatcagacgccccacagttcacctctctcgtctctattccagcagatgcccccacagttcacccctctctcctctccatctcatcagacaacccacagttcaccctctctcctctccatcccagaagacgcccccacagttcactcctttctcctctccatctcatcagatgcccccacagttcacctctctcctctctattccagcagatgcccccatagttcaccccctctcctctccatctcatcagatgcccccacagttcaccctctctcctctccatctcatcagacacccccacagttcaccctctctcctctccatcccagaagatgcccctccagttcaccctctctcctctccatctcatcagacgcccccacagttcaccctctctcctctccatctcatcagacatccccacagttcaccctctctcctctccgtctcatcagacgcccccacagttcaccctctctcctctccatctcatcagacgcccccacagttcaccctctctcctctccatcccagcagacgcccccacagtttaccctctctcctctccatctcattagacgcccccacagttcaccctgtctcctctccatcccagcagacgcccccacagtttaccctctctcctctccatctcatcagacgccccatagttcaccccgtctcctctccatcccagaagacgcccccacagttcaccctctctcctctccatctcatcagacgcccccacagttcaccctctctcctctccatcccagaagatgcccccacagttcacccttctctctctccatctcatcagatgcccccatagttcaccccctctctcctctccgtcccagaagatgcccctccagttcacccctctcccctctccatctcatcagacaccccacagttcactcctctctcctctccatcccagaagacaaccctccagttcacccctttctcctctccatctcatcagacaccccacagttcacccctctctcctctccatctcatcagacaccccacaattcaccctctctcctctccatctcatcagatgcccccacagttcacccctctctcctctccatctcatcagatgcccccacagttcaccctctctcctccccatctcatcagatgcccgcacagttcacctctctcctctccatcccagaagacacccctccagttcacccctctctcttctccatctcatcagacacccccagagttcaccctctcccctctccatctcatcagatgcccccacagttcaccctctctcctctccatcccagaagatgcccccacagttcacccctttctcctctccatctcatcagatgtccccacagttcaccctctctcctccccatctcatcagatgcccccacagttcacctctctcctctccatcccagaagatgcccctccagttcaccgctctctcttctccatctcatcagacgccccacagttcacccctctctcctctccatctcatcagacacccccacagttcaccctctctcctctccatcccagaagacgcccctccagttcacccctctctcttctccatctcatcagacatccccacagttcaccctctctcctctccatctcatcagacatccccacagttcaccctctctcctctccatctcatcagacacccccgcagttcacccctctcctctccatcccagaagatgtccctccagtttacccctctctcctctccatctcatcagacacccccacagttcacccctccctccatcccagcagatgtgtcctctcttcatccttctctcctctccatcccagcagacgcctccacagccagcctcttgggcattacagcgtctgcacctacactgtggtgaacatgtgaaatccaactgagccttctcaaagcttaggtgggaatggtcaactcagaaatcaattttaaaactaagacaaatgaggaattggattaggagaacatgtttgggatatgaatattcacctgctacacgttaaaaatgctgatatttaaatgtgcctagattgaaagagcccccaggagtgaacattatgaaagggctgtgcgtaatggaacaggatgcagagacgacatcatggtgccagccacagtcatagggggtgctgggcagcagtgccatggggtgaagatctacctgccctccacagagcagtgccatggggtgaagatctatcctgccctccgcagaacagtgccacaggtggacaatggcatgggggccataggcagagtggatttgtgtctgctgagtgggcagtggcatgggggccacgggcagagtggatttgtgtctgtggacaatggcatcggggccacgggcagagtggatttgtgtgtgctgagtggacagtggcatgggggccacgggcagagtggatttgtgtctgctgagtggacagtggcatggaggccacaggcaaagacggatttgtgtctgctgagtggacagtggcacgggggccatgggcagagtggatttgtgtctactgagtggacagtggcatgggggccacaggcagagacagatttgtgtctgctgagtggacagtggcatgggggccacgggcagagtggatttgtgtctgctgaatggacagtggcatgggggccacaggcagagacggatttgtgtctgctgagtgggcagtggcatgggggccatgggcagagtggatttgtgtttgctgagtggacagtggcatgggggtccacgggcagagtggatttgtgtttagaacaggagtaacgtaggcagcacatctcaccca

SEQ ID NO: 478551 - DNA, 666 bp, Homo sapiens
tgcctgagattggcttctgttccttctccacaggcgccttttcaaccccgcacccccgagtgactgctgttccctcacacagataatggcaccactgcgatctagaaagacacccacagaacaacagtccctcgctcatccactccgccagtcaccggtgccatccacgcatggtgcctcttgcaggagactcacagacagtgaggaagacatgctgccctcagagctgacggtcccattttttccacgaactccaactccacgcatcagaagcacactagtcgcattctcgagcagctcaaacttcagcatggaatgttgtttcccaggcttttacagtccacagccactccttttctggcatcaaaatctgagcttggaaaagagacctgccaagctcaccaagactgagtacgagtggattccagtggcctccatggaagagccaccccgctgcgtcctcctgctgggggtggaggactgtgtggaggacagtgtggggaggactgtgtggaagaaggactcccagcctcccacctggctgttcaacggaggctctgccctgagtgggcttgtcaagaaatcctgaagaatatgccacagcttgaaactgctgaggaactcaacacctctgccctcctcaacgaagactctcagcgatgatgg

SEQ ID NO: 478552 - DNA, 639 bp, Homo sapiens
agtctccaggcgccacgtggagatgagcacacctgctgttggcttgacggacccagaagctgaactgctggacacttcaaaagaaaaagggaaattggaaaccttctggcttaggcctgcgactggacggctctgccccagagcggtgcccgccgacccagggtcctccatggtctgtgatgttttgatcacgacggctgaggcctttggtgagagcccagaacagccatccagacactcgaaggaggttcacgctgattcagagtcatcaggaaccacccttggcacaaacagcatgatgaccatcctacagataaggaaaccaaggctttcattacttgccccagatcataagagccagagcctggacttgagcaagtcaagcctgcatattacggcagatggaaagctgtgcagtctgcgtgttcaaagagcatttgcaaaaggcagccaagacaggctgtctgctgagcacattccaatcaaagggggaatttctcggtttccttaggaacagttcagcatcagcggagatgcggcggcggctcctgagccttgcagagagccacaacactaacagaactgcatttgtctcctcttgctcttccaactctaaataatatcttagcgtttcatgcc

SEQ ID NO: 478553 - DNA, 2741 bp, Homo sapiens
gtccacacctcttccagctctgagtgcccttagcggggtccctcatcgacacttcttccagctctgagtaccctcagcagggccccttgtcaactcccgtgttatcattccaagcttcgccactttctctgacctctcctctctgcagatcctctggcttccccgggatgctgcagccaccctccccactgactgggaggaagccacgtcgccttcccatcctcctcctccagagtcccctccccactgactgggaggaagccacgtcgccttccaatcctcctcctccagagtaccgctcctcccattatggcatttcccataaagaggtccacgtgcctcccgtcatgaagaggccctgcacttccacacccttagtctgtgggaccagagccctccccacctgcagcctctgctctcacagccctgacacctgaaccagagcctcctcatccacggcctctgctctcacagccctgacacctgaaccagcgcctcctcatccacggcctctgctctcacagccctgacacctgaaccagcgcctcctcatccacggcctctgcctctcacagccctgacacttgaaccagcgcttcctcatccacggcatctgcctctcacagccctgacacttgaaccagcgcctccccatccacggcctctgctctcacagccctgacacctgaaccagcgcctcctcatccacggcctctgcctctcacagccctgacacttgaaccagcgcctcctcatccacggcatctgcctctcacagccctgacacctgaaccagcgcctcctcatccacggcctctgcctcttacagccctgacacctgaaccagcgcctcctcttccacggcgtctgcctctcacagccctgacacctgaaccagagcctccccatccacggcctctgctctcacagccctgacacctgaaccagtgcctccccacccactgcctctgcctctcaaagccctgacacctgaaccagcgcctcctcatccacggcctctgcctctcacagccctgacacttgaaccagcgcttcctcatccacggcatctgcctctcacagccctgacacttgaaccagcgcctccccatccacggcctctgctctcacagccctgacacctgaaccagcgcctcctcatccatggcctctgcctctcacagccctgacacttgaaccagcacctcctcatccacggcatctgcctctcacagccctgacacctgaaccagcgcctcctcatccacggcctctgcctcttacagccctgacacctgaaccagcgcctcctcatccacggtctctgcctctcacagccctgacacctgaaccagtgcctccccacccactgcctctgcctctcacagccctgacacctgaaccagagcctccccatccacggcctctgctctcacagccctgacgctgtgagacgctgacactagccccagcccgcacgcactggctgcatccacgtctggccagtgagtctccagcagctctgcgcccaccgtgtttgctcacgcgctggggacctccacgccttgatcgctaacccacccgtaaccctaactgtggggctccagacccccaggtgaacctactcacaggacatctcggcttccagcgccatcaaatccacaggctcttagactgacatcactggcctcctggacaatttcatgccttttcctggttccgattgtggcacagtggtgcagttcagtggcgtcagatacactcactgccgtgcaaccacgaccaccgtccttctccagaacctcctcagttctgcaaactgcccctcagcccccgtgcaccagactgccaatcttaatgctgtgatgtgtgtctccaggggccgggcacaggccggggtaactgtgcaccaagttctcaggggccgggcacaggccggggtaactgtgcaccaagttctcaggggccgggcacaggccgcggtaactgtgcaccaagttctcaggggccgggcacaggccggggtaactgtgcaccaagttctcaggggccgggcacaggccggggtaactgagcaccaagttctcaggggccgggcacaggccggggtaactgtgcaccaagttctcaggggccgggcacaggccggggtaactgtgcaccaagttctcaggggccgggcataggccacggcagaggagagtgcagcgactgtgcagtcacaattcttgctttttccaggaaagaaattaaattctgaaaatggcatccaaggccacttcatcccttaacttttatgaatcctttggtcacagtaactttcactttaaaaaatacagacctggcctagtaacctaatgaattctgacctaattcttctattaattgatgcctaaataagtgtatactgtttcccaacgtctgaatgagccagtgaataacgaaaacccctttcttgttggggtcacatattttatcactaagtacagacaccaaaaccccagacatgcatttgtgggtctccttcatgaatgtaacacatcggagaagagaatgggagtgaaatgaccttcctgtcagagtccaccgccaaagacatctgccgctctctcacccatgaagagtgaagagattcattagtttactctgctggaaagtgctcgctgggagctgctggtggtcatctgaccaggagtttaattcatgcttcttgttaatgtcaagttaatataggctctgac

SEQ ID NO: 478554 - DNA, 2500 bp, Homo sapiens
ggttcattcacagaataaacaggtcctgtctttacagtaatggagtaatgcctgcaaatgtcgtactcggggccctgtcgtgggtccatgtattcggggccctgtcgtgggtccgtgtactcggggccctgtcgtgggtctttgtactcggggcgctgtcgtgggtccgtgtactcggggccctgtcgtggggcctgtgccgtgtagaatctgtagctgcacacttcgcccagtctcccctcgagctacgtgcccaggcattgtgggtggctggcgggtctgtgcagacaacagccttcagggtgccacctgcattgccctcacacctcgcacatggccgggacacagctgtgaatcctccagagaggtctagtgtcactttctctgagcagctgctctccagattaggtggccatgtgggtaaaagaagaaataaaaacatccccgactacttcatgctcttgtggcgtggaaaggccgcgcgggtcctgagtgtgcgtggaaaggccgtgcgggtcctgagtgtgcgtggaaaggccgtgcgggtcctgagcatgtgtggaacggccgtgcgggtcctgagcgtgcgtggaaaggccgtgcgggtcctgagcgtgcgtggaaaggccgtgcgggtcctgacagtgtgtggaaaggccgcgtgggtcctgactgtgcgtggaaaggccgcgcgggtcctgactgtgcgtggaaaggccgcgcgggtcctgagtgtgcgtggaaaggccgtgcgggtcctgactgtgcgtggaaaggccgcgcgggtcctgactgtgcgtggaaaggccgtgcgggtcctgacagtgcgtggaaaggccgtgcgggtcctgagtgtgcgtggaaaggccgcgcgggtcctgactgtgcgtggaaaggccgcgcgggtcctgactgtgcgtggaaaggccgtgcgggtcctgactgtgcgtggaaaggccgtgcgggtcctgagtgtgcgtggaaaggccgtgcgggtcctgagtgtgcgtggaaaggccgtgcgggtcctgagtgtgtgtggaaaggccgcgcgggtcctgagcgtgcgtggaaaggccgtgcgggtcctgagtgtgcgtggaaaggccatgcgggtcctgagtgtgcgtggaaaggccgtgcgggtcctgacagtgtgtggaaaggccgcgcgggtcctgactgtgcgtggaaaggccgtgcgggtcctgactgtgtgtggaaaggccgtgcgggtcctgagtgtgtgtggaaaggccgtgcgggtcctgagtgtgcgtggaaaggccgtgcgggtcctgactgtgtgtggaacggccgtgcgggtcctgactgtgtgtggaaaggccgtgcagatcctgagtgtgtgtggaaacaccgtgcgggtcctgactgtgtgtggaaaggccgtgcagatcctgagtgtgtgtggaaacaccgtgcgggtcctgactgtgtgtggaaaggccgtgcagatcctgagtgtgtgtggaaacaccgtgcgggtcctgactgtgtgtggaaaggccgtgcgggtcctgactgtgtgtggaacggccgtgcgggtcctgactgtgtgtggaaaggccgtgcgggtcctgagtgtgtgtggaaaggccgtgcgggtcctgagtgtggaacggccgacgtgcgcgtcctgcgtgtggcgtggaaaggccgtgcgggtcctgagtgtgcgtggaaaggccgtgcgggtcctgactgtgtgtggaacggccgtgtgggtcctgactgtgcgtggaaaggccatgcgggtcctgagtgtgtgtggaaaggccgtgcgggtcctgactatgtgtggaaaggccgtgcgggtcctgactgtgtgtggaaaggacgtgcgcgtcctgcgtgtggcgtggaaaggccatgcgggtcctgagtgtgcgtggaaaggccgtgcaggtcctgactgtgtttggaaaggccgtgcgggtcctgactgtggaaaggccgtgcgcgtcctgactgtgtgtggaaaggccgtgcgggtcctgagtgtgtgtggaaacgccgtgcgggtcctgactgtgtgtggaaaggccgtgcggatcctgactgtgtgtggaaaggccgtgcgggtcctgagtgtgtgtggaacggccgtgcgggtcctgactgtgtgtggaaaggccgtgcgggtcctgagtgtgtgtggaacggccgtgcgggtcctgactgtgtgtggaaaggccgctgtgcgggtcctgactgtgtgtggaaaggccgtgcgggtcctgactgtgtttggaaaggccgtgtgggtcctgatcgtgtgtggaaaggacgtgcgggtcctgagcgtgtgtgtggaaaggccgtgcgggtcctgagtgtgtgtggaaaggctgtgctcctcctgtccccagcgactccccctggggcttcctcatggggccatctcttcctctccccagcgactctccctgtacctgcccttccctccccttcctggggtcaccgctgggtctcagctctt

SEQ ID NO: 478555 - DNA, 1051 bp, Homo sapiens
gtgtggcctgcactttatcccttggccagcagatgggctaatggggaacatctgctgtttccattttctggctaagcaatgctgctgtggacacttgtgtgtgagtttctgtgtagacatacgtcttcatttctctgggatgaatgcttaggaatacacacactgggtcataagaaaccactgcctaaccattttttggggggatgaattaatgcatgaatcaatgaggaacccaagcatgccatcttcctcctcctcttcatcaccaccaccattatgatcatcatcatcatcatcactatcatcagcatcaccatcatcatcctcatcaccactatcatccccatccccatcatcctcaccattctcaccatcatcaccatcatcatcatcaccatcaccatcatcctcaccatcaccatcatcaccatcatcctcaccatcaccatcatcatcactgtcatcctcacccccatcatcctcactattaccatcatcaccatcattctcaccatcacatcatcctcatcatcaccatcgccaccaccaccatcatcctcatcatcaccaccatcatcaccatcattctcaccaccaccatcatcctcatcatcatcaccatcatcaccatcattctcaccaccaccatcatcatcatcaccaccatcatcaccatcattctcaccaccattatcatcctcatcatcatcattatctatttcttcttcacctcctcctcctctctatcttctcatcatgtcacacactgtcattactggttactatgtactgatcaccaatgactattctagagactcattgcctctgctcctcactcccatatggtcaataatatcttcattttagggtgggataacttgtacttagaaaatatgaattgctcaatgtcattttgctagtgaaaagcatgtttttctgattccagaatcaataccttttaactactccttaaattcctttgcagtaaacattaggaaaaatgtgtgtatgtattaaatgaacaacagctcttaagtagtttattaaaaga

SEQ ID NO: 478556 - DNA, 2003 bp, Homo sapiens
aagaagcagctctccttccacattgaatgtggcctatcttggcgaatgttctgtgcgagcttgggaagaatctgtgttctgctgctgttggatgaagtagcctacagatgtcagattcagttgattgatggtatcactcagttcaaccctgtcattgctgaatttctgaatttctgcctgctggatctgtcaattactgagagcagatactcaaaatctccagcattaatggtggactcatctattcctcctggcagctccacaatgtcatctgtaccatatttaactgtagacactttcctctacctgctcaaatctgctgctgaacctctagagcgttctgtcctgaggcacttcttccacacgtaccctggcttgcaacgagcccagggaccacttgaggtgaaagctgcaggtcttcctaggccttttctgaacacgcacattgacctggtgtatgcacagctttgctaaatgttcttctttcacccgtctaggccccattttgcttatacatccatttacgtgtctattgcacacgtgggctgcttccatctttggctactgtaactaatactgcttgagcatgagtatacaattatctgagccctgcttccacttcttttgggtgtatggccagaagtgaaatttctggggcataggaaaattccatgtttattttttgaagactcaccatatcattttccatgatgggaacatctttctatattctcaccaaaaatgcacaaggtttctaacttctccacatccttgccaacacctgttcttttcttttcattgttgttgttttacaatgaccactctaatgtgtgttggcatttccttgtggtttagctttgtattcccttaataattaatgatgttgctgtgcttattggtcatttgtgaatcttcttggagaaatatccaagtcctttgcccatttttgaatcagattattttgctgttgtagttatttaaatagtgtaggtatcagtccattttcagattgatatatgatttgaattttgatatatgatatctactcccattccatccctttcattcagctgaaagtgtcccttaatgcacacaagctttaattctgatgaagtctaaattatgtatctattcttttgttgcttgtacttttggtatccaagatcactgtcaagtccaatgtcataaagcttatcctctctgttttcttctgagagtcttacaggtttagctcttatgtttaggtcttttatctgttgagtattgtttatatgtggtataaggtatgagttcagcttcattatttatatgttgatatccagtttctctaacataaattattgaaaacactgttccttctccattgaatggtcttggcacccttatcagaaatcatttgacaatatacaccagggtttatttctggactctctattctgttccattagtctagatgtctgtgattatgccagcacttaaccacactattttgcttatcatagctctgtagtaagttttgaaatcaggaagtgtgagactccaacttagttcttatttttcaagattgttttgagtatttggggtcccttgtaattccatataaattttagggtggatttttctatttctcaaaaacccaccattagtagttctgacatcttaacaacagtaagcctttcaatccatgaacacagatgtctttccgttcattagtgtctttaatgtcttataacaacattttatagttttcagtgtacagcctctctcctccttggttaagcttatttctaagaattttgggtttttttgacacgattataaatgcaattatttacttcctttttaaattgttcattctgatagtatttggaaacactagtgatttttgtgtgttaattttgtatgcagacactttgctgaatccttttttatacccttgtgtaggtgtgtgtgggtgggggggaatcttcacagttttctacatataagattatgtcatctgc

SEQ ID NO: 478557 - DNA, 800 bp, Homo sapiens
acccgaggctgcctgaccctggctttggacggtgggttcgaagggagttcctggggagcatgggtggtccctggacacactacatagccatgctgggtagccacagtcccgtgacagcagcaccttctcccaacctgaacaccgcccttctccctcctcctggtcaccgaatcagcgactgcacccagtcctgtgacagcagcaccttctcccaacccaaatgccgcccttctccctcctcctggccacgaaatcagcgactgcacccagcccacgtgacagcagcaccttctcccaacccaaatgccacccttctccctcctcctggccaccgaatcagcgactgcacccagtcctgtgacagcagcaccttctcccaacccaaatgccgcccttctccctcctcctggccacgtaatcagcgactgcacccagcccacgtgacagcagcaccttctcccaacccaaatgccgcccttctctctcctcctggccactgaatcagcgactgtgcccagcccacgtgagagctgctgattttggtttatggaggcagaaacccacgccaggctttccaaactcaggtctgtccaaatggtacccttgtgtttatgctctggagagagtcctttctgatccctaccgacccaaagacttgtgtggaaattatactgaataaaacccactggccacccagatgagtagggctggtctccaggtttgtatattgcagtctttacccataaagtatcttctctgattagtaaaaaccattctttactcttgattccaacccaaag

SEQ ID NO: 478558 - DNA, 1751 bp, Homo sapiens
aaccacttcttgagttctattttggcattggtatggtttggctgcgtacccatccaaatttcatcttgaattgtagttcccataatccccacatgctgtgggagggacccagtgagagcaaagagactggtggaattttgccctgccctagagatctgtggaattttgaacttgagagagataatttagggtatctggcagaagaaatttctaagtgggaaatcattcaagaggaagcagaacataaaagtttggaaaacttgcaacctgatgaggcaatagaaaagaaaagcccagtttttagggagaaattcaagcccactgcagaaacttgcataaaggatgtatggaaatgcctggatgtccaggtagaagtatgtgctgaggtggagccctcatggagcatctctgctagatcaatacagataggaaaagtggggtcagaggccccacactgggtccccactgaggcactgtgtaatgaagccatgagaagagggccaccatgctccaggcctcagaatggtagatccaccaacagtttgcactgtgcacctgtaaaagccacagactcaatgccagcctgtgacaccagccaggagaggattggacccacttggtaattcagcataatctgccaatctcaagtttagcccattagaaacatttattgcatgtgcagtcttaattttcttttgccatgtaaggtaacataatttacaggttctgggaattagagtgtggatacctttggagggtcattatttctgcctaccatctcctatatctgcctaccgattaggtttagctgtgaataatagagactaaaaataataatgatttaaataaaacaagtttattttcctatcacataaatgtcctaatacaatgattagcatttttatattatagatgttgaaacgaatactaataatttcaatgaatcatatgaactatggatattattaaaagatgactttgttttcattttaacaccagtgcaaatttctaaagtaggtttattctatgtgtatataaagttattacaaccagtcatttttattaagtttgtaaaaaaaaatccagtaacaacaaaaaactgagttctaaagggagacaggaagagcaaaagcaaagatcacttttgaatcatttgcattaacatcacatagcaacttgtaataataccaatgacaaaaacatgtttattaggaagttttaaaaaggtaatgagatttcttggctatttaaaatgcttatgagaaactgaagccctgaaaataccttagtggacaggaataataaactaattattggaaggtgacatttaatagggataatgtgattttaaaaatatgaagagacagtataaggacatagtattttaatggaaacatctatttaattttcttaagctgataggaggatttggtggtagtgtaatagccagatgctaattacaacctaatttgaatgaatagcatcatatagagaatattccttaaaaaatgtgcggagtgtggcactctgggctgttccttccatacctgaatataaagtacaattctggacacagtaacaagaagggcacatttaagctgaaacatttccagaagagaataaacctgaggatgaaaagtctgacactgtgccagttctgaaatcagaactgtgtgtcttgtggagataaacatatagggaatgtgatagccgtcttaaaatatctacagaatatcagataaagaacattt

SEQ ID NO: 478559 - DNA, 686 bp, Homo sapiens
ctctcatctgatgttttggctataccatcagctgtagcaagcagggatcctatgcagattttcaggtacttctcccatccaatgggttcactgcagtattgctgtattgaatttccacatgaggagccagcaatctacactgaaggagaatgtacctgtctactggcacaacgcagcaagagccctatgtatggaacaccttcaggccacaccctgaggaacagacaaagttatatgcagttcagaggaattccagaagaaggcattgttattacaggagatgatggctccgtgtgtgttgttgcccctgaagaccttccagtgggtcaagatatggaggtggaagatggtgatgttgatgagcctgaccctgtaatgtactcccatcatcaagggacacttgactgcatctgtatagcaactgaggttgtaacacggacaacatgtcccataattcaccttctttgggaaacattacctctcattgaaaaatcattatggctattatttagttttgcaactccttaacaactaggaagctaataagactgggtacaagaatttcaaatagaaatactaaagcaaatagttaagtttcacaggaaatatatcagacttaacgtggtaataagcattataaaaaataaaatctcacacagagcaaccatcaaaataataaaaccttt

SEQ ID NO: 478560 - DNA, 531 bp, Homo sapiens
cccccgccgccgctccagcgccgcgcagccaccgccgccgccaccgccgcctctgcttagtcgccgccatgacgaccgcgtccgcctcgcaggtgcgccagaactcccaccaggactcagaggccgccataaaccgccagatcaacctggagctctacgcctcctacgtttacctgtccatgtcttactactttgaccgcgatgatgatatcaagaaaccagactgtgatgactgggagagcaggctgaatgcgacggagtgtgcattacatttggaaaaaaatgtgaatcagtcactactggaactgcacaaactggccactgacaaaaatgacccccatttgtgtgacttcattgagacacattacctgaatgagcaggtgaaagccatcaaagaattgggtgatcaagtgaccaacttgcgcaagatgggagcacccgaatctggcttggcagaatatctttttgacaagcacatcctgggagacagtgataatgaaagctaagcctcaggctaatttccccatagcc

SEQ ID NO: 478561 - DNA, 1889 bp, Homo sapiens
acggcagaataggaatagctccagtctacagcacccagcatgagcgatgcagaagatgggtgatttctgcatttccaactgaggtactgggttcatcttactagggagtgccagacagtgggtgtgggacagtgggtgcagcgcaccatgcgcgagccaaagcagggcaaggcattgcctcatgcgggaagcgcaaggggtcagggagttccctttcctattcaaagaaaggggtgacagacagcacctggaaaatcgggtcactcccaccctaatactgcacttttccaacgggcttaaaaaatggcacactaggagattatatcccgcacctggctcagaaggtcctaagcccatggagcctcgctcattgctagcacagcagtctgagatcaaactgaaaggcagcagcaaggctgggggagaggcacctgccattgcccaggcttgattaggtaaacaaagcagctgggaagctcgaactgggtggagcccaccacagctcaaggaggcctgcctgcctctgtaggctccacctctgggggcagggcacagacaaacaaaaagacagcagtaacctctgcagacttaaatgtccctgtctgacagctttgaagagagcagtggttctccaagcatgcagctggagatctaagaatgggcagactgcctcctcaaatgggtccctgagccccaagtagtctaactgggaggcaccccccagtaggggcagactgacacctcacacggccgggtactcctctgagacacaacttcaaaaggaacgatcaggcagcagcatttgcggttcaccaatatccgctgttctacagccactgctgttctgcagccactgctgctgatacccaggaaaacagggtcagcagtgcacatctagcaaactccaaatgacctgcagctgagggtcctgtctgttagaaggaaaactaaaaaacagaaaggtcatccacaccaaaaacccatcgtatgtcaccatcatcaaagaccaaaagtaggtaaaaccacaaagatggggaaaaaacagaatagaaaaactggaaactctaaaaagcagagcacctctcctcctccaaaggaacgcagctcctcaccagcaacagaacaaagctggatggagaatgcctttgacgagttgagagaagaaggcttcagacaatcaaactactatgagctacaggaggaaattcaaaccaatggcaaagaagttaaaaactttgaaaaaaaattagatgaatggatacctagaataaccaatacagagaagtccttaaaggacctgacagagctgaaagccaaggctcaagaactacgtgaagaacccagaagcctcaggagccaatgtgatcaactggaagaaaggattcaggaaatacagagaccaccacaaagatactcctcgagaagagcaactccaagacacataattgacagattcaccaaagttgaaatgaaggaaaaaatgttaagggcagccagagagaaaggtcaggttacccacaaaggaaagcccatcagactaacagcggatctctcagcagaaactctacaagccagaagagagtgggggctaatattcaacattcttaaagaaaagaattttcaacccagaatttcatatccagccaatctaagcttcataagtgaaggagatataaaatactttacagacaagcgaatgctgagagattttttcaccaccagacctgccctaaaagagctcctgaaggaagcactaaacatggaaaggaacaactggtaccagccactgcaaaaacatgccaaattgtaaagaccatcaaggctaggaagaaactgcatcaagtaacgagcaaaataaccagctaatatcataatgacaggaccaaatt

SEQ ID NO: 478562 - DNA, 1419 bp, Homo sapiens
tgtggtgtttggttttgcaacagtattcgagctctgctaagggtcagactgcctcctcaagtgggtccctgacccccatgtatactgactgggagacacctcccagtaggttccgacagacatttcatacaggaaaactctggttggcatctgtagtggacctccagaaaactccagcagacctgcagcagaggggcctgactgttagaaggaaaactaacaaaaaagggaacagcaccaacgtcaacaaaaaggacgtccactcagagaccccatccaaaggtcaccacatcaaagaccagagtttggctttcaaatggcaaacagtggaacctagattctcagttaaaattcctggcatccaatgtgggaggtgtgtcttgggtggtcctgtctgcctggtttccaatggatggagcaataggccatggaagtgtgccagaacttatctgttcacactaccagacaggatgacaactactcatgatattttgcttctctgcatggcctctgctgcttgtagtgctcagctggtgcaagggaaagcagcatctgaggagctgacggcctccaagactgggtattgattaatgaatattcttaatgaaacttcaaaaaggttttatttttaattatattacctgtttctttttgaacactttcagatttatatctaaaaagttcaacttttactctgtcttccttctttcagttttttctttccttgataattctctccaactttttgtaagcttcctctggatctaactattgttgtggcctgatgatgaaaagttttaccttgaagatctagaaaaacaatgttttttccccctgaataacttgattctatacttttggcttttctttacatgactaattttttcaatttatttaggacaattctcatacagttactaagaattatatattcccctgctatactcataaccttgaacacagtcttcctaggtttgatgaaacacaagtactttttttcatcagctttggtttccaagttatctaaatgagctttccataggagaagcaatcacactgcaagtgttttttttttttttctttttttttaataactggcctaagaaacaaagattttacattttatcaagataattcctgtgttgtcttctcaggtttttgatttcttaggaaaactgaactttaaaagagttaaggttttatattcgtgtaactttctgtattgatttttaaaagttttttattactattggttacatgaataactatatttcattggcctctgattccattttgatcacttattttggagcttttaacatctttgacaaacctcctcaaaataaaataaatattgctcattctttatattttttccagagacaggaaaatcttttttcttttaactatttatagctt

SEQ ID NO: 478563 - DNA, 632 bp, Homo sapiens
ctctgggtgactattttgggaatcaaaagttccatatagatgctttctcagtattactgctgtgagggcttcacctcaggtatcacagatgaaattggagggggttatcagacacttcccaaggcttatcatcagaggtggaggatgagaaagactgactgtatgcagagttcaaagtcagagaggtggagactgcatgtatatcctaccagacaggaaggatggggcagctctgtagctggcagagctcagagcagcatggagttttggggcctggaggctgtgctacaagaatactcaactgatgtggtgcccaggatgagtttggagtgggggcggggtctcctaatgtgtcaaggaggagcaggacaccaggtccggcctactttctgcaggcttggagcagcaggagagagaagtcaggatacaggcaggatgcaggtgagagggctcagagagaaaggctggcgatgacacctggagggggttcactctgggggttgtctggggaccctcttgcaggtgaagaggggtgggctcacctgcactcattctttttcatatttcccttaagctgggtaaaactttaaaattacttatgtaaaacacagtcctataaatacacaggaaac

SEQ ID NO: 478564 - DNA, 2908 bp, Homo sapiens
gtatgggaaaagaagcaaatagagttcagcagaagaggtaagaaaagaactgtcctccttctcccgggatctcagagaaaattcacctgagttcagtgtccaggtgacccaagctctgaatgcagtaacgtgcacggggagatgaggatgtcaccatgagcaagcctcccagacagcaaccgggagcaaccccaagacagggcagggggggctctgatgcagcccgcggcgaggagggctgcccgtgctgcctaaatgggttcagaatgaaggccgccctcccatcttcaacccggggtcggccacggagcctcccgccacctctaccccgtgtcgcaggcacccccgcgcccccggcacccccggacccccgcgcccgcgtcacttactcctttgccgtcgccacctgtctgggtgccggtctcctccctgcccggccgcggcgcgtcctccccgtcctcgcagtcctcgggctgtgcgcttcccccctccagcaacagccgcagcctcttctcttcgggagggacgtcgtcctcctccctcctgggccagccatccctacctcagggcttgccagtggcttcggagctgccggaagggctggccatgactccgggggctctgcctgcacttggggaagaagaaggacccagcgcgagcgtcctctcggcggagctggggagtctgagcgcgggctcgttgggtccgcgcggcgcggagctgggcatccgggcggcgcgggctcttccgcgggccgctcctggctctctggcgccctctgctggcctctcccgcacaccgccgccacgccgggctcgggcctgcgccgctctcacctgtcctggcccaggaagtcgctgtcccttgcccgtggccaggcccgctctggccaggccctgcacctcctccccgccccagccaggttgcaccccgatagtctccctgccgaaggaggagagaagagaagggacgcccggagagggtggacatcggccacagccaccttgtctttgctcttaccctgtttcttccatgatttggaggtggtgggaaaaccgaggctgctcaaaactctgcctaccaggaaaggactttctggagaagctcagattaatcactccttatgagaggtgacagtgtgctggcagccctcacagccctcattcgctcttggtgcctcctctgcctgtgctcccactttggcggaacttgaggagcccttcagcccgtggctgcatggtgggagcccctgtctgggctggccaaggtcggagctggctccctcagcttgcagggaggtgtggagggagaggcatgagccagaactggggctacacatgctgcttgtctgccggctgaagttccagcctcccccctctgtgggctcctgtgcagcccgagcctccccaacaagcaccttcccctgctccacggtgcccagtcccatcgaccacccaagggctgaggagtgtgggcgcacagagagggactggcaggcagctccacctgtggctcctgtgtgggatccactgggtgaagccagctgtgctcctgagtctgatggagacttctcagggattgtaaacgcaccagtcagcaccctgtcgaaacagaccactcaggctctctgtaaaatggaccaatcagcaggatgtgggtggggccagaaggaagtaactgcgaacacatcggaacatcagaaggaacaaactccagacacgccacctttaagaactgtaacactcaccaggagggtccgcggcttcattcttgaagtcagtgagaccaagaacccaccaattccggacacacttacacacttggcactgggagaattaaaagatggaaacctgcagaatctctgaatcactgttggacaagggcccccaaggagaacccctgccctgcaccagactatactatgggtgccaacccactgagagttcagggtttattcgtctcagcagcagtctattgttacactgactaacatcctaaggtttgagagatctagcatattgttaactgaagctagatttcaattacactgagaaccttatctatttaaaaataaaaactctcctaaaaaaaacaaataatccacattccttttaaccacatgtggaaaatttgcaaaaaaaaaaaaaaaactggccacatattaggccataaagaagtctcagcaaaatccactatacaattgacattgtccagaccacattttcctgaccataatgcaataaaattagaagtcaacagcaagaagatagataaacacaagcacacatttggaaaattaaaaatatcctttcatgagttaaatgaaaaatcacaatagaaattactagacatttacaacagaacgaaaatacaactttatatatatatacatatttacatatatatatacatatttacatatatatatatatatatatatatatatatatatatgtatttttctttatttgttagggtggataatccaggggcctgctcccccatgatagaagccaaagacgtccctgcaggcgcctcccgctgcatccttttctgcactgcccacatggacacaactcagccgattagacttgttctcagaactttagtcttgagcaaagagattaaagggtgaagtgactgaagaagtgaggacgtgaaatatttgtcattctgtgcctggcttatttcatttaatataaagacctggaatctcatccattttgtctgcagcggagagaagtttcttcctttttaggctgactaatacttcattgggtgtatataccacagtttcttcattgaaactaatttctgaagagcaaatattttaaaaatgtctcggaatgtgaaacttcagggatactgtgcccattttattcttttctatttcccatcttatgtatac

SEQ ID NO: 478565 - DNA, 685 bp, Homo sapiens
gatattgggagtaatgtcgtcctccccaaacctggatgttagcaacgagatcacagaggggctgtacacaccctgcgacattggaagtaatatgatcctgtccccacctggatactgggaaagataccacagcgcggaggatccagaactgcagtcggtcctcgctttgctgtccctgtccctgtccctgaatctggtcacggtgctgaggaacctgctcagcatcctggctgtcagctctgactcccccctccacacccccatgtacttcttcctctccaacctgtgctgggctgacatcggtctcacctcggccacggttcccaaggtgattctggatatgcagtcgcatagcagagtcatctctcatgtgggctgcctgacacagatgtctttcttggtcctttttgcatgtatagaaggcatgctcctgactgtgatggcctatggctgctttgtagccatctgtcgccctctgcactacccagtcatagtgaatcctcacctctgtgtcttcttcgttttggtgtcctttttccttaacctgttggattcccagctgcacagttggattgtgttacaattcaccatcatcaagaatggatccttttgtcttactataaaattgtcccctccattctaaggatgtcatcgtcagatgggaagtataaagccttctccacct

SEQ ID NO: 478566 - DNA, 2280 bp, Homo sapiens
tggaatcaacatcaaacggaatcaagcggagttatcgaatggaatcgaagagaatcaccgaatggtctcgaatggaatcatctaatggaatggaatggaataatccacggactcgaatgcaatcatcatcatatagaatagaatggaatcatcgaatggactcgaatggaataatcattgaacggaatcgaatggaatcatcatcgaatggaaacgaatggaatcatcatcgaatggaaatgaaatggaatcgaatggaattatcatcgaatggaatcaacatcaaacggaaaaaaacggaattatcgaatggaatcaaagagaatcttcgattggacccgaatggaatcatatggaatcaccgaatggactggaatggaatcattgaatggactcgaaagggatcattattgaatggaattgaatggaatcatcgaatggtctcgattggaatcattatcaaatggaatcgaatggaatcaccgaatagaatcgaatggaacaatcatcgaatggagtcaaatggaattatcctcaaatggaatcgaatggaattatcgaatgcaatcgaatggaattatcgaatgcaatcgaatagaatcatcgaatggactcgaatggaatcatcgaatggaatggaatggaacaaatcgaatggaattaacattgaatggactcgaatggaatcaacatcaaacggaatcaagcggaattatcgaatggaatcgaacagaatcatcgaatggactcgaatggagtcatctaatggaatggaatggaataatccacggactcgaatgaaatcatcatcgtatagaatcgaatggaatcatcgaatggactcaaatggaataatcattgaacggaatcgaatggaatcttcatcgaatggaaacgaatggaatcatcatcgaatggaaatgaaagggatggaaatgaatggaatcgtcatagaatggaatcgaatggattcattgaatggaatcagatggaatcatcgaatggactggaatggaatcattgaatggactcgaaagggatcattattgaatggaattgaatggaatcatcgaatggtctcgattggaatcattatcaaatggaatcgaatggaatcaccgaatagaatcgaatggaacaatcatcgaatggactcaaatggaattatcctcaaatggaatcgaatggaattatcgaatgcaatcgaatggaattatcgaatgcaatcgaatagaatcatcgaatggaatggaatggaacagtcaatgaactcgaatggaatcatcattgaatggaatcgaatggaatcatcgagtggaatcgaatggaattatgatcaaatggaatcgaattgtgatcatcatcgaatggacccgaatggaatcatcatccaacggaagctaatggaatcaacatcgaatgaatcgaatggaaacaccatcgaattgaaacgaagaatcatcgaatggacccgaatggaatcatctaaaggaatgaaatggaataatccatggactcgaatacaatcatcatcgaatggaatcgaatggaatcatcgaatggactcgaatggaataatcattgagcggaatcgaatggaatcatcatcggatggaaatgaatggaatcatcatcgaatggaaatgaaaggacaacatcaaacggaaaaaaacggaattatcgaatggaatcgaagagaatcatcgaatggacccgaatggaatcatctaatggaatggaatggaataatctatggactcgaatgcaatcatcatcgaatggaatcgaatggaatcatcgaatggaatcgaatggaatcaacatcaaacggaaaaaaacggaattatcgaatggaatcgaagagaatcatcgaatggacccgaatgcaatcatctaatggaatggtatggaataatccgtggactcgaatgcaatcatcatcgaatggaatcgaatggaatcatcgaatggactcgaatggaataatcatcgcacggaatcgaatggaatcatcatgggatgaaaatgaatggaatcatcatcgaatggaatcgaatagatttatggaatgaaatccagtgtgatcatcatcgaatggacccgaatggaatcatcatccaacggaagctaatggaatcaacatcgaatgaatcgaatggaaacaccatcgaattgaaacgaatggaattatcttgaaattgaaatggatggactcgtcatcgaatggattcgaatggaatcatcgaataaaattgattgaaatcatcatcaaatggaatc

SEQ ID NO: 478567 - DNA, 2699 bp, Homo sapiens
tggaatcaacatcaaacggaaaaaaacggaattatctgtgatcatcatcgaatggacccgaatggaatcatcatccaacggaagctaatggaataaacatcgaatgaatcgaatggaaacaccatcgaattgaaaagaaaggaattatcatgaaattgaaatggatggactcatcatcgattggattcgaatggaatcatcgaataaaattgattgaaatcatcatcaaatggaatcgaattgtatcattgaatggaatcgaatggaatcatcatcagatggaaatgaatggaatcgtcatagaatggaatcgaatggattcattgaatggaatcagatggaatcatcgaatggactggaatggaatcattgaatggactcgaaagggatcattattgaatggaattgaatggaatcatcgaatggtctcgattggaatcattatcaaatggaatcgaatgggatcaccgaataaaatcgaatggaacaatcatcgaatggactcaaatggaattatcctcaaatggaatggaatggaattatcgaatgcaatcgaatggaattatcgaatgcaatcgaatggaattatcgaatgcaatcgaatagaatcatcgaatggactcgaatggaatcatcgaatggaatggaatggaacagaatggaatcatcgcttagaatcgaatggaattaacattgaatggactcgaatggaatcaacatcaaacggaatcaagcggaattatcgaatggaatcgaagagaatcatcgaatggactcgaatggaatcatctaatggaatggaatggaataatccacggacccgaatgcaatcatcatcgtgtagaatcgaatggaatcatcgaatggactcgaatggaataatcattgaacggaatcgaatggaatcatcatcggatggaaacgaatggaatcatcatggaatggaaatgaaagggatggaaatgaatggaatcgtcatagaatggaatcgaatggattcattgaatggaatcagatggaatcatcgaatggactggaatggaatcattgaatggactcgaaagggatcattattgaatggaattgaatggaatcatcgaatggtctcgattggaatcattatcaaatggaatcgaatggaatcaccgaatagaatcgaatggaacaatcatcgaatggactcaaatggaattatcctcaaatggaatcgaatggaattatcgaatgcaatcgaatggaattatcgaatgcaatcgaatagaatcatcgaatggactcgaatggaatcatcgaatggaatggaatggaacaaatcgaatggaattatcatcgaatggaattcaatggtatcaacaccaaacggaaaaaaacggaattatcgaatggaatcgaagagaatcttcgaacggacccgaatggaatcatctaatggaatggaatggaataatccatggactcgaatgcaattatcatcgaatggaatcgaatggaatcatcgaatggactcgaatggaataatcattgagcggaatcgaatggaatcatcatcggatggaaatgaatggaatcatcatcgaatggaaatgaaaggatcatcatcgaatggattcgaatggaatcatcgaataaaattgattgaaatcatcatcaaatggaatcgaatggtatcattgaatggaatcgaatggaatcatcatcagatggaaatgaatggaatcgtcatagaatggaatcgaatggattcattgaatggaatcagatggaatcatcgaatggactggaatggaatcattgaatggacacgaaagggatcattattgaatggaattgaatggaatcatcgaatggtctcgattgtaatcattatcaaatggaatcgaatggaatcaccgaataaaatcgaatggaacaatcatcatatggactcaaatggaattatcctcaaatggaatcgaatggaattatcgaatgcaatcgaatggaattatcgaatgcaatcgaatagaatcatcgaatggactcgaatggaatcattgaatggaatggaatggaacaaatcgaatggaattaacatcgaatggactcgaatggaatcaacatcaaacggaatgaagcggaattatcaaatggaatcgaagagaatcatcgaatggacccgaatggaatcatctaatggaatgttatggaataatccccggcccgaatgcaatcatcatcgaatagaatcgaatggaatcatcgaatggactcgaatggaaaaatcattgaacggaatcgaatggaatcatcatcggatggaaatgaatggtatcatcatcgaatggaatggaatagaattatggaatgaaatccagtgtgatcatcatcgaatggacccgaatggaatcatcatccaacggaagctaatggaatcaacatcgaatgaatcaaatggaaacaccatcgaattgaaacgaatggaattaccatgaaattgaaatggatggactcatcatcgaatggattcgaatggaatcatcgaataaaattgattgaaatcatcatcgaatggaatcgaatggtatcattgaatggaatcgaatggaatcatcatcagatggaaatgaatggaatcgtcatagaatggaatcgaatggattcattgaatggaatcagatggaatcatcgaatggattggaatgaaatcattgaatggactc

SEQ ID NO: 478568 - DNA, 929 bp, Homo sapiens
gaatggactcgaatggaatcaacatcaaacggaatcaaacggaattatcgaatggaatcgaagagaatcatcgaatggactcgaatggagtcatctaatggaatggaatggaagaatccatggactcgaatgcaatcatcatcgaatggaatcgaatggaatcatcgaatggactcgaatggaataatcattgaacggaatcgaatggaatcatcatcggatggaaacgaatggaatcatcaaatggaatcagatggaatcatcatcaaatggaatcgaatagaattatggaatgaaatccattgtgatcatcatcgaatggactcgaatggaatcatcatccaatggaaactaatggaatcaacatcgaatggaatcgaatggaaacaccatcgaattgaaacgaatggaattatcatgcaattgaaatggatggactcatcatcgaatggattcgaatggaatcatcgaatgaaattgattgaaatcatcatcaaatggaatcgaatggaatcattgaatggaatcgaatggaatcatcatcagatggaaatgaatggaatcatcatagaatggaatcgcatggattcattgaatggaatcagatggaatcattgaatggactcgaatggaatcattattgaatggaattgaatggaatcatcgaatggtctcgaatggaatcattatcaaatggaatcgaatggaatcaccgaatagaatcgaatggaacaatcatcgaatggactcaaatggaattatcctcaaatggaatcgaatggaattatcgaatgcaatcgaatggaataatcgaatgcaatcgaatagaatcatcgaatggacttgaaaggaatcatcgattgaaacggaatggaatagtcaatgaaatcgaatggaaacgtcattgaatggaatcgtcgagtggaatc

SEQ ID NO: 478569 - DNA, 651 bp, Homo sapiens
tggattaatccatggactcgaattcaatcaccatcgaatacaatcgaatggagtcatcgaatcgactcaacgaatggtctcgaatggaaccacctccaaatggaatggaatggaatcatcgcatagaatcgaatggaattatcatcgaatggactcgaatggaatcaacatcaaacggaatcaaacggaattatcgaatggaatcgaagagaatcatcgaatggactcgaatggaatcatctaatggaatggaatggaagaatccatggactcgaatgcaatcatcagcgaatggaatcgaatggaatcatcgaatggactcgaatggaataatcattgaacggaatcgaatggaatcatcatcggatggaaacgaatggaatcatcaaatggaatcagatggaatcatcatcaaatggaatcgaatagaattatggaatgaaatccattgtgatcatcatcgaatggactcgaatggaatcatcatccaatggaaactaatggaatcaacatcgaatggaatcgaatggaaacaccatcgaattgaaacgaatggaattatcatgaaatagaaatggatggactcatcatcgaatggattcgaatggaatcatcgaatgaaattgattgaaatcatcatcaaatggaatc

SEQ ID NO: 478570 - DNA, 2289 bp, Homo sapiens
tactctgcaaagccagaggaacagagctgccagaggccatgagagcctatctcttcaatcagcatgacctggctgatggaccctaatcttgatgctctcagacacacacagaaggaaaaagctcatgtgaagaaagagacagaaattggaataatagagctacaggccaggaagccaaaggattgtgggaaaccatcagcagctagtgagaaacccacagcagaaggtgcaaaaggaaaaatactccgtgactactctgagaacagagagttacatgagtggattctgtgggctctttttggaaacaagacgttccctgctatcatgactaattattgcatccagcacaagctcagtccctaccttaaacagctgttcagcccacctggaagtccagagaacaaaatcaccttattgcccttcaaaatccttctgcttctcttgaatgctttttctcccacaaaagaactcatagccctttcactactttctgcctacaaacagccatcgcctcccgctcctccactcctggatgcacaggtacacagggtcctgcattgcaatccattccactctgccctggctttgtgttccatcactcatgctccaagttctgaggcagcaaaaaatcagaggctgggagtgtcagtctatgctaaaaagaactgtctgtgagtaaagttcaggaagaaggaggagcagaaacaggaagaggggaaggaggaggaagggaaaaaagagtctcatttaaacaatagagaagtgttttcatgtttctttagaagtttggtgatgttttgtaaccagaaatatgccataggaacttatcctgtttatataaattagtctatggtaacgttggtatccttagatgtcattctgcttattcatagtttccaagaacgtattgagaatgttcacttctatttctccacttagtaagattttttttcaattttccatttcaatagatatttgcatttatttcatctcatcatgtatcatttgtctgagttatggatttcttttcattacctctgtgcgtggaatcattttaagctctcagcctttttaacaaaaatgatgataatattaataatatgttttgcactaaaaccatgattcttgaatatcagaagatcacttatttttaaaaccaaggtatatttcagtctcaaaactagaaatatgacccgtttagaagatggttctttggaaacctaatgctgctgccaggattgtgaagaaaaaattctggatacaatgaaaggcaggaaaaataaacttctattatatatcaacctgttttccagctacttacattctaagtacttatggaatgcctataatctcataaagagtttaagcttttagggtagaggcagtatctgccttgaccacttctgatatggtgcctagaatatagcaagtggtcaataatatacaattatttgtaaattgtcagtcaatatccaaataagatcattaattagtcattaattaatttatgatctagtggttgacatatttagttgttaattatctactgttttacattcattctttttcagtgggacttaatatctgattatcatttcctgaaatcatttgcacagggcatctgtatagcatgctttattctagttacttgtgtatgtgatctcatttctgacaagaactctattacaccactgataggaaaagatcactctatgtattctcaaagaacccagatcaaatctgttagtattagccaatttacatttaatgatgttttatgcacttcccttccacaaagtaagcctctgcatggcacaaaaactataaaatttatcaattttatctaaagctcagctccatcctgatatttgtggtgttgcgaataatgaataaatatttcttgaagggaaataaacattagtttttcctgtttcaataccatctatgtattacatacatagtaattaaattaatgtgtgttatatatcaatttttatatataaaccaatgtattatattcatcaatttatatgtaaaaaaaattatttttatatgtcaactatattacataatataacatcaactatatcttacaatttattacattatatgatataactgatatattaatacattattttataatatatttattgataaccagttcaattaaatataatgtacattaaaccctactgttttattagcacttgatgttaaaatactagagcataccaccaagctacagtgaagttattgtcctcacattagtatgatcagtacatcaaa

SEQ ID NO: 478571 - DNA, 704 bp, Homo sapiens
ccttatcccaccaccagagttgttgttgttgttggggtcttgccatgttgctcagggcggccttgagctcctgggctcaaaccatccccccatgtcagcctcccgagttgctgggtgagccaggctgttggtggccccacccttatggctttgctaggtgcatcccataccacagcttacttgggttggagttgcttgtctgtggctctcccatactggaattgcaagcaccctccattgttgggggtgggctttggttccatccaactgtccacccagcctccatcacccagacagggagcactgatggagccgatcacacccggggtctgctgaacagtgcccacagcttccggtgttcagtgggccttcaacacagcacagcctccttctatttccaaatcagcagtctccgctatggtcgttttgagcattgcccattttccctcagtctccttcaacactgtgaccacattcccccttggttccttacctctcagacctcggacagcgcccctcatcctcctaagcttgcatctaaaaccttcgcaagggtcctactcctcactcgtcctcttcggtcacagatgaagcaacaaagaggtgctgtggcaggccagctgtcactaacacaggcctccgtaacaactgtttcagcactgactgagtggttaagttaaatattaaaagctgagagagccagc

SEQ ID NO: 478572 - DNA, 570 bp, Homo sapiens
ccagcatccttctactttcctgtcttcctgctgctcctcccttgctgggagaaagagccagaggcctggtaagcatgggtcctgccgtaggacctgttgacccaaatgaagtaaatcctgtatcaaaagaagaaaattcatttccgaaagatggaaatacactgaatgtggagaaaaacgaccccatccctcggcgtctgcttcttcagggaccccttcaattcccaaaaaagagcttggagccagtctgctcgggaggaatcctggttctgacacttagtcacacagacttaggcaagtcgcctaatctcctgcacctgatttcttcttcttctgtaaataatatcagcagttgcacttctggctacccccaaagaagtgaaagcaggggctggaagggatgcttgcccacctgtgttcacagcagcactattcagaataggcaaaacgtggaagcaactcaagtgcccgtcaaaggatgaacggataaacaatggcggctgaatgtacaagggaatattatctagctttaaaaagaaatgaaatttggacacatgctacacacaacac

SEQ ID NO: 478573 - DNA, 1039 bp, Homo sapiens
ggacatctgaaacttgtagatttactaacgtggggatgagggtatgcttgtgtttttgcaggagatgaacaagccatgtgggtgccctcaagatgtttgcaaccatggagactggagggacccatggattccaaatataggccttgttaccccagtacgagccatgagccagttgaatctgaatgtgaagacagaacgaggacagactggagtcatgttgacatcaacccccataacatggggacagatcaagaaaaccacacaggaagctgagcaactgctggaatgccaggctgtggcatactttatcaatgaaataggcatagaatcgccatttctattccaaaagggagaaaaaggaaaaaagaaaggaggtaacaggcaccaagagtttgaagaaagtttattccaaccctcaaggataactgagaaatttaagacttcagtggaggaagtaaatgcatatgtggtagacataccaaaacaactggaattaaaagtggaccctaaagatgtgactgaattgctgcaatttcatgataaaaatttaatggatgaggagttgcttcttgtggatgagtaaaaaatgtgaagtggtttttttttttttgagaagaaatctattcctggtgaagatgtgaatattgttgaaatgataacaaagcctttcaaatattagataaacttagtagataaagcaacagcagggtttgagagaattgactctaattttgaagttttttgaataaaatgctatcaaaaagcactgcatgctacagagaaatctctcatgaaaggaagaattcattcatgtggcaaactgtattgttgtcttattttaagaatttgccactgccaccccaacctttagcaaccactactctgatcagtcagccgccatccacataaaggacaactagtaaatccccccacatacacatgcacattttgagttgcaccgcggatggaatgttgttctgtggttttccacagtcttacacataactacactgaaagagagtttcagctttgaaacagt

SEQ ID NO: 478574 - DNA, 824 bp, Homo sapiens
agcaactcctcgctctctctctttcctcgcgttccagcaatgagacatgcttgcttccccttcaccttccactatgcttttcactttaaaaactatgcaaagacccacactctagtttttaggctttatgactattttgcttttaaaggaagtcagtccgagtcccaaaacctcacaagtagggaagatgacagtgtagtcttaagtctgtggctgaaggctggagagcccctggcaaaccgctggtacagttgtgatggcatcggcggcccttctggagtggctgctgcaaaaacgccgctgaggaccagcaggaagtgggaagaggtggaagccccaccccctatggagttggcagggtgggagcccatgcttctggatgcagctgcagcccctcagctgtggttccagatccaggcatccctgtgttctcagggtttcaggaagcctctgcccctgcaagcttcgaagtgcctgctcctgctacctgacctctccctgatcccagtgcccccagagcaaagctgtggccgagctcaagcagtgtcgcaaacagccaggtgtgtgcgcactcaagacagtgctgacacaccagtcccctgccgcctcagcttcctccagactttgagcactgaagaggagtggagggtggggggttgggggtagacaggttcctgggtggaaaggggcaggttcctggtgaaacccccctttcaagccagggatgtcctaaagcctgggggaacggctgccagttatgggtggagtccatgtcccagaataagaacttatggtgctttttctgggcctgcccatggctgccc

SEQ ID NO: 478575 - DNA, 669 bp, Homo sapiens
gctgcttccatttcagaggctctgatccagcaggaggtaggcgctcactgtggagaataagcacagtggagtggaggacagagatgcagctcagggccacctgcatgtgctgggccagctccctgcccccacactcccacctccctcggagggtgccacatgtggagccaagggaggtcccctcccacgggggcagttgggagcctgcactctcaatcggcccatgtttattgacttataaatctactctgtttagcggctcagtagaaaggtgcagctctccccctgtgggctcccctcattctctcctggcaggcttcagagccccttgccaaagctccaggtttggggaaacagccgcccaagggtctgcaggagttggagccagcaaggggaggacagcacacagcagcccccagtgggaccctgtaaacaaacccagcctcattagttgtcttagtgcctcacccacctgttgggtttcatgtcttctaccttgccctgggtgaacatagagtctgcttaataaacaattcaaaaggagactgtgctgttaacttggtgactgtcaggctttctgaggtggaaagttgtccatggattcagaaacttctagggtctaaagattcataagatcttctggttgggttagagtgtgcactagagctg

SEQ ID NO: 478576 - DNA, 597 bp, Homo sapiens
agctgataaatatttggcttgtgtctccttctaaaataatcctcatgcacaatgatggctcaaaacctcatcaagacaactaaagtcaagggaatagttgataacaagaaacaaacaaacacaaagaataaaggaggagcttctagcttgtcccgtttgctggctgtctgtgccacattcatgccacttgtggctgtgtggagaacacgtgaggttctctgtgaggttgtccaggcccgtctgcctgtgccctcccctcctcccttccctcctgcttccagcacagggttctgtgttgacagaagttggggggattttgaggggagtcttgctgggccctttggctctatcacagagttggaagaatccaagggaagaaatcacaagaaagtccacctgactgcacctgagctcaagggcagccagtgctggaaaaatgatggtggagagccagggctgttttctgaccttctcttctccacggggaccatttctcctatgcggctgacttatccacattttgtgtccctttaaaccagagattcaagtgtcagtttaattgtcctgtggcaccagtactgtcattagcactcagtc

SEQ ID NO: 478577 - DNA, 484 bp, Homo sapiens
tatcatcaccatcatgaggaattacccattatcacactatgttggcactgttctacgaggagggacttctcagagtctacataacatgcagaatttcctacttgttcatttgatcatgaggtccttcctgtggccctgttcatctctgtgcacactctcagtggtgggttggagacagctggcgccagcttgtccaaaagatcacaggatccttctaagagatttccctggggaagatgggcacagcctggctgatggccttgccggcgataatgaagatgaggggagattggagacctcttatatcttttctgggcatatgcaaaacccagcacttggcactgtagatccccaagaatatgtcagcacttttcaaagaatactgtggacatctcatttcctaaatattccttttaagttttcggccaggctcttgttttccccaacttgtattgcaccctaaagcagctgcaaatgctgaaca

SEQ ID NO: 478578 - DNA, 678 bp, Homo sapiens
agtacagctcctgagaaagacttgagcacaaagacacacttaatgtccatgaaaatgaggtacaccactacaccacttccttcaggcctggaggcctgtgcccacggacctaggcgagggcaggcatttttgttttcgtacccaaatgttgcatttcccaaaaccaccctggcctgccacgcccccatcctgttcctataaaaccccccaagattccagcaggcagacatacaagcggctggacgtcgtgagaagtagatcagtggaagaagacacaagaacctggacattgagaggacatcgagagcagcacgccggtggaagaacacatcaacaggcacagcggcaggccattaacacagcggaacgacatggagtgcctcagcggagaagtttgggaaaccctggtttcacagtcgatgggaagacaccaacggcttttcaagcagagacactacatgagaaggaaagaaggatacccccagaagcagggaggccagcagaaaacacctgcaatagctcaggaggggagttagtacacctgaaacagactgacgacattgggaagaaaaggaagggaagtacttaaggacaatttaggaggtagaatggcttggttgaagaaatgaaggaaattggagacaaataatgactccctggctttaggcttgtgtaaac

SEQ ID NO: 478579 - DNA, 612 bp, Homo sapiens
tttctccaggggtgctgaagagtttggaatgtgacctgctcacgtgggcattcttgatgtcaccatgaaccttgcagtgcacatggatgttattttgagagtggcctctggggacagtcagggagaacctgggaccttaaacaaaggctcagttagtaggcagtggagaaatctcaatgaagaagcactttctctgactcgatatggatggatttggatagcagatctcatcgtggcctttggtcccaccgccaaagaagtgggctctgctctcttctttctggcctgttatttaggaacagagcaaggcgaagtggctgcagcaattggaacagttcaagttgaaaatgacttcccagatcagaaagctctatttccttgggcctacaggatctgcctggtgttcaaggcatccctgcaccccaccccaccttgctggcttcagtggctcccttctccttcccctctgtatccctcaacatcctgcagccattcacttctcactgctgctttctttcctctgaaacttctccataagctatagaagagtccatccaataagcacaggcttgggtagctcctattccatgaatacttctgctccctctgatc

SEQ ID NO: 478580 - DNA, 480 bp, Homo sapiens
gtttatacaaagccttctaaggcgttcctccttcctgagggcgatggagagctataatgttgacatgggtaattggaggcttaagtatatccttcatataaatctacatgacccatgccagggcttacctctgctaaaggatttgtcctcaaagcaggcagcaaatctgttcccttggcagaggatggaagccgtggcttgtgacattctcctgataatgcagccaggccacgggcagccagcatttctgcagggggacaggaaactgaggcacagaagggccaaagggctatatggccaaacttctggaatgcatggggggaggtcactggaacatggggccttggagcctcttttgccctcctcagatactgaggtgcttcctccaggtgggcacctctgtgattcctcaggaaatctcaagtacagattggagaaatctgacatcttctaattagggagacagatgactgtcatgtt

SEQ ID NO: 478581 - DNA, 557 bp, Homo sapiens
gcaggggcagagaaagactagagaatggcatgagggatttttgctgcctcaatctggaagcaatgaagacttacatttcactgatgtctgtccttccatttgacaaccacctccctggaacaggcaggaagagagtagatgagcaaattgaaattggcaccagcatggctgacccatctgatgagctcctttgtggacttcagtatggaaagcattcctttgggaacagcaaaatgatggcagtagaaaagcaatgggtatatcggcagatgattggttgtttctcccttcagcaatgtgggagtggacacctgccagtctcttgcatgattactcagttgccagtaggtgggaccacagctacagaagctggtgcttccttggaggaaatgagggtaactcaggcagaacgattaggagcacacagggtagaaatttcagtggttgaaaatgaatagattcctgtgcaaaagatgtactctctaaggtattttgtgttcacttagggaaaagcttagagtatcatgggttcatgggttataagtaaggtgatagga

SEQ ID NO: 478582 - DNA, 1010 bp, Homo sapiens
gtccacgctgtgggagaaagtttcctgtgagaaggcgcatggcataaatccctcctaagcatgctgccctccaagacgcacacacaggctccacattggctgtgggagggcaagtcccctgcctccgagagcccctcgtcctgtgtcgacgctgctgcaggacgtcagctccggtctggccgcctggccttcccgtgtcccctggtgataggtggggatgcacccggggaacagtccagtgaaggcgaagcacagggggacccagcagagcagcccagccccgtcatgagtcagtcagctctgcacaaagccaaagaggcagccattcaactcgcacctcacgtctggtgcaaatcctgtttcgggacacggctccaggcccccttcctgcagacgtcttcccgagcttctcccatgcgaagatcccggagcgtccaagggccaatatcccaggacatggaggtccagagaagctgtgacccaggagagctggctgctccggcctcggtggcagtgcccacagctggggttctgagctggcaactgccgggctggcagcccagggggaccatgctgaaggcagagagacagacggaggagaggacccggggaagggaggtgcttccagaaggcagcctgccctggagccttccagactctagccctggccatggggaggccctgagtgacggatggggaaccgaggccaccctccctgctgtgctgttcttgagcaggcctgggcgaggctatcaatagagctgttgggtccatctgatcaccagctccatgctgtccatacccttcagctgatcttggctgtcacctttgaccagcacatgtgtcgtccccacaccggggcttctgtccacttgcccagtcacccatctctgactcccatctgcatcaggaccttattcctgttgagctcttgtcaccatccctgcagacaggcagcagacggccaccatgattccatatccagtccctgccgggggccagtgccttgc

SEQ ID NO: 478583 - DNA, 1612 bp, Homo sapiens
ctccccgtccacccacccctgaggaagccagcctctgtaggacttggcgttatctgccccacctctgctcacaacctctggaacctccatcatgaaacatggagcatttgtgaggctccaagtgttctccatgcagagggaagaccccataaccactactgccatcatcacagtcatctccattgccaccaccgccaacatcaccacagttacatggtcctcatcaccatcagcacccccatcattacctcatcaccatctccttcaccaccgtcaccatcagcacccccatcgttacatcatcaccatctccatcaccattgtcactcatcgttacatcatcatcaccaccaccacctccatcaccaccgtcaccatcagcacccccattgttacctcatcatcatctccatcaccaccatcactcatcgttacatcatcaccaccaccaccacctccgtcaccaccatcaccatcagcacccccatcattacgtcatcaccaccaccatcaccaccatcaccatcagcaccccaatcattacatcatctccaacacctccatcaccaccggcaccatcagcacccccatcattacgtcattatcaccatcacctccatcaccaccgtcaccatcagcacccccatcgttacatcattatcaccaccacctccatcatcaccgtcaccatcagcacccccatcgttacatcatcaccagcacctccatcaccaccatcaccatcagcacccccatcattacatcattatcaccaccacctccatcaccaccatcaccatcagtacccccatcattacgtcatcaccaccaccatcaccaccatcaccatcagcacccccatcgttacatcatcaccaacacctccatcaccaccggcaccatcagcacccccatcattacgtcattatcaccatcacctccatcaccaccgtcaccatcagcacccccatcgttacatcattatcaccaccacctccatcatcaccgtcaccatcagcaccccaatcattacatcatctccaacacctccatcaccaccatcaccatcagcacccccatcattacgtcatcaccaccaccatcaccaccatcaccatcagcacccccatcgttacatcatcaccaacacctccatcaccaccggcaccatcagcacccccatcattacgtcattatcaccatcacctccatcaccaccgtcaccatcagcacccccatcgttacatcattatcaccaccacctccatcatcaccgtcaccatcagcacccccatcgttacatcatcaccagcacctccatcaccaccatcaccatcagcacccccatcattacatcattatcaccatcaccttcatcatcaccatcaccatcagcaccccatcattacatcatcaccatcacctccatcaccaccgtcaccatcagcacccccatcgttacatcattatcaccaccaccattactgtcgtcacccctccaccatcaccaccacaaatgtcatcactatcatcatcatcaatggctgtcccaagtgacctatgtttctacaaaaacgggagctaagaagcctccccccagggctgctgagga

SEQ ID NO: 478584 - DNA, 1211 bp, Homo sapiens
tctttgtggtgatgggaatgttctttagggtctttgtggtgatggagatgttctgtggggtcttcatggtgatggggatgttctgtggggtctttgtggtgatggagatgtcctgtggggtcttcgtggtgatggggatgttctgtggggtcttcatggtgatggagatgctctgtggggtcttcacggtgatggagatgttttgtggggtcttcatgtccggcaatggggaggagcacactgccggctgggagcccctgcgagcacgcctgtcccagggccacagaaaaagcacggtggagcaggggcaggacacacgcatgtggagtccctttctggccggactcgagtttgccatcacgcagctctggagcgaggtgtattgtgcccattgcctagaggaaccgagggtgtcagcctgggtcctaggcatctggattctggaatcagttgttaatgctgctgggtacctgctcatccaaccccagtgcagcctggagactgccaccgtgccccccggagggcgatggagcctccgctctgctcaggagcagcctggcttccgggagggcagcctgactcccacggcactgccggtctgcagagcctgccctggagagaaccccttctccggctctgggggagcactcacgctgccacctgtgtccctgtggcggccccttgcctgcctgcatttggctggcctggcccgacaccttcctgcccctggcccatgtgcctgctccgagtccctcctgccacatgggacccgggcaggcctgggcagccccgagggccagctgtgccaagcgaggatgccaccctggttccagggagcagcagtgccatcagagaaggccctgcaggctgtcggccccccgggtcacagcagcttgttctggcagcccctcctcccccggggcccttgttctcctccctggctcttggcctatcctcaggccatgccaagagccggcggagacgggcctggggctgggagcctgcgccagttgccatttaaaccttggcagtcggagagcccctcgatgccaaaggcccgcggtgaaggaggcggtagtgaggatgcctgagaattcttgaggtggggaaagaaaacacaaagaggaccggggctggggggtgtccctggccacgccccccactgccatttgctgatggagctccttcagtccaggcctctgtagctagtt

SEQ ID NO: 478585 - DNA, 962 bp, Homo sapiens
caggggggccactttgacccactatggtacgtgtgggcccccctggccactgtctctcatcagtgctggtatgcctgcagagtgaggcattgtggtgggaggcaggaaaggaaggccgcctgcaggaagtcttccaggattgctccagcgcacgctcaggtgaagccagcctcctgggtcatgcgcccacacttagagtttccgacgtaccaccttccagctgtctgatcttggacaatagctccactgtgactcctgcagggtatggaccacagtggtgtctcccccaaagagggaacctgagagtcaagaacatggttcttggcaagctctgccaatggtgtctggcacagtccaagctgcagcaacgtggttggcatcatcaggcccagcccgcaactgggcacgacacaagagcatcctggattcctgccccacgatggcttctccaggccacgcccctccaagggcactgttctccctgaaaactcaatgcagctcctgctccaggggcgacgactgcctcgctttcttccccctccccctcttcccctctccctcttccttcttccccttcctcgcctcctcctttctctcctcctccttctcctctttcttgtttttactacctttgaaattggtttttaaattgtcctttaaaataatattaattttcactttgtaagtattaaaaaactcataaagaatataaaaataaaaataaaatcttccaaatacaagctgttaaattcagatgttttaactactattttatttcccaagcatagatattttttaactagtggttatatttaaaatttggttcctacctttctcagtgattattataagaaaatattgatgttcataccattttcataagcatcactctaaagagttagaaatactccaggatatggagaacagtgccttgcaggagcccagcgggggtggaaaatggg

SEQ ID NO: 478586 - DNA, 1058 bp, Homo sapiens
cgcccctgagcggcggttgtgcatctgctccccaagctgcccccacagtgcacaggccaggagccgcctcaaggaagccgcactgcatggtttgatgctggacacccggagcgcaggatctgccagcctgactccaccagggcccctccggcatgaatcggaggatggtttagagagcaggaagaaaggggaccaagtgtatggaggcagcggccatggagcgtcggctgtggatcccaccctgcagaggctgccccgaggcccggagctggcttggaaaggccaaaagcctccaggacatcatctggaaaatgagagtgagcaggatcgattggcagcactggaggcagccacagaggcccggaggggagagtggaagacggctgtagtggcccatgatagccgcaagggcgctccacccagggcccagggatctgtggtcaaagggtccgtctatctatccaagcaggaagactgtcataagctgagcggcatccccggaactcctagggtgaagttctaacccctagtattttagaatgagactatgtgtggggatagggcttcctaaaatgtaattaagttacaataaggccagaaggcgggccctcatccaacctgctggggtcattattatcggaggttgggacacagacatgcacaaagggacgacttcatgaggacacagggagcacacggccatctacacgccaagaagagaggcctcaggagggagcagccctgccgacgccttgctgtggggctctgcactccaggacaggaggaattcgtctctgttgcttcaaccgcctgggggtgagggagatggaggctcagccatggctggcagtgccctgcagaccaatctaccccaacacacctccacccccactgaagccttcctcatgacacccccaggcctcccaccctcaggtctagccatccaccctaggcaccccctcctccttaggcctccccctcctcacctcctcctcaggcctcctcctcctccctaggcctccccctcctcctccccttgtccttaggctggcccctcc

SEQ ID NO: 478587 - DNA, 660 bp, Homo sapiens
gtacaggtattccgtggcgagacttacccgacggttcggtgattttagagtcgtacatacccgttttagccgttgggctaaaacaggcgtgtggcagagagtttttgaagtgctatcacatgacagtgataatgaatatgccatgctggactcaaccattgtgcgcgctcatcaacacagtgccggaaaaaaaagaacaggcgatcggacgcagtaaaggtggcttaagtaccaaaattcatgcccgtactgatgctttaggcaacccaacaggattttatctcactgccgggcaggcccatgacttgaacggtgccgatgtgttactggacttatcgttaagccaaacatggcttatggataaagcctacaattccagggatcgagtgattgatccgattcataagatcaatggtcaagtcgtgatgccatccaaaagtaacgcgattgatcagcgtgattatgaccaacatctttataaggcaagacatctgatcgagaatttcttcgccaagctcaagcagtatccaggtattgctacgcgctatgataaattggctcaaaacttcctgtcagcgatctaccttgcctcaatcatgatatggcttaattgatgacacgccctagccacaaataaaatttcatagcgtattatcttac

SEQ ID NO: 478588 - DNA, 1766 bp, Homo sapiens
gcgaaatgagcagatgtttatcgttgttttccatacaagtaccgtggtgcatgtgcgagatgtatcacatcatcacattgatagcaccagtagataaaattgatagctactcacagacagctattaatatttggtcaagcaataagttcaatatcattgttttggactttcttcaacttgcggcactttatgggggaggtccgatgacattaaataaaagcacacgtgatgaccttaaaaaactaaaagtcatgacgacaaagacaacaattaatgcgattgatatgtctccattaattggtgagtggcaaggtgttggtgatccagttgtaatgttgtttggccgaaagggaacgccttgtttcattgacttctatgcgaatactgatggtaactacaacttatatgtttgtggggtatcgggagccggtaaatcagttttgctacttgagatccttgcagcgtacagagcagtaggcgctaaacttttcatcttagacgttggccgttcatttaaaaactttgttgatcttgcgaaaggtacaacgtttgactttaacagtggacgcagtttatgcatgaatccttggtcatggattcaagttgcggaagaggaagaagaaggcggtttaaatacattccaacaagagctaagaatgctgttgccaatttactcaaaaatggcatcacctaaaaactcgttgaatcaattccaagaagcgctccttgaagaagcattaagtgctacatggagagaatacggcaatgagaacaacgttgataatgttcaagcctatttattgcaaatcaaagaccaaggtggccaacaagtagaccgagttgcttttgaatttgcaaacagctacaagcattcacaactaatggcatgtatggctcgtattttaactgatgcaccggcattgcgctcagtagtgatgttctgtgtgactagccgaatcatgaaagaaatgtacctcacacgtgatcgtaaaaaattatgtttcattgatgaagcttggcagttacttggtgatgatgctgaaacagctaagtttattgaagaagggtatcgaagagcacgtaaatataacggtatttttggaattggtactcagggtattgatgatgcttttaaaaatgaagcttcacgtgctgcatatacgaatgccgattggaaaattttcttgcgccaagatgaaaagaacttccaagaattgattgattctaaaaagaaaattgatgaaattatcaatgaagataatcaaaagaaagaaaaagtagagccggaattaaagactgaaaaagtttcaagtcaaaaggtttctaaaattgataagtggataaacggtttaaagtttgtgattgcaacagcgcttatttctttgttagtcactttccctggtttatacctggtcaaaaagtctcaagtaaaagtcggtgtggttgatgtgcaagctttacttgttgaacatgaaaagaaagtcactcaacagctatatgcgaaccaagggctttatcaaaacagtgatgctgcaagcctaaatagcggagctgtagaagagcaaacaaaacagtttttactaaagctagaaggctcaattgacgacattaacaataattgtggatgtgtcttaatcaataaggcagcgcttttaactcaaagtggaaatgttgttgattacacacaaaaggttagagaagcacttgaaaaatgaaactcaataaaaccaatacaataaatgccatattttattcttcatagcgtt

SEQ ID NO: 478589 - DNA, 1189 bp, Homo sapiens
tagaggaagagttagtgatgaatcatgaatacttagcaagacagacatacaagctgctggatgttgagcacatagatggaggaacgcatgggtggctggatgtcaagaggaatgtaccaacagtcaccaacagaacaatgaggagttttgctggggcagtcagaggagagcccaggctgctgagcagtccgactccaggggaaaaccttcccactatatccccttctgacttcccccaagttacctccactcaggaaacagagcataaaagttcagaaaatttgcagcctgacaatgtgatagagaagaaaagcccattttctggggagaaatgtaagctggctgcagaaatttgcataagtagcaaggagcctaatgttaatacccaagaccatggggaaaatgtctccaggtcatgtcagagaccttcacggcagcgacccccatcacaagcccagaagcccaggaggaaaaaatggtttcctgggccaggaccagggtccccgtgctgtgtgcagcctagggacttggtgccctatgtcctagcccccccagccatggctgaaaggggccaacatacagcttgggctggtgcttcagagggtggaagccccaagccttggcagcttccaagtggtgttgagcctgtgggtgcacagaagttaagaattgaggtttgggaacctctgcctagatttcagaagatgcatggcaacgaccagatgcccaggcaaaagtttgctgcaggggcgggaccctcatggagaacctctgctagggcagtgtggaagggaaatgtggggttggagcccccacacagagtccctactggggcactgcctagtggagctgtgagaagagggccaccgtcctccagaccccagaatggtagatccactgacagcttccactgtgtgcctagaaaagccacagacactcaacaccagcctgtgaaagcagccaggagggaggctgtaccctgcagagccacaggggcagagctgcccaagaccatgggaacccaccttgtgcatcagtgtgacctggatggaataacaaaattccgttttaatggcaagtagatctttagtcaagggttgtatgattagcaaaaagaagaaggaggaggagaaggaagaggaggaggaggaagaaggaggaggagggggagggggagggaaggaaggag

SEQ ID NO: 478590 - DNA, 1681 bp, Homo sapiens
ccgccgggcggctgatgtaccggcacagccgttcgagcttcttgcgttcatcggccctggccgccacgccggcgtgcaggctggacccggctaccttgccaatcccgtcaccgaacggatcaccactggtcggcagagtttgcaaagtgaacacctttcgccccgcctgtgaaccgacagcgatacggtaagtgatcgagtgccccagcaggggtgtcatcgggtcgtcatccaccgcatccgaggccagatagctgttttcgacatcccgttccagcaggccttgccgttccagatagcgacccacccggtgggcgatggtgtgcgtcagcggcactgttgcaaataaccacgaatggtaagctgaagactgttttagctaaaggtgcagcatatgaatcctttccatggtcggcattttcagggcgaaatcattctttgggctgtgcgctggtattgtaaatatggcattagctatcgtgaactgcaggaaatgctggccgaacggggtgtgaatgttgatcacacgactatttaccgttgggttcaacgttatgctcctgaaatagaaaaacgtttacgctggtattggcgtaatcctacagatctgagctcgtggcatattgatgaaacctatgtaaaagtgaatggacgatggtcttatctgtatcgtgcagtcgatcaacgtggcgataccattgatttttatctttcttctagacgtaataccaaatcagcatattgttttcttggaaaaattttaaataatgtgaagaagtggcaaattccacaagtgatcaacacggataaagcacccacatatggacgtgctttatcacggttaaaacgggaaggtaaatgtccaccagaccttgagcacaggcagattaagtataaaaataacgtgattgaatgtgatcatggcaagctaaagcggatcatcagggccacattaggattcaaatctatgaagacggcttatgccacaattaaaggtattgaagtcatgcgtgcactacgtaaaggacaagcatcgtcattttattatggtcagcctcagggtgaagattgtaattctgatcatatgagattttcccatctggacgtttaacgaattctttttcattcgtggtaaacgacatagcagaataattaatttcgacattatgtttatgtcgggtcaaagcaacataagttaaattagcattcatgttctcactcgccacaatataggcattatcaacagtcataccttgtgatgagtgaatagtatttgcataaccatatttaaattggttgtattcatttaaatctactttaatgatctcattatttctatctgactgaaccatcataaatttaatgttattaagattatctttttcaaaaccgattacttttgctgtttcaccattgctaacttttaattttgaatcattctgcttaaatgcaattttttctccgacagtaatttcaatatcaccgaaagcagttttaacatgattaccagtagcagaaagttgaccatttttaattaatacatttcttgccatgcggtttaattcattcacatcattatttgaatgagcaagcattaacttattttcgctagaatcttcactccaagatgtaatagttttggactagtgctagatcaagagattcatattcattaacgagc

SEQ ID NO: 478591 - DNA, 816 bp, Homo sapiens
aaatcggtgaattgttatgtattctgcaattctatatcttttaagtggagcatttaggccatctgcattcaatgttagtattgagatgaaactgatttgggagttctgtttgatgaccgaagagagtctttaccactgtgcctatatttttatgccagaatatgggtgggtgcacatgtacagggaggcaaaaaaatttgtgagtgaaaatgaaggggctcttgggaaaggaaaaggaaaacggtggtttgcatttaagatgatgatggccaagaaatgggcaaaattcctccgtgattttgagaacttcaaagctgcgtgtgtcccatgggaaaataaaatcaaggctattgaaagcactattgctactgccaaagacagcagagactctaccctcattgatcttacatccaaatgtgttaatgtatgtatgcttggatggggaagacagaatataatataagcaaataaataatgacggtaattgtggattgtagtctagtgtggaagaaactttgtcttctggatttcttagtctcttccacctgtgtctgggtctttcctataatcgttctagttttaatgaaatctattggcctgcaattcattttctttacacttaagattctgtaaagactcaacctccaaataaaatagttgtgaagccactctcaaatctgagaactggagtttggaagttttggactctaaagtatatttcattatgatgcttaagcatgttggaggaggggatactttctgaaacatcttaattcacttctgtcttttgcatttaagtatatttgtaccctacac

SEQ ID NO: 478592 - DNA, 486 bp, Homo sapiens
catttccaccactcaaaataacgtctttttatcccactttttaattaaacattttcctatgtcacaaaaattacttcaggaaatcttaatagctcccactcagacaaacagaacagcgtgtggagattcacattgtgaacttttgctccaagaaatactgcaggaacataccaggaaagccaagaaaatccacacactctttggaggaagcagcttccctctgcaggctctgcgagacagccaaaaaactgtgagtgcgcaaagtaaatcaagtgaaatacagggggtagaggaagcagtgggaagagccctgtgggcactcttggtcccacgggaagccatttctgactttgtcttgcaggggctcctggggaggactgccagtaaaattgaggaaagaccacagggaaaaggaaattcccagctgcactttgtaacaattttgactgaacacaaagttcctcggacataatctgggggaggggg

SEQ ID NO: 478593 - DNA, 1546 bp, Homo sapiens
tttctcctcagaaaatgggattttttttctattgcatttctgaggctacgtgcggcaacaatcctgagctaggatattcagaggaccatcctttcatgctactggagaaagtgactttcccaagtttgtcattgctgggtcatgatagccagcttgggcttttgcccacacaactgctcagtgcttatgcttggctgcttgccctcttctccatggctgtgatctgcccagccaacaccctgcttaatttaggccccactgaaagacagtcctggaggctctcagtcctggaggctggaagttcaagatcagggttagatcctccagagggctgtgagggagaattggttccaggacccctcctagcttctggtggttcactggcaagcttttgtgttccttggcttgtggaagcatcatcccaatctttaccttcttctaaggccacagtcatattggattggggcctaccctaacaacctcatctaaacttaactaatatcatctgcaacggtcctgtttccaaatatggtcacgttctgaggtgctagggtataagaattcagcatatgattttggaaggggatgcacaatttatttatttatgcttaatttttaattttattttatttttccataagttattggggtataggtggtatttggttacacgaatatgcgtgcttccccttcacccttctgccatgattgtaagtttcctgaggcttccccagccatgcctcctgtacagcctgtggaacttcaggacctgggagagaaaaaagctaccagcaacattcagactgagagaggccaaaatactaattcataattagcctggtacatatgaaggatcaaaaagaacaggactgtatgtctgacctctgacaggccctaccaccatagtagagactcagtatgtatacttaatgaaggaataatgaatacatcagcaagagaaataagagtgaccatatgttccttaagagaagcaaagagcagctcctgttcctgctggaatgagtctccattccttgcaacagaagtgtcctaagttatagccagaggacgggggcacattgacaaaacataaagcggatatgataataacaaggtaccattccagcaagaacatctgaagaaagaagcagtgttgtttatctttccttcatctattctgaaactaaaatccttaaccaaatttatttccgaagtttaaccctttaataaactggcctctgactccacctggtggagatacataaatctatgaaaataaaccaatccaaatgaagattttaaagtcatcagctctctttcatgtctcaaagaaaaaacacatatcccgaaattcaaatagatgaccttctcggatgtgttataggcactcagaagccccaaagaaaaaatagtttgagttgatcatttgactgttgctctcagccttcatttctgcctttctaggttgtgtcaggcattttgactgtccaggggccctgcatattctattttcctagttacttgctaaggtttgaatatttgtccc

SEQ ID NO: 478594 - DNA, 563 bp, Homo sapiens
ttaatttttaaatggatattagaaaaaccacttttagtaacttaatcagaaggaagaggaagaaagaggaagaggaggaagaagaggaggaggagcaggaggaaaaaagacaggaagaagaagcagaagcaggagaagaggaaaaagaaggagacaaggaggaagaggaagagcaagagggaaggagaaggggaaggaaagaaggaaaaaagaagaggaggtatacaacttcaagagaacaccatggctttagtcaaaaggaaagaagctgcgtcatgttgtcggtgtttgaagaatccaaaaattatacattttctaattctcgatttggacagtctctgttcccatcattcaaagactaccaggaacacatctgtgatcaacaaaggtattattattatgatgccaatgttactaaagaggctatatgacttgtccatgatcaccagaccaataaaatagcaaagactttctgattataagttacatgtgctttccactgtcacctttttggtacttgactattttgtttgattgactaatttaaggtgacaatgattagt

SEQ ID NO: 478595 - DNA, 1438 bp, Homo sapiens
acctcttcctccaacacttaaaaaaggcagtaggtctgcttctacttaggctgatttctaagctttgaatttttgcgcaataaaagcagaatgtcgaagctccttaactgtttagaacaaaagtccctgctcaacaagttgcagaatgaaaagggtgccgacttctacattactaataagctccaaagtgatgtcgagttgctgatcgttgaaccatcctttgagcagaaaagccatagtaatgtaccagggctgcctcctattgaagtagcctcattgtctaggatacccgaagttcgttgtctcatgaccaaggaaattaagaacgtgaacacacaaggaagggtattggaagataactccttctggctacttcctgctggagagatacgtcatgtggggaacagcagcaaaggctcctcctggggtcaatctaagggtcctgtaaaggtcctgcatggttctatctgcaacaccatttggagttcaatagcttctagccagacaagtaatggaggtgggagtttaagtgactattcctcctccattccatcgactcccagcatcagccaggaggaacttcggatcgatgttcctcccacttccaacacacccacgcccgttcgcaagcagtccaagcgctggtccaacctgtttacctctcagaaagggagcaacccagacaaagagaagaagggcctggagaatcgtgcagacagcatcaggaggggcagagccatccccattaaacagggcatgctattcaagctaagtggcaaagggctgaagaaatggaaaaagaaatatgtcaccccatgtgacaacggcgtgctgacctaccatccaaatttacatgattacatgaagaatattcatggtaaagagattgaccttgggagaaccactgtgaaagtcccagggaagaggccactgctagccacatctgcctgtgcgcgcatctccagctctaaaaccaatggcctaaccaaggacatgagcagtttacacatctcacccaattcagacacagggctggatgactccctatgctccagccccagtatctccagcaccaccagccccaagctccacacgccccactctcctcaggccaacagaaagaagcaccaaaggaagaaaagcacaaacaacttaaaagaccatggcctgtccggcactgctgaaggacaagaagaaaactttatcattgtgcccctcactggccaaatgtggcactttgaagccacgatgtatgaggagcgggatgcctgggttcaagccatggagagccagatcctggccagcctgcagtcatgcgagagcagcaagagcaagtccgggctgaggagccaaagcgaggccatggccctgcagttgatcggaaacatgcgggaactccaactgtgtggactgcgagacccagaatcctaaccacatt

SEQ ID NO: 478596 - DNA, 2014 bp, Homo sapiens
accgaaaaaaggaacaggataaaacctaatggcgattgctcgtttaagtgtcaaagtcggtaaggcaggtaaagcagcaccgcatgccgaatatattgatagggatgaagaaaagaagctgaaacaggaacaggcagaaactgatcttgaacatagtacttatggaaacatgccgaaatgggctgaacataatccgattaccttttggcaggcagccgacctttacgagcgtaaaaatggcagtacctatcgagaatatgaaattgccctgcctagagagatgaatgccgagcaacgcctagaactggttgaggacttcattcagtctgagatcggctcaaaatatccgtatcaatttgcgattcataaccctaaagcaatggacggcaaggatcagcctcacgttcacctcatgtttaatgaacgtctgcaagatggaatcgaacgagatccagagcaatatttcaaacgctataacgccaagaatcctgaacgtggcggagctaaaaaagacaatacgggcaagggttaccaggaacgaaaaactgatattaaagacctacgccaaagatgggctgatttatgcaacagccatttagaaaaacaccaaattgacagtcgtattgatatgcgaagctacaaagagcaaggcatagagaaagaacccgaaaagaaactattaccaagccaagctaaagaccctgaaatcagggaagccttgcaacagtcacgtatagcctataaagagcttgagcaactagatttaggcgaccctaaaaaagacctgaaagacctcaaaaacagcccaatttcagataaagaaattaaacagggtattgagagctttaaggctgattttgacagctttaaacagcttgctttggaacagtacaaacagcagcagaaattagaaagagagcaacagaaaacaatgaatttagaaagaacagagtttaaggaagaagaacttgcgcccattaaaaagcttgatttgaatgatttgaaagttcctatgcctaaaaaccttgatcagttactgatttggacatccgaactggctcaatataattatgctcaattccttaaccaatccgaacagctaaaacttgttgatgaagacaacctggaagaacaggcggaaatcagtcagaagcttaggttctatagaggtaatgcgcttatagaaaaccaaatcaaagatttctatttgaaaaagttacttgatcaaggagaggcaacagtcaaaggttatattaaaagtccgactaagaaaaatacccgatatgctgtaatttcttatcatgactatgattttgtaagctttgctactccagagattcttaataaatttccagccgatctcatcaatttcgtgcaaaaggaaacacctaagacattagcggacatatatcctgaagaagccgtgttcttatcagctatcaaaaaatttataaaaccttttaaggaacagtataaaaaattggctgataagaacagggaaattaaggagcacaatacagttgctcataaaatttatataaaaattaaaaataaggaagcaactctgcaaaagccaacagagtcaaagcctaaagaatctaatccaaagactactgaaaatagtgctgtcccagtagagatgaagcagggaaccattcagaaaaatatggctccacaagaaaagccacttactgtgattaagaagcgaaaatttgctttaaacaagaataagtaacttgtaatgtaaaattctaaacaaaaacccctctaagtcttgcaacttagaggggttttcaagtaaattcagcggtacgcagttatttgatggaactaacatcaagtaacgaagatcataaggtttggcgaccgttatgatttcaccaaaaggcttgtacctgaactctattttcacaataaacagtgtttatatcaagcctcaaaatgataagtcttcgttaattcgtgttttaaaccatcaaataagcatcctagatcgagctttgcccgcttctgc

SEQ ID NO: 478597 - DNA, 876 bp, Homo sapiens
cccaaagccatgttttcggagctgtcaaatccagaaagtctgcccgcacagggacaggcccagaactcagcacagtcaccagcaagtctggttctggtcgacgcgggtcagcagctgccccctcggcctcctcagtcctctagcgtgtctctggtgtccagtggctccggccaggcagctgtgccgtcagagcagccgtggccacagccagtgcctgcacttgcccccggcccaccgcctcaggacctggccgcctactactactaccggcctttgtacgatgcctaccagcctcagtactctttgccgtacccaccggagcctggcgcagcctccctctattaccaggatgtctacagcctctatgagcctcgatacaggccctatgatggtgctgcgtctgcttacgcccagaactaccgctatcccgagcccgagcggcccagctcccgagccagccactcctcggaacggccacctcccagggaggtgcgcagagccctgcgaggggtgggcgtggtcctggccaccgcgctaggctgcgccttccagggccttagctgcacttgctccttgtgagatctgagagagactgtctcacagatagagccttcctgcaaggggatattgcttcttaaacttggtaatagagaaaaagctactcattaatgaagactttgtacctgcacttgtttttgaaaggttcctcgtgcttattagaggtttttaggagcttacctaaagacaaaggctctgtctgtgaacctctgcccacgcagctggccctggtgtactcggctccaagggcatgcactgggcggtgtgcagctggatgttggaggtgctttgtgaagcaggcggcactgtgaggcttca

SEQ ID NO: 478598 - DNA, 526 bp, Homo sapiens
tctacggatggcagtgctgacctctaaggatgtaggtgtgcaggatgtgatgcccggggctgccactgtacccaggccaccagcgcaggtgaacgagaagaaccaaggctttagaggcgtgggccatttcctgctccacgtttcagctccagacccggccgcctttatgagcttcgtgcagcttgcacatgtgggtttccacgcgcacgggtgccaaggctggctcctctgcctgatgcttggaccatctgcactggagcccacaggccgggccggaacctccttggcttcctccagctcctctcttggactctgggacgtgccttgcctgctggttccctctctggtgaccagggtggacatgaggctgcgggaggcccatggagggaccacgcccattgcccaccttgttcagagtgacagctgaactgggacagtcttgcagaagggagggccctggccgctttgctgagggaggtgggagtcagatgggacttgaggggtgggttctcattcctggaagggt

SEQ ID NO: 478599 - DNA, 1536 bp, Homo sapiens
ggcctgcagagctgcggtgcctataacatgaggctggctccgtctaacctcaaggaacatcacttgggggacaacggcttttatcactgggggatgcccgttcaagtccactgcgttgtgtctgcctttgtgcgctcagcagaatcccagccacactcacattcccacaaggacattccccccatctcatcccttctgggggcctcaaacaatttctacgagtgtccccaagtccccagaataaaactgttcctcagcaggcacacaaacccttttaccatcaccccaaacatccagaatgttggatccagggtcctgcctgggcctgaaaacctggactccaactctgtcctgtcacgaagtggggtccacatgggggacaaggagaccctgaccccacagccagcagcacaccccggtgtacgcaaacagcagcaaatgcagggcctggggactctgccctgggcgctccatggtcgctgacagttaactatgggaagctggaaaagccagagggcgggtgatggggctctttctgctccaggccaccagggcctcatgttttctgcattggcctcaagtgcctgcccggtgggcacacacggtgggtcgctggctccccgcatgggctgtgatccaccgagggtccctgccctggatcccacagcacacggccttcctgttctgtgggaaccatctttggcaccagatacacaaaaagtatgtgtgtccctctgcagcttagggccgagccagggcctggcgacagcttccaccgccgaacgcggcttttcctgatcagccatttgtcagagccagacgcggactgggggcctagggatgtgcacgggtcccaggggcgggcgtggagaaggctggaaccaaggagattagagactagagaaacagacgtgcctcttgctctcagttttactgaacagattttcaaggcagtaaagtttgatgatggaaggaaaaagagggaaaagcagtccagcttttacaggaaagcacaaattcatacgttgcaggttctcctcccctgcacggtgaggaacagagaaaagggccaaggctcccctatccaaaggcaggcagagccacctgcaggatctgctcccagagagggaccaagcatgtgggtggctaaggggccaggacctgcctgaaagaggggggacggcacaacctggacaccccaaagatcacagaacatggagctttagcaggagagaccacagatgagagtgcagtctgccccttattttacagataaggaaactgaggcacacacaaggaatgacttccacaaggctctgattgtatccagtttcctgattcttagtctagaatttttctctgtaaatcttggccgtctggggagaaagctgactagggagaggacaaagggttgtggaataagagtgcagctctcttgcagccactgaggctgagacaacacgtccttgagtgggaagcacagtgggtccatccttggctcccccgtgctcctggatggacagggtaggaaggctc

SEQ ID NO: 478600 - DNA, 605 bp, Homo sapiens
tgggatctggcaaggtgatgggctgtcccttgcgagatgaagttgctgctcctccccgctgcaaaccgcgtgaattccccgtggctccacctacttcccccagtgcgcatgttgggcaccggtctgctgcaggagctttggcaagactcacatctcaaaaaccgagctccctgagtgagcaattcctgtcccttttaagggcttacaactctaaggggtcacaacttagtggcttggagaagtatctagtgactggctgtcctaggacccctcagatagtgacagttctggaggaccgttgtccaggacagcagagtaagactgagaaggccatgccagtgtccaggagacagttaacctcctggccctcaatggtcaagcatacctggggctctgtgagggtgacggcatgggctgacacttgccccgggcaccctcagtcctgctgctggatcatctgcaaagtggttgccactactgattgaatgcatttgggccatccgcgggttgctgggttaaggatttttgctaggaaggttacaggttgtcagtggtctcagtgctttcaggctacgcccttgtttacaccgacaacaagttggtat

SEQ ID NO: 478601 - DNA, 558 bp, Homo sapiens
caaagacttgggtgcccttggggtctccactgtgccaagtttctgcttttagcagtatgaagccatggtttttagtttctgtctctagtgataagtggaaaagagggacgaggaaggggctttaccagcccaatcagaaacagaaactaagaacccatgactgtgttctctcccttggacaccctggcagggagtggaaattattgaacactaagagctgcatgcccacaggaaaaggagcaccctctcctcactcactccacagtgcgcagagggcagaagttgaggaggcaaatatctcagctgcagctcctagtttctacagaggctcaaacccctcaccagaccaagccgctttctgtttccatcagaggaagccagagagcaggggtaacagttttccttctaacagtcaggaccctcagctgcaggtctgttggaatttgctggtggtccaccccagaccctgtttgcctggctatcaacagcggaggctgcagaacagcaaatattgcagaacagcaaatgttgctgcctgatccttcctccagaagcttc

SEQ ID NO: 478602 - DNA, 577 bp, Homo sapiens
accatatggacgggtttgaaggccatggaaaagtgtgtggtgtgggcagatccagaagcacctgtgcatcggcaggacacaacaaacagggcccagtaccaaagcaaaccaaagacatgtggacctcagactgcatctgagtgtccttgccagagtatacaagcttctgggtggctacctcctaaattttcaatattgcccaagttcaccaagtacttgtatgaacttcatgtcctgactccttggaccagagagactagcagccctctttttggacactctcaagggtggcattggggcagcagtgcagggcctgggacctgtgggttccagttccaggggacatctgagcacttcctggccacacacaaaaacaacgggggaagtgagacagtggggatccagatggctcctcaggaggtagcggcccagagctgccataacagaggtgcaaagagagcccctgcaagctcacttctgctcccaggctggtgagactgaaaacattgagggaggatgacattcaggccttcgttcctttcatagatgcaaaattgttactgttctcttacaaaat

SEQ ID NO: 478603 - DNA, 721 bp, Homo sapiens
ccacacaaaccattcagggcaagtgataatggatagtccatatatcatatctctgcatattttaaagctctggtctcagcccagcccccagcccaaaggagaaccctttgtgctcaggtactcaagttttcatgtccttgcaagtgaatattctggcctgaacatccaacctctgagcacacgtgtgtggacacctgcctggattcccacttgctttgttcacccactgaactcccaacttccaaaatctgcgtatggctcttaccacacttaccacactgttgtccacatgtctgtgctcagctaccccttgagcccagggtacatactggacagttggtcagtcctcaggaagagacctacaggaagtggatcaaatccaccaaatagagcaatgtgtgagcttttagaagctgttgagcagtcctggagaacagccagccaagaccaggaaggattccaggaaggacctgaaacaatgaagtttggagatgaatttcagaaatcatcattctcagatgaagtaaaaactaagcaaaatttttaccaatactcctaccctaaaagtatgggatgcttcccagtcacttacttatgcttcttgatctgacaaaaaaaaatgtaagtacaagacaaaattattttgaaatgtatccacattgtagcccctatcaatagtttacacctttttttttactgctgagttgtatttcatttcatg

SEQ ID NO: 478604 - DNA, 656 bp, Homo sapiens
gtggaatttcctgctgtgttggtctctgcatcggtcactgtgatggtccctgctctggaacagtgtagacaacaactgagtctgaaaggagaaggatggacaggatccagatccagggcttttcaagttgggattcccctggggccaggtatatcaggtgtactagggtgtgccagagtaccaggtgtgccggagggatcagacgtgccaagggtgccagttgtgccaggagaccaggtgtgccaggaacaaggtgtgccagggaccaggtatgccagagaaccaagtgtgccatgcgtaccaggtgcatccagggaccaggtgtgccacaggaccaagtgtgctatgggtaccaggtgtgcccagggactattcacatcaggggtaccagatgtacaaggcaccaggtgtgccaggggaccaggtgtagcagggataccaggtgtaccagaagtaccaaagttctgttatttcaaaaatgtcatacaagagaaaccataaagtatgtagccttttacaattgactttcaatcagtataattcccatgagattcatcagagttgtggtgtgtttcaatgcttaatttcttttttactgctgaggaatgtttcatggtaaaggtatgccaaggtatgcaggccacctgggggctttc

SEQ ID NO: 478605 - DNA, 564 bp, Homo sapiens
ttttttgttttttgtttttttgttttgagaaggatctcctctattgtcctgggcagtctaatgctgggtgcagcctgctatgaccttcacagtgaggataacacacaagatgtagcttcacaagtcctctttgatcagcagccatccagctctggtctgccgaagcctcctgtttcccaggcagcttactccaaggactcaccgaacaatgcagagacagcaggagcctgtggagggggcctcctgctggcagatagaacatgcaatctggttccttgtgcatacacatggagacagcgtcctgttttcagtggcaatattgttttgcaagccccacttgctgtagaaatccattcaaagagaaatccattcaaaaagaaatccactcaacatctggctatcaaccatctggacagtgctgcaaggagtaagggagtctgttattgccagtactccaggaggaaggccaggctcaggaacgatggagggtggatacttcattctgggaaccctgtgaggctgtggaccagagatagttcctcttagcacagaaactgctcattt

SEQ ID NO: 478606 - DNA, 641 bp, Homo sapiens
cacagatggccatgtgtgaaccccggggaacacagccctggcccttcgcacagctgtttcctgattcacttttcttcttcagaagaatgaagctggatgtaaatttcaatggatgcaggaatgaggccaagagacttaaaggaacttctccagccctctggagctggagccctccggagctggagccctctggagctggagccctccgaaagcaggaattccgccatgcagagaagcttggggtgttgtgtgggaaggctgcagatgctgcatccagcccacctcctcccttgccaaataattgtgttgtccgtgtgcctgagcgccaggtccgcgtgtgcaaactggcagggatggctctacctagtggggttgctgaaggattgcgcacatgtacgatggttaacgaatgatgtttaacatcttttcaggggcttatttgccatctgcattctcctctcttaaatatctgttcatgtctcttgtccacgttctaactggattgctgtttttgttttaactgctgagctttgagagctcttatagtctatattcaagcctttgtcagatttgtggtttggaattaggtatcccagtctgtcatcgcgtcttccatcctttcacctgggctttctcaaacc

SEQ ID NO: 478607 - DNA, 485 bp, Homo sapiens
cacccatccatgcatccattcatccatccatctgtccacccatccatccacccattcatccatccactcatccatccaaccacccatccacccatccatctacccatccacctgtccattcatccatccacccatcatccacccatccttccacccatccattcatccatccatccatccatccatccatccatccatccatccacctacccatccacccgtccatccatccattcatccatccacccattcatccatccactcatccatccacctatcaatccacccatccatgcatccatccgtctacctatccatactaatgtacaatccaagaatgggtccctgaataatttacagttccctgtaactgaacagaaacgggtaaaagcagtcagcggctagcacttgctactgtgtcaggtactgcccagacaactttccatggattgacccatttaccctccgaaagccctaagcagtgt

SEQ ID NO: 478608 - DNA, 675 bp, Homo sapiens
aatttaatcattctaaaaccccctcatgcgatccctttccagtcacaccctccccctctgcatagcccctgacaaccacgggcctggtggaaccgccatcaataaatcaagtgtgatcagggtgaggaacaggaaagaaggaaatttggggaaatggggtgaatgtcaggtggatcagagagatacagtcatgggggtcaggtgtggtatcaggaataatgtgggaggccggattgaagtctgggccaggaacaatggtaattgtgggagactcaacaaagaggggcttccgaggccattgggcagtgtcagtcttcagccgctaagccgagaagatctgggaaggagtcagagagcctcgggccagagttccaggggctctgggagtggctaccagaagtcagggtttacttggggggtagagggcaacagacatgaaaagtgtgaaaaatgctttcccccagtgcacactctcattggctcccagtgcaaagaactgctgctgcacctgcggcagtgtacagggaggttgctggtggatgggaggtgaccccatcttcatgtctattcctgggtcgatgctgcaattagcccagtgcctgcatctcctttgtactgagtggctttggcgagctgtgcttccccttcccttaggggtggtccatactgagggtt

SEQ ID NO: 478609 - DNA, 755 bp, Homo sapiens
gcaaacaaaagccatttaggatctgtaaactaaatttgctgaattcaaaatatgaattttctactgtatagtgcatggaacaatatatattaaagtatactgtgaattactgtctcattggaggttttatcaaagaaacagttacccaaactaatgatcctttgaaaaacaaatgtgaagtggctctcctgtggcttctgtggatccttcaggttctgggaaggaacatttgttctaaacccattatttgtcaactgccttataccacaaaattgtcctggattccctgcctaacacgtattactaatgattctaattatcaaggcatttggcaagagtttcaagaagagcagactggttctggggggccttacaaggagaatacagtgtggagcaccagatgcagctgtagccaagaaggctttaatggcatgcaatctccctttaggtgataacatataaacctggtgctgcaaatctattgaattatctctgagagagaaaacaagagagagacatggagaagggaaaggagaaaggaagaaaggaaaatcggagaacgaaagtaaatttgacgatattcactttgcatttttatgattagccatatgtaagcaaagtaatttcatggttaatgaatgaaataaggatgaatttataaccttaaaccacattgataatgatggagcattttgctttgtaaattaactatctccaaggttcatttgactgtggaatgtattaatacttccctt

SEQ ID NO: 478610 - DNA, 522 bp, Homo sapiens
tcgatcttgagttaattttgtatatcaggaaagggacctccacaatgactacatcaatttatattctcagaaacagtgtaaaaagtttccagtttctttacttccttgccaatacttgtgctcttttgataatagctatcctgtcagccaagggaagccatgagagactgtaccgggaggaatggtgcactctggctcagatactgtgcatctcccacaggcttcacaaccggcagaccaggacattccctccggtgcctatgccaccagggccctgggtttcaagcacaaaacagggcagccatttgggcagacacaaagctagctgccggagttttgttttcttttcataccccaatggcacctggaacaccagcgagaaagaactgttcactcccctggacagggggctgaagccaggaagtcaagtggtctggctcagcagtttccttcctcacagagcccagcaagctaagatccactggcttgaaattctcactgctagcacagcagtctgaggtc

SEQ ID NO: 478611 - DNA, 1613 bp, Homo sapiens
tcaaagtaaaacacttgtgcattatgttttacgatactaagattcaggccctcagctgcaggtctgttggagtttatcagaggtccaccccagaccctgtttgcctgggtatcagcagcggagtctgcagaacagcggatattggtgaacagcaaatgttgctgcctgatcattcctctggaacttttgtgtcagaggagtacccagccattaatgagcgaggctccgtgggcgtaggaccctctgagccaggcacaggatataatcttctggcgtgccatttgctaagaccatcggaaaagcgcagtattagagtgggagtgacccgattttccaggtgccatttgtcacccctttccttggctaggaaagggaattctctgaccccttgtgcttcccgagtgaggcgatgcctcgccctgcattggctcaggctcggtgcactgcatccactgtcctgcccccagtccaacactccccagcattcactataattcctgaatttagatttgggataaaatagtgtataataaaaaaggcaaactagtgttgtttattgaaatcgggacaaaattgtgtatatggttacatcagggtctcccggaaaattaaaatttaatgaagagcgggaattttcatttgctttgtgctgctatattttcagcatatagaacagtgcctcaccatgataagtgtttaataaatatttgtttgcatacatcttaagtaaaaattattaacaagcctcttaacttattgcaattatgaccacaatagcatacttgtaattacagtttataattatttggctaccatatgaatgtctattacatgcaagcattttactaggtactttctcatgggctgactcattttgtttcatgatagccctgtaaagtagatacagtcatcccattttacaaatgaataagctctaagaattagtttgcttaagaacccacaggaataaaactaagttacctgaacatggtaaagttttcatttaatgtttggttttagctaaataattctccctatagacctttaagtgtaagaacaatattatttgttctaatgataaaaggaggtaggagaaatttggttacctgcaatgattttcaagtcatgaaagtataccaaataaacatttcacattcacatttctgcaacttttccaaggataataccagtcctgaatcttaactagatattagaattatttggaagctttaaaaaatgctgatgactagttctcacccacagaaatactgatttaatgtaccccagtttccatttatatgggttatagtctggggaaataaataaataattgactcaggaacatggaaacaattattcttaagtatcatttaggtatttttttaactcagaaacatttgtgtttgatttcaataagaaagaacatactctgctatataatagcctttagttgtaaagattaagcaaattaataaatgtaaagcacttaaagcaacacatatagaaacatagaaattactcaaagattgttagctattataattattgctgctgttactgtcatcattattacttgagggattaaatggaatgaacagcgagccttattttta

SEQ ID NO: 478612 - DNA, 1757 bp, Homo sapiens
gtgagagtgcccagcaaggcacaaaaggatggtcggctcagcaggactggggagggagcactcaaggctgtacttgagcgggaaggctgaggactcccgagcattttcccagcaaacctgcagcccggagcctgagaaacgagaagtgtctgtgaggctgaaccaacatcgatacagtcttctggccatcacagccccagatattgccacagggacctccacccagtgctccccacccatcagtgcctggccttctccttgctccccacggggctcccgtgatgcctctacgtctcccccaggacagccactccccctccttgctgggcatcatggagtggatacgttgaaccctgcttcatcctcacaagcagatggggagcctggcagtcgcttgtactggctccctttgaaaaatgagtggtccagactgtgcctactcctgtgctgctggctgccctggacactggcctctgagacttccagcatcatggcatcaggcttggccaagcagctgccttcatgcagcctggctgtcactctgcctgctgacctgagctcacaacatgacagcaacagagacatgggctgctccctgagccctgaccaggggccgggagccacgctgaggactccggggggctttctttattcccagccagggctgccatcatctgaaggctcgactggggctggaggaggctgcagttacattctcagccagggctgccatcatctgaaggctcgactggggctggaggaggctgcagttacactctcagccagggctgccatcatccaaaggcttgactggggctggaagaggctgcaggtgagcgagaaggccactggaaggcagactatgcatcctgccggagtgtttgctgaggcctggatgcttcctgtcggcctcagtgacactgagcctctgctggaacctgctccgggaagctctcaatgtgccctgattatctgtttcctatcagcttccactgataacgagaacctctcaaaggccggcccctgtttgcactgcccggtcgtcagccgtaggaagatgttcggtgacaggcaaggacccacccattgggcaaatgcggacgtgggccctgcaggattctggggctggtcacgcagcagggagctgctactgccagtgctactgcagctattactacctccactgctactgtggctgtcactaccaccactgccaccacagctgtcactccaccaccgctaccgcggctgtcactgccaccactgctactgcagctgtcactaccaccactgccaccacagctgtcactccaccactgctaccgcagctaccgcagctgtcactaccaccactgctactgcagctgtcactgccaccactgccaccacggctgtcactgccaccactgccaccgcggctgtcactaccaccactgctcctatggctagtactaccaccaccactgctactgaagctattactaccaccactgctactgctgttactgctgctattacactggcagtggcaatggtaacagtagtactaggaagaggagtactaggaatatgaatagtgataattaccactacttgaagtactcctcctcttcctattactactggtagtgctagtacggctagtaggggtagtaatcgtggcagtaccactactactcctagtactgctgggttgtaaatagaaaactccctagagaaaataaggtgggactgcaaagcttttatttcctgagcct

SEQ ID NO: 478613 - DNA, 699 bp, Homo sapiens
gagcttcagtatgcaccgggttcatcccccaacgcctgtggaaacgcatgggccccccgctcctggaggatccatggtgccttcgctggacaatatcaccttggcttctctcatttccagcaagttccagagctgggacggggccctggcgatgtgctttagctctttctttgggcctggcttccttgatggacagcagctggcccgatcactagctgctgctgtctgggagacaaggccaggtggttggaggggctggcagggaaccaagttcaattcacaagggttgtgtgcaggaggctcaggcaatgggatggaggctcagggtggagacactaagaaggagtcagagaaagagcacagtgctgtggagggtggctgtccagacctgcccaggatgccagcaggggccctgggtgcagagttggggggcctcgcctctgtgctgtgggggcctctgcaggccctgagaaaagagtggcattgcccacttccctactcttgtcttaactaccaggcacccgtccttgaatttcctgcagaggcctaggcttgcccgtgagattccaatgcaaatatattttccacaaaacggtatgtatttttgtaaatcacaaaaaatgttttgataaaatccatcctacccttgtttttattttgtgtattgtgtttttggtgttctgtcaaataaaactttat

SEQ ID NO: 478614 - DNA, 496 bp, Homo sapiens
taagtgcactgattgcttttgggggtgatgggtgaatatggggctgtttcaaagtatgaagtagaagccaacaaaatggaaatgaaagaaactgctaaacaggatacactgtggcaaatgagctcaactagcaaacccgtgttgaatactcgtgaagtcaatcctttgaagaaattcaccattcctaagatcaggaggacagctgagaaagaaggcaaggagaagcaagtcacatcttacatggatggcagcaggcaaagagagagagcttatgcagagaaactcctgtttttaaaaccatcagatctcatgagacccattcactatcatgagaatagcacgggaaagacttgcccccatagttcagtcatctcccactggatccctcccacaaaacatgggaattatgggagatacaaggtgagatttggttggggacacagagccaaatcatatcagaccacaatggaattaattaagatgatcaagtaggggg

SEQ ID NO: 478615 - DNA, 7609 bp, Homo sapiens
cacagtgtttgtgactcgatgttgggatgatcaactggtttttagggaaacaggtggtatttggttacatgaaaaggacatgctctctgaataactgtacagtggccaaaagatttggaaaaggaaaagatgctactgtcacctttgtgcatttcaagaaacctgtagatccatttgttcaagaaaactgtttatgcaatgcactaaattcagagataaatcctttcatctcaaatatttctaactcctatggaaatgtacaaaatggaaacatttctatacctgaaacatacagtggacagacagagcacagtttagcagaaattagagacacttctcaagtacttgcacatgattcagacatttcacttatgcccagtgatgccaaagacagtgttaatggtgaccttttgttaaattggacaagtcttaaaaatattttaagtggtcttaatgcttcttttcctcttcacaacaatactggctcaagcacagtcactacttcaaaatccatcaaagacccaagactgatgaggagagaagaaagtatgggagaacagagtagtactgcaggcttaaatgaggttttgcaatttgagaagagttcagataatgttaattcagaaataaaatcgacaccatctaattctgcctcctcctcagaagttgtccctggtgattgtgctgttcttactaatggtttggataccccttgctttaaaacttctgttaatgattcacaatcttgggctcacaacatgggctctgaggactatgactgtatacctcccaataaagttaccatggcagggcaatgtaaggaccaaggtaatttttccttcccaatttctgtgtcaaatgtagtgtcagaggttgagaaccaaaaccacagtgaggagaaggctcagagagcccaacaggagtccggtaatgcttatacaaaagagtacagtagtcacatttttcaggactcgcagtcttctgatttaaaaacaatttatcagactggttgccaaacgtctacagtttttccactcaaaaagaaagtaagcattgatgaataccttcaaaatactggaaagatgaaaaacttcgctgacctggaagacagttccaaacatgaagaaaagcaaacttcatggaaagaaattgataatgatttcactaatgaaacaaaaatcagtccaatagataattacattgttttgcaccaagaatacaaagagagtgagagtcataattcttttgggaaaagctgtgataaaatattaattactcaagagttagaaataacaaaatcttctacatctaccataaaggataaggatgaactagatcatctagcattggaatggcaaattactccaagttttgagagcctgtcacaaaagcatcctcagcactctgtggagtatgagggtaacattcatacaagtttagccattgctcaaaagctaatggaactgaaattggggaaaataaatcaaaattatgctagcattataactgaagctttcccgaaaccaaaagacataccccaggccaaagaaatgttcattgatacagttatttcatcttataacatagaaacagctcatgacagttcaaattgcagcataactagagaacatatatgtgtccataggaaaaatgaaaatgaaccagtgtcattagagaacattcagagagactataaagaaactgcttatgttgaagataggggtcaggatcacaatctgttctgtaattcacagttaagcaatgatatatggctgaatgttaatttcaaaaaacaaacagatagagaaaaccaaaatgaggctaaagagaatagtgcttcatgtgtagaaaacaacatagagaacatatatggagacaaaaagcaggattctcatacaaacgaaaatttcagcaatatagatgaaaaggaggacaaaaattaccacaatatagaaattttgagttctgaagaattttctactaaatttaacttgatttgcagagaagataatgcagtgtcagcagcaactgcattattagagagtgaagaagataccattagtgccgtgaaacaaaaagatactgaaaatactggaagaagtgtagagcatttggcttccacgacatttcccaaaactgcaagttcttcagtgtgtgtagcctcaaatgctgcaatacagatagctagtgctactatgcctgcattaagcctaaataatgacgatcaccagatataccagtttaaagaaacttgttcttctgaaagtccagattttggtttgttagtaaaacatagggtttctgattgtgaaattgatacggataaaaataaatcacaagaatcatttcatcaatcaataaatgagaacttagttcttcagagcattgaattggaaagtgaaattgaaatagaattagaagattgtgatgatgcttttatatttcaacaagatacacatagccatgaaaacatgctttgtgaagaatttgtgacctcatataaggctctgaagtctcgtatcagttgggaaggtctgttagcacttgataacggggagatggaagttttggaaagcaccacaggaagggagaatagtgatcagcattattctaaggaaagtaactatttttattcctctacacaaaacaatgaaacagaacttaccagcccaattttacttccagatctacaaattaaaattactaatatatttaggccaggattcagcccgacagctgactcccttgcattgaaagatagtttttgcacacatgtaactgaagccacaaaaccggaaataaataaggaagatggagaaattctaggatttgacatttattcccagccttttggtgaaaatgcagattatccatgtgaagataaagttgataatataaggcaagaatcagggccagtgagtaactctgaaatctccctttcttttgacttgagtcgtaatacagatgtgaatcatacgtctgaaaatcagaacagtgaatctttgtttactgaaccttctaatgtcacaacaatagatgatggaagcagatgtttctttacaaaatcaaaaactgactataatgataccaaaaataaaaaggaggtagaatcaagaattagcaaaaggaagctacatatatcttccagggatcagaacataccacataaagatttaagacgacataaaatttatgggagaaagaggaggctaaccagtcaagactcatctgagtgtttctcttcattatcccaaggacgaattaaaacattttcacagtcagaaaagcacattaagagtgtcctaaatatcctaagtgatgaagcatctttatgtaaaagcaaatgtctttccagaaaactagacaaagcagttgttcacttaaaaaaagctcatagaagagttcacacatctttgcagcttataactaaagtaggagaagaaagaaagggcccattaccaaaatcatatgcaataatatgcaataatttctgggaaagttgtgaccttcaaggttatagttctgtgtctcaaagaaaatattattctactaagcatttttcgtcaaaaagaaaatatgacaaacggagaaagaaaagagctccaaaagctgatatttctaaatcattaacccatgtgtcaaagcacaagtcttataaaacaagtggagagaaaaaatgcctttctaggaaaagtatggctagcagtgtctcaaaaagtcaccccaccaccagtcacatgggagaattttgtaatcaagaacatcctgaatcacagttgcctgtatcctccacatcccaaagtacaagtcagtcagtttattataatagcagtgtaagcaatccaagtttatcagaagaacatcagcccttttctggaaaaactgcatatctgttttccccagaccactcagatgagaaactaatagaaaaagaaaatcaaattgatacagcatttttatctagcactagtaaatatgaaaagcttgaaaaacattcagcaaatcataatgttaaagatgcaactaaagaaaacagttgtgacgctaatgaagtaataaatgaaagtaattctgtatctttaagttgcataaaagaaaacataaattctagtacaggcaacgattgtgatgcaacttgcataggtcacacaaaggcgaaaactgacgtacttatatcagtcttagattcaaatgtgaagcactttttaaatgatctctaccaacaaggtaaccttattttatctgattgtaaaagaaacctggaagtaaagtggacagatcctattgagagacccaaacaaaacattattacaggaaacttccttatgggcccattaaacctaactttgatagcaagtaaaaagtacagtattcctcagttatcagccgctgcagtgacagatagtgagggagaatcttcaaaatcttacttggataagcagagaattcttactgtagattcttttgcagcatccagtactgtaccacactgtgagcagagctgtagagaaaaagagcttctaaagacagaacagtgctcttcaggtaattgcctccatacagatgggaatgaaacaaatgtcactgagaattatgagttggatgtagcatcaggaactgaagaagataaaagttatggggaaaatatagtggaattatcttccagtgatagttctctgcttttaaaagataatgtaaaaggctcctcttcagaaacatgtattgtgaagaaagacactgaggacagaataacgtggaaagttaaacaagcggaaaaagcaaaagattctgtttacaaaagaagcatgactgaaggatcaactgttaatactgagtacaaaaatcaaaagaatcagatctcagaagaatcctgcttaaatgagaaaattattacaactaacttgattgattcccatctgagcactaaaaatactaccactgagtcagtccctttgaagaacacagtttctaatccgcttaacaaaagagagaagaagggggaaattaaagttagtaaagactcgcagtctgacttgacattacattcagaaatagcctatatttccaaaccaggaattctaggagttaatcatacgcctattttacctgcccactctgaaacctgtaaagtccctactcttctgaagaaacctgcgtcatacgtgagtgattttaaagaaaaacattgctcagctaatcatacggcccttatagctaatctatctcaaattttgcagagggcagatgaagcatcatctttgcagattctacaggaagaaactaaggtttgtctaaatattctccctttatttgtggaagcttttgaaagaaagcaagaatgttcagttgaacaaatcctgatttcaagagaactgttggtagaccaaaacctgtggaataattgcaaacacacattaaaaccatgtgctgttgacactttggtagaacttcaaatgatgatggaaacaattcaattcattgaaaacaaaaaaaggcacttagaaggtgaaccaacattgcgaagcttgctttggtatgatgaaacactgtatgctgagcttcttggaaaaccacgtggatttcaacagcagtctaatttctatcctggtttccaaggaagattaaaatataatgcattctgtgagttacagacttaccatgatcaattagttgaattgcttgaagaaacaaaaagggaaaagaattcatactatgtattcttaaagtacaaacgacaggttaatgaatgtgaagccataatggagcattgttccgattgctttgatttttctctttctgttccatttacctgtggagttaactttggagatagtttagaagacctggaaatcttaagaaaaagtactttaaagttgatcaatgtatgtggggactctcctaaagttcattcgtatccaggaaaacaggaccatctgtggattatcatagaaatgatctcctcaaaggttaattttattaagaacaacgaggcagtacgtgttaaaatatctctttatggtctggaacatatcttttttgatgctgcaaaaaatcttgtttggaaagagagaacacaatccttcagcaaaaaatactcacaaaagaaggacgaagaaaggctactcagagtgaataaatgtgccttttctaagttgcagaagatatatgatactttgtctaaagatttaaacaatgaaccaatttcccctattgggcttgaggaggatactataattgcttccagaaagtcagatcatccaataaacgaagcaacaattagcatagaaaattctaaatttaacagtaatttgcttgcacacccagatatttgttgtattagtgagatattggatcaggctgaatttgcagaccttaaaaaattacaggatctcaccttgagatgtacagatcacttagaaattttaaaaaaatactttcagatgctacaagataataacatggataatatttttatcacagaagaaaatgttttagacgtggtgataaaccacagccatgaggctatcattttaaagcctgaagctattgaaatgtatattgaaatcgtcatggtctcagaaacaattcactttcttaaaaactcaatagcaaagaaactagacaaacagaggtttcgaggtatgctttggtttgatttgtcacttcttcctgagctggttcagtgccaagaaaaaatggcttctttttcatttcttaaagataactcaacagatgtttgcctttggaaagtgatagagactgctgtttccgaacttaagaaagatctggatattatctgcaaatataatgaagctgttaattgctcatatgctattcatttgctctcaagagaacttcaagaactttcagaaataaaaaagcttctgaagaagtccaagtattttatttccacatatattgactttgtgccatatatagcatccataaattatggaagcactgtgacagagttagaatacaactacaatcaattttctacactgctgaagaatgtaatgtctgcccctaggaaagatttaggaaaaatggcccacattaggaaagtcatgaaaacgattgaacatatgaagatgatatgtactaaaaatgctgaactaaccatttcctttttcctatgccaaatgctgtataacagaaggaagattttacagctgaagagaaaagaaaaaatgaatattcatattgtaaaacctggggaaaataacaataaatttagtatttctacgatgttgcccccagtatcagagtgcataaacaaaaacatctcaaattcctctaaaaaacgaccgagcactgtagacaaatgtgaagactctcaggaacaacagcaagatactactgtttccagttgtaaaaagctaaaggtatgtatgttttaaaacaaaacttttataagtattctttttgaaaacaagtctactcataagcaaacaagtagtttgcagaattctaaaagttaagaatggtaaattgtctggcaaaatgaatttactaactataatattgatttaaacaattcatattatctataaaatgatacataaattatatgtataggtgataccttgcaaatgtctactttttaaac

SEQ ID NO: 478616 - DNA, 490 bp, Homo sapiens
ttgctggctctcacactccccagagcacagaaacaccctcctcacaatgctgccactgcaaggggatgagaaatgggtgatgtccttgatttcagactgttttttgtacctcttcagtgtctcttttggtaatatgaaattaaaaccagatgagggggatttctccccagtgcagtgcagcgcaaccgatccaccatggggcagccagagcgctttgttaagcagatcctggatccagtgccttatgactgggtgggaccctccaacaggcactgccagacaccttatacaggagcatttccaccagcatcaggtcagtgcccctctgggacagagctcccagaggaaggaacaagcagtcatctttgctattctgcagcctccactggtgacacctcccagtgcaagagggacccagatgaatagggtctggagtggaccctcagaaaaccacagaaaccctatggaagagggtcttacctgttaaaat

SEQ ID NO: 478617 - DNA, 694 bp, Homo sapiens
ctgatgtttctgtgaggccattagcttgtggtatggggcacctcacactgccatccctggcttctgccaactgccaacattcaggaaggcaggcttctttaaatctgaaggacggcgagggagctgctctgctacatacaaaattcccagccagaagcaggtggtctaccagtggtttaccaccaggttccccacaaaactggcagtgcatgaatggcatagatgacgtcacatctaaaaaagatatttgcaaagtaccccggttgcctcggcaactggtgctcaggaaggcggcctggggtgtagcagcggtgttggctggacgcccacctgctttcagcgtggctgaggggactgcccccaccccacagcctggccacctggcaatgcccagtgactgtgggaggtggctgtctgggaagcctgttctcgctgccgacttctggggctttgctcgcacatatcctcttttgctttcttgtccccaaaatgcctcttcccagaaagaatctgagtcagtctctcgtcattagattagttcctgccaaactacggcagatgtcaaagcagctgataggaagattatgattctccctttcgcaaccccaacagaaaaagcggagtaaagaacccgagcggagaaggttgtcaggcaaagttccgatgaggagggaagatggttctattttggcag

SEQ ID NO: 478618 - DNA, 583 bp, Homo sapiens
tttctctctagaaagacagctgtggctccagcaggacagatgggcaatagaaggtggcaccttctccaggatacggaaaaatggatggatttgagacattggagaaaatgacaagaaaaaatactttctaccgcccgcgccgcccccaggagccgcggggaccctcgcgccgtcgccgccgccgcctggatccccgcaccaggccagcggagaagaccttcaagcagcgccgcaccttccaacaaagagtagatgtccgacttattcaagagcagcatccagccaaaagcccggtgataacagaacgataccaaggtgagaagcagcttcctgtcctggataaaacgaagttccttgtacctgacgttcgagacgtcaacatgagtgagctcatcaagataattagaaggcgcttacagctcaatgctaatcaagccttcctcctggtggtgaacggacatagcatggttcacagaacccagcgccttttcggatagaagttttctactcagctagagaaatctccctaagaggatctgtaggcctcagctgtgaagcataatccctgcaaaacgcatttgcc

SEQ ID NO: 478619 - DNA, 1281 bp, Homo sapiens
ctctggcatcaataaatggttcccaactctggctgctgattagaatcacacagggagtttgaaaactatcagttgctcaggccccgcgagtccggggctggcctgccgtgccctaggcgtagtactgtaggttggctttcttcttggcctggacctccaggatgccttccatgtagtcctcgtgggtgagctccgtggcacccctgcgcagtgcgatcatacccgcctccacagacacagccttgcactgggccccgttgaagtcatctgtgcagcgggtcagctccctcgcagttcacgtcaggactgacgttcatcttttgggagtggatctgcatgattctggcccaggcactcgatcttgcggtccaggccgccctagcgtagcagggcggggtccaggatgtccacccggtttgtgactgcaattaccttaacttgggtgttgggctggaagccatccagctggttcagaagctccagcatcgtcctctgcacctctcggtccccggacttctcgctgtcaaagtgcttggtgcctatggcatccagctcatcagtgaagatgatggagggcgctttctccttggccagggcgaaggcatcccggactagcttggcaccatctccagtgaacatctgcaccagctgggggccagtcaatatttggaccatcctcctcttgatcattgggatcaacatccaggagctcgatgatgttggagacaaggtacaccagggttttgttcacattgattttctcactgttctctttgatcttgtccttcatggcttggagctcatgggtgactctcaacagttaactcttcatgatcttgatctcactgtccagaagccatgtgcgctggatgatctcctccgcgggagaggagcacaggccctggaggaaagggtatgttggggtttagtgcggctgcccttgctgcagggcagggcagtcagagagacacggaagacatcatgtctgcctgagtacttgagcctgcaggagatcgtgccggaagcttgctggaggcaaattgcagagggactcttacatgtctcagaatgtgaactcgccagcaaagagccatggatggattttgagctggagaaaatgcccaatatctgaattaggctgactttaaatctgttaatgttttggtttttctgagtggatttgtagtttgctaatatttccttaaagatatattatctccattccattcttgtcacttttcttaacttgatttaacacatgattaagtgatgattgactac

SEQ ID NO: 478620 - DNA, 798 bp, Homo sapiens
cagcacactccctagaatgtcttccaaacgtatgattctgcaagtcgtcatgttcaacagcctggagacatttccttcagaattctcttctcttcctttcccttcctgcacagatattcaccccacccccatcctaacccagcgttttggctggcgtggcttaattgatctagaaggccttgcctgtagtatccagagttttcgctattccaggcaccctagaatcattctaagctattggcatggaatgatgagttttatgacttggtgtttggcgatcctgggcagcttcccctctcctagatggggaatgcattatctgcactgctttcctcccttgaacagcagctgtgacaggtcacaagctctcaactactgggaaaaaggaaaaatgggctgcaaatcctttaagagtctgaactttgggtttgaaattggatttggggagaggggatacgacggcgaggtggatcctgggtataagatgattggcggaagtctttctaaggctgtaataactgagagagtccttcaagccaaggcgggagtaccagaaagggcctataccaatggaaggcctgactacatcaagctgccctcccttgcacagactggagctgaccttcaggctggaagctttgaatcttaaatagttaatggaaaattaagcaatgaagcctcacacagtgccattttctgcttccacctgttggctctccccagaatctacctttttagagctttaaagtcatttgaaatagtttgcctagggtttatatgaagtggtgacagatattt

SEQ ID NO: 478621 - DNA, 495 bp, Homo sapiens
gcaagccaaggaccccaacagcatgcacttgcttccttacaggagagattttgggcctcacaaagtggcaccagtgaaggtccaccagtatgaccagttcgtcccgagtgaagagaatatggatttgctcacgacgtataagaaagattacaatccctaccctgtctgtcgagtggaccccatcaaacctcgggacagtaaatatccatgtagcgacaagatggagtgtttgcctacttataaaggtgcagggagaggtctgcgagtgaaaaatgctccttgcttgtcttggggctacatctcaggctgtcctcttcaaactacagaagaatggtgccttgttgctgtgtcctcatgtggtgaaagccagaaggaaaaaagggccttggctagctccctccagtcattgtatagcagtgctaatccattcatgaaggtggagcctgcatgatgcaatcatttcccaaaaggcctcacctcccaataccaccgtat

SEQ ID NO: 478622 - DNA, 2286 bp, Homo sapiens
aggcctctgcttcaaggtcccaggggctaaatttctgccagaaatggtggcagagtttggggaagtgaggatgtgggaaattggcaagtggagtccatgtagtctcacatgtggggtcggcctacagaccagagacgtcttctgcagccacctgctttccagagagatgaatgaaacagtcatcctggctgatgagctgtgtcgccagcccaagcccagcacggtgcaagcttgtaaccgctttaattgccccccagcctggtaccctgcacagtggcagccgtgttccagaacgtgtggcgggggtgttcagaaacgtgaggttctttgcaagcagcgcatggctgatggcagcttcctggagcttcctgagaccttctgttcagcttcaaaacctgcctgccagcaagcatgcaagaaagatgactgtcccagcgagtggcttctctcagactggacagagtgttccacaagctgcggggaaggcacccagactcgaagcgccatttgccgaaagatgctgaaaaccggcctctcaacggttgtcaattccaccctgtgcccgcccctgcctttctcttcctccatcaggccctgtatgctggcaacctgtgcaaggcccgggcggccatccacgaagcacagcccgcacatcgcggccgccaggaaggtctacatacagactcgcaggcagaggaagctgcacttcgtggtggggggcttcgcctacctgctccccaagacggcggtggtgctgcgctgcccggcgcgcagggtccgcaagcccctcatcacctgggagaaggacggccagcacctcatcagctcgacgcacgtcacggtggcccccttcggctatctcaagatccaccgcctcaagccctcggatgcaggcgtctacacctgctcagcgggcccggcccgggagcactttgtgattaagctcatcggaggcaaccgcaagctcgtggcccggcccttgagcccgagaagtgaggaagaggtgcttgcggggaggaagggcggcccgaaggaggccctgcagacccacaaacaccagaacgggatcttctccaacggcagcaaggcggagaagcggggcctggccgccaacccggggagccgctacgacgacctcgtctcccggctgctggagcagggcggctggcccggagagctgctggcctcgtgggaggcgcaggactctgcggaaaggaacacgacctcggaggaggacccgggtgcagagcaagtgctcctgcacctgcccttcaccatggtgaccgagcagcggcgcctggacgacatcctggggaacctctcccagcagcccgaggagctgcgcgacctctacagcaagcacctggtggcccagctggcccaggagatcttccgcagccacctggagcaccaggacacgctcctgaagccctcggagcgcaggacttccccagtgactctctcgcctcataaacacgtgtctggcttcagcagctccctgcggacctcctccaccggggacgccgggggaggctctcgaaggccacaccgcaagcccaccatcctgcgcaagatctcagcggcccagcagctctcagcctcggaggtggtcacccacctggggcagacggtggccctggccagcgggacactgagtgttcttctgcactgtgaggccatcggccacccaaggcctaccatcagctgggccaggaatggagaagaagttcagttcagtgacaggtcactgagtggcagctccagtgtgtggacccagggtgatgaggggtggcctgatactcagtcctatcggtgcacctgctgtacctattacaccactatgatgccctctcctctaccagccagtcagtttatcaagtgtaggattcttctacagccagatgattccttacagatcttggcaccagtggaagcagatgtgggtttctacacttgcaatgccaccaatgccttgggatacgactctgtctccattgccgtcacattagcaggattatgttgtcatactgtactccagtcacacatgctacccccttgcatatctgtttagcaacagtattcctgcccccatgacttcaggctgatctgggaagggacccttagcaggcggctttgcggggaagatcaaagtcaacaatgaagaaggcaatttaaggagccctgggccggattaaagactgatattattaatgcctattttttgtgaataaaacatttgcttttcttctaatgtattccagttgcaatctttattcccctctttat

SEQ ID NO: 478623 - DNA, 3619 bp, Homo sapiens
gttatgaagccggagcctgtcccccggctgggatgagcagcagacgtgccggtcactccctgttatttaggggcctccgttggcgggctgccctgcctgccctctgcgtgccactgggccgtggtgtccatactcaggacccaagcccatgccgctctgccactcgattgcaggaatcctggaggattctgcccagggcccaggagggcatgtcccagcccttctgtgggctgagagcactgaggacttccccctgccctcctctcccatgggaaccccacgccccacagggtgaggctgccgggctctctcacaggcaccttcctgcttccatgcccaacgggcatgccagaagttccgttctggagtcaaaccacatcttcaaaaaccaagcaccagcatctctgagccctgggaccctcggtaagtcccccatccctgcgcctcgcttcttcatctgagcacaggagagcagcctctgtcccagggctgcctggaggatggcgggaggccctgcatgcgtgggcacaggccaggcacccactgcacagagtcggacggggaccgtgctagccgtgccaggtgcgggggatgcgcgaaccggccgacagcggcccagcccttcgcggggccctgccctcggagtcacagagaggctcagtggctgagcctggggtcatcattgatccccaggactgtcccctgctggggaccggacaccagcctgtgggaggacttagctggagaggccacagcctctcctcggtccccatctcgggtggacccctgggctccgagattcaagtgggctgccgagtccctccccgtgctcttgggccagccactagcctggagccgcccacttcctgctgagtccctccccgtggtcttggacctgccactggcctggagccccccacttccaggtgctcccatcctgtgtctccccgatcccagagcaccctgggccaggctgggacttatctacaacaagctcacagctccgctcctgcatagctccagtgaccaccacgggcctcgctccgccaccagtcccagccgccttcctcctttggctgtgctgagggctcctgcgccaggcctgtccccctcagggccccatgggtcctgccacacacacagatacatcccacagccacacaccacgtgcacacacacatacgcacccacaacacacgcacacacacgccgccaacatgcacacatgtacacacacacaaacacacaccaacacacagatacccttcccacgtcctcccctcacagatcccagtggaaacccgatagcccccagcacatccttgagacacgtgtgtgcatgaaaatcaatttgcaaagaatatccccattgcagagacgggggtggggactgacaataaactatggagaagactgatctccgcggagacctgaaggggaagacaaggggctgcagtggggagggtgctccgagcagagggagcgacgtgcatgtgaaagctctggcagtcctcacatagctccccaagcagggggagacctagccggacactgaggctgtggactgtcctaaatggggtttgtcctggaagctgggagaagtggggaaggacagggccaggaggctgctaagagagttggagaactgggtttcaatcctgcctgaccctctcaggatcagcgatctcaggcaaagccctctgcttccctgagcctcagtgttctcatctgcagcctgggggcaacgcccctccctcataagatcatcttgaggatgaatctggatggtttgtatggcaggtggtggggacggagcctggcccaatgggggtgagcaggaggggtcacctctctgattctgacacagcggggggtgccccctaaccccacctactctgagtggcccccatttttaccctgtcccgcggagggttgggggttatactgaatccacctctctgtcccccaggggcctccaccaggccgtgcctcctgggcaggcatagacttggcagctttacagttttattttctgagccccctcgcctggccttcacatcagccccagcaggcggcagaaatttcccgcggcctatgcagggccccatttgcgcatcgccgggaatgctaatcggctcctggcggtcccaggcggagaatcccgcctttccctgacatttgtaaagttcacgttttcaaaataaagccacgtgaagggcgaggcactcgcagatcacttccctgtcaccggcctgctggctccttccctgcccttggccttcactcccccgcttaaaagccatcagtcctgggagaacagccacccccctccccgagcttcgctggccagttcctttctcccagccttctgcctgctttctgccctccctccctcctttcacacactcacccattcacttgttctttcattctgcactatttattgagcacctagtgcacatccttcctgggtgtatgtcaaggacacagcaggaagccccaggattcttgtccccaggagctgacagtcaagtgggaaagagggacatgaaatactcacttaatgacaagtgtgagaaatgccacaaagttggaagcaggggaggtgtcacagggttggggcaccagggactgcttccctgaggaagtggcatcaccccaggcctagaggaggagcaggagtcagccgccaccccaccctggcgagaagaggcagaagggcatttcaggacccgcgggtgcaaagtcctgggatgggggggccagggatgcctgagggtctagaagaggcccctttcattcatcccctctgccttttgtgagcatctaccctgccacctgcccaggggaggagtcagacccactccctgcctgccctcaaagggctcctcgtctgtggtggggcctgctcctggaccggcgaccctgtctgagcacagcacgcccacccagggcccagccagagacccagagccagcctcagctttgctcaccaccccgccagcccaactgggtgattttctgtccccagtgccttctggcacagatacccccatgcccaggggccacagtttgcttcccgggtcctgcagaccccagctcctccctgctcctgtttaggctaccacctcattctcctcgggtccctgcagcagctgccaaaccatttctgcttccacaccacccccagcgggccaatctccctgcacatcccaagagaaaatcttcccacagctccccatggccccccggtgaagtccaggctctccagcaggatgtcctgggcccttcttggctccccttttccaccctccccactcctcaaatgcccatcctcccacccccatcctccgcttctgagcctttcacatgctgctgtctgcctgggatgctcttccccaaccccttttcctggatactccattctcctccaggtctcagctgagactccacctcctccaggaagccctccctgatctctccagactgtgttaggcatcaggtctccactctcactgcctggctacaaacctctacagaatggcactgtgctgaatactgcaggcaattttagcacaatgataagtatttgtgcctctaaatatagaaaagctacagt

SEQ ID NO: 478624 - DNA, 699 bp, Homo sapiens
tgaccccccggaaccctcctccctgtgaggaaagcgtaaccctgtcttgcagatgaggaaaccgaggctcagtggtgccgccgaatcactcggatttgctaagcgcttactctgggctgggcacttgcccagctgcaagaggaagcaccgtcctggggagcccggagacccaggcccccctcacaggcgaggggctggcacgcggcctctggaggaacttctggccttcaccgtctccgcctggtcactcgtcaatggccggctgccttctggaaagctgctgctgcgcgacagtgaccctgggtggagtgaggcatccacggaggctgtgggacctgccttccggcctccgtcacatgaccgcacagcgaggaggcgcttctgtgaaccaggaggtggccctcaccacgcagaaactgtgggcgccttcatcttggacttccagcctccagaactgtgaaggattggtttctgtgggcccccacccatgtttacacaagaaagctccatttataagatggtatccattcaaggctggggccccacaggacccctcaacagctgctggctgagggcagggcatggagcccccgtccagactgacactgtcctgcttgtccacaagaagacagctttgcaggcccaagttaagggtcaatctaaaccttaatcgcccttgacataggggttttactgttc

SEQ ID NO: 478625 - DNA, 781 bp, Homo sapiens
catgaacttatgaatttgggggtagccttcctgtctttggcacactggaagagctgtggcgtagtttctcagggctacgagagaccgaaaaccgaagctcagagaggtcaagagaattgcccaaagtcacacagacgccagtgggaggctgatgccccagctggctctgctgactccaaagcctgggtttgggttcatctgcaggaggaaacacagctgagtcaaaagcccagtgactcggtggcagcgcatgtcttccaggaacagaacaaacacaagcccatatctgcaggcgagccttgcctcggcctccacagcgcgggtggtagagtcaggcgccccaggcccctgaaaaccaggacgcagtcccgtggcccgtctctcccaagaaacagaatcctagccggaccccgtgcctgctgggcgtggagtggaatgttgcagctgcttgggtttggggcaggaaggaaggggagatggaacaaggttgagggtctccgttccccctggagtgcatggaggcttcctccttctcccctttgagatctcaacacaaccccccacgtagattttgaatgtgatcattgaagagtgaggggctgctgatccctcccgtgagagacctgacctggcccctcttggcaaagctatccaggaaccaggtcagaggcagaaggacctttgccctacaaactaccccatcctttcccggactcagagccttgggctatacctggatggattcccttggcctttccacctgaggggcctggaggttagg

SEQ ID NO: 478626 - DNA, 1033 bp, Homo sapiens
ccctgatggcccaggggcctctgtctccccccaacagccctgctcctggacatcatgacggtggccggcgtgcagaagctcatcaagcggcgcggaccgtacgagatgagccccagcctcctggactacctcaccatggacatctacgccttcccggccgggcacgccagccgcgccgccatggtgtccaagttcttcctcagccacctggtgctggcggtgcccctgcgcgtgctgctggtgctctgggccctctgcgtgggcctgtcccgcgtgatgatcggccgacaccacgtcacggacgtcctctccggctttgtcatcggctacctccagttccgtctggtggagctggtctggatgccctccagcacctgccagatgctcatctctgcctgcacgacgcctgccaaaatgcccccaacctactgcctgatgcagcggcagccggtgctggctcaggacaatgccagcacttcctgccggtgctgacgtcccgtcccagagcgttggtgtcgttgtctgtcaaacggggatgacaggggccccgtggggttgatgtgtgactcggggtgccctccacctgcaaacctgacacatcacaggtcatgctcagtgttggtcacagggctcctggcgttgttgcccctggtggcaaggaaggaactgggacacgatgtgctgacatggccgttagcacaaagcagacccgggatctgactcttccaggctttccctggacttcatcactctcagacaccgacgtgtctctagaaccatcactctgcatcccctttccatgaagacccaagggccatgggaggagctgccaacctcagatcccagatgacagggaagaggctgtgactccttcaggacttgccatcctgccttgttgctggacagagcctgggtggggaggtcgatgccattttgcattggttgacagcttccagtgcccatcatggaacaagagagatggtgtgtacctgctcaggcatgggtaatgcactttgttgagtaaagccaataa

SEQ ID NO: 478627 - DNA, 897 bp, Homo sapiens
gctagtcttagtgcagaagggccaagggtgtcctgtggtttggtcattcagctcctgaacctacttccgggcctgcggagacctctccttctgaggcagagcccgccttctgctgtcacagccaaacgtggccaatgtgcacatgtatcccagacggccattggcagccgctgcccccgcctccaccaaggcacgtgctgggaaccagggaccgaggggaaccgttctgggatgggtggcgaccctggacaccaaggcacatggcggtgcccgaggggtggtgctgcctggtggcagcggaggggagaaacccccacacagctcaggccgggcagcgatggcagtggtgtcttcaccaaccacttccgctggagcccattcttccctcccagcctcacgggctccgagctgggtcctctggcctccagaggttctgggagtcccagtgcccttggaatgaattcattttctgcttaaatcagctggaaactatttccgtggcctacaaataagagccctgtcagttgttggaatttctcttcgtgcttttctctagtgaatttccagggcagaaaaatgggctataacgttcttcttttaataagttgtttttaaaaaactattacatcaataatacatgttcactattttaaaaagcaagaaataaagaataatacaaagaagaaataaaaatttttcagcacccagagataataagcacaattactattttgagccaaccttgcattttgaaataaatcccacttggttgtgatattgttttatttgacttgctaatattttttaaggattttcacatccattttcatgggaagagttgacccatgatgtttctttgttgtaatgtcttcatcagaatttagcattaaagttttg

SEQ ID NO: 478628 - DNA, 1222 bp, Homo sapiens
ccccagaggcctctgaggaaactgagccagcatgagagggtggctggttcctggagcattaaacgcttcaggaggacccagatgtcatcaggcaggctgaagccaccatagcacttccccgtcacacttcagcctgtgcctgctgagaacatggtgcgctcctaacagacagtctccatcatcccgccccagaaaatagacgccgatgccaccatcgaatgttcagccttcaggtggagcggctctcaggtgaggagctgacccaggaacagtcccggggagctgatcctcacctggatgagatcccggactcggaacagaggctgcgatgggttgagacttttggggtcgtctgggagggggagcgaggatattttgcacgggaagaaatgcaggactcggtggccagagggcggaggaaaaggagcagagtgacggtggacacgcgagaccaggccatcgaaggcaccgtggctggccgccggccctccctaggattcctcacctgcagggaagctgggaaaggcgaggaaatggagtcccccgcagcgcctccagaggggagcacggccctgctgtccctggtgtcagctgtgagacctgccgcagacttccagcctctgggactctggaatacgtttgtctgcgtgaaccacgcagctgtggtcaattattacagcagccacggggaaggaacgcactgcccgtgggcgacggggaaggaacgcactgcccgtggacaccattgctgctgcgcagagctgactgctcggagcgcctggtccaggcaagcccagcgtctctcaccgcagcggccggagcgcccagtccaggcaagcccagcatctctcgccagggcggccgtggttcgatcgtgcgtctgctgcagctcctcatccgagagggcatggtgctgggcccagtgtacagaaaggggttgtgggaacctcccaatttctggtgagagaggcctattgtacaacaacatcagcctggtcaccgctgaggaccagcaggatgagtgtgtataaagtgcatggaggatgtgttggaatttaaactctgggttcaccagcctttgctaccacagcatagtaaacgttgctgaaaagtttctaagtatcactagcaagcctctgtgaaatcccggtgggaagccctgtttctctgctaccttctgctcctaggagaggccatgaagccaaggcacaaggatccaggc

SEQ ID NO: 478629 - DNA, 630 bp, Homo sapiens
gtcaagagagatgacaccttctgagatgtccaaaagaaccagtgggtcctccctggcttctggtaccaccagccttccccccgccacccctggccgaaaagagccagagaatggagagggtttcgtgctgagggctctaggacagtgcctgcccacgtggcatcccacctgcagcactgccaccatgagaagccaagcagaggggttcacacagcagcacacggaggggctggctgccaggctggccacggccgagctctggggctcctcagcagcaagggactggccctgccgtgcccgagtgtgccgcatcgaacgtggcctaagccagaaccctcagccagaacttgacccctctgtcttgtcaatgcttcccatggccaccagaggccgggacgccgttaccccacgctgtctgctggccgggttaccccgtcttgccaatgcttcccgtggccaccagaggccgggacgccattaccccacactgtctgctggccgggttacggtgaatcccccgggtgcccagaagtgagcttactaaccgggccgtccctgaccactcaggataaaagtgtgcacgccctgtcccttcctcccccaactctgccccgtccttctgatctcccc

SEQ ID NO: 478630 - DNA, 1052 bp, Homo sapiens
ggtagtgccgcagtagatttatgctgcatgaaaactgtgggccttcagcctggggaacccctgcaaaaggtcccaacaggaatctgtggacccttgccagcggagacaataggattacttctacgaaggtctagtttaagtttaaaaggggtacaaatacatacaggaatcattgattcagattataatggggaaattcaaattgttatatctacttctgttctctggaaagcagagccaggagatagtatagcacagctcctgatcgtgccatatgtggaaatgggaaaagtgaaattaaacgaacaggaggatttggaagcacaaataaacaaggcaaagcagattattggacacctgaaaccttatcatgagccagatgtcaaggaagagattctgggaggatcccaaggaccccccggttgcagtcatgttgagactgacactgaggaggaccccaactgtcacaagcaacacccgttgaacacagccactcacctggcgacagatcaagaagctgtcacagatggtggaagaaaacctgaggaaagcaggacaaccagtcacaatgagtaatttaatggtagctatgatagcgatgatcaccattgccatgagtattccttcaacaagggctgacacagagaacaattacacttattgggcatatttatcaatcttggctggcaagaatacctagatgtaatcactctgacacagttacacatgatttctgatctcagtatttatcataataaatttgctcctataattgaggcatattgccctcaaaaacctatttgtaaacaaaattgaacctggccagtaaaaatgaacatgtttgtttaggaagactgcattgcagaacagtcagaggtgctacacaatgattcctatggaatcattattgattggtcccgtaaggggaagtttagcttaaattgcacctctcagactgcatgctatggccacgctatgttcagctggtctgaacacaacattcagatggtagaaatggcaagaagtatggcaagagttcctgttatctggaa

SEQ ID NO: 478631 - DNA, 761 bp, Homo sapiens
gagggtccgctgcttcattcttggagtcaaggcacatgcatgcacatggtggatcagccaacttggggtctggctggctgggggtggggctatgaagctattactctggctaggagcatgggtgcacagttggtcgaccactctgggggcatttctgccagcagtggtccatggaagtggtcttcaaactctggatatgagtgcaagcctgttctgctggcatcagagtgtgtcttccaggggtccagtgcctttacttggaaaatctgggaaagttgggaacttcctagagacttgttgaatggctttgcccaaaatgctgatagcgatatggacaataaggtccaggctgaggtggtcccagatggagatgaggaacttgttgggaactggagtaaaggtgactcttgttatgttttagcagaaagactggcagcattttgcccctcccctagagatttgtggaacttttaaattgagaaagatgatttagggtatctgatggaagaaatttctgagaagcaaagcattcaagaggtgacttgggttttgttaaaggcattaagtttaaaagggaagtggagcataaaagtttggaaaatttgcagcctgactatgtgatagaaaaagaaaaacccattttctggggagaaattcaagctggctacagaaatttgcataagttgcaaggagcctaatgttaatcccctaaaccatggggaaaatgtctccaggtcatgtcagagaccttcatggcagcc

SEQ ID NO: 478632 - DNA, 491 bp, Homo sapiens
ccatttgtttatgtgtttagttgcgccatatgtttgtccctggctctatcctcaagcagatttgacaatatgcagttctagggcaggttccagtcagattggagctacattttccaaatttcagtctgtgctgattcttttaaaagagatgctagttatttctaggagaatgcatgggcttacctcagaaatctgtgcaacttcgtgtgactttcatgtcaggacttgccagagatgccatgtggcatgcttattcaccttgaagatttctagcttcaccaggtttcttggtttgctggagtttggatttactactgagtcatatttggagcatgctggaatcttacaactgagattaccgagtcagaaactgtgggaattgaacaatgaggacacctggacacaggaaggggaacgtcacacaccggggcctgccgtggtgtgaggaggggggagggatagcattaggagatatacctaatgtaaatgac

SEQ ID NO: 478633 - DNA, 646 bp, Homo sapiens
ttaaacagggctagtttaattccttgcattgtttaaccaatgcttggttatgagaagaaagagatcagctgttaccggaagagctattggaagctggcggtcaaatgtgagcaatgtgagcagaggcagaaagtatttcagccccatcagagttgcttgcagagggtgaaagatataggctgcaaggttccgcagtttcatcctggtctgaaggctggatttttacctgcttgtccaggccatgaaacaccccctgtatctgccatcattgaggtcattgcagttcccaaggactacagccttgtctggagaaactgcgtggagacatgcatgaatgcaggtctctcaaacgagggtccacatgccaacagcgcagtggaccgctgtgctgacaaccagaatcaactgccaaacatatatcatggggcagatataagccatacttgctgtaccttctctgaacttgtggcccatagaaagtatgaggcataatacaattgttgtttatatcaatacattttgagtttttagaaacttgcttatgtgccttggttttcactgaggaggtggaagtacattgtgctggttagggttcactcaggttcttctatatctgaagaggatggctactttaacatctttgcag

SEQ ID NO: 478634 - DNA, 713 bp, Homo sapiens
cttcaaattccacactgagtcattcctaccttggatagtttacatggccacgccaatggcacagcccttaaacagaggacccctgaaggaaaagaaggagccaggcataagagaagttggaagagtcttccaggcagaagaagaagcaaggcatgagcctgggatgggaacaggcatctctgatagtggagtaccacctgaacatcagatctgcctagggtccagaaacaatggtgttttcttcatcttttgcggccgaaaaagaatcaccagattgttgtattggaaacagggtgatgagaagacaagtttcaaagcacagatagcagttaagaagtttgtacaaactacccagataagagaagaagggaccttggaccatggtgaaatgagtggaggtggtattgaagctgctctaatagaggcatatccagattgggatcccagggacgcagaaaaggaacaactgctgagagcagaattcttagagaagcagtgacttgaaacagtctctaaattcattagaagcccttattgtgaataaaatagggctgccactgttggctaattaatcaaaagaaccagtttaagagaggatcataaaaataatgcatatacactctaagcagcttataaatattttaggttaacttaaaacataaaaatctgttgttgtttgccaaggttcagatgtacagccaaggccttgattt

SEQ ID NO: 478635 - DNA, 644 bp, Homo sapiens
taggctctagcaagcagtcgccctggaaagagcctgcgcctagtctttctggagtcacgactgcatgtctgaagtactcactcagctgtgtccactctggcttccaagagacaaactaaactgtaacatcatctataattcagataatttgtcaaaccatgacatgaatacattcatcaaatctgagcgctgtgtaagtacaggaagtggcataaatgtcaagaacagatgtgaagctggaagtctggagacattttctgaccatactggaatcgccaagaaaaccttgttaaaatataagtgtctgggctccattggcagacattctgattcagtaggtctgaggaaaggccccagaatatgcatttccaacaaggtgctaatgctgctgatctggggaacccactttaagaacaactggcatggagaattctcagaagtcaccagttccatggtagcttactactttacaaaattctgccatccatattcccagggttagtttgtgttatggttaatatggactgtcaacttgactggactgaaggatgcaaagtattgttcctggctgtgtctgtgagggtgttgccaaaggagattaacatttgagtcagtggggtgggaaaggcagacctaccctcaat

SEQ ID NO: 478636 - DNA, 801 bp, Homo sapiens
acacaacatgctgtttacaaacaatagtagttctcctgtccagcctgcctccgctggatttctcttccagacacttctttctatggattccaggtctgcagataaactctttcaacaaattgccaatcaaaaaatctttgaatccatctatgacctggaaaacaggggtccccaacccctgggccatggaccagtaccatacagcagtaggcaagctgtgggcaggcaagcattaccacctgagctctgccgcctgttagatcggaggtggcactggattctcacaggagtgtataaaatttataaaagaaagaagattgattcacagttccacatggctggggaggcctcacaatcatggcagaaggccagtgtctgggcccctgtgtcagaatcacaggattctcctacagcactgacctgctctttcatagagaattgtgaaaggttataaaaggcttatgaaaatcttacctgtggtcaaatttattaaacttggatagaattatttataaagatttattgaaattagctttaacataaataatacatcataccaagctaagtatagccttcgactattgtgtggagtatatcttgtgatcaaaatttgaagcatatttctgtttctacctgatttctgcaaaatttggaaactgtgcatattcctaatttatagcaatagttatttgcataagtttaataaaattctgttttcttttataactggacacaattggaggcactggttattttaccaaggctttgactggaataatgtattttcagatatgagcagaa

SEQ ID NO: 478637 - DNA, 822 bp, Homo sapiens
agaagtccaagatagttgtagccatgtcggatttctcttatgtcataactttacaaaggcagtttcaatgggagatagaaaggaaagatgcagtggcagttagacacagtcaaagaatgccagaaattgccagcaaaccaccaaagttggaagaagccaagaagcattcccctgcaggtttcagagggaccgtgaccctgcgacaccttggcctcagagttttcagccttcataactatttacataaagatgattcttccatcaccctagactctcagttccttgaattcttctcctttaaaagccctcttccattttaccttacttctatttccaagatgcacttattaccaataatcaaaactccttctcatctcatttccaggttcacagaaaaattgagcagaatatacagttcccatacgcctcctccccgaccacaagcacagactcccccatcaccaacatcccaccagagtggagcatttgctggaacaggacgctctgccatcgtggcaatgatccacagcttctctcttccactgatggcatctgaaagcagaggccctgatgaacttgccctctcatttttagtcaaaatgagaacactcagtccagatgacttcaaagaggcctatgaaaatcaatgctctgggagccacctgactgactgtactgctggaacccattttgcccagggcattagctccatgagtgcatatggtgctcaccttgtggaaaattccaaacaattataacccttaagtctcagcagagagtgtcagcccggagagagctgacccttcaagtcagtagtgaggg

SEQ ID NO: 478638 - DNA, 1318 bp, Homo sapiens
cccacacctctccctccacacctccccgcaagcagaggtagctggctctgaccttggccagcccagagaggggctcccacagtgcagcagcgaagggctcctcaagcgcggccagagtgggtgccgaggccaagaaggcgccgagagcaagtgagggctaccagcacgctgtcacctcttactaatttaaaaatagagccaaggccaaagcagatacgcttctttgtcatgatcgtgctgcggtgtggagtttttcgggcccaacttttcactgagcgtggcaaatatatcagcagcttagaaataatatcctgtgtttgtgaagcatgcgccagcaagactcccaacgccctccacaaacatcagctcaacattactgcgctcgcgtttttctcaccatgtcatggcaaggaggtggcagaaaggctacagtgtcggtgggatggggacacctctgtgggtaacagtgataacagaaagcatttatgtttacctgtagcacagaaagtcaagctgttggagaaactggaagtggtgtgtgaagtgtctttcagaagagatggtgtcagaatggacaccatatatgacctgaggaaacagaaggataaactgttggagttctatgccgaaagtgatgaaaataagttaatgataaaaagaaaaacaatgcttaaggctaaaaatgaagatctcgattatacagcattaaagtttttgaagatgtgtggtgacagagcatctgatgatcacaaagcggcagagaaattcattgatgagtttgccaaggtcattgctgatgaaagtctgatgccagaacaagtctgtaatgctgatgaaacatcgctgttttggcataattatcccagaaagagactgacaaaagctgatgagacagcccccaagtcaatgaagaataaatataacaacacttccttgaacagcatgctggcagcagtgactagaggtgtggacccctttcataagctggaagaagtggatattgaaggagtttttaacataaataatgaggcttccatcactcattcattgaccaatggtgaaattgttgaaatggttctgaatccaggtgatcgtggtaacagtgatgaggaagatgacattgttaacactgcagaaaaagtgcctgttgatgagatgatgaaaacatgcactgggcttattaaaggactagagcagtgcagattcataacagaacaagaaatcatcatgcagtttataaaatcaaagggagacatctaagacaaaagctgttaatgaggcagatgactctggaggaaacattttaaaaagccaccca

SEQ ID NO: 478639 - DNA, 635 bp, Homo sapiens
atgaattccaaaaggaaactccccgtttgtaatcataaaatccttttatgcaaaataaaataaacataattttacttccaaattccataaatgtgaataagggccgcttgagggctccttggtcaagcagtaacgccagtgtctgggaagacacccgttacttagcagaccgcaaaaggcactctcctttccttggaggagtcagggaacactctgctaccagcttcttgtggaaggctagatattatccaggcctgcccgcagtcatcaacaggcctaaacccctccctgtggtgctgtgcttcaatggtcgtgttccttgtccactttcatgttcctcccgtactcctggttcctctttgaagttcgtagtacatagcgatagaaggaatactgaaagtcttaaagttttttatctttcttataagtgcatagaagaaaacgctgacgtatgctgccttctctctctctgctttggctatctaaaagggaagggcccccgtcctttgatcacgtgacttgtttcaccttttcaatcacttagaaaagtcaccctccttaccctgcccccttgtcttgtatgcagtaaatatcagcgcacccagccagctctctgggatcatcttcattttttt

SEQ ID NO: 478640 - DNA, 499 bp, Homo sapiens
catttcaaagacttctggatacagtgtatgagtacattatccagggaaaccaaagcattatcctacccttcccctacattaaagagagattatggagaccagataatacatggaatcttggtcaaagtctggttcacagtggatttgtgggttctctgtgtgaatgaagtggctgtttctctgatccatgtgtgtaattggagtgaacatgttgtatccttggtggaatataactgttttttgtcctatacgaagggtggtgttgaaaaatcacccaagaaggactgtggaaccggagagtatgtcttccttttgttaagacgaggatacattaaaattaaatacactgtttttgtcaaattctcctcaactaccattagaagagcaaacaaaagttctgtagcataagaatacatcttttttcttacatggctagtttattaattagcagtatttcaaatttaagtacatttaaatacattgtcaattcccatgattt

SEQ ID NO: 478641 - DNA, 800 bp, Homo sapiens
tctgctgtgggggtggagccctcatggataacctcttctagggaagtgtggaggggaaatgtggggttggagttcccacacagagtccccactggggcactgctcctctgtgaggagaaggccacaatcctccagaccccagaatggtagatccactgacaacctgcatcatgtgtctggaaaagccacagacactcaacaccagtccatgaaagcagccctggggactgtaccccacagtggcacaggggtggaggtgcccaaggccttgagagcccaccccttgcatcagtgtggcctggctacatggcagtgtggggaaaaatccaacccagggaaagaggataatgaagaggaccgtttgatgaaaagaaattcttcatcattaatggaaaaggtggagggccaggccgagcaacgagagagaagagtttcctcttcccacaaattcttcctttggcagcaaggaactctggattggagaaaggagtggagggacaaaagctggcagggcttacctgatcactgggaaaatggcaccaatgacttgctccatgcaggatttccagaaatcttccgtttgtaaaaagcacagtatctatgaagcacaataaagcaaaatgcaatgaaatgaggtgttcctccactaatttacattcccaccagtagtgtgccaagtttccctcttgtccatatcttgccaatatttatctcatcatgttgataatagccatcctaagaggtataagatgtatctcattgtggttttgatttgcatttccctgatgattagtgatgtc

SEQ ID NO: 478642 - DNA, 880 bp, Homo sapiens
tgcattgtcagaggacaccgaggatgactgaaagaagctcggcgggtaagctgggcactcagaagaaccaggattctgaatgtgagggacaggacccggaggaaattaaagaaaagaaagggaagctgaaaaaggtgtattttactagccagtcggttccacctgctgaattaagtgaatggccacctcctccctctcctcctaatggctacagcaggaagagaagactctgggaagagccaaaactcctgatacgagtgattccgcaaacaaacatctcagagacaaaggagaaaaccgagaatagtcgtcaggcaaattctccaacatggggacaaatcaagaagctggtgcagatggcaaaggacaacttgaaagcacagaacaaactaaaaacaactagtaacctgatggtggccatgctggcagtactcaccatggcggcaagcctccttactataggagcaactcagaatttcacttattgggcatatgtctcatttcctcctttaattagatcaccctctctggaaggaatcaactgccttgtcatgaggatactcacacagtcttacggagaagtcaaagaaccgaggtctcctgccaacagctgggtgagtgagccatcttggatgaaaatcctccagccccagtcaagccttcaaatgactgcagccctggctgaaaaattaaatgcaacatatgagagaccctaaggcagaatcacccaggaagtatactatatttaatggaagagaggtttatttctgttattttgtctgggggacttttcttgaaaaatatgtttggatttttatgggctaaagaaaatgttttaaatgaggtttatgtgatttttatttataccctgtattttttc

SEQ ID NO: 478643 - DNA, 830 bp, Homo sapiens
agagagacttaattcaacccacagcagtctgtgagagtgtaatgaggctttggagaaacatgaaacagcaacagtgtattgaggagggcatctgtctgtggcacaggaaaggaagaggtttgcagatttcaataaggtggtctaggatatggttcactgcagaggagacatttgaacaacatccagaaggaggcgagggagttcatgccgccaaacaccagaggacggataaactgaggcttgatatctccttccaggtaaacaaatttcgtgggcagattcctatcaggataattgggaaacttcctggcaagtccactgaggtgctgtttgatcaaggcacagaggggaagtccttgtttgtaaaggtgcaagatgacccacaaaccctcaccagaaactggaaaagtaaagatttgataaaggcaagcaatgcaaagaagcaactgaagcagaagaaagaggagaaataggaaaagggagaggaggaggaggaggagaaactcttaaagaacacgaaaatttggaatgtaataataatacttggctgtacagacaataatattacatagtcataataacataaatactgtttgctgattttcaaattttcagatcaaataacaagggaaagaagacttgattatgtatacacacacaaaaagaaagtgttatcaaaactgacaagaaaaagtaagtcaaggtacttaaagtagtgctggaagttataagtttcctcgtacatatttttaaaattttaaatctttctggaagtaggtaaggtacaaataaagaaatagcacagaactaattacattttttttgggttt

SEQ ID NO: 478644 - DNA, 664 bp, Homo sapiens
ctgccggtttacactgtttctccaagccatcacagctgatatctcctggacctgagacttaacaacctgctaaaaatgagctttgggggcctacaccatgtttcaatttggactagccatgtttcaaatatcccgtaaagacatgtggctcctggtgactgtcctactggacagcacagatctaggtccgtggtcctcaaatttagcctccccagagcttctgattccctgggtctggaatggagcccaggaatttgcatttctaaccacttctcaggtgatgcctgtgctgctggtccaaggaccacaattagaaaacccctgtctgctaagtaacgggtgcctttccaggcactggcattaccgcttgaccatggagccctcaagaagcccttatgctggcgtgacagaaggctcacctcttgccttcttggtcacttctcacaatgtcccttcagcacctgaccctatacccgctggaaagagatatgatgtgaactctaccattgatatcaaagatgagcaatggaggatggagtgtgggcgcactcgtccaggtgagagtggatagatttttaactgtggcagtaactgtgaggataacaagaaaggcaggggttgtgcgacatgttttgaaatgatttggaattagcagggttgaatt

SEQ ID NO: 478645 - DNA, 759 bp, Homo sapiens
tgcagtaggcccaccccaagcgtaggttcctggaatcagggatctcttcactgagttataggatgcctttgccttatggtcaggtgggcatcatgaatccaagtcagtccagaaccatggcccatggacgggcaggagtgaattcaacacaagtcacagccagcttgctccatcttaaaggcgaggagccccagccccaagtcctgagctcttgccaacctgttcgagaccacacattgaccctggaagaggaggagcagccccggctcctggtggcaggaggtgccttcctggctgtagcaggaagagtctccaggttatatggccgtgtccctgtgccaggactcggggtaggggtacactctgttctgacccccccaggaagtgagttccaaaggagtcgggcctttggaggagaacttggtggctgtgcttttgacctggcattgcaggagcataagccctggtcaacttgagcgaaaaagccggacccactgtcaccatctcacaggctgtgtcgcatgctctggcggaagctctgtaaacaagaagaaagggactgaggacccacagggttgcctggacatttggaaaataattttaaatatttacacttgatctataggagattacacatttgctatggaaagcttcaattattaaatgatcaggttcactagagtaaaaacaattattctctgctgagaaagtattttatatttctactttaaactttgctctgttctggttgaatgtgtt

SEQ ID NO: 478646 - DNA, 667 bp, Homo sapiens
ccccattccttgtgacatactctgtggagggaaccaagagtccaggtgagaagccggtggtccaggatggaggggagggcaccaggtacacccacaggcagcatacagggtcatgacttgcctgtggttggctgcagactctgctccagaacagcaaccaccggccgtctgcagcaggccactctactagtgtgggtgcatggaagggggcctgctgcagtcctcacttcatggtcatttgagctgaggcagtcacgtggccactacaaccaggcctgcaggcagaggcaatctgtgtttaaaatggcccacacgtttcttaaatgtttggctgcagcccctcctggcttcgagcagagcccggctggatctgggaagtgtgcgaccccactgatgtcatgctgtggaactgccaagcacccaagagatgggtacaatctaagtcagagagtcccctggctcaaggagacaggaaccctgcgaggccgatggctacagagaggaccagaaaatagaaaggacatcctgaaggctgacagatttgatcttgcaaaggacaaacttgctgcataaaagttaaacatttctgtttggcaagaagtaaaattactaagaaaaacccgggaaaatgtttggcaatttctgtgaaacataaaaggttagtggc

SEQ ID NO: 478647 - DNA, 571 bp, Homo sapiens
ctcctgttccttttgagagggcaacgctgggaggtgttgggtgcatgggaaatgcaccagcaagtgggactcaccttccctggggtggatgtcatgccgcatatgggatttcacccgtggcaggctgttcatgtcgggtgttgctgaagagattgcatgttgcctgggattccatcccagtcatgccagagttaacctccgagtacagttatgacgattttcactcagtcacaggcgcagaccggcgtcagatggcaagaggaggagtgcaggaatcaaaggtcacagtctcaggagcaaagccccacagacgtctggcttctggatctgtgaccatatggtcaaagattgctctgcacaataacctccagagcagtcaggttgaggatgtctggtactgaagttactccatttgagaagttttatatatttttgttaaataaaattgaattgtaaatgtttaattgcagtaaagcatagtgaagaaaattaaaaatcacttataatctcatcactccaagatacaatcaccattcctactttgtgactttatacagtgatagtcgtgtac

SEQ ID NO: 478648 - DNA, 1466 bp, Homo sapiens
tcaggactacatcgtaggggtcccattgtgtctggagctggttccttccagtgggtttgtggtatggctgacttcacgaatgaagccgcacaccttcacggtgagtattacagctcttaaagatggcacggatccaaagagcagcagtagcaagggttattgtgaagagcaaaagaataaagcttccacagcacggagcaggaccagagcaggttgccgctgctggctgggaggtggccagcttttattcccttatttgtccccgcccatgttccgtttctgtcctatcagaatgccctttttcaatcctcccttttagggaggctacttttaggatcctgctgattggtgcattttacagagtgctgattgctgcattttacagagtgctgattggtacattttacaatcctcttgctagctacagagcgctgattggtgcgtttttacagagtgctgattggtgcattttgcaatcctcttgtaagacagaaaagttctccaagtccccactcgacccaggaagtccagctggcttcacctctcaccatctatgaagcactccaagcccttccgaggatgaagtaggagcctcctgtgtctgactgactggctatctggctggctgactgactatttgagtgactgacggactggctgactgactgactgactggctggctgactggctgactagctgactgactatttgagtgactgactggctgactgactggttgactgactgactggctgactgactatctgactggctgactggctgactgagtgactgactgactggctgactgactggctgactgactgactaactgacttactgactatctgactgactaactgactatctgactgtctatctgtatgactgactgattatctgactgactggctggctggctgactgactgagtgactatctattacttcatgtttctccttaaacccattcactgttttttagggttttgccttttccagaatgtcctatagttggaatcacacagcatgtatccttttcagattggcttcttcacttggtgatatgcatgtaaacttcctccctgtcttctcagtacttgcagcccctttctttttagcaatggatactattccgttgtctggatgtcccacagtttgtttatccatgagcctatccataggcatcttggttgcttcccagttttggcaattattatggataaagctgccatcagcatccatgcgcaggttttcatgtggacatacatttttcaactcctttgggtaaatacccaggagtgtaattgctggattatatagtcagagtatgtttagttttataagatgtaaataaactgttttttaaaaaagaaagactatatcatggcaataagtggaaaaccagtatcgtcttgccgtacgtagaaagtaaatttaagaaaagaatacaataaaagaaaaaa

SEQ ID NO: 478649 - DNA, 755 bp, Homo sapiens
ggaaggcacgtgcactgtgcattatgtatgtgtctcatgttatcaaacatgatgaacggattgtggagatgatgatcccaagaggtcactgtgatgggctgaattatgtccccaagattcatatgtactgggagttcaagctcgaacccccagtacctcagaacgtgactgcatttggaggtagggcctttaaagagtccgtggtgcttcatgatggcagctggagctggctgatccagccaccagtgatcttcacgtcagcaaacccagaacttgcagtacccatgggcagtgtgcagcagtggtccgcgcaggctctggctctagaccacctggagaccgagagtttccactgcggacttgaagcatccgaaccctccccctacaccaatggctttggcaaatggtggggcacggagggcaggcacaaagggtggaccgcatctgggagtgtgctgaatgagtgcgctagaccaccagctcaggtgtcggccctcctggagcctgccccatgtgctcagctgcaacttgccccgccctccccctactccaccatgagaaccaagggtggctgtgctgctgttatccgtgctctgcaagtcctgctgcgtgtgcacctgcatgggaggctctttgcaaatgttaatactattcttaactcgcaggccataggctagattcggcctgagagcctttgttgacaaacctatggtctgaatggaagaaaatgatggggaagatgttggtaatgcaga

SEQ ID NO: 478650 - DNA, 5665 bp, Homo sapiens
aggagctgagggcaaggaggaaatgaggacctcggtcctctcacctcaaggaacttaattctgccaataaggatgagctgggaagcggatttttccccagagcctccagatgaggactcagcctggctggcacctcaattcagccttgtgagaccctgagaagtgaacccagacatgccaggccaggcttctgagctgcggacctgtgcgctgactgacggtggtgtttaaagtggctaaatatgtggtagttttatgcagcaatggaaaatgaatacagaggccagctccaggccaaatgccatctgacccacagatgggtccagcaaggagactgtggtggtccagggaagggctgtcagccccaagcaagagagcacctctgcagacaggagcccctcaacctgttgtgtgacagtggtgccaccaagttcttccccatgggggaagccgcctcctacaccctgtgctgccagggcccccgctctgggtgggaaacgagccacgagcagctgctcctgctctctgggcacggctctctggtccacggtttgctctggcccctccttcttcccctagaagagtctcctatcaccatcacctcactggccattcatatcgtgggcggtggggactgggctgtctctgggtgccacgtagccctgtcagccacttccagcctggagacagacaggagcccagggcttgttttacgccctgaccatgctcaggttgtcttcgacaggaagtcagagctcccagcagaccgctgtgatggccgcagtgctttctgaggcctaatttcagtctctgctgtatgtctctgctttcgccccgagaccttgcaatctgacgagtttctctcctcagcacctgtctgtcctgtcatcttttgatagttgcagccaatggcagccggcaccccaactcctgatgtctgttcctcccatctcttctctcaaagccacacggtcactcgatagacacaaatctattgtttaaaaagttaaaatgtatcaaagcttacatacacaaacacagactgtacatagcatcatttgcagttcggagaaagctatgcaaacatgaagatacagtattaaattgtaaccccataaaattaactgtagcacattctgtactattataataatttcacagccacctcctgttactatcgtggtgagctgaagtgttgcagcttactttaagaatatagcatgtaacacatctaacatacaaaatatgtatgtttacgctatcaataaggcttccagtcaacaggaggctattagtagtaaattttgggggagtcaaaagttatactcagattttcaactgtgcagggggccagtggccttaacccctgcattgttcaatgaccaactagatatataattatatatgcatataattatagaatatatacagtttaacaactttattgatatagaattcacgtaacatacaattcattcatttaaagtgtatatttcaatggcacattaccaacttcaaaaattgtggcatatatatacatatacatgtatctatatgtatatattcttatgttgtattattcttatgtattcttatgtattacgtattactatgtattacatattattatgttgttcatgtatatgtatacatgtatacatatatatataacaaaatttgccattttaagcaattttagcgttcaattatgaggcattaattaaattcattgttgtaaaaccatcatcattatctatttccaaaacttttccataccctaaattaagtctgtaactactaaacactagcttcccactctcccctcaccccagcccgtggaaactgctaatctattttctgtttctatgaatttccttgtgatagatattttacataaatggaatcatgcaatacttttccttttgtgcctggcttatttcacttagaataatgttttcaaggtttatcagtgtggtagcatgtgtcagaatttcattccttttaaaggctcaataatttcccattgtatgtatatatcacattttgcttatccattcatctgttgataaacccttcagttgtttccaccctttggctattgtgaataattttaaaataaacattggcatacaagtatcttgttgagtcctgttttcaattctttggggtgtgtacttaagagtggaatttctgggtcacgtggtaattctatgtttacttttgaggaactaccaaactacttttcacaatggctgcaccattttgcattatcactagcaatgtatgagggttctaatttctccacatccttgctaacacttgttattttctgttttaattcattgattttagccattctagtgaacttgaagaggtatctcctggtggttttgatgaacatttccctaatgactaatgatactgagcatctttttgtgtactaatgggccatttgtatatcttctttgaagaaatgtctgttcaagccctctgcccattttgaaacggattgttttatattgttattgaattgtaggaattctttatatgttctagatgttaaaccattatcagatatgtaatttgcaaatattttatctcattctgtagcctgtcttttcaccctcttcataatgttttttgatgcacaaaagtttttgattttgttgaagtttaacttatccctttattctttgttgttcatacatttggtgtcatatctaagaacctattgttcaattcaaagtcacagtgatttacaccctatgttttcttctaagagtgttatagttttagctctcatatttaagtcattgatccatttagagttcttttttgtatatggtgtcaggagcagcctgcccttgaattctttcttactcagggtgtattgtccattctgcatctaactttcaaaatattcttttcttttgcaataaattactctatgctgcacctcctttgctgtgtgtttcttgtttaaattattttaaatcaagaaaacaagaactgaggtatcaccacagccatcaacaatgttagctatgagtttttcataaatgccctttatcatgttgaggacatttccttttatttctggttttctgagggttttttttttttcatgataggtcattggattttgtcaaatgccttttctgtgtcacttgagatgatcatgtgattttctcctttgttctattattttattaattttaatttcattaacttatttttaattaataagtaaaaaatatatattcatagcacacaacatgatgttttgacatctgtatacactgtggaatggctaagtcaagctatttaacatatgctttctctcccatacttatcttttttgtgatgagagcacttaaaatctcatttaaatttttaaggataaaatatattgttattaactctagttaccatgatgtgcaatagatcttttgaatttattcctcctatttagccttcattatattaatgtgatgtattacattgattgattttcttatgccagactaatatgcattcctaagttcaattatctccactagaatctttccttctttctgctagctttggatttggtttgtgctttttttcctaggtccttaatgtgtaaagttagggtattgattaaagagctgtcttattttttaatataagcatttacagtgacatatttcctttatagcactgtgttcattgtatcccctaagtattggtatgttgcattttctcttttgttaaactctaagtgttttctaatttctcttattatttctccttgacacattgattatctaagactgtgttatttaattttcacatatttgtaaattttcctgatttccttgttattgatttttagcttcattccattgtagtcagagaagattctttatacatttttctttttaaatctattgagagttatttgtgtcctaacatatgatctattccagaaaatgttccatgtgtacttgagaaaaatgtgtactctgctgttgttgagtttataaatgtttcttaggtctagttggtttataatgtcttttcattttctattttgattgatcttctgtttatatgttgtctgaattactgaaaatagggtgttggaacacccaactattaatattgaattgtctgtttctccagtcaaatgtgacaatgcttttgtcatatatttttgggctctgttgttttgtgtgcatacgtttctaggtgttacatctttttgattatttgacctctttatcagtatataatgcccttctctgtctcttttaacaattttctacttaaatgatattagtataggcactgccactatcttttggttccagtatgttcatggaatctattttccattcttttattttcaacctatttgtgtctttgaatttaaacactttctctatgtcttagctttttttttcccctcatgtcctccattactgccttcttttcttcttaatctttttgtagtgaaacattttgattcccttcttactttgtctatattctttaagttttttctttgtggttaccatgggaataacatttgaaatcctaaatttataacagtctaatttgaatttttatcaatttaatgtcaatagcatccaaaaactctgtccctatacagttctgccctcctctttatgttatttttgtcacaaattctatgttatgtgccaaataatatagatttataattatttctatgcatttacattttaaaacatgcagtaaatcaaaagtggaattagaagcaaaaattaaatacactagattttatatctgcccatgtatctcacattaataaagatatttatttctttaaacgttttcaaattactgtctagtgtgctttcatttccatctgaaggactcctttttgtacttttgcagggcagttctagcagcaatgcactccctcagcttttgtttatctggaatgtctctctctctctctctctctctctctctctctctctctctctctatatatatatatatatatatatatatatatatatatatcttgccaccacacccatcccctttctctcatttttgaaggacagtgttgctgtttataaaattcttggctgacagtttttttatgcttttagcaccttaaatatgtcagctcatcacctcttggtgatcaaggtttctgatgagaaatcagctgttaatcttatcaaagaattccttgtacatgatgaatcacttctctcttgctgctttcaagattctcttttgtctttcaacaatttgtgtcttggtatagtttttcttgtttagtttatcctacttaaaattttttttgaggttcttggatttgtagattcatgtctttcatcaaacttgtgaaatttttggatgttatttcttcaaataaattttctacctctttttctcctctcctttttggactcccattatgcatatgttggtccacttggtggcaccttacaggtcaaaattagtactgaggagtggggcattgctataaagatacctgaaattgtggaagcaactgtggaactgggtaacaggcagagtttggaagagtttggagggctcagaagataggaaggtgagggaaagtttgaaacttctttgagactggttaaatggttgtgac

SEQ ID NO: 478651 - DNA, 480 bp, Homo sapiens
ggttaacataatgtcctccaggttcatccacgttgccaagatgacaggactgaccagcacagtggacggtgacattcaactgatgcactgttcagagggccagatggcagtaacgggcaatgatgaactttgcagacacagggctgaacagaaaaagcaaaataccgacatgaaaaactcacaggcacaaaacaacatgtgttcaagaaacaaattccagacaaaaggaaacaccaaacgcataggaatgggggcctcctggggagggatttggaaacaagggaacaaggagagaggtgccctgaagctgctggaacccactttgcgtctacacctgaaggatggggagcacctcagaattcagacctcagggctgaggggtctttgctcctagaagaaagtgccacatcccttccaagggttccacatggctccccctgtagcagagggtcaagttcctctcagatttcaaatctctcc

SEQ ID NO: 478652 - DNA, 773 bp, Homo sapiens
ggcatggtgacatgtgtcaaactcatagttctggctggatacaggatggacggatgtaattgccagagttatgggcaccagatgacctctgagctaacagccctctgcccagctggagcccagtctttcaggtcagccctggtgatcctggccaaacaggatggctttgcttttcctctagggtctagccagaggcctctctactgtagccatagggaagactccccgatctcatcctccacatctgctctcagaatgaacaagggattcatgataaaacattctgatttaatattctcagcgtgtcctccctgtcccatcagttcattctgggtgtcctgtcctctctctacccctcccaatacaccgggaaaatgctcccggaggctcccagttaatagtggggacgtcctgaccagaatgcagatgcttcacttggtgtccttggcccggtcttgccaagcatccagcctgtccctgggtgtgatcagcttctccttccctggggtccagacccttcttcctaaggctcatcaccatcagaacaggctgtggagctgctctgcaagtgagtgcggccctgctgacaccttaattccagatttgcaggctccagaactgtgagaataaatttctatttttttaagacaccaagtttgtggtggtttgtgacggcagctcaggaaacgaacacgctggctatctcatcaccaaataaagctaaaaccacctgaaattccatcacccagaggaaattgcagcttctgacagcc

SEQ ID NO: 478653 - DNA, 547 bp, Homo sapiens
cagtctgcttcatgcacatctatagcttccattccagcccctgcctggctgtacacatgtgtgtgtgcatgtacatgtatgcttacatatttgtgcatgtgtatgtgtgtgtgcatgtgcttgtgtgtatgtcatactctgttcaggctgccgtaacaaaataccacagactggagggcttaagtaatagaaaatttatttcttacagttctggaggctggaagtccaagatcaaggtgctggctgattcagtgtgtgtaaagaagaagcggacctggcacaaacacggcccggggcaagcgcctgacgtcaagcccgtgcagaatggcagccagctcttcatcaaggagctgcggagccggacctttcccagaggacagaattcttggccacaggaaggacacagccgggagcggctcctgccatgcgagtgggtatgaactggtatcttattttttgattttcatttctctagtgattagtgatgttgagcatcttttcatgagcttgtcgatccttgtatatcttccttggaaaaatgactatt

SEQ ID NO: 478654 - DNA, 579 bp, Homo sapiens
tcaagattttttttgttttggtcttcaaattagtttgccaatgccgattgatggagttggctctggttcaaatgcctctgacagaatggctggatcatataagagagatacagaggagaaagacagagggaggagaagatgacgtgaagatggaggcagagattggaatgatggggctacaagccaaaaaataccaaggaacatctgaagccaacagaagcaggaagaggcaaagaacagactgttccttagagctttcgcaagtactgcagccctaccgacaccttgatgtcagacagacttctggactccagcactcagtggcaaatctgtacaggtccgcagcaacctcatttcttgcctcctcagaagaacttgtggtgccaagaccttacagtccttttcaacaacaagtagtgctgggaaaactggatatccacatgcagaataatgtggttggacccttacctaatgtcatgtaaaaaaatgaactccaaatggatgaaagacctaaatgtaaaacctaaagcaataaaactattagggaaaaaaatggcaaaatttcacaacattggattt

SEQ ID NO: 478655 - DNA, 940 bp, Homo sapiens
aactatatgataagttactctcttatcatggtttattctttatatattgggtcaagcccttgaaatggactccctgtggcaaaaagagacccagaaaatgttaaaaccagattctacagctttggccaggcaggaggtcagtgacccctcaacactcccctaccttgccaactgccgcaagattttctttcctgtaattaaacagaaaccagttcctgagaaacaatgtttggaagatttccccaccaaccttgacagaccgcttgacatcgtagctgacctcccctctcttattatggtcttgcctttacaactgaccagccttacaaaacattccttcctggtagatgaccaccaaccagagcctggttctgaccagtccacagaggctgtgcatgggatgcctttgtatctggaggctggatgtccaagatcaaggtgccagcaggcttggtgtctggtgagggttgctgtcgctgcttccaagaatgatcaaagctctgctcttctggaagccacagttaagggaatccaggacctgagcagctggcagaggagtaagaatttcttaccagccaggctctgacctctctctctgtgcaatctggtcaagtggatagtaaaaatcagcttcctttgcaaaacttttcattaatgggataaaaggatttgtgtgtgactaatcttgatgtattgactctggtgtactttttggtattttgtggtcatattgtttgatccctttatgcctccaaatcatctttttctctttgtctttgtcttcctgtgttgttgtgtcttaaagagagagatattggactgtagtttttgtttattgtgtctttgccaacttttggtatcaagatgatgccagtttcatagaatgagttagggaggaatccctctgtattagtctgttctcccattgctgtaaagaaat

SEQ ID NO: 478656 - DNA, 633 bp, Homo sapiens
tcatgtactctctaaagggggaaagccttcaacccatatattgtggagctatgagaagagggccaccgtcctccagaccccagaatggtagattcactgccctgtgcatctggaaaagccgcagacactcaatgcctgcccatgaaagcagccaggagggagactgtaccctgcaaagccacaggggcggagctgcccaagaccatgggatcccacctcttgcatcagcgtgacctggatgtgaggcctggagtcaaaggagatcattttggagctttaaaatttgactgccccactggattttggacttgcatgggccctgtagcccctttgttttggccaatttttcccatttggaatggctgtatttacccaatacctgtacccccattgtatctaggaaacaaaggtggaaaggctgatggcagcatgagttggggaggggatgttgccactactggggatggggaagctatttcttctggcaaaaaagtttcatcagagtttacaaactcagtgtccccagcttcatcagggtcctcccacatgtccccattccaagttgcaggatcccattcttttccaatcaatgccctcactttaacaggagacacctggtgaggctgtacatgc

SEQ ID NO: 478657 - DNA, 910 bp, Homo sapiens
tccttgcggccaggaacagtggccaacacctgtaatcccagcactttggaggctgaagtagagggagatgacctcagcaaaggacatcgaacctgtgggagcacctgtgaggcaagaagtcctctgccctctaccctcaccctccccagccatcacagtgcggtggcagacaggccctgtgagcggcaggcacctgtcagtgccagagtcctcccagcaggcctggtggccctggtgctcagccttggaggccccgtgctgcctcgtcccttccctggggcttagcttagctctctttgttgagttggcaggtctttggctaaggatttgcacatcgtcagtgttacaacctgctgccactgttgtatctcgtggccgctctgccctctgtgcagcccaagaagtcttggcatccctctgcccaggcatgaagcttccaagtcttcgccccactctccaagccaaattgagctgtctctgccttgcctttcattttctttctctgtgggtataattgtgttgacagccacaagaaaccaaatgtttccctacatcatttagagatgtgtggcctatgaaattcctttccattttgttgttttcaccatgactgcaatgagcacagttgtcaggagaaaaacctcaaaacattttggggaaatagagaaaacttagcatcctagcaatgtgttgccattagactaatgaatcaatcaggcagccagatcacagtgactgcctgaacagaatgcacctagctccatgcagatgtaacctgtgatgtcacagccatggcctgtccagtgcatcccagggctgagtgaaacacagacccagttgggagctgagaggaaggatggggtgaatagccaagggggtgtcacagggcagatgatgagtaggtaaatta

SEQ ID NO: 478658 - DNA, 1463 bp, Homo sapiens
gatcctgggccgtaaccccaaatggctctgcgggtcagggagtggagcaacccaaacccaccccctaccctgctccccatcccttctcctgctgaactttccttccactgtgctgaacacgaggaaatggagactcagagaggtgaagaagctcatctgcggccaccagctgtggaggatttaatccttctggcaggattaaaatccaggcctgagcaattgcactctccagtgaggaaaccaaacaccaactttcctgataagggatctttgtggtcagcgggaaacagctgctgcaccaacctcgtttcaacacgaagccgaaatgcccaagcactgaagatggttgggagtttgggaagacttgataaaaatgaagaattaagcagttatgagccctgatcaatactgagatgacgccaataacagcttgtgtttatttcgccattctcttgggagaggctcagatccttatggctcttcccaggtgtagcacattttgggcaatagagttttgctatagatttgtatgaatagattttttaattgttgctaagttgaataactttttttttaatctgcatgggaaggatttggtatagaaaagaatcccaaagtgggttcttctacaaagtgaagagaatgtacatctatcacgttattgctgaggaggattttgtgtctggggcaaagatagggaaaggggtggaggctgggtttgtgtgaagaaattctaggcttccttccaactagaagggtccatgtttcaaatgttttggcacgcatagtttatattactttatctcctggtttatctttctatgtttatatttcatataacaagtgtcctttaaaatgaactacacttagaattctacaggacaaatgacttagtgtcttcaataaataaatggcattttagaaaggatattttacaagttaagagacttaacaggcaggtccaccagatgcctcaaataaggactagaatgtgtggtcctcatttgggtcctgattcaaatgaaccaactgtaaaaagacatttttcagacaatcaggggaaaagttgaacaagaaccagttaatagattgtatgtcataaggagttatccttaataatgttagatgtattagttgcattgtggttatgttagaaaaaaaagcctatctgttagagttgctttctgaagtattactggtgcagtgatatgatgcctgggattttctttaaagtgttccaagaaaaaaagagagagagagagaaaggggggtggggagatgaaataaaaatggcaaagtgttgcaactgttcgaactggataatgggtgcacagggactcattccatttcgtgtatgtttgaaacgttccataataaaaagttaaagttttaaaatgcatgccatgcttaaacattttaaactgtagcctgtacctgattaaatgttgctttcctcagaatct

SEQ ID NO: 478659 - DNA, 920 bp, Homo sapiens
ggcgcctcctcgggtcatcaatacagtggtagaaatgtcatcttcaacttcatactggccccagggctgcttccaaggcagccagcacagccccttacagcctggaaaggaacacaaccactggcaagctgggcttacgcatccccaaagaggacacgggaacaggccagaaacacacacggcagagactgcaagccccatggcagcccctacccatttcgtccctgactcacagcttgatgatgtagcaatgagggtgaaaaagaggccctactttcacaaagttgtgccaccacaacctctaactagttccaaaatatcttcatcaccccaaggtaaaactctgtatccattcattagcagttactccccacttcccttctccctcctgcaaccaccaatctgctctctgtctatggatttacctattctggatatttcatataaatgggatcatataatacatgacctttcgtgactggctgcttttacttagcataatgttttcaaggttcatcctggttgcagcacggatcaatacttcatttctctttaaggcagaataatattccgttgcctggatagaccacattttgtctacccatcccctgtcggagggcacttggattgcttctaccttttgtctcctgagaataagctgctgaggacacgggtgtacaactcaaatactcttgatttgcatcacagctggacttgcagctctcaaaaccatcccctctcctggttctgccctggtgctcccatccccctggttgactcctactcaatccttagggctcagcttcatgccacttcctccaggaagcctccttgctgtgcctggacaaggctggtgctccttttcctgaggggctccgtgacactctggacaacccccaagcaagacctctgcacatgcc

SEQ ID NO: 478660 - DNA, 2695 bp, Homo sapiens
agcccagaacctgatggctgtgctggccgggacctcagatgctggcaggagcttcagctgcccttaaatgctcctgagtggctgcaaaggacagggaggtgcctcgtccttaaccaccaggttcaactcactcccagatgaaagggttcccgctgtccttgtgcgtcctcgtgcagtggcagtggagaacgctggacagaatggctgcagaggctctgcggtaggcctgacgccactcatgattcccagggactcctgtgcctcgggcagccagtgccaccctgtcactcacagggatgaggctgatccaagggctccactttaataacgggtccagctggtgccagcttttattttagcgaccggggagagccagggatggcttctcagaggagggagcagcagggtcagcccctgaagccccgtaggatgtcctggagacctatggcgacggcaggcctgggttgggggccagaatccaccgttttcagtgcccactattttgttcccaaggaagaaacgtccaggccaggggcatcgcagggcaggtaaaaccccaaggaatacctggaagtgggaggagtggaaagcgggtggtgaggggggcacccctcttcatccgctgtgggaattccaggcagctcgggagaacttggacggactgttttcattaggagtcatacccactaacccacacacagacctctgcacttctcatctgaacacggagaatatatttcagagccatgattgtctcactatgtgtgtgagggggaaaagctgacagctgcacttctccatctgagtctgagagaccacagacgagggcagccagagaagagccccctcttccagaagcagaagctactctcctctctggttataaaatgcagagtggtgggtgggcttagctgggggaaggttactggggacagtaaagcataggctctataggaccagaagttgccttcctgctctgctgtgggaggaccccaaggtggcccgaccccagtgacctgggccctgagggggatgcttgggagcggggtcttcctgaaaacaccctagggaatcccaagggcagcagagaaccacatcaccccaaactctgggctgcgggcatgtgcacatgtgtgtttgaggtcagcagtgattatcagtatactgaacaaccagcaggccatgggtgccgcccaaggggacaggcaggtgccaggactttgcatggttgcaaatgggtgcttttggggtggggcctacatggggctctttttgaacgacgacaatgatcaagcgagcagggtgtgggggtgcagtgctctgaaggccgctgcagggttggtgagctccccggggcagtgggaggcagagggctgaggcacagagcagggctgggggatgctggcccacagtaggtactcagtgggtaggccacaattgcccagaagatgccccctgagctcgaagctggcagggctgggcagttacccgctctcactgaaaaaggggtgccaatgctcctttgcatcctgtctcctgagactgaggagtcctcagggactccggaatttatggcagtgagcagcgatgggtcctgcctctggggcttccagacgagagaccggctgcctgcctggctgtctgctgctccatggagtgtggaggaggtgggcttccttctcacagcagccacccctcgccagggagctgagcagctttgcctggaggagcctgggctcttctgggctaagctttgctgctttcctctccctgtcatgctgctggaactcgggaaagagacatttccatgggaactcacggattggagggatcccagccaggcttctggtggaagaaactttgcagacaaaggcacagtggcacactgcgtctcaactgctcaaggtcaaggggacaaagagtttgtcgaagaatcaaaatcgtggcctggcataagtgaacagagtgagcgaggagaggggtgagaacttggtagggggtgtcctttgagcttgcacttgacttaaatcagcaatgtgagctcatttcttctgtctgtctgtctgtctgcatcaggacttgcctcctcttggaagtccccagagggcctggacctcatctgttacctctcgttacaaagctagtagattatttttgcttgtgactttataatttcctgttactcatctataccatgcaaatttcctcattgtaaaggagtcaggcaacccagagaggatatctataataaagcacattggtcccccctcatctcccctgttcatactttggtgtatgtcttcatcgtccacatatataacggatgtgtccatatatatagtggacttatatacaatcatatgtatataatcatacatatgtatggttatatacaaatccttttcaaaaatatagatggaataaaattaagtgcattgttctgcagatgctttttgatagcaaattccacatacacaattcaaattaaaactgtgcattggagccaaaatcccaccagtgaaggggatgattaggctgctggtgagaggggagccagcggttattttcagggagattcattaacactttcctgcccctggtgctcagcttcttttcattgccagaaaaaaggtcatttatcagaagttaccttaatgaagtttaaaaatgaatgtccgtcaaccacctggtcccc

SEQ ID NO: 478661 - DNA, 1220 bp, Homo sapiens
cactcttcctccaagtacactcagggcccttccccagttcccgggcagttcagcggtcagactgcctggccacctcccacctcctccactttatgaggcacagggccttgggatgagttaaagacccctggtacagcccggtgctgccaactacaatttggctaatgccttaattgcatctgcttcagcggccttccttctggctcggggaccatgtctatttccctgctccctggtccccagcagccaactagggcaggccccagcagcagaacagcttgattccttgagcccagggaagctataaatctagagctttaatcatgtcttcatgatcattcagcaaagagcgaccgaggatttattctaccgggacggccaagggaagactgcggggagcctgcgtccttgagaatgcagtaagcattttttaaacgccccaagggtcctttccagttttctctgcaaatgttaaggaggaggagaaatcaaggaaatccagagaggactctgtggtcccttgcacacggcaggcacctaatatctacctattgaacatctccgctccttcattttatgggcgagaagaaagaggcccagagaggtgtccaccacacagcagaggttactcacagtagaggagggagcctggccccggtggaagacccccagtgatacagcaggaaaggggtcaccgggctaatgacgctaagggggaggggatgctgccttacctggggaccagcagagatggtggagagtggtgaccccagtgggcaccgtctcttcccattcagcccaaccacccagggcttcagaagcaggcctgagcctggaggcaacggggagtccaggcccaaggacagcagcggaggtccctggctgtacaagacgcatggcaccggcatctgctcagcttctgccacaagccaaggagcaccgcagactgccagcaaccaccagcagccgggagagaggcctggaatgagtcccccctcggagccccagaaggaaccactgctgctaacaccttcatttcagacttctggcttccggagcggtgagatttctgctgccttcagccaccaaggtggtggcgatttgctgcagcagccacaagaaacggatacagaggcgatggtttggggccaggaatgcatgatcaggtcttcccagccgctggtgctgtgacgccaacctcctctggtcttggggctgcc

SEQ ID NO: 478662 - DNA, 1147 bp, Homo sapiens
gcaagcaacactcaggcagaagatgccgccagccatagagctcacacaggcagctggcggccgacctagagcacgtgaccccactgtgctgtcctgcctgtcactgactcccccacgtttcgtgaacaaggatgaccatggaacaaagttctggccaatgagaactttcaggaaagccattgttctcctcaccgaaaaagagggagggaagggaagcgaggggcacatggggaccactctcccaaacctgggctgtgagcgcgaggggcacgtggggaccactctcccaaacctgggctgtgagcgcgaggggcacgtggggaccactctcccaaacctgggctgtgagcgcgaggggcacgtggggaccactctcccaaacctgggctgtgagcgcgaggggcacgtggggaccactctcccaaacctgggctgtgagcgcgaggggcacgtggggaccactctcccaaacctgggctgtgagcgcgaggggcacatggggaccactctcccaaacctgggctgcaccaccactctaggagacaatcggcgtcatctggtgaagtgcagctgcgtgccctgggaacgggccagccacgagacgccgcaggtgcgctacggtgtgcgtcagcggcaccagaggagctccttcagcctgcagattttgaggcccccagattcttgccttccacgtgcagacgggccgaggcaccactttgagaaacagtttccaaggatgaagctgcaagcaaggaggggcatggagccgagggactcgccgggggtcccagctggagtccctggattgactcgccgctacctcttgtacttccccggggtgttccaggggctctcggagcgccgtattgaaatcgatgtcctcgtggtctattccatgtgtcctccttaggaaaggataaaattaaaaatcttgtcttaataaagttaaaagtaactggtgtagtgatgctgagaatctcagacaacctaagacttactgacttggttctgaggtagttgctagtggccagttccctaacacttccctcacagagctctttcctccttgtctgcccatgcccgggcattacttaactttgttgggggtgctcaggctttcagaggtttccaagctttgctataaacc

SEQ ID NO: 478663 - DNA, 783 bp, Homo sapiens
tttggttggtttttactgggagatgagatggcctcatctgggacctccctaccccaggatccccctgtttctgctcacgctgtctgctcggccggctgcttcaagggctgaggagtcagctcccgcagggctcatgtggaagagcaagcctgtggcagttgacctgggtccctgtggtgtggacaatcccagggcccagatgctgccctctgctgcctgcatttctattcgggagctggatccccaggcgacatcgggtgccacacaggggcctaccaatacctccgtggctttggagcccaattttgtccccatgaagaggaggaagccttggctaggaggtaaaatgagtcgcccaaaggcaggctgcaagtggaatgcagagcgcagggcagagtttgggcctctagtcctcatcgtcacagtgctcgtcctcctaaaagtcaggtggcagcaagcagccccagagctggattggctggatgcaaatccaagctccactacctgtgagctgtatggccatgggcaagtcacttcctcttcctgtgccttagttttctaatctgtaaaatgggatactgtgactacttctttcatagggagaaaactacatgaattaatatttgtattagaacaaagacatgcttagaacagggccaggctcatcatatgcactgtagcatacatgcttgatttcgtgggctatggcatccttgctgcccttgagatgtgggagaaaaaactggttctaagccctgaattcattaaaatggaaggaaaatc

SEQ ID NO: 478664 - DNA, 1700 bp, Homo sapiens
ggtgcttaaacctcattgctacactgagctcggagatgcggtgtttgccggcgtggattgaacagcctcgccctctgaagggagcaatcagccagcgggccagggccatgcagctacatctggccactcctgtgacctctttgatcactacctctttggagagtcgcaacaaagttggtgtcaccagagtgcagctgcacaaactactctccaattcgagtcctttagaagtccctgggcactgggcccccatgtggctggatgcatgcacagagggcttccatggtgctgtgaaagagaaaaagagttactgccctctgacctatgtccaaagcaaccatcgtactaatgccccgttcaccccgagggtgctgctgctcgggcctgtgggcagtgggaaaagtctgcaggccgccctcctggcccagaaatacaggcttgtcaatgccttggctcctgcgtaataggaatgtgctgtttatttattttctccagtctcgtttggtgcccccaacccaggtcagtgtgtttacaggcagacaatttctgaaccagaggaagacttctcactccgcacagtttcaataaatattttaccaggaagagagaaaatattgaaatcagctctccaggtctttcccggggtggtcccaggcggtcttggatgccagcttgtgttcaggaggataaagggatgggaatcaggaagaaactgtagcagagacacactgccaggttgaagggagttaaaagcactgcccctacgcacaccatgctccacaaacctaagtagcctctactgtatttactaaggaaacgagacctgcacccccaaatatatgcatatgcatacaacccccccaaattatacaggcataccatatgaatatagagagggaatacaaacaaatatatggacacacacaaatatacctacaaatatatgtacatttttgtacatttgtatgtatatttgtatatacatacacatatatgtatatatttgtatatacatacacatatatgtatatatttgtatatacatacacatatatgtatatatttgtatatacatacacatatatgtatatatttgtatatacatacacatatatgtatatatttgtatatacatacacatatatgtatatatttgtatatacatacacatatatgtatatatttgtatatacatacacatatatgtatatatttgtatatacatacacatatatgtatatatttgtatatacatacacatatatgtatatatttgtatatacatacacatatatgtatatatttgtatatacatacacatatatgtatatatttgtatatacatacacatatatgtatatatttgtatatacatacacatatatgtatatatttgtatatacatacacatatatgtatatatttgtatatacatacacatatatgtatatatttgtatatacatacacatatatgtatatatttgtatatacatacacatatatgtatatatttgtatatacatacacatatacatatatgtatatatttgtatatacatacaaatatacatatatgtatatacatacaaatgtacgtgtatatatatgtatatgcatacaaatatatgtatataccaccccagaagaatcaagttttgaataaaaatgcttctcaggcctcctccagcttacaattct

SEQ ID NO: 478665 - DNA, 707 bp, Homo sapiens
cctgtttcactcagcatgatgtcctcaaggcagttgttgggatggcaacatcaatgctggccgtggcacttcctctttggccagctctgcacagtggccgagctgtgggccctcagctcctggcagggccctgtgtcccctgaccagacttccactgggaggacctgtggccctgcaggtccagcccagaacctgggctccaaggtcagagcttttggcaatgaaataacaactacatttattgtgtgcctaccccgcaccctgagccattcacagcgttcacaggaaagtgctgtgatcgtgccacaaacgtgtcagagggaagagaactgcctgggaaggcatccggaggaggagtgccctcctgcttggcccatggttctactccacaccgacggttggcagccggcaccgtgcgataaacttatcaggccaaacctgagcatgccgggctctgcactgcactagaggggcctgaagggacctgcagctttgagggaggggacagagacacaaacctcaaggccgggaaatcatatttcagcagacagagtcttttttgtcatgccagtgataatgttatcatgcacgcccaatacagaaaaataaaacatacacactaaaaaataagaagaaaaaagacactgccgtttatccttgcacacttccttccgtgtgtgtgtgtgtgtgtgtgtgtatgtaattaa

SEQ ID NO: 478666 - DNA, 1211 bp, Homo sapiens
aagattgcctatggtgatggttccacaactctgtgaatataaaaacgattgaattataatatactttacatgggtgaattgtatgctgcagggctcagtctcctcacagctgctcaccccgctgggaacctggcggtcctgagcgccctgcccctccacccacaccctgactcagcactctgtcctccggctgcgggagtgcgctggccgatggctcagttgaatccttctttgagagttgcactgtatggaagagaaactattggcctcactttctggatgtctgacccagtcctcaccgacggatagttctgctctcactcttaaaccgcagcagagagcctgctgggtggcactgcttgcagagggacgactcattctcagggcaaacactgtcttgacaaaattggttctctctacagcctctcacctgaagggccctgttccttttgcctccctgaaaagggacctccctgagagcgggcaggaatctatgatacacatgccacctcatggtgtagaaagtgcacgctttctgtatgtgcttcccatgtgcaccaagtttgatttgggtcatctctatagttcatccttcctgaggcccagcgtgttcctgacacgccagaatatcccttccagatccttatggtggcagtcgttggaatttcctggcagggaacccttgcagaaaatggtacctgacatgccctccgtcacgacagtgcaaaggatgaaacagattcatgttcaaggcatgttctcattatgcgcagccttcattaaaagtaattaaaacttggcaaatactcatctcggatgattaatagaccatctccacttctccttttgggaggtcggttaccagttatcaaaaatgaaacacctgcctttacatcaacgtgctgctgccgaaacgtagcaggacgcagctttcacaaagctgttacatacatctgttgtgccaaaaaaaaaatggagctctgtgttgacctaagtcctgaataaatatggtggatttggggacacaaatctgattaaaaacttctccctaggccaacatggttaaaaactaagttagctagttagctatgtgtcatttataaggaatataaaattggatggtagcaaatggtcattttggtggtattaaacgtgtcttggggaaagcatgtcccaatctgaattccaattaatgcaattactatttcccg

SEQ ID NO: 478667 - DNA, 583 bp, Homo sapiens
atgtccgcggtggctgctctgcagcgcagccccaggcctgggtggattcatgcgctgcttagagctttggtccccaaacaccttgggcacagatgatgtgcaaagcccggtgctggggacaagccttccccacacctgccctccagaaactggggcccagtcagaggtgtgcccgaacaacaaggccagccctttggacggtttctgcaggccgcctcccggggccgaacgcgcaggacccgctcctgcacgcggcgtggctcaaggcggtggcctcaggtcctcggtgttgacgccctgcgatgcctccctggtagtaccctgtgccttctgctctgaggccgctgcgaaggaaatggcttgcttacgtctatatagcaccctatggaaggacggaaagcaaacagtaattgacaaatccagccatgaatgcaataaattcaactccaaggtaagctgagagacttagacacttctttttgtaaagttctgaaataaaagcccacactccctaaatctagaaaatgatacgcctttctgagcaatctgaagaccgtgtgaacgcaccagagcacctttcccc

SEQ ID NO: 478668 - DNA, 731 bp, Homo sapiens
gaccatcaactttcgattcaccagtttgctctggttggtcagctccaggtgccagcatgggtgctggttctctgcaaggctgcagccagactggcactggggaacatgttggcgcctggaagcttggagacaacagggaccgcagggccccaaagagggagtcacagccttggcttgggaagctcctagctggttgtcccaatgtctgctgctctcagcagagagaaggccatggagtggatagctttcctctaccactggttgtcctgacatctgctcagctctggctgagcctggggcttttatgggcctcagaggggaagaagtacacccttgttggtccatgggtggccatgggtggcccagaaaaggcaccacaaattcccactctggtccatgggactggcagcccggtccccaaccttcaggcccttcctggcctgaaggtggggcctcatcagggacccacccccttttgcagggaagcctgtctgcttcctgctgctgttcatggtgcctaggctgtctttacttgaccaaataaaaagttgttaactctgttaacttctaatattactgacatttcactggccccctcccctgccaaatccaaaacctagagaactcctgctttctctcaactctaaaatacttagatctgtgtctttcacacagcgtataggctttgtgctttatgctttgtagtgattgggttgagaacatgcttctgc

SEQ ID NO: 478669 - DNA, 847 bp, Homo sapiens
ccacccggagaaacggcaagcactccagagatcagccacccgagaactgccacatgcaaccttatgacagaggcagagcaagttggagacagacacagaggaggcagcaaagtgaagacagaagcaaagattggagggatgcggccacaagcccaggaatgccatgctggccgccagaagctaagaaatgttagtatcaccagagggcactggttaaaaacaccacagatttggaagtcgatgtcttataaacttaaacatacatacttgtattgggtgctgtgtccgtgtgttgaccacccagtgttctttggggttccactctttgcacaggcaccacagctggagaaacacagacgcacagacacaagctggatcctgcgtctcttcctgcctccgggcacagggcgccagtcagcctggttgtgcgaatggaggtcgtgttccttagcacagagggactcattccagggcgctcccctcagaggaggaagagaccggaaggtcgttttagggggcacttcctgggacatgggccaagcctcctaaggaggacacatctcacttattcactcagagatgtttgggagaagagctgttcttagctattataaacacagtcttgtactgttgaaagaatcttgtatttcaaataacctgattggaattttctgttaaagcaaaacagaaaattcagtacatagttttaaatatttacctcttaatattaaagcattgttttcttctggcttaaattatagccaaatgtgagaaattttaacttacaaacttgatgtaactcttctaaaaaatgttatgagattttttaatgtttgttaaccattcc

SEQ ID NO: 478670 - DNA, 3170 bp, Homo sapiens
ggaagctgccagacagtggtgcacccctctagtggcaggacaggatggccgcggcccgagtggggccggggcttccaacgtctttgtccagatgaggacagaagtggggcctgtgaagccccctcaggcacagaccttgatcctaactcaggcccccctcgtctggcaggctccaggcaccctctgtggaggtgtcatgtgtccacctcccctactccatggcagctgctcctggggtgaccgttacctctgcccaggtggttgggggctacccaggacctgtcagcgaggctggtcccatggccttcctcttcccccaccaccaccggctgcccaggtggcccccatcgtgtccccagggaacgctaggccatggccacaaggggctcatggagagggcagcctggctccctcccaggccaaggcccggccggacgactcctgtaaacccaagagtgtctatgagaacttccgactctggcagcactacaagcccctggcccggaggcaccttccccagagtcctgacactgaagcgctttcctgcttcctcatcccagttctccgatccctggcccggcggaagcccaccatgacgctggaggagggactgtggcaggccatgcgggaatggcagcacacgagcaactttgaccggatgatcttctacgagatggcggaaaagttcctggaatttgaggctgaggaggagatgcagattcagaaatcgcagtggatgaaggggccccagagcctgcctcctccagccccgccgaggcttgaacctcgaggaccccctgcccctgaggtggtcaagcagccagtgtaccttcccagcaaggatggccccaaggccccgactgcctgcctgccaccacccaggccccagaggccagcggagaccaaggcccacctgccaccacccaggccccagaggccagcggagaccaacgcccacctgccaccacccaggccccagaggccagcggagaccaaggtccctgaggagatcccccctgaagtggtgcaggagtatgtggacatcatggaggagctgctggggtctcaccctggggacacaggggagcctgagggacaacgggaaaagggcaaagtggagcagccgcaggaagaggacgggataacctcagacccgggcctcctgagctacattgacaagctgtgttcccaggaagactttgtcaccaaggtggaggccgtcattcacccccgattcctggaagaattgctttccccagatccacagatggatttcttggccctaagccaggagctggagcaggaggaaggactcacccttgcccagctagtggagaagcgcctcctgtccttgaaggagaaagggtgcgggagggcagcccctcgacatggcacggccaggttggactcaagtccttctgagtttgcagctggccaagaagcagcgagagaggtccctgacccccaacaaagggtcagcgtggaaacctccccaccccagacagctgcccaggaccctcagggacagggcagagtgcgcactggcatggccaggtccgaagaccctgctgtgcttttgggatgtcaggattcccccaggctgaaggctgtccggccaacctctcctccccaggaccacagacccacctgccccggcctggggaccaaggacgccttgggtctccctggagagtctcctgtcaaggagtcacatgggctggctaaggggtcaagtgaggagacggaactccctggcatggtctatgtcgtgggttcccaccacaggctgaggccctggaggctgtcccagagccctgtcccttcctcgggccttctcagcccaggagggagaggaccccagggagctcttcagtctccatctgctcagaaaagaggcctcagcccatcaccttctcctgccagcaagtccaagaagcgacctctctttggaagcccatcccctgctgaaaagacaccgcacccagggcctgggctcagggtctctggggagcaatccctggcttgggggctgggtggcccctcacagtctcaaaagagaaagggtgaccccttggcctccaggaggaagaagaagcggcattgtagccagtaggggccgccatggggcagactctctgatgccagtccccaaaagtggggctctgaagtctcggaccctcatggcacccggtgccccaaagcaaaggctgcttctcctccagtgctgatcttgctgggccttagctttggagggtaggggaaggaggggagggagaaggtggctgaacggggagggcaggaagggagggcctggggggtgggaagcagtgccttgggggccttgtgtgtaaatgtgaataaatgtagttgttttggaaaatgctctcagggctgctgcctctgcccttggcgttgtgctgctttgtggagggtgtctgtgaggcctcagggctgaggaactgggagaggccaggcactgggaacccacaggggctggccccactcttttctcctgttatagggggccccttcagatgctctggggactgacagatgctgaggaagccctgatccctcccaccatccactcacaaggccccgcctgctttagggaggcttctcggggcctcccatcattatcagtatccctggaaaatcctgggatggagagagctggctggctttttttctgctcggtgggagctgaggagaaggcagctgcctgcaacatggacatggggagaggcggctgctcctgcttaaccctcatcaggaagagcacgggcactgggctgaggggagacgttgaggccatggtccttcctcagagtttcctttgtcttagttcattccaaagatcatgttgtagggacgtttatcacgtatacggtatttgcataaactgtatgagcgattaaaagatattctctgacattaaacacaaacaacatagaaatctcacgggtgacgataggatcacaagattcctaataaatgttaagtggatggttactcaaggtaaatcccttcatccccttgcccttcattagaatagacagaaactgactgtatacaggctttactcctttataatgtgccaaaataaaaccccaaagcacaaatcgcacaaaccaagtcatgccactgggaccatcgtgtgtcatctgagc

SEQ ID NO: 478671 - DNA, 851 bp, Homo sapiens
cgaggaaaggataaaagttacttcaggccatctggatgtatacgtacaagtcacgggatgcgatggcttggcttgggctcagaggcctgacgttcctgccttcttatattaataagaaaaataaaatagtgttgaagtcttggggcggcgaaaatttttggggggtggtatggagagagaatgggcgctgtttctcagggctgcttcaagcgggattaggggcggcgtgggaacctacaagttatctaaatctcagcgtccgtgatggtctacgggacttccgaggtgattgggcagcgtcagtctttagccgctaagccaagaaggagtcagtcagagagccttgggccagagttccaggggctctgggagtggctgccaggcattccttggcctggtggtcagatttctggcacttgtagcaagctccttggggaggaggttctggaggaacgcctggccgctgcagttcaggcaaaagcgggacttgccgctaagggtgaaggagaaggggttgaggggtacttgcctctcccccagaaaagcagagaaggggtagagacaaggagagaaggggttgggggacttgccgctaagggtgaaggaccaaggcaggtgtccctgcatgtcatggcaccaaatttcatgcgcgtccgtgtgaagagaccaccaaagagactttgtgtgagcaacatggctgtttacttcacctgggtgcagtatcttcttctaattgggaaagagaatggtgtctttggataaacagaagttcttaattttcacgttgtgcaatttattaatttttttgttgttaataaatattaatgtaaaaaaatgaattgtctgtcgtg

SEQ ID NO: 478672 - DNA, 1002 bp, Homo sapiens
attcacactgaaaggaatagaagacaggaggaagagtcgggcgatggcagaaggcacaggtgatttggcaaggcttggagtcgggtggttctgcctgtgttccctcggccagcacctcagagtccccacaaccaggagccagccagcatcttcagcaagggtcctgtacagcctcagcaccccatccacaggaatgctagaactctgccagagtccactagggcaatgcaagaggcctgtagaggtgacttctcaggatggccggccaggtggctcccactcctgcctgatcccagtagttttcacacccagggaggtggggccctcttctgctgctcctaccccagagagccctggagggacattgagaagaaaacagtttaggatgcatgaagttaatggtacaaatgagcacagaggctacttaagatggctgaacacacggaggttcctggtgggtaatacatggaaaaggcgtggaaactctgcacctcttcccccgtaccttggcctgcgcgtctcttcaactggatcctttataataacctagtaaatgtaaagatggatccaactctcagggggttggttccccggatgcataagaaaatgcaaactgataagtaaaaagcaaaatattcaatcccttggttattgttatctgtaatagctatgcagaccaaaagttgaaataacacgcactataaacttaaagaaacttacttttatcctgagccaagtttgaggactaatagccaagaaacagaaactcagtgcaaactgagaatgtgtcccgtgcactatttacatgttgggaatgggaggagggggcaaaggcgacattgttccaattctatttacgtgttcttttatatagaagacgggaagagtaaggcaaaggtgacattgttccaattctactggtgctcagttgctttgtacctaagataaagcaaatgagcagttaatgtttatgggttgaaaggcttaggaagtatgcaggca

SEQ ID NO: 478673 - DNA, 1123 bp, Homo sapiens
aggcacaggggagacctgccggagccacggaagatgaggtggcccgcagtgccaagaagatggacaagatggtgcaggagaagaacacggccggagcactgggtttgttaacagagcttcagaatgttctggaattactgcggtccacaggaactggaatgttacttaatgttagtctcaagcagagtgcagatgaagaagttacatctttagcaaagtctctcgtcaaatcctggaaaaagttaccagataagccatcaaatacttgtttcatctgttccttggcacgaagcacttctgattctgtgcggatgaagtacagggagatgcttcctgcagcccttcgaacaggagatgactgcattgaaatgggaactgatgaggaagaattaggatctcgaactgaggaagcaatagatccagaaagagggaatacaggcatgaagtacaaaaatagagtccaaagtaagatatcaaatcttacagatgcaaagaatccagatttaaggaaaaatgcaccgtgtgggaatattcctcctgacttacttgctagaatgacagcagaagaaatggctagtgatgagctcaaagagatgcacaaaaacttgacgaaagaagccatcagagagcatcagatggccaagacaggtggaacccagcctgattcgctcacatgtgccaaatgtaaaaagaagaattgcacttccacacaggtacaagcctgcagtgctggtgaaccaatgacaacgtttgttgactgtaatgaatgtggaaatcaacagaagaatacctctctaaagcactctagtgctcacatgtctgctcctacccactgcactgaacttagagggtccatgtgcctaacgggcagggcaccgagggcagcctcttgtcaagagacagtggaaactgaggccctcagtccttcagcccgtggaactgaaattctgccaacaacagactctttcctcgtgcagcttatcagacacctggattacagcctcaggggggcccctgagcagaggacctgctaagctgtgcctggactcctcaatcgtaaacactgtgtgataagaaattgtgtatttttatgcagcaatagataactatcacagttgtgaaa

SEQ ID NO: 478674 - DNA, 1187 bp, Homo sapiens
tgggacccagtcatggacctgttagtgctgtctcagggacaccaggccaacatcccggacatcatccacatacacaaggaagctctaaccaaagtcacggagagtaggcaacatgtggcagaagggaagacagaggtgcagaggctgatgatgggggaaattcaagaacgcttagagtgtttgcataaaaaagagcccagtgcaaatagccaagacaatggggaaaaggccttgaaggcatttcagagatcttttcagcagccgttgctgtcacaggccctagggatgaggagagaatggtttcctgggccagctccatggcctggctgctgtgtgcatcctcaggacaccgctgcctgcatccctgcagctccagctccagccatggctgaaagatgcacagtgtgggaaagatacagacactcgacaccagcctcgtccatgagggcagctgcggggacttatcactgcaaacccacaggtggagatctgcccaaagccttgggagcccagccctcacacccctgtgccgtggatgtgggacaaggattccaaaaggatgattttggagctgtaggattgaatgacgggcctgctgggttttggacattcatgtatcctgctgtgatgaagataggtgaaaatgtaaaagcaggttcacaagtggctaacagccagagagatgtttgcagcagcccttgctgtcacaggccctgggacctaggagaaaagagtggtttcctgggccagccccatggccctgctgctgtgtgcagcctcaggatacagctgcctgcatccctgcagctccagctcctgcaccagccttgtctcaaagatgcacagattcatagacccaccaagagctttgtaccctccatgggtaaaaactacaggcactcaacaccagcacagcccatgaaggcagctgcatgggctgaacactgcaaagccacaggtgcagagctgcccaaggcctttggagcccagccctcacacccttgtgccctggatgtgggacaaggataaaaaaggggtgactttggagctgtgggtttgaataactggcctgctgggttttggacttttcatggagcttaaaacttacccgatgcctgtaccatcattgtaccttgaaaaaaagaactcccttttaaattcagggactcataggcaaaagggactgt

SEQ ID NO: 478675 - DNA, 483 bp, Homo sapiens
gtgtataatcagagaggcgtctctgcaatgattaaacaccaagggaaggctgccttcctagtccatgaccggcgctggagttttgggttcacggataaaacatgtctcttttgtctctaccagaaaatgaaaggaattgaaattaagagaagggagagattgaagtgtggcgccaagattgaaaggagaaagaggttgagggatagtgagggaggacccgaggtcgtaggtggatctttctcatggagcaaagagcaggaggacaggggattgatctgccaagggaggtcccccgatccgagtcacggcaccaaatttcatgtgtgtccgtgtgaagagaccaccaaacaggctttgtgtgagcaacatggctgtttatttcacctgggtgcaggtgggctgagtccgaaaagagagtcagccaagggagataaaggtggggccgttttgtaagatttagggtacttgtgcacaatgtgcaag

SEQ ID NO: 478676 - DNA, 4665 bp, Homo sapiens
gaaagagcaaagatggttaggtccctctcctcccatgtaattggcgatggggaaagggaacttccctgaccctcatcgcagtattaatcgccagattacaaatgcagacttgtggaagcatcagaaggatgtgtttttgagtgccatatccagtggagctgactctcccaacagcaaaaatggcaacatgcccatgtcgggcaacactggagagaatttcagaaagaacctcacagatgtcatcaaaaagtccatggtggaccatacgagcgctttctccacagaggaactgccacctcctgtccacttatcaaagccaggggaacacatggatgtgtatgtgcctgtggcctgtcacccaggctacttcgtcatccagccttggcaggagatacataagttggaagttctgatggaagagatgattctatattacagcgtgtctgaagagcgccacatagcagtggagaaagaccaagtgtatgctgcaaaagtggaaaataagtaggtccttggacaaagcattttattctactcctaagaaaaatgtgtaaaatgatgccagagtcttaatcttggcggggggacttcgaactgtactaatgggaattttgaatgtgaaacaaacacagtaatttttccgattttctagtatttaaaatgatgtcacttatcaaaaaatctattggccatattcctgttaaaacccaattatataactaaaatgaatgtttaaatattttttctatttttctattagaaaaatatttttattcagaaaataaccagattttttcatttaatgactttttattttaaaaataaaaatattatggaaaaattttaaaatataaaaaaagcataagaaattaaaatcaaccacccacacataacacttgttaaactacttatgtatttcctctaattttatatgtgcatatttatatagttggtatattattagtatgtataattttgtacctgcttttttcacctaacattatgtcatgaacatttttccatgtgataaaatttcttcaggaacctttataatggctattttaatcatgatatacagaattcctttttcccaatgaaatcataatttacttaccattctattttgttatgtaaggttttctctcctgtatttttcactattataaataatagtgaatgtaaatctttgcatttctgattatttatttacgggatagattcctagaagaaaagtcacttgttggaagatggcaagactcttgctttatgttgtcagctgcatcctggcatctgtgccatctttcataaggagcaacaatgcttatttcactactctttggccttggggctgtgagaacatactttctcttacatttctttagcgcttcagtgttttttctaatattttcacatttgggtccacaccctcctccccaaagccctgcaggatgtgctggtttcatccaagtgaagcccagacaccccactgtccactttccactcaggccatgaagccctgggaaatggcacaatgcccatcctgttcctttgccagcttgcttaggagaaatgaacaagcttatttatcaatgctgaacacaaagaacagtcacccctccccaacacacacacacacacacacacaccccaaaactcagtttaaaaggtcaaactgcttattttttatatgaaatgttttaattctttaagatagcaaacataggcatgtataaagttttgtcattttcatgggagaaaaaaactaatttttaactctcagtgaagcgtataaaagctctcatttcgaaaaacatacaatttgtatgtcataagcttttcttctctaaaaaaccatttctactgttgtgttatttataaccacaagcataaataggtttaattcagcttgtgtaggtttgcctcaatcagagctctttgtaagataattcaatcacagttaaaaaccaaactaatgttctggggggcagattgatgattaaaggtgaggagatcctccttggagtaaaggggttgggtaggaaggagaacacatcaactggagagctccaatatgagcccttgcactccccactctgccctccatggctttgaaccattctgccccaggactcttggactttagttaatttgtcccagataatcaagggatgttttgtatataaaaacagataatctgatttttttaaaacttcatgaactgaatcagtataaaatgtttagaacttctgtcttccttaagactcaggactatttactaaactttgttcccaactatggtaagttaagacttagaaattttagatacatatttttattacagcggtttccaaatctatcgcagcataagaacaacttggaaaacctattaaaaatgcagattcttcttccttaccccaggcattctgaatcagaatctttgcaggtggagctccagaatctgttgttaacaaattccaggtgatgccagtactgaattttagtaatctagtcaaaactgaagtcttcccttaagctattagttttgaaagttgaaaactaaatagaaatacaacacatcagttttctgggactctctcttcactgccctataccacttatttatggactaaaaacacagaccaccaccaatttgccctgtacaattttaagatgacgctgttggtggaaaccaagtgtttttacctccttttgtgcttacacaaattagcaacctacaccgaaagtgtttccacctgtgaaaatttctcttcagtttgatctgaagttcttatttatagtagcttgtcttcattttaataataatgatgataactatcatttgccaagtgcctattattagccaagtaatgtcccaggcactttccatgtattatttctgtaagtgaatttacattaaatattaaacatgagatgattgaggctcagagcttaaatgaagagcccaggtgggactctaattcaggtctatttggcccccaaaactcatgtacatactatgtatcctttctgtgtcccagttgtctctgggactcatggagtattgcttgctgcactttgagcctgtctgaaagtttctggagttccctcagaagcccccagttacagtgttgaaagctgacctttttgtttcggggtttctctgtagttcatcctatagcagctgcatgggtttcctatactaggtgtatatgggctggagaaacagtccattccagccagccccagtccagcagtgtgttgtggtacagggcttgctgttctggtgggcttctggctggcaaacctgttccagagaatgactgaccatgccacctgaactagaggccaatttccaccatttagcagcagagaccacctccatagacactttctttcagctgttaggaacaatcttcctttccttcatgtagtaatactttttaatcatgtatttgagactataggactttaaagtgatctttcattattaaccttgaagtctgggtttttctcattttaatgatgttgatgtagcttctgtaggggtaagtagattcctgtggatttccttctggtgccttgagctccagatctgaagccatactccacctccctcatactcctctaccttttccaggttctttattttaggtggtgggttgaatcttgtgttttgttctttttttaatgaccttgtcataattaaaattgcaaactttttttgtacaaaactgatttgatctgtccccagcgtgccttcctagtctgacttctcttccattcttccacacattccactctctaactatactggaaggtttgctctgctccaaaacactatgccctctccagtcctctgtgcttttcttctcaagcatttcttcatccccagctggtcctgcttgcctctctctttccatcgtccaagcatgtaccatatccaaacatgtggccatcttctgtccaccctccttcagtgaagggatcccctggctttgtcctggtcatcctccatggtgtttgtttcttctaattaatgatggttgacagtttatatgtctctttccttcactaactccaggggcttataaaagtctcttgaatgagcaaattctatcaaataagacagtggcaaagcagagaatagtaagctttggaaaaaggagcaggaaatgcttttaaaacttttttgaaaatatagttttaaattttgataaacataatttgcattaatttttctttttatcataaaatatttcttgcccttaaagcaggtactgagtttatgtgttttctcttcctttttaatttaatgtacatctaggtggcacagggtgcttttaaaaggaatcctgaccaatggactggtatctgtgtatgagctggattatggcaaacacgaattagtcaacataagaaaagtacagcccctagtggacatgttccgaaagctgcccttccaagcagtcacagctcaacttgcaggtaatttctgtggaatctgaactcatgctacaacaatgcaatattgtcattttatcctgggtacttagcaagtactgaatcattggcctcttgagtttaggtatgttgggtttttgtttttttgtgctaataatattgcaaccataatggaaataattttaatgatgtcttacagtcgtg

SEQ ID NO: 478677 - DNA, 856 bp, Homo sapiens
ccaaattttgtttctcaagaaaatgaatttctctaaagtcctcacaatgagaacgctcttttcaagggctattacaaatagtgctgctgcgaacattccttgccagaatcctcctgtccacgcgcacagcctgctgttggaagtgctgggtgatagagaaagcctaacctcaacttcggcagagataagcctgaactcttccaaagttatagtaccattgtacagtgcagtttcccatcttcaacaacacttgaagttacaaaaattgaaacactttagaaattctgatatcagctcattgagaacgggccatgatgacgatggcggttttgtcgagtggaagcgggggaagtgtggggaaaggaaagagaaatcagattgttgctgtgtctgtgtagaaagaagtagacatgggagactccattttgttctgtactaagaaaaattcttctgccttgcaaaaaataaataaataaataaataaataaataaataaataaaagtaatggaaacatttctaaagtcagtgaaatagaaaccttttcctaacctgtagacaatttgaggatttttccatttttttattagagaatgaaacaattattaaaaacataccagtttatttcacttaaacatttctgtgttgggatatttttatttcatcataagtgataaatcactggcattcagcactcctgaattttgaatcacttgttgtaaatactgagttttaaaaagctagagataattttgacatgtttaaaatgaaaaacttcaaatatttggtctctaccttcctctttctgttctcatttgtttctggatttttctcaaataaaaacaaacaaatgacatt

SEQ ID NO: 478678 - DNA, 1897 bp, Homo sapiens
tccctgtcttgggagcctttcttcagggagcttgatggttccaacccacccaggagcctgggacatctgtgcccctgggcaatcccctgcagtttcctgattccaagatgagggggtagaatccgaagatctccaaggccttgatgagtgctaccagtctgcaaattcccaagccaagacggctagcacaggccatcatcctggcccacgatgaagtacacagaggaggcgcttggggttcagaggcacgtgtggaactagaccgacgccactcaccccagcaggtggccaagcgggatgggagcgcgggtctccccatccccagcggtgacgggcggcggctctttcctgaagaatggggcggcgtccgcaacgggaaccgctggaggcgctccccgggaccctggcccgccctcgcccccgcgcatgcctggccgctgaggcgtgagagccgccgcccggggcctccccccgcgcgccttgcacaaccggcccaggtaagtgctgcgtctctgggcaattatcgccctcccgccgccggggctggccgcgcacagggcccacggccaaggcactcgcagccacccaaggagagctgcacggtctacgacggccgccagcgcgcgcgatttcacaaggcccgggagcggggacggggcggggcggcgggggcggtgacgtcacgcgcagccacgccccgcggttgccccgcccccgcgctgggccgggcctggggaggaagcgatgcgaggccacctgtccacctgcgccgcttcgtccttcctcctcctcctccctccctctccggcctctgcctggactgggccagtgggcctgtcagcaaggctacggtagaagacagccacgatgatgctgatgggggtgataacttggactgacacaaaacgcgtttctatagacattatctcattcttgttctcacaataatcctaggaggacctctggttcatgggacagttcacattctttgagcaagttctgtttcaatctctttgcaatatgttggtgtggaaataatttttagtatcacaggtaatcgtggaagatagttaatgttcaccaattatccaattctcttttacttctaagtatgtggatgcatatactcttctgtccccttgaaataaagcatggtcatgtgactatttttggctgataaatgtgattaaaaggagttgttcctatcttttggctattgtgaagactgctactatgaacattggtgtataggctttggtttagacacttgttttcaattatttgggatatatacctaggaatggaattgctgggtcatatgtaattgtatgtttaatgttttgaagaaccaccaaactgtcttccatagtggctgcatcttgttacattcccaccagcaaggtacaagggttccaatttctacatatccctgccaacacttgttatatcttcccgttttttggataatagccattctaatcgatatgaagtggtatctcattgtgttgcctttgtttctgaaagatacttttactgtgtgtgaagttctcggttgacatttttacattaaagattttttccccactgtcttctagcttgcattttcttccaataacaaatctgctgtcatctttatctttgttcccactgtatataatatgtgtctttctctgactactttttagatttttcctttatcatttgttttgaaatgtgccttggtgtcattcttttgtttggaattcactgggcttcttagatctttgcatgtatactttccaacttttgggaacttttgaccgttcgtttttaaacacatttgttgagatataatttatctaccatacaattcacccatttaaatgtacaattaactgtatattattatatgtgttga

SEQ ID NO: 478679 - DNA, 814 bp, Homo sapiens
attttggtaggcacactggggatacaatgctgaacaggatagccctcaatgagctcatagagcagtcagtgaagtgggcctggctgcccatcacttctcagtgcctcaccacaaagggaagaaacagtgctgggagaactgagggagagcagggaaggctccctgtaggaggtatctttgcttgcggagtgatcatgtgcaagtcacttatcctctccgaggctcagtctcctcatctggaaaatgcagatcagaatcacatctacttcatagggttgttttgcacattaagtgaagaagtgaatgctaagcccttcatgcagtgcttgctccacgagaagctaaactcggatgccccaaaacaggtgaagaatgaattgcatttaggcaagaattcgtcaatgccttggaatgtcataaagatcctgaagctgggagatgagtttacatttttcgtctgggttcgtatctgcaaatggaagtgaggcacaatggcagttatctgaataaatcagattaaataaaacacacacccacacaagaccaagaaactccttaatcattttcttcaatttgcatgatcttggacaagttccttttttctttttatattgtggtaaaatgcacaagataaaattcgccattttaaccattttaaagtggatgagtcattgtcattgagtacattcacaacgttgttcaaccatcaccactatttagagctgaaacattttcatgctttcttgggcatgaaagcttttgtgctttcgccccaatttgctttgttgggcaagttttttaacctctaagcctc

SEQ ID NO: 478680 - DNA, 978 bp, Homo sapiens
agcaaacggaacaccaggagattatatcccgcacctggctcggagagtcccatgcccacggagcctcgcttattgctagcacagcagtctgagatccaactgcaaggcagcagcgaggctgggggaggagcgcccaccattgatgaggcttgagtaggtaaacaaagtggcagggaagctcaaactgggtggagcccaccgcagcccaaggaggcctgcctgcctctgtagactccacctctgggggcagggcatagccaaacaaaaggcagcagaaacctctgcagacttaaatgtccctgtctgacagctttgaagagagtagtggttctcccagcatggagtttgagatctgagaacaaacacactacctcttcaagagggtccctgacccctgagtagcctacctgggaggcatcccctagtaggggcagactgatgcctcacacggctgggtacccctctgtgacgaagcttccagaggaacgatcaggcagcaacattggctgttcagcaatatttgctgttctgcagcttccgctgctgatatccaggcacacagggtctggagtggacctccagcaaactccaacagacctgcagctgagggtcctgttagaaggagaactaacaaacagaaaggacattcacaccaaaaccccatctgtatgtcaccatcatcaaagaccaaagctaaaggaggatgttcgagcccattgtgaagaagctaaaaatgttgaaaaaaggttggacgaatggctaactagaataaacagtgtagagaagtccttaaataacctgactgagctgaaaaccatggcacgagaactacgtgatgcatgcacaaggttcagtagccgatttgaacaagtgaaagaaagggtatcagtgattgaagatcagatgaatgaaatgaagtgataagagaagtttagagaaaaaagagtaaaaagaaacgaacggaacgtccaagaaata

SEQ ID NO: 478681 - DNA, 1116 bp, Homo sapiens
ggacgccaccaaatctaggacacaacccagcaattgtttactgagggtcaagtaattttctgggtactagcaaagtaccacacagggtctctagtcttcccaaccatgctgcaaaggttcttcctcttctcttggtctagtgtccttctggatgagttgggaaagtagaacactgggcaggaggtggaagacgggagggtactctctcaatgtggtttctgcaatacaagcaggccttccaccctgcccagatccacaacgcttctacgccagcattttgcgttaagaaaaagtctcctctggtatccctgccttgtgtctacagacctcaagaggcaaaaagggaaaaggagaatagaactgtcctaaaacgtacatcaagcacctggcccatagaaggcgctcagcaggtgatagtaggtcttccgcacctaagtcaacaaaaactgttcatcttcaaagtggaatgcagcatttcagaaggcgtgccagccagcaaagggttcaccacacggggcatcccacaaacatccacagtgactgggaatttcagtcctgccttgccaccctattgcctgctgcgaactcttggcccgctcaaatgtgattccattaggggaggatttccagacaccggcatgtaaagaagcaccagttgccgttttctccttaataaccttttcatctcagagaatggctccccatcccctcagtcatctcctgtccaagttaataattgtagttcttttcatgtttctccattagtcctgtttctcaactcttaaaatcactaccttcaaaccatttccaaattccctgcatccctatgaacctgctttatatcttaaaaagtatatagaaatgtactgagtaaacatatggacagggcggctgtgtaggtactaatacactccatctcgtcatggacttcgccaagatttcttctgaaggaaatgttcaaaaatggagagtagtgaaaatagagaaaatgctacttgcattttctcaattatttgctattttggagtcaggggatgagggagacctactaataaatcataatggtaaaattaataataatagtatttgatatgtatgatgttcagggctccagct

SEQ ID NO: 478682 - DNA, 691 bp, Homo sapiens
gaacaactccagatatgccacctaaagagctcttcactcctgaagccagagagaccccgaacccaccgcgaggaacaaacaactccagatgcgctgccttaagagctgtaacactcaccacggtctgcagcttcactactgagccagcaagaccaagaacccgccagaaggaagaaactccgaacacatccgaacatcagaaggaacaaactacggacacgccgcctttaagaactgtaacactcactgtgagggtccgcggcttcattcttgaagtcagtgagaccaggagcccaccaattccggacacaatatcatctaggaaggcaaaatatattgaattaactcaggttgttctgggagaagcattcctatacatcaacagccaaactgagacccaaatgagaaaaacaatcccatttgcaactgccacaaaaagaataaaatacctaggaatatggctaaccaaggaggggaaagatattttcaatgagaactataaaacactcctcaaagaaatcagagaagacaaagacacggaaaaactttccatgctcctggacaggaagaatcaatatcactaaacggctacgttggccaaagcaacttacagattcaatgctattcctatcacactactaacaatattcttcacagaatcagaaaaaaatattttaaaatgcatatggaa

SEQ ID NO: 478683 - DNA, 827 bp, Homo sapiens
acagcagtatctaggacaaatatccacccgttccggcctcacaaagtgccaggattacagcgtgagccaccatgctcggcctctcctctcctctcctctcctctgctctctctcctctcctctcctctcctcccctccactcctctcttctcccctcccctcctctccactcccctctcctctctcctcccctctcctctctcctcccctctccactctcctctcccctcccctcccctctcccctcccctccgctctcctctcctctcccctctcccctctcctttcctctctcctctctcctctcctcccctcccctccccctccttctctctcctttctttcttttcttttcttttttcttttcttttctttttctttttcttttcggctatggcagctggcactgaagtgctcagggatccaagacctgtgggaccctatatgggcttgagcagtgcctctgcacagactccaggtggctctctgtgttgctctggaggctcatggtggccttgggaagcagtgcccctgtggctccactgggtacaggccctgcagctgctttctcaggctggaattaagtacctgcagcttttccaggcacatgatgcaagctgtcagtggatctgcctttctgatggtggccctattctcacaggtccactaggcagtgtctcaatggggactctgtgtggggcctcaaatcccacatttcccttccacattgccctagtagaagttcttcatgagggctccatccctgcagcagacttatgcctggacatccaggtatttccatacattctttgaaatctaggcagagg

SEQ ID NO: 478684 - DNA, 687 bp, Homo sapiens
tgacacatgggaattatgggagctacaattcaggatgagatttggcttgtcaccaaaggtattgtcctaaataagaaaacagtgatgcaaggtggccttagttccaaagaatgttacagatttaaattcttcagcagattaagagagcagacaatcatttatactggaactggcaggcaaggttttatggagggcagtaatgcccctgtgtgcactttggaggcctattttccaggactttactgcatagcagctgctacctgggttacttgtgatcctgatagaagtgagtcccggaaaggaacagacagacgggaaacaggtggacaggttgtgaatgtagcaatgggaagaaagagaaacaacagcagcagcaactacacactgagtacttatgccaatacactaagcccttcatttacattatgttaggtgttcttacaaaaaattacctgaataggtattattattacacctactttacaggtgaagaaaggaaaattcaagatggctaggtaactttctaatgtcataccagattgcaaaatatgtcacttagaaaaacaaaacaaagctaatagtaaaacaaaaaagttaccagtcctagagcctatacatgtacttgcaaatatgaaaaaaagcttaaaaatttaaaatcctgtagaatcaaaatgaaaatgtaaatta

SEQ ID NO: 478685 - DNA, 509 bp, Homo sapiens
gtaaaaccaacaagttttattagtgattttcaaacggggagggagtgtatgaatagggtgtgggtcacagagatcacgtgcttcacaagacatggggagcagcaagtgcgaaacccctgggttgagaatgattctggaatgctggatgaaaagcaggaggcttatgtggcagatggagtaagtgaggtggatccctctagctcaggacccagagaggtggtgactcaccagagtgtgccatcttggtgggcactgtacttcacctgctgctcactgagtccgctgaaagcaaagcatgacctttcagctgcctccagtcaatctgattttgcagagggatctaatgattttgtctgcagcaggaggattgaacagggattggcaaatgatagcccatggaccaaatctagcccaatgtttttataaataaagtgttattgaaaaaaaccacacctatttattaacatactttctatggctacattcatgaacaaccacaaggttgagtc

SEQ ID NO: 478686 - DNA, 753 bp, Homo sapiens
gtgggcgcagcttcagccgatttaaatgtccctgcctgacagccctgaagagagcagcggatctctcagcacagcatttgagggacagactgcctcctcaagtgggtccctggcccccatgtatcctgactgggagacacctcacagcagggttcgacagacacttcataaaaaagagctccagctggcatctggcaggtgcccctctggggtgaagcttccagaggaaggaacaggcagaaatctttgctgttctgcagcctccgctagtgatacccaggcaaaaagggtctggagcggacctccagcaaactccagcagacctgcagcagaggaatgcctcttctcctccaaaggatcacaactcctcaccagcaagggaacaaaactgtggttaataaaaaactcctctgagctaaaggagcatgttctaacccaacgcaagaaagctaagaaccttgaaaaaaggttagacgaattgctaactagaataaccagtttagagaagaacataaatgacctgatggagctgagaaatgcacagtacgagaactttgtgatgcatacacaagtatcaatagctgaatcgaccaagcggaagaaaggatatcaaagatcgaagatcaactcaatgaaagtgagaagattagagaaaaaagagtgaaaagaaacaaacaaagcctccaagaaatatgggactatgtgaaaagaccaaatgtatgtttgattggtgtacctgaaagagatgagagg

SEQ ID NO: 478687 - DNA, 602 bp, Homo sapiens
gcgggtcagccacttctcagccaggtccagccgcaggtgtcgatggtctctagcatttggtatgtttttgcagcagctggtactgattgttcctttccatgtttagtgcttccttcaggagcttttgttggggaagttcttctggatactatcctgaagagtgttttccaacctggttccattctccccttcactatcaggtacaccaatcaaacagatgccctgcccagagaggaggaatctggagaggcagtctggctatggcggctttgcgaagctacattggactccacccagttcaaacttctcagctgctttgtttatactgtgaggggaaaactgcctactcaagcctcagtaatggcggacaaccctccccccaccaagctccagtgccccaggtcaacctcagactgctgtgctggcagtgagaatttcaagccaggggatcttagcttgctggactccatgggggtgggatccactgagctagaccacttggctccctggcttcagccccctttccaggggagtgaatggtttggtctcactggtattccaggtgccactggggtatgaaaaaaaactactggagctagctc

SEQ ID NO: 478688 - DNA, 605 bp, Homo sapiens
tttccgaggctggagtgcaatggcatgattttggctcaccacaacctctgcctcccgggtgttaacgaagttctggcagcttgtctgtgcaggctactcaacaaggcagacaaccttcagaaggaagatactcgctgtcaggttcatccagctataattggagtatatattgactttggagagattgaatttaacaaatgtacactaagaatgatagctgacactaattcaatgagcagaaggttaaatccgatcataattcctgagaaatgtgctctcctgaagaaaaatcagaaatacattgatagtggaagatttatggacagaaaagaggaaattgatgtacagaaaatcgaagtgagggacatcccttttaccaacttggcaaagactaaaaatacagagcatccaggatcaaagcgtattcgtgatgcgaagaactatcccctgacaatcaggctggaagaaggagcatggtttttatttgaatatgccaagaagatacagagtaattgacagtctgatttatttatttatttatttatttatttatttatttatttattatactttaagttctagggtacatgtgtacaacgtgcagg

SEQ ID NO: 478689 - DNA, 517 bp, Homo sapiens
gttcccttttctccacatcctcaccagcattcattagtgcctgtgttttggatataagccattttaactgggcatcaacaatggcggatgcccctcccccagccaggctgcagcctcgcaagttgatctcagactactgtgctagcagtgagcaaggctctgtgggcatgggacccgacgagccaggcatgggagaaaatctcctggtctgctggttgctaagaccatgggaaaagcacagtatttgggcagaagtgtcccatttttccaggatggtgaggtctcccaggccccagggaggtccagaggtaccatccaggagtcggggactagagtcaaaaaccttagaactctacctggtgttctgttatactgccactgagctgacactcaagctaaaagatgatagcactgagttcatggcctcacaatttctgtgctctctgcaccatactgctgctgcaggggtcggggaggggtggcagttcagataaattgttgtccttgtgtagggaac

SEQ ID NO: 478690 - DNA, 784 bp, Homo sapiens
tatcccatctggggcaccgaaatgtgtctggaattggttccttccggtgggttcttggtcttgctgacttcaagaatgaagccgcggaccctcatggctatagctgccatagatagtgattcctctgatggatctgggcaaagtaaattgaaaacctgctggaaaggattcataattctagattccattaagaacatttgtgttaggaatgtggcaagtcatttacttcttccagtgtccttcaaggccatgaaaggactcatactgaagaacctgaggaatgtaagaaatgtggtgaagccttcggttgttccagttccctttgaaagcatgaaatttcttatatgtggttttaaaaaaccctatgaatgtaagaaatgtgttaaagctttcagatgttctaatttcactagaacacatgaaaaaactcacactggagaaaaacccaacaaatataaggaatatgagaatgtatgcaatttccccagttccctttaaaaacagaagaacctatactaggaagaaaacctcataaatgcacaaaagtggtaaagcattccattttccctgttgctttcaggtacatacaagaattcacaatagagatataccttgtaattttcagaaatgtggtaaagcctttagtttttttatttttcttgaaatcatggaaggacttagtggagaaaagccgtatgaatgtaaacatttgaaaaactctcttcaattttcttaatattcaaatagtattttaaaatgtttacgacagatggaactgcccctc

SEQ ID NO: 478691 - DNA, 569 bp, Homo sapiens
ctgctgatagtatcgacaatgttttattcttctataaagcaatttgtggtaaaagccaaaaaaagaatcatacttttttccgtagatgttgcaccatgttacaatctcaccaacagtgtacaagggttccgccttccctacatctctgctaataccggttattttctgtttttaaattgtagtcaccctaatgggtatgaggaaatacctcattgtggtttgatttgcatttctcttatgattagtgatgttgagcatcttttcttattggccatttgtacatcatctttggagaaatgtctccttaagtcttttgcccatttttattttttatttttaaattttatttcaatactttctggggtacaagaggtttttggttacatggattacattaaaatcatagacaagaatttagagataaaaattcacaaggaaaaatagaatgagagggagacaacttatttattaatgttgcaattgttattttgggcatttttgttttaaatttagagttgccatacttagtgagactgggagacaagcattatttttggatgaatttaagc

SEQ ID NO: 478692 - DNA, 474 bp, Homo sapiens
cgggcacctctggcggacacagagcacccaccatcttaaaatgagcttcaatcaagaggaagaaggaaaattgcttaagtcagacccgacagctaaaggacagttactgcccttcaatacccctgccacactccacagcccacagccaatgactgatgaaccctggatgcaaaagggttccctgtctggtgacgagctgacggaggggtgtgggacccgtggaaggtggactggactccttttcttgggtctactgcagcttgttggaggtgtggataaggcatttagggtctttggtccttcatttgtccaagggtggcaagagaagctccactgcagaggcagtggccaagaggctttcagttgcctctggaggctctgtccagggagttgccaagttggtactggcttgatagctctggtagggggtggctggaggcccaagcccggaggccctgcttggtgaggaaatac

SEQ ID NO: 478693 - DNA, 962 bp, Homo sapiens
tgctgagagctgcagaccacagctgcagaagtctgctgcaggggcagagccctcatggagaacctttatgagggcaatgtggaaaggaaacacagggttggagcccctacacagagtccccactggggcagtgcctagtggagttgtgagaagagggccaccatcctctagatcccagaatggtagatccattaacagcttgcacaatgtgcctggaaaagctgcaggcactcaacgccagttcatgaaagcagctgcaagggctgtacccctcaaagccataggggtagagctgcccaaggacttgggagcccaccccttgcatccgtgtgtcctgaatgtgagtcatagagtcaaaggagattatttgggagctttaagatttaatgacagggttttggactttcatggggcctgtagcccctttgtttcagtcaatggagctccttttgggacaggagcacttatccaatgcctgtacttccattgtatcttggaaaagcagaaacctgtacaacccgtggaactgtgaaatttctttgtaaattacccagtctcagatatatctttatagcagtgtgaactaatacataagtgtaaaagaggggaaaagtccatttatattggtatttatggttctgtaaataagaagttacatgaggctaagagctgttgctttctttccttgacgaaagactttttctacccatctatttaagctcatgcatgttaaataaagaaaaataattagcttctgtgtgaatatgttcagcatattaatctaattatgttcggaagaacgtcatgtgagttttgagttaattattagccaacaatatatgtcaattcttaatatttaaactattattcatttgcaaatgattataagcaaaaaagttagttattattgctcaaaaggcaatattaaaaagaaagtacattattatttataaagttctatt

SEQ ID NO: 478694 - DNA, 614 bp, Homo sapiens
agccattctaactgggggtcatgggtgtaggcttgggtaaatgggcaaattcaagaggtattctgaggcacaacagaaatgcttcacagccaatcggctgtggagggtgtatgagaggagaagccaagattatttacactcttttgacaactggccctcctaaaaatcctccaacaacctcagtccgtcatgaacaagtcacagatccacagtgcagagtctggactagtgctgaccttgacagtgatggacaccctgtgatctggacttggctctccatcacaacaatcccaggtctatttactgtaagaccaatttacagactaaagggcttaacttttctgtccacgcaggtagaaatttctgagtattccaggcaggctggtattgaggcttaccacaggagtcagaagttatttttccacctggaatgcacttcaatttttccacatggactactccctgatttcctcaccactgccacaaaggacattgatagttacattcaaactgacatacaaaattaaacatctaagagatgccaggatagttaccaaaactttaacacttgaatcagtaggccaagtaaagatctgctgttaccagtgtgggtg

SEQ ID NO: 478695 - DNA, 660 bp, Homo sapiens
tattagtgataaaaagggatcaaactcgtatggctctttatggtttgggatgcccaatttatcactgatactgtgggttgtaaggctgcttctaagctgattttaattgactgctcctgccctgggacagaccaaaacagttttgattccaacgtggtctctgtggcagccgaacaaagcattcaaaatgctcagtgggagggatcaagtgccatgctagcaagacctgatgcaaaaatcatttccccaacatgccagttggcaaaggcaccagagaggacttgtgccagtgactctggaaatccaacctgctataagcagccctgttttactgcagaagatgattcctgccccaggttgaatgggtacaacctcatggaaatgtcggtgcctttaacccgaaggcacttaaaagctaggaaaatggcaatctaccctgaaatacactgtcctaaacacagcaagagaccacaatgactggtctcatttaaattctttaacactttcttggcattctgtagagatgcttcctaaatctcaaagcactttgctaaatctatattcctatctactattccaacaataattttttaaaagtagaggctagatattgaatgaccacatcatgtcaactgcctgatgagtcagtattatattagc

SEQ ID NO: 478696 - DNA, 681 bp, Homo sapiens
agcacggcaataggcacctgatagatgaagcgaggcaattggtataaaagcataacttcctttttcctattacactggctaatttatgaagaaaaaaggtttgattggctcatcgttctgcaggctgtgcaggaaccatgcctggggagccctcaggaaacttacaatcatggcaatagacaaaggggaagccagcacctcgtatcatatgaccctctccacagagctatgctttcaaggctccaggaaccgttccttacccttgccctatcaggccttgcggtgactgtcccatttcctgccagaatcctgacaatcaccgtctccagaagctcaatggagaggtccattggtatacaaggaaacgaggccctcagtttaatcacctacaaggaactgaggcttgacagcaaccacagtgttgctaaagctcaagagagaataagaaataaaatgccttaaattaaatatacaagttacgtaatatatattagtgttctttgaaagttttaaacttgcagaatattaaaatgtcagtgaacctaatcaaagacttctacaataagatcccttggcagggatttggttttcagtgttttctttctatatctcctaacgagaaaggcacacttctccttattgagttagatctttttaaatttaattgaaaattaaatttcc

SEQ ID NO: 478697 - DNA, 841 bp, Homo sapiens
ctagttgtgctacttccgagcgggtggggcacacggtcatggctgctgtcattccaggagaactctactacgcacgaagagataaagactatctgcaacatattcattggggaacagatgtcacagatcagatgtctctctattatcttcctcctcaagaggggtttggtcataaagaatatcaagaccaggaaaaggggacacaggtgaccatgcacacagtgaggctgattatgtgcatagaaaccaagagccttatgttccagagggcagtgccagctccttttctgctgctgcctcctggagctcctgtctgtcctctgagctcctgcagaagccttcctctatcgccactgccaaaccaccaaccccagactggggcagtacatttgcttttgataccctggagtgtaggaggaccacttagacttggcattgtaagccccatggttgtgtggccctaaacaagtcatggtgatgacaacaccagccctgctcctagttcaccaccttctgcttccacactggaacgccaattattcttaggtttcgtcatttaacataatcccaaacttcttggaggctttgttcattttttaaaaattctttcctctttgtctttgaatggactaagaagttgcttttgttttttatttatgctatctatttcactgaagagttttcccttcacatcttatatcatttttcaaatttctttgagttggactttacctttctctggtgactacctgattagcataataattgacatttttgaattctctttctggcaattcagatttcttctcggtttggatccattgctgatcttttgggggtg

SEQ ID NO: 478698 - DNA, 3376 bp, Homo sapiens
ctgcttccgctatcaccatcatcatcatcatcatcatcatcatcccagttcttgttatctatagtatgatgccaacttcaggccactccaccgcatggctgctgccgtttgctgggggtctgctacagagcccagttgcctcagtttctcccatacctggagagagagatcaaagctctgtctgtagaatcctggctggactggctgaagcccctgcagggaggtcttgccaagtgaggaggaatggatcagggtcctccttaaagaggcagtctggtgatgatctggcaaggcagctgtgctgtgttgtgagggagccttcctcatccagaccatctgtgttatccacagccagcaggctggagcagaaattggtagagtttcaaaatagccaataccacagacccacaaaggagcattatgtagactgtttatcctacaaagttaccataaccactgccatcattgcttggtatagatctgcagaaccgaaagaaaagaaaaatgggtagcctgctatgttaactctttgctgcacaataatccactcgcgttactttttgtacacggtatgagataaagttctgatttaatctttttgcatgaggatatctaactgttccagaattattcattgaaaaaagtatccttacctactgaactgcttaagcacctttgagaaaatcaattgaccataaatttaaggattttttcggaattccaattctaggccattgatatatatgtttacacttttgtcagtatcatatttgattactgcattatattttcttaatcatctcttactgagagaagtcactttctctgttgtaagctcccaatgccccatgttgctttatcatagaatttgtctccacttgtaattatataatttgggaataattaattcaaacaaacactttgttattacttcacattgtatcactaatatctagtaaagtacccacaatgtgatgggcattcagtaaacattgtaaaatgtatgaatatatgagtcatggaccaagaagcgaaagatactttagcagtattttgaggtatctgataagttctaagagatgtgataaggcatattctggaaacttccagtattttcacatgtctgtgccattaagtttaggttggactgttgccagaaataaagctataattttagataggtattccttaatgaacctactatgtcatagtaagtagtattattgtatcctggttatttccagttattcaagcttggatattttagtcattactattttctctcttttaaatttcaaacttaactatttagcagtctttcaattatttttgctctacaatgttccttctataattatagtttatatttgcattattatagtcttctgctgttgtttcaaatttattgtctttacctttagattcttctacatcaatccttgtgtcatatgtaaaggtaaaagatttttttaaaaagggcaaaaacacttcagaaaacactaatagcatggtttgattgttgggtgagatgcatacaatggaaagtgtgaggcctgacagagatccaagtgacaacttaatcttgtcctccttagaagtttttatgaatcatacaaactatgaaggaaaaagtgaaatattttaggcaaaataactgtagtaaaaaatttttcactttcaggtataggaatattccaacagtataagtaattaatttaaaatagtgaagttaatagagaagtctgacgggaattattataacctgcctcggtttccttatctttcctgaattaatgtttgcagaatgctttaaacagagtttgatgctcaggaaagccttgacaatatcttctattattattcctatatgatatttgtattactgaagataatgtaaattactcaaagtttcttcctcaacaatgagtatggtgcattataagtaatgagctaatattagtgtctattccactttagctgcaattcaaaaccccaaatgttgtgaaaaccaaagagtaatttttgtcattcatttgatagccaaatttgacctaaaccaatatctggctacttccagtctttacttatccctctcagtgtaaaaattcatgtgtttcactgtaggaatataaattttaaaaataaaagatggtgtcacattatctgtcaaattaaactcatgattgtgtttttattttaaattatgtacataaactatatcttaagaaaaacagtcatttcctttttgttatttttatgttattttccttctctttgcaaataccttgaatacaaggaagatcatgtttagcataaaaatcccaagtttaacacccaaaaagcaaaatactcattaaatataccagcagtaataggcttatatgcattgctactttctggatttcaatggaagggttttggatgacgtttttaaacatgaagtgatttgattagaaagtcaatgaatatagctcttgaattctataaaatgcatgtatatgcagctataaattttactctgagcatgggttttactaaaactctacatttttacaagttgtttattccttttactttgtctgaagacattttctaaaatcttttgtgagttctcacatatgttaatccttcttttacacatttgcctaggtagtcaacattttggtcaacaacagattgcatataagatagtgttcccataaaaataaacaaggttacttcaaaaagtgtgtagataaatggaattaaaatataagcatataaatataaactttatttcttaatgtaagcttcaccaagataaagacacttatgtaagggatgatacagaccatttagtccaattctaaagaagtgaagatctttggaatttaaacatatcaatgaagtctttcttcattattaactgaagaaaaacaggtgggctttaaagatttttttaacattaggaaaagaaaataatacagaaggagccaaatcaggaccttaagttggatttctggtgttttctcatagaaactcacacaaaattgctttatttcataagttgaataagcaggaacattgttattgttgagaaggactctggttaagcgttcctggacatttgttttttactaaagctttagctaactttttcataataagtacatattatcattctttgaccctccagaaattcaacagtaaaatgtctagcacatcagcaaaactgttgccatgatctttgcttttgacccatctgatatgctttgattggaccatttccatctcttggtagccattgctttgattgtgctttgttttcaggatcacactaataaagccatgtttcatctcctgttataatctttaaaaaagtttttcagtcttgatt

SEQ ID NO: 478699 - DNA, 905 bp, Homo sapiens
tttgttttgttatgatttagcgaagggactggtagcattttgcctctgccctagagatgtgtggaacttggaactttgaacttgagagggatgatttagggtatcagaggagctgtgagaagagggccaccatcctccagtccccagaatgtagatccaccaacagcttgcactgtgtaactgaaaaagcctcaggtactcaatgccagcccatgattgtggcagtagggcctgaatcctgcaaagccacaggaatggagctgctcaaggccgtgggagcccactctttgcgtcagcatgccctggatgtgagacatggagttaaagaagattattttggtgctttaagatttaatgactaccctgctggattttggacttgcatggggcttgtagcctctttgtttcggccaacttctctcattcggaatgggaacatttgtctaatgcctacacatacacatccagagaaaagcaatggaaagaaatacaccgaagaagttgtgagtggttatcactagataatgagaaaacggaacatttctgagtatggctttatactttattttctaattttatcctgtgtacataagcaatgaaatttgcttaaaatattatttatcctttggcttaaatattcttaatagagttgttatttctgaataaactaaggaaaattttctttatgtttgatagcactgagacggcaagcatctttatttgattgtaagagccaagggcaaagaccagtctctgtattctcagtaaaaggcctcaggcatatcagcccgttggctcttgcctatgaccaatcccaataagctcagatttcatctttgttttcaggcaccttgttctgataccaactcatgagattagttgtataattgttatttctacctctc

SEQ ID NO: 478700 - DNA, 728 bp, Homo sapiens
tgtgaactcagtgaactgcagcttctgcctccttatgacatgggtggattaaaatttaagcttcaccaacttcttgcttttgtgatggcaaaagatcttaactacagtgaaccctgttttctttatttgcaaaatttacatattacccactttacaagagaggaagaagacattacaactgataccacagaaattcaaagaataattcgatactattatcagcaactatatgacaataaattgaaaaacctagaagaaatggatacatttctagacatatccaatctacctagattgaaccatgaagaaatccaaaacctgaatagacaaatagaaactaacaagatagaagctgtaataaaaagtcttcaatcaaagaaaagtcaaggacctgatggaaccacagctgaaaaataattaatatcaatcatactcaaactattataaaaaaatgaggaggtgggaatacttccaaattcattctatgaggccagtatcactttgattttaaaaccagacaggcacaacaaaaaagaaaactatgggtcaatatctcctgaacatagatgcaaacatctttaataaaatactagtaaatcaaattcaacaatacattaagatgatcattcattgtaatcaagtgggatgcattccagtttctaatcatgaacatgcttgataaatgtttgttgcatgattaaaccaagtaaagaagcttcatcctagtc

SEQ ID NO: 478701 - DNA, 567 bp, Homo sapiens
ggatgcttcagagctatttcatacttaacaggtcccaacatgaaggctgcatatttcttgccaaacctgcccgtcccctgtgtcttcctcatctcagtaaaagaactattttcctccagttgttcaggagagaaaacttggaggcatcttcagctcatccgttcctgtcagacattgccaatttctatcagctcaggattcaaaacacagcagatgctgaccatgctctgtgcccatggtggtgatgccttggttgaagaaaagaccaaatatgcactcctgcagtcagtggtctgtgttgcttccatgtcgtctctctctctctgcatacacccaacaggcccccactcattacacacaatcaggctaaaacgagatggcaaaatcattccaggctctgggcttgtcctgccagtgacctccgtagttgcattccagcaggaggtaactgaaggctctgccccgaggccagcgatggtccttggttactgtccagcactgttggcctcttactcccaaagagcagtcatgtgcctgctacggatttgaatcatctcccatgatgca

SEQ ID NO: 478702 - DNA, 897 bp, Homo sapiens
tttttttttttatggcgttagcaaaatggagaagtactgtctgaaaaataacataactttcaaaattttacttactgctgataatgctcttgcacatgctcctcttattggtgatctttattccaatatcaaaggtgatgtcaccaaggagtatataaatggtacctggaagaagacattcaaaagtttcaaccatgatgtcaaaggatttgtaaaggatgaggaggttacaaaaatcaacaaggctgtggttgagatgacaaacaacttaaacctgggtgtgtgtgaggatgatattgaagagctcctagagatgattcatgaggaactgactaacaagaagttgttggaactgcaagaggaacagatagctgaagaagaggcaagaggaaagataattacaggagaagcagctgctgccatcctagatcctgatccagatccttcccctgctcacattatgcctcctccttacaatcctgattcttgggaaccatcccatgagcctgttacttctcagccccagtacccttccctaaaaggactccaacatgatatagaacaatggagaaatgctatccaaaatttcccatttccctctacatctaaggagtcagccccaactctcttccccttaaaggaggtgccacaagaatggggagctattggctttgtgaatgctcccttaaccagtttggagatccaaactttgacgaaggaacttaagccattgtttgatgacccttatgggtggcagatcaagttgatcaattcttgggacctcaattatacacttgcgttgagttaatgtccatcctaggcatcctcttttcgggggaagaaagaagcatgatccataagcctgctatggtaatttgggaacatgaacaccctccc

SEQ ID NO: 478703 - DNA, 668 bp, Homo sapiens
agacctactttgagccgcttctacagcatgggagccaacttggctggcacagacctcatagggacttttgaaatgcattttattaatccctcatcctcttcaccccctttcctctcttctccttctaagccttcttctaatcaaactgctatcccctctatacccaatgataagactaaggtagatattgtagaagtaaatgatttaaggcaaactttagcaattgaaacaggatatcaagatgcaaattcctggttggaatggatcaaatattctgtccacatgttaaacaaaagcaattgttatgcttgtgtgcacggccagccagaggcccagattgtcctctttccacttggatggattctacagcttgggacaataaataatgccaagctctctttctgctctatcctgaaatccaacaccctgcgggtcagcccccgaaggccatccagcttccatctcccaacgtcaatttcaccttgtgtctctcacaacaaggggaaaacttggcattccttggaagcttaacaggatgcaaatttctcagggtctttagtatttgaatatgcaaggtttattctgattggtgctctggttggccagcaatcattactttactttaaggaggattttagtcagttccatggatgctctggcaaactcac

SEQ ID NO: 478704 - DNA, 1029 bp, Homo sapiens
ctgacatgccctggagacattttccccattgcctcacaatcatggcagaaggcaaggaggagcaagtcacatcatatgtggatggtggcaggcaaagacagagagcttgtgcaggaaaactccaccttacaataaccatcagatacatgagatgtattcactaccatgagaacagcacagaaaacacctgccctcgtggagggacagacccgattctcccactgggtccctcccacaacacatgcgaattcaagatgagatttgactggggaaacagccaaaccttatcacctccaaattataaagggaaattttccaactgtggaataagaaaagatgatagaaagaaaggtgtcttaagaaaaatagacttcctagtggcactttgccagacatgtttctatctgattcagttttcaatagctagacaaacagtcctttcctggatcctgagaagagggattgtcaatacccaaagatcaaaaacagcttgcccataaatctatataaagtatagtcagtgtggctacaaggcagtatagttaaattagaaagccctgaaaagtattttgtatattaagatagaaatttttaactagtaaccaaaacagcagattttaaaacagtatgcatacaatgattaaatttttatgacatgtattagtgtgtgaatatgtatatttataaaaaggaaaaagtcttcaaatctatactccaaaatatgtacaaaggttacttctgtgtgagaggtgtatgttatttttatgttctttcctgcttatctgaatattctactttttcttcactaatcatggttttaaataatttttaaaactaaatcaatcgaagggttccctttataattttagtgcagggtaaaggattgtgccagaccatctttgtctgtacttgtgtttccagaaagtgaattagcctgcagcatattcaaatgcataccaggtgagtagtgccataacaggattcctctctaattcctgatgttttattttcccctatttaattttccag

SEQ ID NO: 478705 - DNA, 3891 bp, Homo sapiens
gttgtcgttactgataagaaactacatttcccagaatgcagtgagggtagcgaccgggctacacaggtgatgaaggggggaactgcatcctgggatccgcagtttcgcctgtccacccgccaaatcctaagagtggctgagcgcagttattggggagtggtagtagaaacagggtttcaccatgttggccatgctggtctcgaactccagaactcaagtgatccgtccgcctcggtcttccaaactgctgggattacaggcgtgagccaccgcgcccagcctttggggaagttctttttaccgtccatcatccattgccaccacaccttctgcttacgagttatttataataagtttaactaaaagagaacgagagaacatcccctgaaacccaaagtttgtcattctatacagctttcctgcctgcaaaagaggaggagcagactcatccagcaaatcacctaaaaagtttgaagatcaaaaagcctagctccagtttcagatccttcccctacctttctgaacactagtttcttcctctgaaaaacgaaagagggaacgggaccgtagagtggagtgggcacaagaatcgcaagtcccttctggctatgacgctgcaagactctaggtacagtttaggactccgggcattcagatccccgggacttgtcaagttctcctcattgacatttttgatatttcgtgacaacacaaattcatcacatttttgtgctgtgtgttatatgtgggaaggagattttaaaaagattgccttttgaagttattggatagctgtgttacagaagaaaacattgccttcaagaagttattggatagatatgttacagaagaaaagacgtttgtttcatttttgactttgcaggaaaagaatatgtaacacatcagaattcttctctcctccctggccttagtcgagtacctgaggggcattaaagcacttcctccttgcaatcacttacccagcatagtccttaatacagatatcttcattctctagcaaaagtcttggtcactcgttgacctgacttgactcatgcaatctactctgaaaatgtcactagagtcaggcccagaggatccggacttaagggacaactgtaggattcgtgtggctcatctcacttccaggcacaaagaagccacaccagatatcccagataatgccctcccagtgactcctctcagaaggcccgtgcctcctccccagtgccgagcctcctcagcagggctttgtcctattgatgacattcttctctttcacatttatttactctccttggatgacatcatcatcactcatagctactacattcacactgatgaccaccaaatccaaatttccagtccaacatgtaaacgaattccccgagtcatgagaagtagaagagagttgggctatgacagccttctgtgtcatgagcaagaatccagatatgtcttcagggggtgataacgagcaagtcaaagcttttaagcatagaattaacacaatcatgtttgtgtattagaaaaatcactctgaaagttgtggaaggaggaagtttggcctgcagaatagtactgattaagagcttttaatctttcaatcagtggacaagcaaaagtttccatttgttctatttcaaaagaaattattgctttgcaaagtagatttacatcttaataagactgtcggtggataaggttaatctgctctaaaaacaagtttttgggatcaggttctaggttttggtcagctttgtcaccccgatggactgccatgcctacagcagatccccaacaaatattgctcaattgaaatacttcatcaaatagattatttgtgtgaagatagatagtgttaaccataaatgaacctcatctttttattgcatcaagctaaaaatacttatttaatagttccagctaccaaatacggagtacttgaaagacacgatatcatactgaaattatttctacaatttaggtttattgctagtcagactgactctccttaataaaataatttttctataagtcttaaagaagggtgtcaaattaatatttaaaataatttcactcattcttttttaaaaaaggttcatgaaataacgcttttcttgttgaaagagaagagagctgtcagctctgttagagtcagtaagaaggaacaatcctttcttggtattgttgttgatgttggtattgagttgtcactgccttacagacttacctaaggattgtaatagtaaaaaaaggattataagaaaacttacattacttggttatattatttgtatatggtctggtggctcaaatatatatcagtcattaatgataaccaaaaacctatggctcaaatatacgtcagtcattaatgacaacaaaaatctaactcactctgacacagatataaatggatatggacttttggggggctgtgagtacaatgtggtcggaactattcttggtcaaaattaaatctcattaaaaatgtgagaaaaattattaaaccatcttaactgaattttaaatatttcatttaaactttcttgtaaagaacatattcattagcagaagattaaatttgcccaagtaacacaaagtcattttaactagagtttatgaaatacaggaattttaaagctaataattaccatgagtctgtacgattttgtagcattcattatttcttgtgcattaaaaagttctgtaagccagctttccaccttacattaaaaatataagatacatctgaacagactagcttatatttttagttcaatatacgtttctttgctaagcagcagtaaaaaaagtggaagcaagattttttttgaagtcatactatattcaatattcatgattcctattcattataactaaactgtagaagctgaatgatttttcagaatcttttccccaaaagtattctatactcccatgagaggttttttgtctactctttttctctttcattagagaacaatgttgacaccattttcatgatgccattttcaccagttcaccatatgacaagctaagcttcactacatacattctttgtagcatggagaaaccacaaatgcagaattcaatttatcatggtgaaaatatagcctgttataaaatttaaaaatataatgttaagtaagtcttcgtaagtctatcatacaggaaattttatatacagtggctccctataaaataagaaaagttggataaattaacgaaacaaaatgtgatttaaaaatctgagcaacattgcatgtattgatggtaattttgtcactcagtctaaaatggaataagggaataagaacttcagaattctatattacagttttctttacagtaattcactatatcattaataaaatatttcactgtagtttaagcatataagtaaattaacatccctcattataatacctcaccaatagttaatagttacttaagctaaaaactctatagttcctaaatcattgcttatatgtattaaattattgagcaaagaaacacctctattattttattgcccaagattttttcagaatttcctatattgctaagaatgaaacatcttttctgcaaataaagtacactgttataatgcatacacaaaaatcgacttgtgtttaattaggaattagtgaatgacatgaaacaaataaaaaacgcctcagtaaggtcattgggtaagttctggatagaaatctctgctgtcttaatgtgctgtatggtaagttttcttaaatgcctctctttttttaagctaaaaatccatcaactagtgatttgcgactttgtgacaaatttcctttttatgtgtacttcaaatgaaccattgtacccaatgacaatatgacttcacaaacttggcaaacatat

SEQ ID NO: 478706 - DNA, 562 bp, Homo sapiens
gagaacgggccatgatgactatggcggttttgagacgtggatccaccctcaagccatgattcagacaatcgggcataaaataatgcagggaatgacagcagctaggacacccgacagctatcaagtgacagccaacagcagcagaaggagccagagtgtagaaatgcagcctggctctgcagtacagcagtctaaaggcatttcacttgggggccactgtcccaagcacctagcatccccaggagacactctctcatcacttagtgcaatggctgatgaagtgaaagaatgcaaccaaaccattgttaaagtggatgttgatgggattcttgcattgaggagactggaccagatgatccctaaggtccctcccaatgaatttcttatgaatttccatatctcattcacactacatcccactgccagaaagtttgggaaccccagtatactcaatgccaaacagattgtcattccaagcatcaagatattgggggtcatgtagatctaacatatcaacaaatgaccaacctcttcacattgtatggagagagcccataattcc

SEQ ID NO: 478707 - DNA, 717 bp, Homo sapiens
ctgattcgtggagggtcaggatccagggcggagagagtctgagcttatcctacttaaacatgtacccaaggcaaagccaagaaacagaaccctgtcagcgtcccacaagttcttcatctttttcctgtccctggcatggttccactccccaactagatgcaaccactatcctgatctttgcaataattttttctttaatgattatttttaaactttacatgaatggactcatattgtgtatgtgtactttattctcattcaccaaaaatttttttctgtttataattctagattaccactgtcttctgactcaatgttgctgtcaagaagtaagttatcagtttaatcttttgtctttagctctttttgatttcttttttctactggcattctacagttttggtatgatgttttttagtttatctgctttgaataaaattttaatatattttccaacatttttagttgtgctcagtaagaaggttggtcctgctatgattagaaatgggatttaaataaaaaaaaaaagttagaatcttatttacatactgctttgtaacctacttttaaaaactaaacttattatgaggctttttccttgtaattataagttctatttttatgagtgcatagtatacctctacaggaaaacactaatttactcaatctattgttgcacattgtagttcttggtgattttctagtataataaatgct

SEQ ID NO: 478708 - DNA, 622 bp, Homo sapiens
gaatcctgcaggatgactgaaaactcctctgttgatcagggcattcagcaagcaacctcacccctaggctccgggattgtcacaaaggtgttcctgtctcaatttgagtgtggtgttctatttctaatgcctaaacatggcaacctttgctgtgccatttccattacagatttatacccaaggacttcactttttgatgataataaaaacaatattgtgtttttaatattcaatttcagtgttcattgttgctataaaattatttaccacttctctatgacaaggtactgtgggaggctatggatgaaggattcctaccctggagaggtgaatagcaccataggcattgctaacgtcaagtttgcgcacgctatcagaggggaagagaaagaatttccagggcagaacattaaaaattgttttcctccaatatatatttttatggaagacaaagatcagaattataatgaccagaagagatggtgaattagaatgaatctcatcttcagtgctattgattttgttcaggaagctaacctccagataagggtcacagtatgccttggatagagagaaagggctttatttgaaaactactaatctgaaaatcatggaggaggat

SEQ ID NO: 478709 - DNA, 1586 bp, Homo sapiens
acagctcattgagaacgggccatgatgacaatggcggttttttctgattttcacaagcccgaactatgcaactggacaaatatgtatggctgtcctccagcactgcagagcctgtcatgggaggccatggaggaacgtccctgcataccgagctggggagagcacgaggtctggggcaggagacagttggccgagtctggaggcctggccgagggcctagtgggctggcaggacacgaggcgtgatgagctctcctttccggggcgcttcggccgttgcaggctgctcgcaggcctgagagtatttttgtatctggaccaccacttgctttcctcctctgtgatgtctgcagctgtggactcactgcctgcagtgcccaggctcctgccctgcgtcctgtccacccaaccaacagaggctgtgtgtgcatctctgttggttgtatgagatacccagtgttcttaggataagccccaacttttgtcatgtttaagttaatcagagttggtttccactgccccactccccccatccaaaaatcctaaatgaaaaaagtgagatagaaaagagtgtctatttaaagtgagttcttctttttcctaaacagctgttattaaattgatgccgtgttctgcatttcagagtgaggaaacatattggtagacacccattaagctctcagctgttgaccacgttttcagatgcattcagtagctccctgcctctgccctctctcctgtagacctgtcctccgttctgctgcctggagggtggctctgaggtgagcgtctgagtatctcgctccagtgagaattccagccagggatccctgaggtgagtaagagcgctcttatcctcatatcgcagaaggtccacagaggggctcctgggctccatggaccctcagaattgtagatacaattgtatcggtgtgcactattgcaacagctgtgaccagagctttgtcagattctcaaagaggcttgttacttggccctcaaaggaggcctgctgcctagagaaaagaatccatgctcctgcactcgtcagctcagccacactttcggaccttttcctgcctcacttttgcctttgtgttctataaaactagcatctccaaagcacttgcaactgtttccatatgcgggggtgttttatgggtttatgttcttgcatatgctgtaccttctgaaatgttctctccatgcgacctctctgccccttgtcagtgtccttttcatccgtccgcaccccctcagagcatgactcccacggtagatccttgattaccccctgcagagaattgtcttctcacgatgacagctttattccaacccacctagatctgttccggcctaaaggtcacgtgttgtgctgctgatccgtgcagatctagttccttcccagggggctgtggtttttctcctgtgttccagcacactgctgggcccataacaggtctaaacaaacaagggtaggaaaaatgcatcttcccaattaataaataactgatttagttatgaactattaattttaataataaaaaggtgtttttttcctctggaattcttagattattttgtttt

SEQ ID NO: 478710 - DNA, 635 bp, Homo sapiens
ccacaacccctgagggaaaacctaagtgttatcacacgtggaccttaataagggcatagtcccaaatgcttttattgagaggtccacgggtcgtctttttctctccccttacctgcaggctgggctcccttccacctcttctcactggcctcctgtttgtacccctgacctctccgggatctgccccagcgtgtgttgttcccctctatgagtccatgtattctaatcgtttagctcccacttataaggacaggctttctgaactagtcacattgaggcctgagtccttacagatgagaagcagaaagccacgcaaagcactgagcattctggacaaaaggatcagcaaaagtaaaaaccctgaagcaaggaagaaatggtctgtccatggagctgtaactgaaatcacggaaagtgaaaccgcagttataaagggactactataactaccgccataatcaacaaccgcacttgttcatcactgtaaaagaaaatgcttgtgctactcgtttgcatatgcgccttccccatcttcccacccctgaaatccagtctctatcccctggcatccattaatttgttcatctcttagttttataatttcaagaatattatataaacaaaatcaacagtgc

SEQ ID NO: 478711 - DNA, 648 bp, Homo sapiens
tccttttgctatcaccttcttggatgcccagtgtgtctggggtctgccaacgtcgtcataataaatgctctaacaactgctcttttaatgaggaacatttcacatctgtgtctgctgtaccctgggcctgttccaccccaggagtcgtaaaagttgggctagattctgtcatctgtggaggctggcttaacctgccattcttcatctttccactcagatatgaaaggcaagattcaaggatcacaccaactagagggatcacattacatcgaacagaaactgttttaccttgcttgcaaggaggtggaggcctccttgcccccaagtgtggtgccacttccgggttccttgagcacttccaggttatcagcccagctctcctccagtttctggggctgctgaagaagctgttggggaaacctgtgatggtaaaaatataggctccaaatattacagaatgaataggagaaaaaggctttttaaaatgctatcatctgtcattcggtatcactttttgaagagcagtactgacaagatttaaaaaaaattttattctagcaatgcagaaatggctacactgtgctacactaatcagagaatgtcagatgagaaatgcttacaactgtggccttttatattacctttatt

SEQ ID NO: 478712 - DNA, 568 bp, Homo sapiens
caagtcactggctagccaaatgtttttttcacaagatgctgccaaacagttatccaaaagtttgtagcaatttatacttctaccagcagtgcatgaaagtgtcagatgttctacatccttgccaacagttggtactgtcagtcttttacgttttagccattttggggcgctgctccttagcctggaagcatgggaatctgctaagcccctgggtagcccagcttgaggcgtttgatccaagcccacagcaaaagctgttaacgtgtttcttgaccacagcgaaacagtgggtagaagttttggtttggtttagattagccagcggttctgtggcttttggggagaataaaagcccaattacttccttaaaaaaacaagtgggcaactagattattacctcttatttctgattttgaagaagaggagccccttctccctggctcgacctgccccatcaaataaaaaatgccattgggcatcatgatataggcggcgtccactgtccacttgttgtttctgctttgggacagtgcctgagttcacggaacagtagggtggggtggggtgg

SEQ ID NO: 478713 - DNA, 654 bp, Homo sapiens
agtggaggtaaatgcgtgaagtcggcgttttccctccttccgtttcccggagccgcctgcgtgaatgttcttcccggctctgctgccccctggaggctagtggaggtaaatgcgtgaagtcggcgttttccctccttccgtttcccggagccgcctgcgtgaatgttcttcccggctctgctgccccctggaggctagtggaggaggaggaggaagagaggaagaaaggagaagtgaagacggagactctctttgggcaaagcggggctttcagcacgttcggtggtacagctctgaccctggccaatcatggcactgacctatgccaccatatgggggtggatcgaggtgggtggtggcatctgggatctctgcttggcttcccggttgaaaggaatatcctctgcagctccaccggggagcagggcggacaagggtctgtctcctcgaatcagcaaaagcattgagttgtaataaagcatgtaggctgaaatatcatcactgaaatctcagcacattcctttcgccccaaagccaaacaccacttagttggatgatatttggataatatgttgcaatgactctcagttgtgtacactttagtaagaattaatgcaaccagcttgctttccatttcacagattaggttgatgc

SEQ ID NO: 478714 - DNA, 569 bp, Homo sapiens
gtgttcgcttcaaggtgccggcgtgctgctctaacctctagctcgtatgcccacttcacaaaaccagctttattctttacctttctgttggagcagggaagatctccagcttgtccctaaagcaggcggtgctcctgtctgcccaggccctcttcctgcttacgttatccttcctgctgtcctcgcctcgcaccacatccagtctctgcccatccctcagggtcatagtctcttgggggaggccttgccaccggctgtccacagtgagggtgctgctgatcccagtagaacatggcagcagagggcagaaacccacaatgatgatgaaattagaaaggaagacaagaacaacaaggttgtggaattcagaagccatagagacaagagaaaattattctctggggtatctgaccacttccagaggaaagacataaagatgctgatgtcaagaatgacccaactaaacggcccagccacatgacccagttgaagctggtggacaagaagtttcattcatggaatcagaacttccaataaggtcttttagtacctcactcctaaatttgaat

SEQ ID NO: 478715 - DNA, 1230 bp, Homo sapiens
gtgggcactgtccgcaccgggatggggctcccctccgcggcgcctcccggccggtcctgctgcggctccggggccggagggaatccgcagccggccgggggcctccgccagcctggctgcgcgccgggactccgcctcgcgcccggccccctctccagcagggattgcttctgcctcgctgccaggttttctcccgcccaccttctccgctgccagaccgcccgagctgccctcagtttctccccaagtgggactcactgtcggggtgtcccacaagcccgatcccagagcctgctggcccgaccccggcgacgcctccacccgcgctcgccgccctccggggcgcaccctccgccagaaaacagccggcgggcggcgagacttcgtgcagagtgcgggctcctctccggcgccaggcccaacaaggacggggagggatttgcgagggggctgaaaccttttgccatcagcgaacagcctcagccaaaaacaaccctggaaaggcgagctaagaatggttatctcctgccagcgctgaaatcggaggccgggcgctgcggaatcaccactgtcagacttcaatccaacaggacccactcgagccatccacacttgccccagcctcctccaaaacagcacactttccggctgaagaaaagaagaatggtattcacgcagttcccattttacagatgaaaacaagaggactttttctgtgaagtcaagaaagtggttacaatggtactttcagcctgtccgaattatgtattgcccctcccctttttattaataacattgaagtgtgatgggacaaccactgaagccgtcagttgaaacctgctgggactttttagccattctcttcaacataaagaatgggtgtttttggagggggtgagaggaatggggaaatgttgtcaaagagtacaacgttttagttgagacaggaagaatatattttgttgagatctacagcacagcatggtgactgtagttaacaatgaagtattgtctatttccaaattgctaagacaataaatttcaaatgttctcaccacaaaaaagataggttttgaggtgatgaatctattaattctctggatttaattattccacaatgtatacatatatcataatatcacattatacctccgtaaatacatacaattttaatttgtcaattaacatttttttaatagaatagtgtggccagtcggggaggtagtgttg

SEQ ID NO: 478716 - DNA, 767 bp, Homo sapiens
tactacttctaagagggggtccactttgcccccttttccgcgtgggagttgaaggaaatgccccttaatggcagtagcatccacttgggtgtgtgcaccttctggaggactgggtgaggttgcccttcttccagccaaagccagaccctatggtgtgggacgttcagcggggagcaacagaatgccatggcttggtcctccctgggctgtgattggacgactgattattggacagaatggcgtcttgtcgacacctgcggtctcctgcattatcaggaagatcaaggcagctggtggaatcattctaacagccagccactgccctggaggaccagggggagagtttggagtgaagtttaatgttgccaatggaggacaaggcggcatgcacaggagcagaggagccacatgtgatgtgtgtggccgccgttccctgccgccccattcacataatcttctccatgcccctggggagccatgctgtgggatgtgcaggaaactcagcatgctggcagacttcttggaggaagtgaaatttgaactgcgatgtgaagaatgagcaggagttagtgaggtgaagatgagagaaggagtgttgcaaacacaggtcagtctgtgcaaaggccctgagacacaaggagcctagaaccacggctcgaagacaaccgtctggctggggcatggctcgtcttacagatcacattaaggaacaaataattatgttaagagttatgggctgccattaaggatttggataagagagtctt

SEQ ID NO: 478717 - DNA, 858 bp, Homo sapiens
gaggcaccccccgcgatatggggagtaagagccacctcctctccccccccgagttattacgatccacggtggactcacagcctgtttactatattgggggtaatatctccccctctggaaattatgtgctgtttgacagatgggtgtacaccctcggtgtgcaggttgtacacccgtctgtattgagagtaatatcatcctcttccaccctgaatattaagaaccgtatcacaggagcaatatcaccgggtggctgtacattaattgctatgttgggagtcatgtcatgctctatcccctggatattaggatcagtgtcacagggtgagtgtacacctactgagatattaaaactaatatcatgctctccatccctggatattaggaacaatatcacaggtaggtgtacaccccctacggtattaggagaaataatatgattaattattaagcatcagtcttaataatattactaattattaaacatcagtcttaataattatcaatggtaatattaattaatagtataacgttattaatcattaatgattattttaaatatgattatgcatggttaaaattaattattagtattgtcatttttcaatattcgttattaaccttaatattaattattgttttattaccaacatcacttattgatttaattaagtaacattaattaccgatatcattatgttattattaatagtgaggttgctgttaattattaatagtaaacattaatatttttaatccgtattaacttttactatctttatagtaattatttatatcgatgatttctattaattgttattatatttatgaatattaatacttaatacaattgttccc

SEQ ID NO: 478718 - DNA, 467 bp, Homo sapiens
tatcctggagtctcagtgtcaggatgactgcagtgaggtccatgctgttgggggtgacagagcagccctggaggccctctgctcttaccctggcaggaggtggccaaaaagaagcaggcagaggaagcttctccaacaagcttggaaagaaatttccgcatatcactcacgtcactcttgccactagaaggacaatttctacaacggagtggaagaaaatgactatgctgtgggagagaatggatgcatccagaagagcaagatatcctgatgctaatcagagccacacaagaatgcaagcatttgcttcactgcctaccttcagtctcacgggagttctctggagttcttgtatcagcatgtggacctctttagcaagattgaggacagtttcctgaattatatcctcaaaaacgttttccaagttgctcactttctattcttctctgttagaaatgccaggtatg

SEQ ID NO: 478719 - DNA, 2007 bp, Homo sapiens
gcagcaagccaccatgacgccgtcaatcacagacttctacgcatgcaagggctcaaacacaaatgggcttcccggggtcatcctgctcctctcataactcgtcaggctctgagccctgcaccatcaggggaggactgcatggtgctgatggtgctgctagaagctctaataatggcagcagtgaagatacagacaacgagttccagtattttagcagaaatggtagactggccatgatgctacgcgcaaaggttttcagagtttgctccatcaaatcccaaggttttgcagaggagttatctatgacagaattgggaaagggtttgggagggacaataagtgagaagaggggcaaggagaagctggccttacaacgatgttatgaggaaagtgtcatcatcatcatcaccatcatcatcatcatcatcatcatggacatggatgaagctggaaaccatcattctcagcaaactaacacaggaacaggaaaccaaacactgcatgttctcactcataagtaggagttgaacagtaagaacacatggacacagggaggggaacatcacacaccacgggctgttgaggggtgggggctaggggagggatagcattaggagaaatacctagtgtggatgacaggttgatgggtgcagcaaaccaccatggcacgtgtatacctatgtaacaaacctgtacgttctgcacatatatcccagaatttaaagtataataataaaaaaagaagaatgtcagatggctttaggaggataatagaggagattgatgcaattattgttaaataataataataattagtgatcagataataatcactgataatgaagcccaatatactaaaatcccaagcttttgctattgaacaaaaatggtgtttgtactcctcacttaaaaaaaagtgttgcaataaaatcattgtcttcttttccttttcctgcaattgctgaatgagttcagttggtagtaatgtctttgtctatttttaaactgtgtgagaatgtgctttggagacatgagcttttttttcttcttcaaatattcttgtaataatctacattgatgtactaatactctgtttgtctgattttctgacattataaaaatggtactataaccagcaatgtgccatagcaatgagagatatgccatatcccttaaggtttttctaattagctacttaatgagaaaatttggtaattgtattgagttaaaggactaggtgtatttatttggacaacattcgattttgagcgaagacttttttaagagaataaaaatgcaactgtagcattgtataactaatgtgcacagctcactgttttttaagataacaatttaaatctattaacaaagatctgatttcagagtttcataatattgaggatttatttagcttgtaaaacctgtagcaacctattcatatgttctgagatagaaaatacatcaaggaaatttttgtcacttatcccgtaaagaagaattaattagtcagtttgttaatctgtaagaatgtatgaatttccatgtttcatgtttccaattccagattagagtaagtaggactagaataattttagtaaatattcttttgaaatgcggagttttcaatgtggctctccaatgttaataagcttgttgtggctgtcaatatctgaaatggtccataatttatatttgaaaagctgccatcaggcaaagttttctgaagtctctttctttcatataacaatattgcttgagtatctgtatgatttcctcctgtagcaagtttgtgcaaatcctgtcaggggagaaagcacaagctatatccttgcttttcagagagaaaactagttttacggagaaatatcttgcccagagtactcaatcaagtgacagagctaaaaggagagtctgtttatatgattaagtgatacaagtcatgctttatttcttcctatcactaattcttattccagtcagtcagctcatctatgcagtcagtgtaac

SEQ ID NO: 478720 - DNA, 752 bp, Homo sapiens
tggaatacgacccttgtggagcgcctataaacgacgcacgggggggcgcttggatgaagcccacttgatcatggttggaccctcagctgcaggtctgttggagtttgctggaggtccattccagaccctgtttgcctgggtatcagcagtggaggctgcagaacagcgaatattgctgaacagaaaatgttgctgcctgattgttcctctggaagcttcatctcagaggagtacccagccgttaaactccattgttacagacaagagtaattcaaattgctgttcccccattatttaccgaccatctcctgctccacatttatggaaaattgttcctgaggacattcactccctggtgcttctagcctgccttgactatgggctgagcctatttctgaaccagaagcttccatgcaaagaggcacagaaacatatgctaaaatgtcattggcacgaatgggaagcatccaccaagctgcaagtaattgctgggcatagtgtggaggactgatggcatgtgatacacaaagtgaaggagataaatactcaatagttactgtcatacccacgttctgtaactcgttaagattacagactttttcaaaaaataacagatgctggggaggttgtggagaaaaaagaatgcttatatactgttggtgggagtataaattagttcagccattgtggaagacactgtggtgattccccaaagacctaaaaccagaaatatgatttgacccaggaatccc

SEQ ID NO: 478721 - DNA, 1661 bp, Homo sapiens
gtgttcatccagaagcagcatgtttcatttaaaattgcacaggtaccccccatctcagcccacatttttcaaatggatgattatctgtgtgtattcagatgtacatagttttactgaaggagcccgtgggaatctctatgtgtgcacactcaaggtgataactcactggctggcactcagctgctcagtactatgcctgggtatcagacataaagaagcttccagattcagccaaactgtgccagaatcagaataccgccaaaccccacaatctgctattgaacccacgctcctggtccagactctccctttcctcatggtgaatttctcagtggagaattcactggcttttcctgtcaaaggaatctgcccaccttcgtgcagcaaatcattatggaatcctcctgtgatcttaaagtgtgcctccaaaatactgactactgatacatagggctaccattacagaccatatcgaaaagccaattttttttggatcaagatttgtgaagaatctgagattttatcctatttgcaagctaagataaaatgatatttgtagtataagatattccatagtatacctctcttaataattcaattgcgacaagcctcacaccttgaaaaattatgcccccaccaacctggttatagagaagtaggtgcttcagtcattcaagatatcctgaaaactacagagaaacaacactgaatgaggataaataccagcctcagggcttttcacttatttgaggggaccagatatccattagataaaaataatttaagtaggcttgagacagaaatacaaccagtcattcaacaaatacttattgagagtcagttatgtgccaagtacttctttatgtgctgaagatacagcactgaagaaatagaagttcttacaattacaaagctgacattttcaggaagggacacagacaataagcaaataaacatatagtgggttacgtgcgataagtgtggaaaagacaaaccagaataagaaacagagaatagctgggaattaagtcaatgtactacatataggtaattttggagggggtagcctcataataagatgacatctgagtagaaaactacaatggggatggggaggagccgtgtgcatctgtgctaagggtggtccagacagagggagcagaactacaaggcccttgaagcaagatgtgttcaaaggatggaggagaaggcaggagacaggatcagattgctagaggcctggtcaggtgagacactagggaccataatgaggactttagctatgttttgagggagatgagaagctttggagaacttgtagcaggggcttgacatggtctgggaatgatatcatttttatatactttttaaagcaaagacactaaggctcacaaatattaagaaaattgcctaggtgacaaaaataaaatacaaggccccttctctttctatgtcctccagacttccccttcacctttcattgcattggctgctgccctaggtgctctagtacaatgtacaatgttgtatagaagagagtgagcatccttgcctctttcatgaactcgagagtatttactttccctcgtgttagctacttaactaggggaaactgtttatactgtctgttactcagtttaagaaatatttattcagtgttt

SEQ ID NO: 478722 - DNA, 503 bp, Homo sapiens
tgctggcacctggagctgcctgtccggcagcagcagttggcatgcctggctatgcgcagagaccagaccccatgcttgctcacacaccccttgccactccgcacctggcttgcccttggcatcctgggatccaggctggtagtacaccagaagccagtcctaataatccactggatgtcactttaaagcttggtcatcatgatggcctgcagtcaatgaggtggagatttcagaacttctgctgcattgaggaaggagtcagaaggctcagggacatggaaattctagatggattgactatggaatacctaagaacattcaacctgactattttctcggagcacaggaaactttccttttacaagcatctggaagaaccctacaccatgggtaacctggcccatgaagaaagggcttttatggtagaaaagtacaagcagaggacccatccctgaaatttcatcatctccaggagataattctcatcaccttgattaatgggg

SEQ ID NO: 478723 - DNA, 531 bp, Homo sapiens
cccgagcgcccacggcagcaccatgcccgcagagcataagcgacaggagaaagaagaggtggacaagatgacggaacagaagatgaaggaagaacaggagagaaggaagaaaaaggagatggaggagagaatgtcactagaggagaccaaggaacaaattctgaagttgcaggagaagcttttggccctacaggaagagaagcaccagcttttcctgcagctcaaggaagttttacatgaggaagaaaaacggaggcgaaaggaacagagtgacctgaccaccctgacatcagctgcataccagcagagcctgactgttcacacaggtacattactcctcagcacgcaggggagccctggaggacacaatcgcccaggcaccctcatggcagctgacagagccaaacaaatgtttggacccaaattgcttacgatccggcactacgttggcccagcaactgcttttgcggagacaccagagcatggacaattccaaggcagtcctggtggtgcctatgggactgcttagcc

SEQ ID NO: 478724 - DNA, 746 bp, Homo sapiens
tggcatactgcctcctgcatcctgactggtcctgtttcagccatggctcaaagtgctccagctacagctggggctaccactcctgagagcacaagctatttcagatgtatcaaagtctgggtgcctaggcagaagcctgctacagtggtggaaccctgcaaagagcctctactggggcagtgccaaggggaaaggtggggttggagccctcacacagagtccccaccagggtattgcctagtggagctgtggaaacaagtctctcactctccagacaccaggatggtagagccactggcagcttgcaccctcagcatggaaaggcttcaggaacaccgatccttctcagatcgaggatctggcaagagctatcaaaatactcagtttcagcagctcttatttagaccccatcctgtattcctaattaggcttcagatctttgctctgtttttggcttgccagagagaaaagtggccaagccttctcacctgtcactggctgtacctttcgccatacgtggctgtggcaaatttgcccccgaagaagattaaatagtattactagtagttaggatcctttctttgtccttgacctttggaagtttgattattaaatgacttaaggtaatcttttttgggttaaatctgcttagtgttctataaccttcctgtacttgaatattgatatctttctctagttttgggaagttttttgttattatctctgaatgaactttttacccatat

SEQ ID NO: 478725 - DNA, 660 bp, Homo sapiens
tcattgaagtgcaacagggctacaatgatacagtgtgaacatacagagccctggccctattcacaagctgtgcctcacaccccatcacctttttcccatacccggatctccagatctcatcctgacctcctggacctagggctcattgccttagcctctgaaaattctcatactttcccactggatctggcaaatggtgatgctctttcactcctcattcttgactttccccttttggctgcaattggctcttcttatgttctcctcttcttcccactctgtaaaacagctccacccgggagctctgcctttggttttaagaatgaccttgattacaaatgcctgctcaggcaggcccagcctcccagacagaaaacctgccgtggccttggcggcatcttcagtggtacctcgagcagtgccggagaagctaggaatctgcttcagctcttgtttcttgattaggccccggagccaaggcttccaagaggagcctcacttgtcagctgtcagtcaggaggcagcctgttcctcccaggcactgcccctgccacaggggggtgaccagactgtaaaaatgaaatagacttcagtaggatgcctgaaattcattttctccctcggatgctttcatctcactcatttcactgtgtttacagg

SEQ ID NO: 478726 - DNA, 612 bp, Homo sapiens
ctccaacagacctgcagctgagggtcctgactgttagaaggaaaactaacaaacagaaaagacatccacaccaaaaccccacatgtacatcaccatcaccaaagaccaaaggaacatagcctcttgccagcaacaaagctggacagggaatgactttgatgagttgagacaagaaggcttcagacgatcagtaataacaaacttctccgagctaaaggaggatgttcaaacccatcacaaagaagctaaaaaccttgaaaaaagattacacgaatggataactagaataaacaatctagagaagtccttaaatgacctgattgagctgaaaaccatggcacgaggactacatgatgcatgcacaagcttgagtagccgatttgatcaagtggaagaaagggtatcagtgattgcagatcaaatgaatgaaatgaaaaaaaagagtaaaaagaaacgaacaaagcctccaagaaatatggggctgtgtgaaaataccaaatctgcatctgatcggtgtacctgaaagtgacggggagaatggagccaagttggaaaacactctgcaggatactatccaggagaacttccccaacctagtgaggcaggccaaca

SEQ ID NO: 478727 - DNA, 1943 bp, Homo sapiens
ccccagccgtgcttccctgctgcagccagcatgatggcagcagccactgccatcattcccccctctgaagagggtccccagtacaaaggagccaatgtccgagtctccatttttatgaccatttggagtattgggagatccacagctgagacgctaggaccccctggaagcctagaaatgggagtgttgacatttagggatgtggccatagaattctctctggaggagtggcattgtctggacactgcacagcagaatttatataggaatgtgatgttagagaactacagaaacctggtcttcctgggtattgctgcctctaagccagacctgatcacctgtctggagcaaggaaaagaaccttggaatgtgaagagacatgagatggtagctgaacccccagttgtatgttcttattttgcccaagacctttggccaaaccagggcataaaaaattgtttccaaaaagtgatactgagaagatataaaaaatgtggacatgaaaatttacagttaggaaaataccgtaaaagcatggatgagtgtaaggtgcatgaagaatgttgcaatggatttaaccagtgttcgagaactacccagagcaaaatattacaatgtgacaaatatgtgaaagtctttcataaattttcaaattcaaacagatataagataagacatactggaaagaaacctttcaaatgtaaagaatgcgaaaagtcatttttcatgctttcacactcagctcaacataaaagaattcatagtggagagaaaccctacaaatgtaaagaatgtgggaaagcctataatgaggcctcaaacctttctacacataaaagaattcatactggaaagaaaccctacaaatgcgaagattgtggaaaagcctttaactggctttcacatcttactacacaaaaaataattcataccggaaagaaaccctacaaatgtgaggactgtggcaaagcttttaaccaatctgcaaaccttactacacataagagaattcatactggagagaaaccctacaaatgtgaagaatgtggcaaagcttttagccagtcctcaaccctcactacacataagataattcatgctggagagaaaccctacaaatgtgaagaatgtggcaaatcttttaaccaatcctcaataattcatactggagagaaattctacaaatgtgaagaacgtggcaaagcctttagccagttctcacaccttactacacgtaagagaattcattctggagagaaaccctacaaatgtgaagaatgtggcaaagcttttaaacaatcctcaacccttactacacataagagaattcattctggagagaaattctacaaatgtgaagtatgtagcaaagcctttagccggttctcacaccttactacacataagagaattcatactggagagaagccctacaaatgtgaagaatgtggcaaagcttttaacctatcctcacaccttactacacataagataattcatactggagagaaaccctacaaatgtgaagaatgtggcaaagcttttaaccagtcctcaactctttctaaacacaaggttattcatactggagagaaaccctacaaatgtggagaatgtggcaaagcctttaaccagtcctcacaccttactacacataagataattcatactggtgagaaaccctacaagtgcgaagaatgtggcaaagcctttaacaactcctctattcttaacagacataagatgattcatacgggagagaaactctacaaacttgaaagttgtaacaatgcttgtgacaacatctcaaacatttccaaacataaaagaaattgtgctggtgagaaaacatagaaatatgaataatgtgacaaagcctttaaatggttatcacacttgcttgtaggtaaggaaaacagaggtttttcccaaaaacaggtcag

SEQ ID NO: 478728 - DNA, 630 bp, Homo sapiens
gacttaggagagttagagtcccttctaagatttaaggggttagaggcccctctcgcttggccccagggcaatggtgtcgcaagctaaatcactaaggccgctcagggaaagggaatccagaagcctggcgtgccggcaaaagggaaagaaagtggtcactgccgctttatgtagctcagtggtcaagattttgcactttcacatgtggcgatccgggttcgattccccacctaggaagcccccaactgaaaaacgttggaagatcagggatccctggaggaaagaagtcccagacttcagcaatcgtcctatcagtttgggctataaggtgcccaagccagtaccaagcaccaataggcaagctgctacaggccgggtcaccttcactcaggatccctctgtggctaccagatgtcaatcgagaataatgcaagggccagcaaaaatggtcaacagtcaagaggaatcaagctccttctcaatcctagaattcacaaaaggatctatgatgacactggacttcccatttaatgtgaggtaaaacattacatgcaattttatttaatctcaaaaagaaaggagcttcctgtatgcctcaagtatttcataaagaagttctaaaaatcttgt

SEQ ID NO: 478729 - DNA, 2830 bp, Homo sapiens
aggtgacttaatacaagctgtcctacagcaagtgggattaccgctttctggaaacaccatccgccggggcggagctgttccgccccggtgcggtactacgactcccagcatgcacctcgcagtcggccctcggtggaagcgggaacccaggaggacctgggggtgtggcagcgaggaagggccgagccacggactgtggggccgaaactcgctcccgcccaccctttctcgaggctgtggcctccgcgagagccgagcgggccgcaccgccggccgtgcgactgccccagtcagacacgaccccggcttctagcccgcctaagcctgtttggggttgctgactcgtttcctccccgagtttcccgcgggaactaactcttcaagaggaccaaccgcagcccagagcttcgcagacccggccaaccagaggcgaggttgagagcccggcgggccgcggggagagagcgtcccatctgtcctggaaagcctgggcgggtggattgggaccccgagagaagcaggggagctcggcggggtgcagaagtgcccaggcccctccccgctggggttgggagcttgggcaggccagcttcacccttcctaagtccgcttctggtctccgggcccagcctcggccaccatgtcccgccagaccacctctgtgggctccagctgcctggacctgtggagggaaaagaatgaccggctcgttcgacaggccaagaccaacattgttgctccagggctccctgcagctgttcctgttcttcccttggagctgactgtcacctgcaacttcattatcctgagggcaagcttggcccagggtttcacagaggatcaggcccaggatatccagcggagcctagagagagtgctggagacacaggagcagcaggggcccaggttggaacaggggctcagggagctgtgggactctgtccttcgtgcttcctgccttctgccggagctgctgtctgccctgcaccgcctggttggcctgcaggctgccctctggttgagtgctgaccgtcttggggacctggccttgttactagagaccctgaatggcagccagagtggagcctctaaggatctgctgttacttctgaaaacttggagtcccccagctgaggaattagatgctccattgaccctgcaggatgcccagggattgaaggatgtcctcctgacagcatttgcctaccgccaaggtctccaggagctgatcacagggaacccagacaaggcactaagcagccttcatgaagcggcctcaggcctgtgtccacggcctgtgttggtccaggtgtacacagcactggggtcctgtcaccgtaagatgggaaatccacagagagcactgttgtacttggttgcagccctgaaagagggatcagcctggggtcctccacttctggaggcctctaggctctatcagcaactgggggacacaacagcagagctggagagtctggagctgctagttgaggccttgaatgtcccatgcagttccaaagccccgcagtttctcattgagttctccccacccccctcccctccagggccctgtatgcctgaggtgtttttggaggcagcggtagcactgatccaggcaggcagagcccaagatgccttgactctatgtgaggagttgctcagccgcacatcatctctgctacccaagatgtcccggctgtgggaagatgccagaaaaggaaccaaggaactgccatactgcccactctgggtctctgccacccacctgcttcagggccaggcctgggttcaactgggtgcccaaaaagtggcaattagtgaatttagcaggtgcctcgagctgctcttccgggccacacctgaggaaaaagaacaaggtgatctaaactttcagttttcctcttacctcctggaagtggtagtggtggaagtgggttccctttaatgtgtcccagcccaccaggagacttaagagaaagggactgtggacacaagaagaaatagaggaggatttggggttttggtgactgtgaggctgggaagacacttcttgactttgggagtggtccccaggggcagctttcaactgtgagcagggatgtaagtcagatgcggcactgcagcagcttcgggcagccgccctaattagtcgtggactggaatgggtagccagcggccaggataccaaagccttacaggacttcctcctcagtgtgcagatgtgcccaggtatgtatacttgcatgacgtcggctatgcatagatgtgcaaggacagagaggcccatgggaaatacttgggcacacaaagaccatgactctgctgttgtgggttgcacaggagtagggggcagatgatggacactgggatgggaatggttgtgaatgatctgcccccgcttccatatgtctctccccctgtacctagaaagctatttgagctggatccgtccctctgatcgtgacgccttccttgaagaatttcggacatctctgccaaagtcttgtgacctgtagctgccacgttttgaagagcttgagctgggtccccagtgggctgtctctctgtggggagggctttctgcttcaccatcattaggaatgtgaccattcctatataattcctggactggtgagattggtggtaggcctgtgaaatttgccctagttactaccattctcgttttggaggaaacaatctctgccaccaccaagtcattgactttgctcgaggcaccttttttcctgtttctccttttctgttgtcgagtaaaatttcatatttatctcgtctgcctactacatatacttgcgtgggaaggcttgtgacc

SEQ ID NO: 478730 - DNA, 709 bp, Homo sapiens
tcttgagagctctgccctcataaattaattgacattatctctggaatggccctacctgtgatgatgaattcagatctaacactctatcaccagactgagatcctggaagggcctgtttgctctcgcctggtagagtttccagggcaggagatgctcccagcttggcagggtgttcatgagtccttgaacacccaaggactcatgaacacccaaatccaagttcatgagtccaagaacacccaagtcatgtccaaggaagacataatttatccctctcaactgaatctttcccgtcaacatccggcgtgctatgtatctcatatttttcaaaaaccctctctgaatcccatgttctctttctgctatttcctcatttttctgcacctctctggaacaaacctccttgaatacgtgattatacttgctatcaccaattgctctccttctgttgtatcttgaatccactcccatcacaccttcatcactcatctaaatctgtttttcttaatgtcacagaggatctctatgtttttaaattgaatgccattcatcttgcttgactagttggcaactggttatgcagtttatcattttctctttgaaatactttcctctctttgctttcagtacaccacactcttctgtttttcttcctacctcactggctactgcttctttgttcctctatttactggctcctccttttatt

SEQ ID NO: 478731 - DNA, 852 bp, Homo sapiens
agatacggagtgccgattggtgtattaacaatccctgagctagacataaaggttctccatgtccccaccagactcaggagcccggctgtcttcacccagtggattccgcaccggggctgcgggtggagctgtctgccagtccccggccgtgcgcccgcactcctcagcccttgggcaagaaatcgagcgcagcgccggtgggcgggcactgctgggggacccagtacaccctccacagccgctggcctgggtgctaagcccctcattgcccggggccggcagggccagccggctgctccgagtgcagggcccgccaagcccacgcccacctggaactccagctggcccgcaagcacctcgcgcagccccggttcccgctggcgcctctccctccacacctccctgcaagctgagggagctgtctccagccttggtcagcccagaaaggggttcccacagtgcagtggtgggctgaagggctcctcaattatttagaatagtgaagcagtggaaacaacctaagcatgaggctcattaaataaattattatatatccttacaatggaatattatgctaccattaaaaaggatgaggtagatacatatggtctcgtatatataaatgctgtataaaggcttttcctttataaaaaatcatgtcttttagaaacattttaatcctaacctacctgatatgtggtgttacaatttgacaaagtagtaaactctataaagcacctttaggtgaggaccagttttctactgaaaggggacacaatttaatacagaatgagaaaatttggacttgaagcacagaaagggttaacccctctagagcgtcttcttccattt

SEQ ID NO: 478732 - DNA, 1496 bp, Homo sapiens
ccaccgcatccaaaaacacgaagcatgagggacagaagagggccccttggcacctgcctggctcaagtacagtgggccggaggaggtgactcggacaaactatcatacagccttaagaaaagaatgccgacggagggcccttggcctgcagatgcaccctcctggatgaataagcctgcggttgatggaaattcacagagtgaggcattatcactggaaatggctggcctctcgcttcccagtggcggcccagttcttccatatgtgaaagaatcagcaagaagaaatccagcctcagcagctactccgagcgcagccgtgggtttgttccctgctccaacagagtattttgctcgggtgtcctgcagtggtgttgaagctctggggcgggactggctgggaggagggcccagggccacccacggccacagaggacagtgccccaaaggagagcctcgggtgtcacgactgacacgccatcaaaaactgccggaaatgggaagtttttgggatgacccaccaagtgcttttcccagtggtctgggctctgagttggaaccctcttgcctgcattccatcctgtctgcaacactgcacgcgtgccccgaagtgctcctgaaagatgagacgaaacgcattttccttgaccttttaaaccccatgttttcaaagcaaacaatagaattcaagaaaatgtttaaaagcacctcagatggtctgcagataacactggggttactggcgctgcaacattttgaattagcaaattcattatgccatagtttaaagtacaagcagaacaatgcaagtagattaattttaagagttgtcttagaatgatttctttcgcattaagtctggatgcaaactatgcagcccttaggttcctggtgtggtttgtacgacctggcagacttagttgagtttgaattcaaagccggttgatgcggaaggaaattttttagcatgtgttaaattgtgctttaaaagacatataaaaaattgggaaacatttcaggagacgatcatagcctgtataaatatcagattagaacatacggatttaccatgaagttctgtcttcaacacccaacactgtctaaagggctactgtcccaaatcctgtgtgtcccttcggcttgtctgatcacccaatggaagtggatacttgtgaagtctacactgctgtacttggcgttaaatcttgctgaattcatggtgactcctttggttgtctgttgataactttgataaaggtcatttaagggcataaggttttaaagactcccaaagtgagacttaaccattttcgggattagtgattgcatataccagtttatgttgtgtgctgaattactatgccatgtgctattttagtgtttggggaaaatgaaaaataaaatttgttctttagcgtaataaatatgtcttattaaaaatacaatgaactgaatgacaatgaaaatgcaacacatcaacatttgtgggcatgtata

SEQ ID NO: 478733 - DNA, 898 bp, Homo sapiens
cgcggagcatttcgggctcgcccagatcagtgcgccactggccgatgaaggtggccgcactgtcgcgggccacgaagaagcgcagcgccagccaccctgtgggcctggaaggtcacacttcgggatatgcagacagcctcatgggttcccatagacgggccagccgagccactgtgggcgggggtacaaaccaggatcgctgtgaggatccggcaggcgctcagagcagactaagccgcagagcactgcaccggcctgtcactcaggccgaatggctggtttacctgctggctctgagaaacctcagtgcctcagtttcctcatctgagaaatggggcagtgccatcaaaaaacgacatagcagcagtaatggtatcagtaacagcaatgaagtggttagggctgagtgcgtggtgatattatctccattttacaggctgcgccgcgcggcctatctcggcgatccagcagccaagccgcgaaagccagacccccctcagcaagcagcgccccagaaccgcaggccgtcgtttgtggggccagaactgatggcccaggcccagagggggtgcagggccgctcaaggagccaggcccagcccgcagcagggaggcgcctgcaagccacagctggatctgtcgggccgctgcggcctcctaacggcgggccgggatgataacgatattgagggcttgacatcagggagtcctgtcatcagggctgactccatactgaactgctggggaactctgaggcccacaaaggaactgtgagaaacactttcttcaccagcagctgtgctcttaacagtatacaacacattatacaaggcctccaacgggccactgtaactccaaactctggttagtgaaattgtgtcatttagataaaacgaaca

SEQ ID NO: 478734 - DNA, 1018 bp, Homo sapiens
gaagcgcttctaattctgtgcggatgaagtacagggagatgcttgctgcagctcttcgaacaggagatgactgcattgaaatgggagctgatgaggaagaattaggatctcgaattgaggaagctgtagatccagaaagagggaatacaggcatgaagtacaaaaatagagtccaaagtaagatatcaaatcttacagatgcaaagaatccaaatttaaggaaaaatgcatcgtgtgggaatattcctcctgacttacttgctagaatgtccgcagaagaaatggctagcgatgagctcaaagagatgcacaaaaacttgacgaaagaagccatcagagagcatcagatggccaagacaggtggaacccagcctgattcgctcacatgtggcaaatgtaaaaagaattgcacttccacacagaagaacacttgtagattagaaggcttttcataaatcccctcacaggcgaagaggaaaacttcccgctattttatttccctcataggaagacatactggaaagaaaacgcttagcatcttagtatagaatagctattgtgaacagttcatgacttgatcttgatatggaaatctgtactgaccagtgattaagcttaaggattgtaaaaatcattaaagctgtggtcttttcgtgtggaggttgatagaaaatatttttgtcctaagtcttatttgctgactttttctgtcaatgaaggaggttgttgaacaaactgaatctgtgggctatagcaagtagctttacagcagatcttaccatgaagttttactttgtgcttatttaagtgggtaccactttttctgtttagaataattaaaaaatgattttcacaggttccttggggtaggaaaagaaggggcccaagcattcccaaaggtgaatttcaggtggacctaaaatgctaaaagtttgtgctgttctcttctacaaaaagttaaattaggtactagggctggggcaaagcattagataaactggaaaaaagaaaaacttct

SEQ ID NO: 478735 - DNA, 1116 bp, Homo sapiens
tggctttgggtgcagtaagaacctcctcctggctggtgcctgggctgtgatgggataagtgggggccattgagagccaagtctggagccatagatcatgccaagatcatgaaaggcctgaagtgccttgctaaggagtttggatcttgtacctgtgttcagcagttcttgagctcttgtctcacatccaagaagaatgaggacatgctgacagtagaaggcaagaaagggagaaggcagtcatctgaaaacgaggaagacagccctcaccagaaactgacactgttggacctgaatgtctccattcaggttccacataaccatctggatggtctgtgtgaccaacagcatatggtagatgtagcggtggtgtgcccggaattggtgggttctttgctcactgacttcaagaatgaagccgtggaccctcacgagagccgattggtccattttacagaaagctgcttggtccgttttgacagggtgctgattggtgcctttacaatctctgagctagacacaaaagttctccacctccccactagattagctagatacagagtgtccacacgaaggttctccaagtccccaccagagagcccagttggcttcacccagtggatcccactcatactggtgccgcaggtggagctgcctgccagtcccagccgtgcgcccgcactcctcagcccttgggtggtcgatgggactgggcgctgtggagcagggggcgttgctcgtcagggaggctccggctgcgcaggagcccatggaggggtggaggaggctcacgcatggtgggctgcaggtccacagccctgccccgaggggaggcagctaaggccaggcgagaagtcgagcgcagctgctggcccaggtgctaagcccctcactgcccggggcttgcgggccacggggcctccgagtgcggggcccgccgagcccacgcccacccggaactcccgctggcccgcaagcgcgcagcacgcagccccggttctcacccgcgcctcttcctccacacctccctgcaagctgagggagccggctctggccttggccagcccagaagggggctcccacggtgcagcggcgggctgaagggctcctcaagggc

SEQ ID NO: 478736 - DNA, 686 bp, Homo sapiens
aaaggtggggaaaagattgagaaatcggatgccaaaatatggaatcaacctaagtgtccatcaatggataaagaagatgtggtatatatacacaatagaatactatttagcctttaaaaagaaagaaatcctatcatttgtgatgacatggatggacctggtgggctttgtgttaagtgaaataagccaggcacagaaagacaaataccacgtgatctcacttacatggggcaatctgcaacaagttgaactcatagacgcagagagcagaataatggttacaagtgtccagggatacgggtgggggaatgcggagatgttgatgaaaacacagaacatttcagttaggatgaataagttcaggaggtctattctacagcagtgtgactatatttactaatagtgtattatatacttgaaaattgctaagacagtagtacaaaataatctgaatatgaagtgataatttcagtctgatatgtttaggattaaaaaaaatcctgtttggtacttgtgcttatagaatctgaaaattcttacttttcatcaatttgggaatatccttagtcattagagatttcatgcctctcatcaattatcaaatattctcagccattctcccttctaatggtgcctctcccaattcctttcagctctaaccataccaaaacctattaaatgtatat

SEQ ID NO: 478737 - DNA, 1032 bp, Homo sapiens
ctgtcccatctgggttctaatcccagcattactggaggttccaatttggcgtggccagatcctgactgtgtgactttgggctggtcaccttattgccctaatgttttactacaaatgcatttaaggagatgtcaaggggattttcaaaaggaattaatgcacttcagtatggcttctcctggctgcctgcagcaggtacccctaccctgtgctctcgcaggttcctatgctgaccctgttatgacattcatcacactgcattacaagggttacatcaacagtgtaatagctcattgttacagcaataacaatggcttttggaaaaaggaggagaacactccagacaacaggaacagtaggaaaaaaggcctggtggttccagggggcatagaatgtttggagaacatcatatctggaaataagcagctgaaacagcagagaggcagaggccaggacactgaaggccttgtatgctacgctttggggatgggaaaccatggaagggtttcaaatggagcagttagatcagacctgaatttcatgaaggactctggtttgggtcactggaagccaatatgaaaatgactagaaagaaattcactaaatgttaacagtagttttccctgggtagaggaattatgggtgattgatattctgttcttttgtacttgatattctgtaaattttttctaacaggacattttacttcagtaataagaaaaataaccagaatttacgtacacccccaccccaccaccttcagtggccactcattacctgcaggctaaaatggaaatcccttggcatagctttcaagggttttcctgctccctgaatctaccctccatttgtgccattgggccctccctgtgctccgcctccccttcccatgcctggccattcatccctcaagactcaactctgaaatgccctcccccaaagaaatgtctcctccttgcccacttccaatgtggctcttagtaccctgtgttttaatgcctatgtccagccacgtctgtcccccccaaccag

SEQ ID NO: 478738 - DNA, 1095 bp, Homo sapiens
tctccagttttaagctcctttagatagacacgtccactgcctcacacttcagtctcctctggaagcaccctcacagacacacccagaaacaatgcttcaccagccatctgggtatccgtcaatccagtcaagttgacacctaaaattaatcataggttgcaatgacaaaataccatcgattgggtggcttaaacaacagacacttacttctcacagttctggatgctgggaagtccaagatcaaggtgctggctgattctattcctggagaaggccctcttcctggcttgcagatggctgcattcttgatcaactctatcaagtcccgagtctggttttatggcaaagacaatgatgcaggtctgacacctgtggaaggagaatgggaaggaaagattgtcaggaaggaagagtatcagataccatgcaactcgagaaaggtcttggccagggaaagttaccaaagacagaagaagaattgcaaagacactgctgagtggagaaggaagcccagcctgcgtgactctggctgtctttgtgtatctgctggccatgacagccccagaagtctgtagatggtcctcccaggtctgagttgcagctttttgcctgcaatgtcactgtcttcctcaccagcccagcctgctttgttgttgttctttgaacctttttaaaaattttattgatgcataatagatgtacatagtctggggatcacatagaatagaaacaaagaaaaaatgaaaataaaagtttacattgtaactccatcgcctccacattttgactgttagttgtttcaatttacatatttttatattacctgtctcttaacaggttgttgtagctattattgtttttgacagatttatattttgggtttcatactagagttataagtgcatttcataccacaattacaatattagagtattctgcatttgtgcatgtacttaattttaccagtgtgttttataccttcaaatattttaaattttgttttgtttttgcatattagtgtttttttctttcagattgaataactccctttagcatttctttctttcttttttttccttacagtagatattatcc

SEQ ID NO: 478739 - DNA, 698 bp, Homo sapiens
ccatctgccatggggcagaagaagggtatatttctgcacctgtgccaatccccctttgatcaaaggttgctgccctgtgagaggttaactcccttgtacttcaaagtttgcacatttgtcagaatgccgtatgtggccacagcagaaaagccccagaagccaaaaacaagagggttgaggagggaacaggggcgactgagtgagctgctctcagacaccaaagttatttgcaagacagaaagctctcaggtcttacaatggaaatctttccctcttattcctttccctaacaagtatgcgtggatgctgtggggagtgttacacatcacccccttcatgcagccatacccactccacactgatagggccatccacaccttctgtcagaggcttgtgaaccagagcaactccatcttaaataggagctggactgggtattatgaacggatattttggctcatggttctggaggctgggaagtccaagatcaaggggccacatctggagaaggcctttttgctgcgtcatcccatggcagaaggcaaagtgaagagccctcacggcctaagcacctcccattaggccccacctcccaatactgttgtgttggggattaaatttccaacacacgaattttgggggacacccttaaaccatagcacctactatgttctaggtcattctgttttacctgtgtt

SEQ ID NO: 478740 - DNA, 591 bp, Homo sapiens
gcagggcgatggctgggcactgtgctctctattcctttccccatgaagaacatgaatactcgccatgaggatgcgtgcctgctgtggggcagcttcctgatgatgaagaagaaggctgacctgtatgactaccagcacaggctgcctggtccttgggttttcaactgggttcccagtgggagctgtgagaggagacccaagggagagaagcaatggcttctccgaaaagacccaccccctgattacctggtgggtgttggccaagatagggcttccacctatgaacctttaggcaaggatgtaccgcccagtagacaacatcccaaatatgaaaccgtttccctcaatttccccgcacagggcagtgagacagtgttattcaaaatacttactgtccctcccccaacacacacaaaacaccgtgggaggactgtatgtccccaccctttgaactctggagtggccatgtgacttgctttggttagtaaaacgtagaaagaaatgacagcatcacttccaagcagagaattcagggccagcttgtggtcctctatgtctcttttctgccctttgtgaggacgctggaatggg

SEQ ID NO: 478741 - DNA, 570 bp, Homo sapiens
gcagtgccaaagtcaaccccgaccaagggccgtgggctagttggagagggagtcgctgtccaggcatcagacacaagagacaaatggccacaaaggactctctgctctgctcacacgtggccagactgggccattgtaggaagaacatgaatactcgccatgaggatgcgtgcctgctgtggggcagcttcctgatgatgaagaaggcaaggatgtaccgcccagtagacaacatcccaaatatgaaaccgtttccctcaatttccccgcacagggcagtgagggaaagcctggacctggcctctggccgtggcttcaccctgactccctgtgtaaccacagcttggtccctgtactcttggtttctctctgtgtgcaccgtggaaatctgccctccagccccaagattgctggactgctggaaggactggctcatccctgggaatgacgcctctgccttcactttctctcagcttgcaaagtgcacaactcaagcctcttctgcagctgggaggcagggaaggaaaggcccctgcagcggggcctcctgtccctctgagaattagagca

SEQ ID NO: 478742 - DNA, 634 bp, Homo sapiens
attcagcatgctcagttgtgtttcacactcagcaagacgagaatactcagagaatctaattgttcatgctgccagaagagatacccttgaccagtgtggttttatattcccaaaatcaagttgcccatttgctccccctattcaatcaataaatgaccaacatcttatggatgctacaagcccagaaggactgggcctgcaacagaccaccaattccaagacactctcagccccgatggcacatgaaaggggtccagaattcctgtccccattagaaggatacaggggtgaacaaatgggaatattagccacatcttcaggggtccattgtatcagcagtgtcaaagcaggcccaagccagttgggcgttgatgtttctggagcaactggatagtcatacgggggaagaaatgaaccttgacctttacttcacaccattcacaaaacttcatttgaaatcaatcatagacataaatgcttaagctagaactacggaaagtctagaagaaaacacaggagaaaatctttgtgacctcagaataggcaaaagtttcttaagatgcaaaaaagcatgaaccctaaaggaaataagtgccaaattggacttcaccaaagtttaaaacttatgctcttc

SEQ ID NO: 478743 - DNA, 1217 bp, Homo sapiens
tgttgagtttggacctcttaagtatttccttcagttgacagaggagatacactatggtaagtgccaatcagacagcctctgtgaccgagtttattctcctgggcctctctgcccacccaaagctggagaaaacgttctttgtgctcatcctgctgatgtacctggtgatcctactgggcaatggggtcctcatcctgatgactgtgtccaactcccacctgcacatgcccatgtacttcttcctggggaacctctccttcctggacatctgctatacaacatcctcagtccccctcatccttgacagcttcttgacccccaggaaaaccatctccttctcagcctgtgcagtgcagatgttcctctcctttgccatgggagccacagagtgtgttctcctgagcatgatggcgtttgatcgctacgtggccatctgcaacccccttaggctgcccttctgtggagacaacatcatcaaccacttcacctgtgagattctggctgtcctgaagttggcctgtgctgatatctctgtcaatgtgatcagtatgggagtgaccaatgtgatcttcctgggggtcccggttctgttcatctctttctcctatgtcttcatcattgccaccatcctgaggatcccctcagctgaggggaggaaaaaggccttctccacctgctctgcccacctcacagtcgtggtcatcttctatgggaccatcctcttcatgtatgggaagcccaagtctaaggacccgctgggggcagacaagcaagaccttgcagacaaactcatttcccttttctatggggtggtgacccccatgctcaaccccatcatctacagcctgaggaacaaggatgtaaaggctgctacctgaaacaactattttgtctaacgagctcttttttcgtttaatggggaatggtatttagaagtcataatctgggtgctaggtttactattgagtttcccatggtttctaaatgtttcagtggaaagagctatgaaaaaatatatataattgaattatatgtatgtatgatatataaatatatatttagatttagatcaaatatataaatcatacatacagacagacaattcaaattaagagctatggattttttacctaatctcattgattttatacctgtatctccttcttctatgtactgtctcctcattccagaaatgtttggagatggcttgaagttat

SEQ ID NO: 478744 - DNA, 958 bp, Homo sapiens
tgacagcttcctgacccccaggaaaaccatctccttctcagcctgtgcagtacagatgttcctctcccttgccatgggagccacagagtgtgttctcctgagcatgatggcgtttgatcgctacgtggccatctgcaaccccctttggtaccctgaagtcatgaacaaagctacttatgtgcccatggctgctggctcctgggtagctggaagcctcactgccatggtgcagacaccccttgcattgaggctgcccttctgtggagacaacatcatcaatcacttcacctgtgagattctggctgtcctgaagttggcctgtgctgatatctctgtcaatgtgatcagtatgggagtggccaatgtgatcttcctgggggtccctgttctgttcatctctttctcctatgtcttcatcattgccaccatcctgaggatcccctcagctgaggggaggaaaaaggccttctccacctgctctgcccacctcactgtcgtgatcgtcttctacgggaccatcctcttcatgtacgggaagcccaagtctaaggacccactgggagcagacaaacaggaccttgcagacaaactcatttcccttttctatggggtggtgacccccatgctcaaccccatcatctacagcctgaggaacaaggaagtgaaggctgctgtgaggaacctggtatttcagaaacgcttcctgcagtgatggtggaggggtcctgatggctctgtgcttcctgactgctcccacctgagagtcccagaggacaagatgaaagaccaagttgatcaaaggttacatggggtaattcctgctagatatgtacaaattattgatttttaaagttagtcgggataattcctctcttatagttatttggtttatatacttcatttgcttttgaattttgcttttttccatcttctaattataaaaatgcatggctctaaa

SEQ ID NO: 478745 - DNA, 2449 bp, Homo sapiens
agctttcactcttttcttcaaatcagaggtggccatctcaacctgagtctttcaagctagtgctgctatttcttgcccacacactgttcctacgccatggccacatcttctcagtaggttcctgacaaagttgacagaggagatacactatggtaagtgccaatcagacagcctctgtgaccgagtttattctcctgggcctctctgcccacccaaagctggagaaaacgttctttgtgctcatcctgctgatgtacctggtgatcctactgggcaatggggtcctcatcctgatgactgtgtccaactcccacctgcacatgcccatgtacttcttcctggggaacctctccttcctggacatctgctatacaacatcctcagtccccctcatccttgacagcttcttgacccccaggaaaaccatctccttctcagcctgtgcagtgcagatgttcctctcctttgccatgggagccacagagtgtgttctcctgagcatgatggcgtttgatcgctacgtggccatctgcaacccccttaggtaccctgtggtcatgagcaaggctgcctacatgcccataaggctgccggctcctgggctgcccttctgtggagacaacatcatcaaccacttcacctgtgagattctggctgtcctgaagttggcctgtgctgatatctctgtcaatgtgatcagtatgggagtgaccaatgtgatcttcctgggggtcccggttctgttcatctctttctcctatgtcttcatcattgccaccatcctgaggatcccctcagctgaggggaggaaaaaggccttctccacctgctctgcccacctcacagtcgtggtcatcttctatgggaccatcctcttcatgtatgggaagcccaagtctaaggacccgctgggggcagacaagcaagaccttgcagacaaactcatttcccttttctatggggtggtgacccccatgctcaaccccatcatctacagcctgaggaacaaggatgtaaaggctgctgtgagggacttgatatttcagaaatgctttgcctagtgatgtttgggggaacagatgtcctcatagctctttgcctcttggttgctttcacccacaaatctcagaagagcatgctccctaaagaagatacatgtgaagaatgactaccagaaaattgaaatactcatgtaatagagcactttagctgtgattggacccaattaaaatgttgaaacctagaacccagggggagtgtgtcttgaggggatggaagcagaatgctgctggatacacaaggaatgacttttctgtttctccactgttcaagtctgaattcacctttgtgagcagatggttcctctgtttcgggaaaaacaccctcgggtacctttctgttacaaaaatgtaaagccaagattctactcttgaaaggaggcactgaagacaccatgggacagaacttcatgaccctgcccacctccctagcacagtgcttcccaacctgtgtcttgccatggagcacgtagaaaaccatgggatgtgtaggcaccctgggggccttttccccctttttcttggcacttctccttgttgctgccatgtgaagaagagtatgtttgcttccccttctgccatgattgtaagtttcctgaagcctccccagccatgctgaactgtgagtcaattaaacctctttcctttataaatcacccagtctcaggctagattttttttttggaaggaatagtttctcaatatggaaaactataaagtttaccacagtctgattttgctgattgcaattctgtggtgtctgtctttgtgtttcccatacattgatgcctagatctagttacttaatttttttttttttactggagttatgagctcatggctcctgagaccttttgcatgacgctagtatctttgatgacttcctgctatctgatatgtcaagatattacaagctcaatattcactcttccttcccagacctgaaacaactattttgtctaacgagctcttttttcgtttaatggggaatggtatttagaagtcataatctgggtgctaggtttactattgagtttcccatggtttctaaatgtttcagtggaaagagctatgaaaaaatatatataattgaattatatgtatgtatgatatataaatatatatttagatttagatcaaatatataaatcatacatacagacagacaattcaaattaagagctatggattttttacctaatctcattgattttatacctgtatctccttcttctatgtactgtctcctcattccagaaatgtttggagatggcttgaagttatacacacataatgatgtcaggagttaacattgagcacaccttctgtaaagagcagaattcaatcaagtcatccagtggtgtgtgtctgggagtactggggctgaccat

SEQ ID NO: 478746 - DNA, 1655 bp, Homo sapiens
aactcatctggctgctgctttctgaccagattggctatttttggcttctggactactcccagatcccagagaagtaatttgaatcaacacatttgttgaaaagcaagtctgggcttcctcactggctgtctgggcactttaggcatcagagaatcatggagctggccctctgagtttgtacaagtgacatagaaacaccatggtcagttccaatcagacctcccctgtgctggggttccttctcctggggctctctgcccatccaaagctggagaagacattcttcgtgctcatcctgctgatgtacctggtgatcctactgggcaatggggtcctcatcctggtgaccatccttgactcccgcctggacacacccatcttcctgacccccaggaaaaccatctccttctcagcctgtgcagtacagatgttcctctcccttgccatgggagccacagagtgtgttctcctgagcatgatggcgtttgatcgctacgtggccatctgcaaccccctttggtaccctgaagtcatgaacaaagctacttatgtgcccatggctgctggctcctgggtagctggaagcctcactgccatggtgcagacaccccttgcattgaggctgcccttctgtggagacaacatcatcaatcacttcacctgtgagattctggctgtcctgaagttggcctgtgctgatatctctgtcaatgtgatcagtatgggagtggccaatgtgatcttcctgggggtccctgttctgttcatctctttctcctatgtcttcatcattgccaccatcctgaggatcccctcagctgaggggaggaaaaaggccttctccacctgctctgcccacctcactgtcgtgatcgtcttctacgggaccatcctcttcatgtacgggaagcccaagtctaaggacccactgggagcagacaaacaggaccttgcagacaaactcatttcccttttctatggggtggtgacccccatgctcaaccccatcatctacagcctgaggaacaaggaagtgaaggctgctgtgaggaacctggtatttcagaaacgcttcctgcagtgatggtggaggggtcctgatggctctgtgcttcctgactgctcccacctgagagtcccagaggacaagatgaaagaccaagttgatcaaaggttacatgggtaaatctcattacacagaatctcattacatagaagggctctgtaggaacaggacacatttaatgcaactccaccaaagtatgttcttgtttgtctagcctcgtagttctcattctccatgatggatactgaatgaattgatgtcaaggaaaagtaactcttcacatttttattgttggatgaatgaaaagctctagtctgtaggtctttgattcaattgctccacggcttctttctttgaacatatttggctgctgctttctgaccagattggctatttttggcttctggactactcccagatcccagagaagtaatttgaatcaacacatttgttgaaaaggtaagcgagcacttttaaaagaatatagaaactcttgtgggtccttacttttatgttacctttcaagatcttcctactccatattacataatagttagttttatttttctcctcattgttttttttctgg

SEQ ID NO: 478747 - DNA, 704 bp, Homo sapiens
ccagaaagaagaataaccccaggaagtaccttcgcagtgtaggagatggagagactgtggagtttgatgttgttgaaggagaaaagggtgcggaggcagcaaatgttacagggcctggtggtgttccagttcaaggcagtacatatgcagcagaccggtcctccacgcaattaccagcaaaattaccagaatagtgagagtggggaaaagaacgagggatcggagagtgctcccgcaggccaagcccaacaacgccggccctaccgcaggcgaaggttcccaccttactacatgcggagaccctatgggcgtcgaccacagtattccaaccctcctgtgcagggtgaagtgatggagggtgctgacaaccagggtgcaggagaacaaggtagaccagtgaggcagaatacgtatcggggatatagaccacgattccgcaggggccctccacgccaaagacagcctagagaggacggcaatgatgaagataaagaaaatcaaggagatgagacccaaggtcagcagccacctcaacgtcggtaccgccgcaacttcaattgccgacgcagacacccagaaaaccctaaaccacaagatggcaaagagacaaaagcagccgatccaccagctgagaattcgtccactcctgaggctgagcggggcaggactgagtaaatgccagcttaccatctctaccatcatcc

SEQ ID NO: 478748 - DNA, 1385 bp, Homo sapiens
ttttctctggcagcactttgctaggatctgcccaccgccatggtcacctacaagctagtactgatcagatgtggtgagagcacgtggaacctggagaatcacttcagcagctggtacaatgccaatctaatcctggtaggccacaaggaggcaaagcgcggcaggcaggctctgcgagatgctggctatgatgcagaagagagcgatcggatcctctggacagtgctagatgccattgatcagatgcggctgccagtagtgaggacttggtgcctcaaggagtggcattacgggagtctggctggcctcaataaagcagaaacttctgcgaagcatggtgaggcccagatcaaggaggggaaatgggtactgactgcagcccatggcaacagccttcggggcattgtcaagcatctggagggtctctctgaagaggctatcatggagctgaacctgccgactggtattcccatcgtctatgaattggacaagaacttgaagcccatcaagcccatgcagttcctgggggatgaagtgactctgtgtaaagccatggaagctgtggctgcccagagcaaggctaagaagcgaaggccagcaggcatgctactgtcccccggaacaccctccctggccatcccttcctctgcccctgccccctgcacatgtcacactgaccacatctgtaggcatcttatgttgtagctgcagatggggaccagtggctcacattttcgttttagccatttgtctcctgcacccactcccttcatacagtctagtcagaatagcagttctaggtcacaggttctcagtccaagctgaggaaaagattcccttgtccaagagagttgaaaggtagtgacttgggtttttgccagtgttttctttactaaggatttgtggagaggaaccatgctaagccatgaccaatgaggagaagcaagagcacctatctggccccaggagccagttctctgctcttctgcagtcaggccactgcctgggggctctagtcattccagtggaagatgaatgtaacctgcatgatgatgtgacaaacaacatttcctccccaaccccagaagagctggctctagaaggttgggatcaatcctgaatttagtttatgtgttacatttacttttaccgaaaaaaaaagtatagtatatgtaaataatactaaacagtaacctttctggtgtttcttgtagtgattgaaatagtcccacatgtggtcatcagaatataagccattcctcataccaagatgagataagctctgaggggtaggagtgcctcctgctgtgtgttttagaatccttcacctgccttgtttcatggtggtgaaatgcctcttcgtcctgtccaagtatgtctttcac

SEQ ID NO: 478749 - DNA, 1161 bp, Homo sapiens
tgggtgtgaagtggtatctcattgtggctttgatttgcaaccagatgcttaatgacgttgaacatcttatcatctgctgcctcatctctctcttcgcctgcactggcaagttcctcaaaaagttactcctgcctgttttaccacacgggcaaaagaacttgaaagcttctctccttttcctctttattatcctcttatgcctgtgtcctgattttcctctcctgtggattctcggagacatgacttctctttcccatcagagagcaagctttctgagtgaagcatcatactcggttacatctctcagcctagcacaatattgttctgggttagagagcagttttaggttcacaggaaatttgagtggaggctacagagatttcccatatgaatccccccttcgctattatcagcgttccacaacacagaggtacatttgttgtaatctactctatgttgacacatcatcacccaagggccatcgttcacgttagggttcactcttggtgttgtacattctatggattttgacaaattttgaaataacacgtatccaccatcatagtgttttatagaatagtttcactgccctaaaaaattccctgtgctctacctcctgcctccttccagcccctggcaaccactgatctttctactatctccatagttttgccttttccagaatgttaaatagtcggaatcacacatatgtagccttttcagattggcttctttcacttagcaatatgcatttaagtttcctccatgttctttcatggcttgagagttcatttctttttagtgctaaatgatgttccattgtctggtgtaccacagtttatttatccattcacctgctgaagggcatttcagttgcttccaagttttgtcaattatgaataaagttgctataaacatgctataagcatgcagatttttgtgtgaacacaagttttcagctaatttgggtaaattccaaggagtgtgattgctggtaaacagtcggaatcagtaaacagctggtagagtgtgtttagttttatatgaaaattcaaagtgttttccatgatggttgtaccatttggtttctctttattgttttaaagttaaaatttcacctggatataactagatgatctggcctctttaaatagtttcttt

SEQ ID NO: 478750 - DNA, 1563 bp, Homo sapiens
gccggccctctatttccaacctaatgaagcctgtaccctgttctaccactagatggaagcacatgagatcatagaagagcctcatatcaccatggatgcagagaagcaccccccttcaaaggacccctctgctgaggacttacaggagaaccatatctctgaaagcttcttgaagccttccacctctgagaccccgttagagccccatacctctgaatcccctttggtgccatccccttcccagatccccttagaggcccattcccctgaaacccatcaggagccttccatctctgagactccttcagagacccctacctatgaggcttcattggatagtcccatctcagtggtgccagagaaacaccttactcttcctccccaatcacgagactatgtctgtctgtcttcttctgatactctgaaggaagacctctcctctgagtcttcttccaatgaggtcccatggacaaggaggtctacccatctctctgaatctgagagccttccagaacactgtctttcaggcccttcatcccaggtccaagtggacacaaccgaaaagcaggaggaagaagcaggagaggttgaaaagggagtagatgccagtgacagcactgctcacacagcccaacctggacaccaactaggcaagaagaagaagaagaaaggagttagctgtaattgtacctgtcctctcccctgtcctgttctcactactattcactgtccttgacttgccccaggaggaggagactgggttactcttggacatggccccttctcttagttttagggccttctcacttccccctggttactcatcctctcccatcctaggtaacacagcccgcccagtgttccctgctaggcagacagagctggtggaagtggctaaggcaatgcatagagaggagtttggtgctcaagtgaacaatcttttccagtgggagaaggatgcagccctgaatgccatccagacaggagacttgctgttctgacatgacaaagaccttagtccctttggtggaactccattaaaaggctgtcacccctgcatgccaggcccatgctgggtacccaaaagctttgagttctgttaccaaaggggagacctgtgtcctctggccctgctgtttccaagcctcagcctgtgattagtactcttgacagtcctgttagtggcatgctgcgtacagatgaacttgcaaaaacatgccatcctatgcatgagcatgcctacctgtgttatggaaattcatgtctatagggattaccttcagtaagagggccaccctgacctgctataaggattctggtctttctagactgaattcaatagatgttatgacatttattttggtccttcatacttcctttccctttatgatgggaatagagctacgatgacaggcctaaaacataaagacaagcaggtaattctaaatgcttatccctcctccatgaaatttactttcccctttcccatgcagggaccctccacctccccacccttgccctcccgccccaccaccaactttgtttgcttatgttaacatattc

SEQ ID NO: 478751 - DNA, 620 bp, Homo sapiens
cggctttagcagcctcctacctttacactccccagcatatgaagaatcatacttaaagccatgagattagagaaaaccacctatggaatgaacagcagaaagaagcaaggagaaaaggcttgtaaggaggatggagcaatcagtgtgaccagtgctcatgagactaagaaggagcctaagggtggagaatttaccattggaatctggcaatgtgaaggctgccctattcaacccctcatgggagacaggcaggaacatatgagtgagcaagtacaggaaccggccactttggcactggcaggagcaaactctttgtgggccctgcagcagcatctaggtggggtgcctgcaatcccaaggccccagagggtgtgttacaatgttgtcttagctctgtcatccacagacagcagctcagtgggccctctgcctcattgcatggagcagctgccttctgccagtgagggcaaagggccagtgtgacagcctgtttggatacctgcacctgatgtgttccaaattcttgtccagtgcccaagaggaatgaggtcatgtagttaaattgaaggatggtgaatgtggagaatttcactgagtgatgaaagcggctctcagcaaac

SEQ ID NO: 478752 - DNA, 558 bp, Homo sapiens
ttctgcctcatatgaggaccaccattctcatggccccaagacaaactctttgtctctccctagtggagatagatattaacccagaaagacaatatcccctgaaactagaagttagaaaaggactggaagccatcattgataacttaaggtttcaggacctcctcaaactctgcaacagcccttgtaataccccgatattggagatacaagaacctaacagggaatggagactagttcaggacctctgcctcgttaatgagactgtggttccagttcacccagaaaccccattaaagaacacagactggattctctttatggacacaagttcttctacagaacaagggatccataaagcagggtatgcaatagttaccttgaatgatattgctgagagtgcatctctccttgggcacaagtgctcaactagccaagaaatagaatgggccacttcttgaggatatatctttcagttctcaggatggctacaattggaggatggcaagcttcatctaccagctgccaaccaatggaaagttccttaaagccttcagcagg

SEQ ID NO: 478753 - DNA, 709 bp, Homo sapiens
agggtagtaaggttgaaggtggttgcacaaattcaaactgctaccggaagcatacgagagttcctgttgctctatgtccttgccaatccttggcatcatcagttttactaattttagccattctggtggagtatggagcaatagctccttttctaagaccagtcgtgggggagtttctcctcctccccccacaggaaatggctgtggcttgttacttggtgagaagccccaactcactccaccccagaatagcagatgtggctgctccacacagggctgcctttcccttcgtctcccttgcagctgtgacccctttgtacagtgtctgtccctggcgacttctgagcagacctcagctgctctgaatcttaagatcaagtctcacatgacccaaacatttaaggggattccagctccctgtgaccagtccctgatgaaaacactggaaatctcaaaatcctcatacactgggagcagtggaggtgcggagaggcagccctgtgcagagcaggcacctttcctgccacgtcccccggctgctgctggagccacggagagctccgtttcagcatgcctcttgccttctgttgtcttttcttctctccacagagtgggtgaatgacatgttgttgttatggtgcaatcattgctgccaaagtcaaggagcaatgacagatattggcttgattttttatgtaatttaaggtac

SEQ ID NO: 478754 - DNA, 645 bp, Homo sapiens
agcgagcgagggctgcaagggcggccagcatgctgtcacctctcaatacaaaatgggtcaatgtccaacacatcatcagcctcaatccttggagccatcttttccaccaaacaggagttttttgcctctctattagacgaaaatgtgcaagtgatcctgtgtccctaccgagctgtagaaaagctcttgtcaatagagggccaaacccagcactgcatgatggaatatacagcatcctcatttgcctatttccaaaaatatgtccagacaaagccctctcggttccagatccctgtagatgttatgtcaagtgccgtgggcctgggctctgttcagtgttgtgatttgacatgttgggaatatggatgccttcactgtcccacaaaacccttagcaaactgtcaacaagtacaaagggaaattcccagcagcagctgcagtggaaatgctatatgtggaatgccaacagaacagactctcattttatccggctgaaatgagggggaagtggctcttgatatgacctttcttctatgtggggttgccttttgggcttggaaaatttgtctcagaaacaaaatgccaagtgaaaggatagatccagaacatcagaagatagtagtttctccaagatcattcttcttc

SEQ ID NO: 478755 - DNA, 1267 bp, Homo sapiens
agcaaacggcacaccaggagattatatcccgtgcctggctcggagagtcctacgcccacgaagcctcgctcactgctagcacagcagtctgagatcaaactgcaaggtggcagcaaggctgggggaggggcgcctgccattgctgaggcttgagtaggtaaacaaagcagccaggaagctccaactggggggaggccactgcacctcaaggaggcttgcctgcatctgtagactccaactctgggggcaaggcatagcccaacaaaaggcagcagaatcctctgcagacttaaatgtccctgtcagacacctttgacgagagtagtggttctcccaagcatgcagctggagatctgagaacggacagactgcctcctcaagtgggtccctgacccccgagtagcctaactgggaggcaccccccagtaggggcagactggtacctcacacggccaggtactcctctgagaaaaaacttccagaggaacgatcaggcagcaacatttactgttcaccaatatccactgttctgcagccctccgctgctgatacccaggcaaacagggtctggagtggacttccagcaaactccaatagacctgcagctgagggtcctgactgttagaaggaaaactaacaaacagaaagcacatccacaccaaaaccccatctgtacgtcaccatcatcaaagacaaaaggtagataaaaccacaaagatggggaaaaaacagagcagaaaaactggaaactctaaaaatcagagcacctctccccctccaaaggaatgtagctcctcaccagcaatggaacaaagctggacggagaatgactttgacgagctgagagaagaaggcttcagacaatcaaactactctgagctaaaggaggaaggtcaaacccatggcaaagaagttaaaaaccttgaaaaaaaattacacgaatggctaactacaataaccaatgcagagaagtccttaaaggacctgatgcagctgaaaaccaaggctcgagaactacatgacaaatgcacaagcctcaggagccgacttgatcaagtggaagaaaggcagaaactctacaagccagaagagagtgggggccaatattcaacattcttaaagaaaagaattttcaacccagaatttcacatccagccaaactaagcttcataagtgaaggagaaacaaaatactttacagacaagcaaatgctgagagattttgtcaccaccaggcctgccctaaaagagctcctgaaggaagcact

SEQ ID NO: 478756 - DNA, 1274 bp, Homo sapiens
gccaagtggtgggtttgagcactgttaccccacccgctttgaaggaaggctctcaggaatccagaagggctcagaatgaccaaactagatgaacaggtgaaattgtcaaagccacattttacagatggtgacacaaactcaaagagagaaaatgagctctgctccaggttttgggaaaagctctttggcacttgtatggagcagcttgctcttcctggactggattttcctctgcatgtgagtgatctgaccaccatctccctgaccatcaagatctggactctgactcctgttcagtcccatgtgtcagcccctgtgcacttctttgcacttgacattctcatcacaacacaagatggagagttcccacagcaggcttttggacagaacactgtgggaaagtgcagtatagagtcaggccctggggcctggggggactcgggcaggcctgggcagctctctgtggccctcatggcatccaggcagccagatctcaggctctgtcatttctacatttactgtgatggagagagacagtatttccctcgagaaagactctgctgttctcatggtgctccatcccatctcacatagttctttttcttaaatatatatatttttctatggtactatcgtgcatctgatcattcagactagagatttcaatgctgtttattcttacgtcttcagtttgatttgattcaaccaaaatttgctgaacatttcttgggtatatggaactctgattcaggggacacagaagggagtacagtatagtcactgctgtcaagattttgtgctataaattgtggcaaaagcataattgtaaaatcatatgtactttggagtaaaacagaaatgtatatgaatggaggaagtggacaggtgttctcctaggtactgggaatacaggaataaataaaatattttcagtattctccgggagctccaagattagcaggaatcacaaaattattcatcataataaacattaatataacaattataatatatattaatatgttaatatattaatgtattaatacattaatgtgttgttaaattaatacactaataatgtactgatattattataatattgtatatcaaaatacattgtcatgaaattatttgtgattgagactataactatatatttttatattagtaaatgtatatttataatcttgtaaatataatacttgtatttatatataatctcataaatataatacttgtattcatatatatttatatgaaactctatatataac

SEQ ID NO: 478757 - DNA, 717 bp, Homo sapiens
atctgctcacacacgctgctctccctccatgataaacaagaccagcacagagagggagccactcctttctaatgcagacatctaaattctgccagagggtaaaagagaaagtagcatatacggtttcggtgtggtggaaagacatagtggcacaatgccttcgaaggtgggctccacctttgctgcctcctagatgtgaccttgggagagtccccagttgggaaacactcctacagagggaagccagtaacatcaggagaaggcaagctcggagttttctaagaagctccgttgcggccaagccttttcatttcatgacctcagccgaaagctggaggaaaacaaccccaaacacagctcaaactgggtctgcacacaggaaggcaattgctctagtaggaggaaatcttccctggttcccccacacaggatcacaaatcatcccctttgctcccaagtcaaagcgtttgtcttttgtagtatctacttatcacatgtaagattattattctatgtttacttatctatctttcccagttgactgtgagcttcttgaagataacaatgacatgatttttttctgtatatatgtaaatatttcttatttttctgtctaagctattcaagtctcctagagtattgagacattgtgtttgcaatattttactctggcaatatcttcacaatggctctaagacttttcaggccctcccttca

SEQ ID NO: 478758 - DNA, 954 bp, Homo sapiens
caaacggaaaaaaacggaattatcgaatggaatcgaagagaatcttcgaacggacccgaatggaatcatctaatggaatggaatggaataatccatggactcgaatgcaatcatcatcgaatggaatcgaatggaatcatcgaatggactcgaatggaataatcattgaacggaatcgaatggaatcatcatcggatggaaacgaatggaatcatcatcgaatggaaatgaaaggaatcgtaatgattggaatcgtcatagaatggaatcgaatggattcattgaatggaatcagatggaatcatcgaatggactggaatggaatcattgaatggactcaaaagggatcattattgaatggaattgaatggaatcatcgaatggtctcgattggaatcattatcaaatggaatcgaatggaatcaccgaatagaatcgaatggagcaatcatcgaatggactcaaatggaattatcctcaaatggaatcgaatggaattatcgaatgcaatcgaatggaattatcgaatgcaatcgaatagaatcatcgaatggactcgaatggaatcatcgaatggaatggaatggaacagtcaatgaacgcgaatggaatcaacactgaatggaatcgaatgcaatcatcgagtggaatcggatggaattatgatcaaatggtatcgaatgtaatcatcatcaaatggaatcaaaaataaccatcatcaattggtattgaatggaattgtcatcaaatggaattcaaaggaatcatcatcaaatggaaccgaatggaatcctcattgaatggaaatgaaaggagtcctcatctaatggaatcgcatggaatcatcatcaaatgaaatcgaatggaatcatcatcaaatggaaatctaatggaatcattgaacagaaattgaatgggaatcgtcatcggaataaaattgaatgcccatcatcg

SEQ ID NO: 478759 - DNA, 599 bp, Homo sapiens
ccagcagggtgggagccaagtgtcagctctgagctccaaaggcaaatgttgcagccacaaaggcagaagccccctccaatccctattcctgatcttgatgacctagcctcagaagtcactcatgtgcctgaagccagtccaaccgtactcacatttcctcctgtagtgctcacaggtaccagcaccgatggcattccctttgccctgagcctgcagggcatctcttttgtgcttccttcccctgaggaagaacttaatggaggctttcaaaggttattgaggaccgaacgtcctgggccaaaaagctgtaaactagaatacaacattcatttcaagtcattcatcctaggaatgtatgctgagcaccaactggtgctagattcgggaccaaaagaggagtgggcagagctgaccaggtgggcctgcaatagggaagcagcagacaggaagacgctacaaattggagcactccagcatgagctgcctggagttggttctaatgtggcctgactgccccatcaaaagatgatgaggggagttggtgaaatgtctgcatgaagagtttaaaattgtaaagcacatttttaagttacctacaa

SEQ ID NO: 478760 - DNA, 574 bp, Homo sapiens
gtaggcaatggtcacgcagggtggatggcgagagatggtctgaaggtccagttgatgggctccacctttggagtggcttccgctctgacactgacagccacctccaccctcggctctgacccgagcccccaccacagatctaacaggctcttcactcagcagccagcggggccctttatcaatggcagggcagggcactcctctgcccaaaccatttggtggggtcttcaaggatctggtcccacactgcactcacagcagctgctctctggaaagcctcaaccagccagaaaacagggagctcagttctactggtgcaaggaactgaattctgccgaccaatgcaagaccttggaagacgacctgagctctgaaagaagatgcagcccggctgacaccttgactgcatttcaacagctgatccatgtgcatgccaagttggcccagtgatggcttagggcatcgatctttcctgaagctccttttcatttggaaagctttattgatgtgtaacttacacatcatacaaaataggccaattttaagtgtacaattcaagttggttctggagcct

SEQ ID NO: 478761 - DNA, 669 bp, Homo sapiens
gtaccaccctgctggtaccatagagtagtgctacactctcaaaagttttatagttttaggttttacatttaggcctatgatccattttgagttaagttttgcatcaagtgtgagtccttgatcccgttttctgaacaccagcgtgctccatgagggccgttaaccaaggagaaagagctgagaaaccaggtgctgatgggcccgttttgtcactcaacaaactggtcaaggaggtccatgaggagcaggccctgtcctgggccccaaaacccacagtctctcctcttacttcctgcagcagcagcagcagcagcagcagctttgggcctctcctctgcccagcgggcacccctcctagcagctctcgtctcatctcagctatttccaaaccctacaatagacacagggaggcacggagcacctgcatggggacagggaacagccaatcagagcccagctgcaggatcctggaggccatggtgaggcaggtgcagcaggacccagtggttcaaactgagctccctggaatcctcagagccccactggcacctggaggaaggtgaaccagagggagggaacggacgagatgatgcaggttctgcacccagccccaccccaggtctcagggaagctgcactttcattggttgttcatttagattttcagtgt

SEQ ID NO: 478762 - DNA, 522 bp, Homo sapiens
gtcaacagcatggaggacaacgcagcaatggccctgctcctcaagagatcctttcttcttgatgatctcttccttcttggtctggaggtgctcttcacggagcttgcgtgcttccttggtcttagacccgcgggcctcagcctggtcagccaggggcttcttgcgggctttgtctgccttcagcttgtggctgtgttccgtgagaatccgcttgtgtttgaacacattccccttcaacttcagccggcgcagaatcctcagtctcctcatccacgtgaccttctctggcattcaggcattggctgtacccctccgcttacctatgcccaagtgcctgcccttccggcgggccaaggtgcttttccagcattgagcccgggaatggaccgtcacaggcttgcggtgacgcaagatcagcccatctttgatcagcttccggatctgctgacggaagttggcattggggatttcattgtgagtgagttctcatgatatctgatggtttgaaagtgtgtggcattt

SEQ ID NO: 478763 - DNA, 1076 bp, Homo sapiens
ggtggcaggttgcccccagctgcccagggcctctgcggcctgggtgcccacagccatctttcaggcacttgccctgctatgctcggaccctttctgtacccttggcgcttacctgctggcagcctggccccaccggcatcactgggagtgggctgtgccaccatacaagccacatctgactggcggtatcaggctgtcgcagcgacgtggaagtggggtgaggaggtcacgtcccgtgcttcttgctggctgagggcaaatccctccccacgtgcgcctgttctctctccacctttccgccctaagcccccaggtgcccttactcactcatgttccttgagccaggtgtcttaggtctttgtgtggatgaggaggagcggaggtgtgaggtgtgctgggccttcagggcctgggaaggccatcccagactgagccccaccgccctttcccagctcagtccccaccgagctgacagcttggaaaggggcggttgggaagtgagtagcaccctctgataatgatactgatcaggccagcaggtttgtcaggggtgcacatcctgctcagcagagcatatgaagatcacagcttggtgaagctccactcgagagacctggagcgagactgctgtgcggtgggtgacaggtggaactccagccgggccggggctggtggagcccactgcgagcagtctgaacgaagacataggacaactctggtgacagccacagctggtggccgcttcctcgtgtcagatgtggacggtcaccccgccctcccagcgctaagcgctgagactgcgtgtccagagtcggctcctgcacgtgaggccaattggtcacactgggccagtgtggaggaagacgcctctcatctcccaaatggggatctttcatgggtgtcacctgagcttatagagcttagtttagtctagccattccaagacagtggtttcttaaccttttctaggtcacaaaacctcctgagaacctaatgaaaactggatcccagccccagaaaaatgcacctgtgtgcacacacccagcagtttccaggtcatttcaagtcctgccttc

SEQ ID NO: 478764 - DNA, 1009 bp, Homo sapiens
gtttgaaaagcgttgcaatatgatgcacacgttgtgcggccactgtggctctaaggcctgtcaccttccgaagtctacctgtggcaaatgtggctaccccgccaagcgcaagaggaagtatgactggtgtgccaaggctaaaagactaaaggccacagggactgggcgaatgaagcggctgttctctgacggagctgtctctttgcacacgaggagcctgaaatatggaaaactaggtcagggggttttggtccaggtttccccctccctggtgaaacggcagaagacccactttcatgatttgccatgtggtgcctcagtgattctcggtaacaacggcttcatctggatttacccaacacctgagcacaaagaagaggaagcagggggcttcattgcaaacctggagcctgtctctcttgctgatcgagaggtgatatcccggcttcggaactgcatcatctcgctggtaactcagaggatgatgctgtatgataccagcatcctgtactgctatgaagcatcccttccacatcagatcaaagacatcttaaagccagaaataatggaggagattgtgatggaaacacgccagaggcttttggaacaggagggataaggaggtgctccagaagcacgggactgtggaccttgcaggagtgaagactgtgatgtgtggtccccatatgtggctcagcaaagactcgagagatcatccctttgtctgcattgacggccctgtgacggcctccagcccacaggcctgctttctcctgtcctaacaccaagcctgggtggcagatgaacagtgcctttcttgggttgccagctgagtcccggatttaggaataagttcagctctttcaaagtgcacagtgttacagtcgaatgggctcccatcctggaataatatggagaatcctttgtcttccactcactgtcattcacaaggcacagtgccccatgaaattgccccaatagaaaacatggcatccctgacctccaaatg

SEQ ID NO: 478765 - DNA, 3804 bp, Homo sapiens
ggcttcgtggagctcactcggtctgagaggtcggaggctgcgagtgtcgctgctgaaggctgtggtggaccaggctggatcgcggattctgagctacatcgcgggtttggtggtggatcttggatttgggggtggatcgcgggtttgggggtggatcttggatttgggggtggatcgcgggttgtgggggggatggcggatttggggctgggtgggggtggaaaggccacgaggagccgcggcggctcaggagcgggtggtgggcgtctgaaaagtcgccaccatgaggaagctcttcagcttcgggagacgcctgggccaggcgctcctggactccatggaccaagagtacgctggtcgggggtaccacatccgggactgggaactgcggaagatccacagggctgccatcaagggcgacgccgcggaggtggagcactgcctgacgcgcaggttccgggacttggacgcccgcgacagaaaagacaggtatcgggggctcagcctgcggtgggagggggccccaggcccggcttccctgcagcccctggggcgggggccttggagggccccgggcaccctcggagccgcggagccaaatggagcctcagactgctttccatcgctggcaattccccatttacataaaccaaataaaaatatcaaggttttatcatttttgcatgacactgtctatcttactattgtgatgatatttaaaaatgttcataatggagtgaaaaaagacttgctcctctagatatcaaaatgtgctattaattctcacaattaattatttactaacagctgaaaacacagataaataaatgcaacagaataggaaatccaaaaacactgaaatatatgtaagatatatacatagggattgataatggtaacatttcagatgagtaggaaaggatgagttattaataacatgcctgctgtgtgaagaaaactaatggaattttatgtcgcaaaaatgagttcctgatggaatttagactgaaatttttacatatgcaaaatgagaaaagtaccagaagaaaatacaaagacttatatatacaggtacattttatgttaataaaggccttcctaagaatgacctcgcaagcaggcattctgaaagttgatttagcaaactaaaaattaaaatcccctgtgtatcagaaaaaaattaacaaaagaagtaaaaagggaatctttttacctgtgcttgcagattttattatgtacatattatgtatatatgtttttcttatgtatagattcattacatatatgcaatgatagattaatcatttcattatagttgtagtcttataaaaataacaaatagcaaatagtattactatcacaaaaatactggtttataaaagttgtatttaaaaatattgagctccccaactgtattctatcaatccatttattcatcaaacataacctgaatacctgttatgtagcaaacattttacctgttatgtagcaaacattttgcactatctctcaggacccttccatacttaaaaactttgtttacctgttctgcctgagcaagatgagagatttaaaatgggaatagtaggacttaatctccttgaagcttttcctcccacctttcaagcaaaagcatttctgaaggtagaaaacagtaagagataacctttaactgcccttttgaaaatctgtcagtcttaaatactaatatgaataattggaaagtctgatttgcatatattctgtaaatctaagtgttgactaaaatgagccatacctgttcatctcaatcattagtttcctttagcttcatatttttaaaaatcaaagaagtaatttgtttaaaaaatatgttgttatttcagtgctctttccccatggtacttttaggaattaaaatgtatttaagtgtcaattagatgcctagaactgccctagacctgctgtctataccgtatttgcttaatgtaaggcctcatggattgtgtgataccctactgttttctatattaataagatgattttttaaacgctaccaattgtagttataaaaaattatgaattataaatgccattccaatatcagatatactaaaatgtgacctaatctttaaatcatcctgcaaaatggcaataattgtatcattttacttaattaaaatgtttttgttaagtagtagtaatagtaataattgtaacatctggctgggactgttctacatttgacctgtgcccatggccgtgtggaagtggtcaccctcttgctgagcagaagatgccagatcaacatatatgatagactaaacaggacacctttaatgaaggtatatagtagccaactttttcagcatgaaatggatttgatttaaatacatagaattaaaatgaatttatctcatttaaatataactagttggtgaaacctgtggaatatgtattttgaattcttagaatttatagtctagttttttcatctgacactaataggctgtacactgccaggaagaggcttgtgccattattctcctggaacatggcgccaatccaaacattaaggatatctacagcaacactgctctccattatgctgtgtataataaggggacttcactggcagaaaaactgctttcccaccatgcaaatattgaagcactaaacgaggtacagatcaatcaactttcttttcaaaatacttgttttaacattgacataggtaagagtcagtttttcatatttggaactcaagtgttcccgaataaaaatattttgaaataaattaattgtctaaaattttaccttaaatattgatacttttaaagaagcttttttagtgcacttatgggaaatatttgtgaatttgttaagctaaaacttcttcaagtatttgtttcctaccccaggtgtaggaaaatactaattatttttctaattagtattaaaaaaaatcacaggaaaaaagttaccctggaaataggctttatcttaaaaccagcaatagctggtacgtgaccgagtccaaagtagaactcaagccctagtttaactgaatccaaacatcaagctcattctatccaaaacagcaacttaaaataaatggaagtcttgctgctgctgacggttttctaacaaaagggatgtatctttcattggcaaggtttaagagggaaaaatgggaagggaaaagggaagcaatcaaaaacatgcaggtcagttgaaaattaggtaatgagagaaaataccaagaagaggttttgttttttagtttgttgtttttccagtttatgtattgagacaaagcactcttcagctttggggtaatcatttttggtttggtaaaagagggattgaaacttgcctaaagattaatttttagaggactctgaggaaaccagattggcagtgaatatatggtgatgaagtgagaaacacttcagcaaagggtggaacaaattagtaactgacttattacccatcctggcaaaaacagccacttagataagagtctaaactctcctttcaaatctagaatgtcttggtgggaaggtgggagataaggagcttataaatagcaaaatcaactgggattttgagtttacttatccctgttataaccacacccaggaaaattcactggcgttttaataaataactctatctcatactcttttctctttctggccacatcccaagctgataaaggatattggccatgtgggtgagagatgaaactgaagcgatcgtctgccacagtaattctcagctagaattgtgcattacagtgacctggggaaattttgttaaaag

SEQ ID NO: 478766 - DNA, 708 bp, Homo sapiens
ggcacaccccacctctctaggcccagagcagggtgctggctgcagcctggcagacctggagaagatgaatgagcctccaggagggcctgctgcaagcccagtactccccagctgcctgagaggagaattatgactgagaaggcaggccagagcccaggccttcgggtggtcccagccctgccctccctgcagccatgggggcctccagaactctgtcttatcaccagctgccccaggagcatctcccacttcccagaatccaagcccctctgagcagccagttctggcaggacatccagggagagctttgggcccagccggtgcctgggggtggctgcatcatgaccccacagcccattccttcaggcacccaccccaagacaccgtactttctgggcctcagtaggcagggccagcggcggttggctctgaagctgaaacactatgtccatgcaggcagcgcctggcactgggcaggtatggtccaggcccctccacccttcccctcaggacctccctctcgcgccagattgaagcagtcatggttccccaggggcacctggtggtccctgcagcagctggctgcgacaagaggccaggctgctccctgcccacaacatcattcacatcgttactatgggtgaaggattcctctccatttactggggagaaaactgaggttggggaaagggagccactggaagccac

SEQ ID NO: 478767 - DNA, 861 bp, Homo sapiens
ggcccacagagatggacggcgatggcggccgccgagacgtccccggcacgctgatggagcccgggcgcggcgcggggcccgcgggcatggcggagcctcgggcgaaggcggcacggccggggccccagcgctttctgcggcgcagcgtggtagagtcggaccaggaggagcgccgggcttggaggcagccgaggcgccgggcccgcagcccccgcagcccctgcagcgccgggtgcttctgtctgaagacgcgccgcctctcgcggagcgcgcccgcggacgcccgccgcccccgcgcccgcagcgctgcccccgcggacgccggccccgagcccgtgggcacgcaggagcccggcccggaccccatcgcagccgctgtcgaaaccgcgcctgcccccgacggcggccccagggaggaggcggcggcgaccgtgaggaaggaggatgagggggcggccgaggcgaagcctgagcccgggcgcactcgccgggacgagcccgaagaggaggaggacgacgaggacgacctcaaggccgtggccacctctctggacggccgcttcctcaagttcgacatcgagctgggccgcggttccttcaagacggtctacaaggggctggacacggagacctgggtggaggtggcctggtgtgagctgcagcaagccgtggctgccccagcagggatacctgcagagacttcttctgacccagggcctgtgacccagaggtggtgcctggtagagctctggggacagctgggcaaggcctggaagtgtgccgctggcagccccgccagtgccagtgctgagctggcccgtcatcccgtgcagatctgaaggtagagaaggtaggaatcgt

SEQ ID NO: 478768 - DNA, 789 bp, Homo sapiens
taggttttttcctaatcttatccagcttcacccaatcacaggcacacgtgagtaaccacagcccctgaaatgacagaatacgatgactatgtcttagatagcccatacaaggttatttccatatttcctgatttaaaatactttccttctcttgacggttgtttggatcctgccagtcactgggaagccagtgctgtcatggaaatccctgcacacgacacacgggtttccttcggtttggcgagacattcccagatgaccgcagagcttgtctgccatcacatctccgtgatttccaggtacaaatttgccgtagtaagttatgtctggcttgttctgcaaaaaaaacaccaagtgctagtagatggattcaattgcagccactatgtcagtgacatggttaagaaacagtgtgcagagcacgtgcttacagaggtctatgcacatagagcttccccaaattttcatgtcatcaattttccagtcatgtgccttccaggtatctgatcatccagccaaaccattggctacagcccatgaatcagtttgtaattgcatatcatgccatttcttcttccaggcaaagtggacaaccagagaagaaaagaaattccatgatttgagggagacaaagaataaaaataaaaataaatcagcaaaaatttgactagacatctgacaaaagaaggtaggctaacggccaataagcataagaaaaaatatagaatatgactcctcatcaggaaaatgtgaattaaaccacataatttaaccacccaggtctcagat

SEQ ID NO: 478769 - DNA, 537 bp, Homo sapiens
gagctccctgagccagaactgccatctttcagtaattcgccaaaatgacgaacacaaagggaaaggggagaggcacccgatatgtgttctctaggccttttggaaaacatggagttgttcctttggccacgtatatgcacatctataaggaaggtgataatgtagacaccaagggaatgggtactgctcaaaaaggaatggcccacaagtgttaccttgacaaaactggaagagtctacaatattacccagcatgctcttggcactgtcgtaaacaaacaagttaagggcaagattcttgcccagagaattaatgtgtgtattgagtacattaagcactctaagagccgagatagcttcctgaaacactggatgccagagaggcctgaaacctccaataggcatagacaaacaatcagacagacaaacaaaagtctggctggagaactgggtaaaggggaagcacaacagagaccaaatggggagctctaactcctgtttcacaactggccacaaacaggtggcctgattttcctcc

SEQ ID NO: 478770 - DNA, 1555 bp, Homo sapiens
tccgtccccagcatagagaggaggcagctgatcccagaggctctgtgtggccaggcaaggaggagctctgcaaccatgccaccaccccttactacaaaaagcctatgtatggcacctcacacaagttcatggagaagaagaaccgtccctcaggggacctgctaaacatatatgagctcttccagaaggtaaatgccagcaacagaccctcgtcacttaggctcctgaatgagccacagaagtgggactatggcagcactggggtggccaccaacagtgaccctaacatctacttcctgatccagaagatattctacatgttcaacaccctcaagtctaacaggtcccagctgcacagcacaatggacatactctccctgaaggtgaaccccactgagatggtggccaaattccagctgcccccaccaccgcatagcagctcatgggccgcagagctcaagcagatggtggaccagagcctgtcgggtggggtcttggcaggctgcccactggtgcagctcttccccaagctcttcagctgcagccgagcagtggaccccggccacttcctggaccacaaagacgaggaggacggcctgtctctggaccggagcagcaccatggcctcagaccacgtggtggacatgcaggacctcaccgagttcctggatgaagcctcttcgcccagcgaatatgctgtcttcctcctccactggctcttccctgagctctttgaccactgcaagctgggcgagtactacagctgctatggggatggcagcaagcaggagctggagccgcagaggctgcagatcatctgcaactacacagaggtctacttctcccatatgcaggaggaggaggcctggctgcagcagtgtgcccagcgcatcaacgacaagctccagggcctgaggctggatgcgggcagtgaagacgagccccccacggtggaggatagctccaagggcgagcagcgccgctccaagaagatctggctggtactcatcaacctggacaaattggagatcccccagcccaatttggaggtgcctggcaccgactgcctgctcagcaaggagcatctgcacagcatctatgagagcagcctgtccattggcaacttcgccttgcacctgctggtgcccctgttccccaagctcttcacccatgagaacctgcacaagcagtacagctccagcggttccctgggcaagaagcagctggacctgtcctgcatcaagctcattcgccagtatgtgtgtctgctctacctccatgccaaaaacgaccgcttctggaccctggagttcatgggcaacctgcgccgggacacgagcagaggcgctcctaccagcagcagtgcaaggtccacgtgctggcccccagtgcagagacatgaggagctatgcaatcaaccctgagaggtttgaggaggagtttgagggtcccccgctgcccccaagaggagcaggaaggacttttgcaagatccccttggacaaggtggtggtccctcgcccagcttcccggtgccctctccctacctgctgtcc

SEQ ID NO: 478771 - DNA, 1432 bp, Homo sapiens
tacaggaggcatggctggggagggctcaggaaatttacaatcatggccgaaggtgaaggggaagcaagcacatcttcacatggtgacgggagagagaaagcgaagagggaagacatgggctactgccagggtgtgagccaggtcgctgttgtcctgctgatgttccccaaggagaaagaggccttcttggcactagctcagctgctgaccagcaaaaacctgccagacactgtagatggacagctgcctatggggcctcacagccgggccagagcccagccggggcccctgctctggtctctgctgccgctgctgctcctgagcccagaggccgcccctgccccacagtcccgcgccgccagcccctcgcaggctccgggggaggccagagagagcttgggggcgcagcagggccgggagcccgcagccagagcccaagtgtgtgggaagcctaaggtggtggggaagatctatggtggccgggacgcagcagctggccagtggccatggcaggccagcctgctctactggggctcgcacctctgtggagctgtcctcatcgactcctgctggctggtatcaactacccactgctttctcaaaacctcctcatccttcatcctcagctctggcagggagttccctggcccctgtgtctgtctgctcaacccagacatgcgtgagagcattggcagtgtctgtgctggccacctgcagggcttctcttcagtgtgcaccatgctcctcaaatcccaggccccgaagaactatcaggttctgttgggaaacatccaactgtatcatcaaacccagcacacccagaagatgtctgtgcaccggatcatcacccatccagactttgagaagctccacccctttgggagtgacattgccatgttgcagctgcacctgcctatgaacttcacttcctacattgtccctgtctgcctcccatcccgggacatgcagctgcccagtaacgtgtcctgttggataaccggctggggaatgctcaccgaagaccataagaggggtgtgggagaggcgggaggatgagggaggggaaggagagggaggcagaggggaagaaggaaggatggcttagccaggcaaagaggaagccactggacttggccctctgtgcctcatttccatgaccggtaagacaagctatgggagtgaaatgaaatgaaccaagatcaattaaagacttccagtttccagtctggagtataagaagcttggaagtcatcactcccattctcaaaacaagaaaaaaaaaagctgaacaaactgaaagtcaacaactcttcttagatctgtcagagaattgaggtcacagggcagattactaccctcaaaactggagacaggcagatacagagaatcacggttaatctgaagggaagctcagatgtaaaagctggctatt

SEQ ID NO: 478772 - DNA, 582 bp, Homo sapiens
tgtttgttttgtgctaatgctgtttaattttgtagcaaaccctgacaatgcaactgaggcccttttaagattgtctgccaaggctgtgcagttccatggatctgagccaatgtgtagagtctcccatccaccactccagcaacaaaaggagcagttcctacatccgcaaggtctcccatgcatcccctttggagccaacctctccccactccatcagctcctggcaaccacggatctgttctccatccctatggttcagcattgtccaaaatgttctatgaatggaatcatatcaccacagaggcaattgcaggtctctggtcggagtgacacgctggtgagactgaaaggtgtctgtgtggaagcatctaaccaccactgcccattcagtgatagaagttctttatatattctggatacaagtccttagtcagaaataagttgaatgtttagaaataaaaaatgcatggcctgaaattaatatttattatgggcaataaatggcagaataaaagattagtgagcttgaagacacaggattagaaattacctaaaatgagaaatgacacagagggaagaaaa

SEQ ID NO: 478773 - DNA, 2248 bp, Homo sapiens
agacagtggttgcctaatgatctttgagacatggtgccctgtctcccagatgcttcagctccagccacagttaaaaggggccaaggtacagctcaggccattgcttcagagggtccaagctccaagccttggaggcttccatgtggtgttgagcctgtgggttcacagaagtcaagaattgaggtttgggaaccttcacctggatttcagaggatgtatggaaatgcctggatacccaggcagaagtttgctgcaggggcaaagccctcatggagaacctctgctaggacagtgcagaatggaaatgtggggttggagcccccacacagagtcctcactggggtactacctagtggagctgtgagaagagggtcactgtcctccagaccccagcatggtagatccactgacaactttcactgtgcccctggaaaagccacagacactcaatgccagcccatgaaagcagccaggagggggttgtaccctgcaaagccacaggggtggagctgcccatggccatgggagcttacttcttgcatcagtgtgacctggattttaccattgccatggcaacactcaggcattaccacccctttcagcggcaatgacctgatgacccaaaaattaccaccattttcctaacaatttctgcacaaaccatccctgaatctgcatgtaattaaaatgtttcacgtgtgtaaagtagcaagcatgtatatactgcttagaggcatctacacttacatactacactcatatccaacacttgcatcgtacaaagtacacatagtaggtgtggcatgtaataagttaccctcctatattttcttctaaaagatttttaaatatttgcatctcaaatttaagtcctttgtccatttagatctggcctttgtgtgatagggatccatttttgggatagagatgcattctgatattttcccatatggataccaattgctcataccatggttcatatagaccctttctgactgttctgtaatgttagccagggcatacatcaagatttcacacaagcatacactttcacaatagcaattcctgctgtggtaattataacttcacagcaaatctgattattagtgtaacattggaactactggtgacatcatctaggcatcatgttttctttgtagaattattaattattaactcaattactttaatgtattagtgcaaaatatatttctctttatgattgtactcagattaactagtttgcaggactgtgtccagagttggttccttccggtgggttcgtggtctccctgacttcaagaatgcagctgtggaccttcctgaaaatgtgaaactccgaccaagtgcagtggctcatgcctgtaatcccagctcgttgggaggccgaggcaggtggatcacaagtcgcaggtggcgtgatttgatttgtgtgaaggcaatgaaatgatacacagatacaccgaagcctcccaaaagaatcctggttccaagactcaagaagatggattaatgtttttccattaattgttggaatttatgccattttttactatgtgccatcaattttaaagcacttctgaaaagacataacaatctaaatgagatggcattttaaattcataaaaatatatttttaattggagcctttagaattttctctatatgagatcatgtcatcttcaaatagagacactttcacttcttttccagtttggatgccttttatttctttttcttacttaattgctctggctaggacttacagactttttcagaaaccccccaaaataatctaagggagtccattgtcactagacctgctttataagaaattctaaagggagttcttcaaactgaaatgcaataagactaattagcatcacgaaaacatatgtagttataaaaagtcaccagtaaaagtaactatacagtcaaattcaaaatattcctaatactgtaatgatggagtataatcactttaacttttaaaaggttaaaagacaaaaaatattacaaataaatataactacaaaataaacaaagaaataaacgctgacatcaaaaaaacataaaaagtggaggggagtaaagtgtagggttttgtatatgcttgaagttaagttgttatcaacttaaaatagaccattataactataatcatacatttcttaatgtggatatgttctgaataatgcctcattatgcaattttgtcatggtgtgaatatcatagagtatacttacac

SEQ ID NO: 478774 - DNA, 1160 bp, Homo sapiens
agtcaccatatctggtcaagattgtcattcttaaaggcattgatattaaaagggttattgaagattaaggttttgctatgagtgctgttagtaactgtactgttgctaagaaagctgttgttaagggcatttttgataagggtactattggaaagagtgttgaatttaaagaaattgttgttatgggctattttcttagagtcattgttcttaaaggccttgatagtaagagtgttgaaaataaaacagattttgctacgagtgatgttgataagggagctgctgctatgagcactatgctaatgtttttgctaaaagtcattgttacaaaagctgtggttactaatgatgttgctgccatggaacacgtgcctaaggatgatatttcaattggcatcgatagtaaggtcactgttgctaaggaagttatttctaagtgcattgttcctggagccattgactggggcacttgctcttccaaattcttcatgactccctcttcattgagccctgagggaaatggagagagagaaaaatggctatggttcgctttgtttgtgtatctccccaatgccaatgtgactgcttcaatagactatgtcacagatatgttgcttgtaatatttgacatgatgtgaatttttattcaagttaagcaacagccatgagagacaatcacagagagcctatccatgtgtttctgacaaaggttccttttttattgttttatgtttatcaagagatttcttttgacacatgtactttttaaatttttttattttgaaataattgtagattcacatgaagttgcaaaaagaaaaaaagtattttacaattgcacatatttaaggtgtacagagtatgacacgtgtaaaacacaggaactatcattaaaagtagaattaacaccccaaaatgtcctgttgtggcaagcttctcttccatcttcaaacatagggctttagataaaagctttcaaccaattgccaatcaggaaatcttttaatccacttatgacttgcaggccacaacccccccactgccccttcctcccccttcacattgctccatgtgatggttaatattgagtgtcaacttgattggaatgaagggtgcgaagtgttgttcctggatgtatctgtgaggatgttgccaaagac

SEQ ID NO: 478775 - DNA, 713 bp, Homo sapiens
tctctcccacaaaatatgggaattcaagatgagatttcggtggggacacagccaaaccatatcaagtccctagagcccaggtttccacgttccttctctcgcgagaattgtgcagacacgccctttctggctgcaaactgtggagatgtgtggcaggcatctccacctcagaaaaatccagagttcttaaaggctgctgatcacacagctacccaaccagccaagttgcagatgccaaacaggcaccagccatcattttaccttattgcaataccaatccaaaaagaggagaataagaggccatgtagttccacatcagcccagaaaaggcgtcccctctttctggtcatgacagattatgagaatgaaaaggggatgaaggcagaaagttcaggagaaatgctactcaatgccagcaatcaggtaggccttacaatcagagtttggagtgcctatagcatcagcagaaatgatgtggcactcatcagcaaagggcgatgtacttgtttctgggagtatggcctataccaactgaatggccagtgggacaagaatggttaccaagtcctggggaaagggttggaggaatgcggagttattgtttaatgtgcagttttgggatgacacgaaagttctgaaggtggatagttatgataattgcacaataatgtgaatacacttaatgtcactgaattgaatatttaaaaatcgtc

SEQ ID NO: 478776 - DNA, 630 bp, Homo sapiens
aaaccacccgtttatgatttcaaacaggtaatacttgtttctcaataactggatgggggctggatggctaaggggcctcatattttagggacaggaggagctcatcgtcagctgggtgatgggaatgcgaccacaagtctcattatccaggagagcttgaacataggggttgagtttcaaaagcagcataagggcagcaacacaagaacttcccatgtctcacttctgtcatatttgctattctcccattggccaaagcaggtcacaagggcatggccagccggtatggaaggggacaaccaaaggggtagacacagggaaggatattgtttcacaagtgcggtccctaaaatggagcagggaaccctcttggggcctgcaccccctccattccaccaccctgcacccccatccatggaaataaaggaaaatattgagttccttcaagggaaattccaggcacctagctagccctgagaagcaagcaacttgataagcaagaaagtaatcacagcttaaaacaacagccaaggaagttctagccataagatatttgaaactaaaggcaacattttaacatatgtccctgagttgtttttcagaaacccagactccctaccgagccgatcc

SEQ ID NO: 478777 - DNA, 1731 bp, Homo sapiens
attggtcaatctctcgtaacctccgcgcggtcagcgccgtagtgtccggcctgccgcatgccctgcaggtagcgcccccgcctgcggcccagagtgcactcgcgcctgcgccatctcccggaaaaatttcgcgccacgcagagatgacagccaaggagatgaaggcgaccgagagtgcggcgcagccggcgccgctgcccaagaaggaagtggacgtcagccccaaacaggatgaaggagtgctgaaggtcatcaagagagagggcacaggtacagagatgcccatgactggggacctagtctttgtccactacactggctggctgttagagggcacaaagtttgactccagcgtggatcgcaaggacaaattctcctttgacctgggaaaaggggaggtcatcaaggcttgggacattgccgtagcaaccatgaaggtgggggaggaagaagatctgacggaagaggaagatgggggaatcatccgcagaatagggactcgcggtgaaggctatgtcaagcccgatgagggcgctatggtggaggttgcgctggaagggtgctgcaaggaccagctctttgaccaacgggcgctccactttgaggttagcgagggggagaacctggatctgccttatgatctggagagggccattcagcacttggagaaaggagaacattccactgtgtacctcaagcccagctatgcttttggcagtgttgggaaggaaaagttccaaatcccaccaaatgccgagctgaaatatgaattacatctcaagagttttgaaaaggccaaggaatcttgggagatgatttcagaagagaagctggaacagaacaccatagtgaaagagcagggcagtgtgtacttcaaggaaggcaaatacaagcaagctttactacagtgtaagaagattgtgtcctggctggaatatgagtctagtttttccaatgaggaagcacagaaggcacaggcccttcgactggcctctcacctcgacctggtcatgtgtcagctgaaactacaggccttctctgctgccattgaaagttgtaacaatgccctagaactgggcagcaacaacgagaagggccccttccgccggggagaggcccacctggcggtgaatgactttgaactggcatgggctgacttccagaaggtcctgcagctctaccccaacgacaaagccgccagggcccagctggctgtgggtcagcagcggatccacaggcagcttgcctgggagaagttctatgccaaaatgtttgagaggctggctgaggaggagaacaaggccaaggcagaggcttgctcaggagaccatcccactgacacagagatgaaggcggagtgcaagagcaacacggcgggagccagaaatcggtattatgggctgcactgtagaaataaccaggaagccaacttttataatgtgacacaagcagataagccaagctgtctgcgtatgcttgctaaggagcacatgcatggagctgtgggtatattgggtattagggctcagcatttactgagaacactgtgctcagtgaagtatgagcttcgtatatgagtaagggtagttagtctaagttaaaaggtgagaaggcagactctgtgggtgtaggtactggtgggtaagtgtctttgttcattttgtgctgctgtgacagatgaccacagattgcgtgattaattttttcacaggtataaaagctgtgaagccc

SEQ ID NO: 478778 - DNA, 1659 bp, Homo sapiens
cggaagagcaggccaacagacacctgcaggccatcaggccatcgatggaggcctcttagataagggtgttgttgctaagaaatgttccccacacatactgccaccaaggacatagttgttactgccactgtagctaaatgcatggctgatatagccattattgctctggtcacaattacagtagccactcttgcagaaggagcaattcctatgaccaccgttgctaaagacattgttattaagatgcatttgctaaatcaaggttggatggtcactactgccacgaaaactgttgctaaaggcaacattgctaggggcaaaggtgctaaggaaatttttgctatgaaatgtgctgttactaagaacattgtggccatggccactattgcagaggctactgttgctaagatcattggtgctaaaggtgctgttcctaaggaaagagtgttgaatttaaagaaattgttgttatgggctattttcttagagtcattgttcttaaaggccttgatagtaagagtgttgaaaataaaacagattttgctacgagtgatgttgataagggagctgctgctatgagtactgtttccaaatgtgatgttgctaagagccaattgctaagggtactctagctaaatacattgttaataaggacattgctgcaaatagtgctgctcacagagttgttgttaatggtgctgtttctaaggacactgttgatactgcaccaatgctaagggcctggttgttcatggcatttttattaaaggcagttataataatgaggttgtttttaaggtgttgatgccaagagtattgtttctaaagatatttttgctaagcatgctcttgctgatggccttgttttatagccactgtttctatgggaaatgatactaaaggtgttattgcttagggcattgttgctatggttggtagccaagaaaggttttgctaaattggcttttttccaagggtgctgtgcaaaggttgttaagtactgtggtaaggaaaatattattatgaatattattgttaaggccattgcctataagagttgctaaaggacattgtgagtcctttatcctatataaatataaaggatatttatattaagcacattgtcactgaggaacttgctgctaggtgttttgttgatgtggcctattgttgctaaggatattgtcactctgacaatgatattaggggcattgtagctaaggacattgacattaaggctctgttactaagactcatttttgctaagggtatttttgctaaggatgttgttattaagtacatttttgctagagcattcttgttcagtgtgttgttgctaaagggctagttgctagaagcacttttcctagaataattgttgcaaagagcattcatgctaaaatgttgatcctaagaccactgtttctaagaaactcatttgaagggcactgtcactggctttagataaaagctttcaaccaattgccaatcaggaaatcttttaatccacttatgacttgcaggccacaacccccccactgccccttcctcccccttcacattgctccatgtgatggttaatattgagtgtcaacttgattggaatgaagggtgcgaagtgttgttcctggatgtatctgtgaggatgttgccaaagac

SEQ ID NO: 478779 - DNA, 1029 bp, Homo sapiens
cagcctgcagagccctgagtcaaatacacgtcttttctttataagtttcccagcttcagatattcctttatagcaatgcaaaaatggactgaggcatcgagaaatacgatttttgtattacatgttctcactcaggtggatgctaaagaggttctcactcatgtggatgctaaagatgctcacggaggagatgaaggcacttcaaaagacagcttgttactcacagttgagggggtggttactcacagttatggttgggggagtggggtagaggaactccatgccacacagggccacctggggaagcaccagatgacttggggcagaggaatattgattggatgtctgcgcgtgataaaagaaagagttgagggctctgggctgtgggtcgtctggtttgcatatgaaaggcgtgcttctgggccatgtttgctatttctaggagtgagctttaccctctacagtcagtaccaatgtaatattgggttttcattgcataacccatttattcatttatttactctcaccgattattctttcttttctccataacccatgtttcaactgcccatcccaattctctatgaacttattactctgagaataatagctctataaaatgtgttccataggctgaagaaatgtgactcaatggctgaaatcggtgaatttattaagttataataaataaaagtgtatggctaacatgttgaaagaaatgttaatgacttcactgaaaaagacccacataaatgacggcaacagacttagatcttgccacatattttatttaatgttttatctgccagcacacacagctacagataaaacttggatgcagtaagatataacgtcatgaaatcgtatgaaaaggaagacagaaattagtcacataaatgatactcaacaatgggttgtatgattaactggtttagagtgggtcttaggactttcaaaaagagttgaaaaataggtagaaaactgaaggaaaaaatgtaaatatattttgtgggcaaagctatcgaggtc

SEQ ID NO: 478780 - DNA, 1037 bp, Homo sapiens
agaagtccaagatcaaggtgccagcaggattggtgtctggtgagggcctggtctctgcatccaagatggtaccttgtgcactgtgtcttcaggaggagaggcactgtgtcctcacatggcagaaggcggaagggcaaaacaggggaagcccactccctccagtccttgtagacttgctgaatgactttgacaaaaatgctgatagtgttttgaacaataaggtccaggcagaggtggtctcagatggagatgaggaacttgttgtgaactggagcaaagagcccctatacagagtccttactggggcacttcctagtggagctgtgaggagagggccactctcctccagaccccagaattgtagattcactgacagcttgcaccatgagcctggaaaagctgtggacactcaacgtcagcccatgaaaacagccacgaggtgggctataccctgcaaagccacagaggcagaactgcccaaggctgtgggagcccacctcttggatcagcatgaccttgatgtgaaacatggagtcaaaggagatcatttcggaactttaaaatttgactaccttgctggattttggacttgcatggggcctgctgttactgccacaggtcatgattcctttgatggatctgggcaaagtcaattcgaaaccttctggaaaggattcattatgatagatgccactaagaacattcatgattcaccagaggaggtaaaaatagcagcattaataggagtctggaagaagttgattctgaccctcataaatgactttgaggggttcaagaccttagcagaggaagtaaccacagttgtggtgaagatagcaagaaaactagaattacaagtggagcctgaagatgaccttccgagaggctccggaaagttatccagaaatgtccacctgaaacatgagcctggagcatttgtccacctgtcccacactggttgaggtcttcccctgaggctgttaacctgcaagtgtttctgggctgtatttgtgctcaggcaaaatcctacaataatg

SEQ ID NO: 478781 - DNA, 600 bp, Homo sapiens
tgaaagccatgcaatttaagggatggtgttaatctcagtccaaataggtgtcctcaaggtggcgtgcaagtgggttgtggcttcgagtggcaggcgccaatgggaggtacctctgggctgtgagaggctggtggagttgggacctccagacctagagattctgggtacagaagcctattactgccagacgctgaggcgttgccatgggatccaagggcgtttcgggtcagctcagagcctttctcagataattgtttcggtaactggggagctgctgtccagcgcacgcctctatgaaggcttaatgttctctcagattcctaagcctgtgactttgagtatcggtgtcttccttgcaatgtttcaatctgaggttattggggagagtgcagaattggagcccgatggaagactggtggggagagggcttgaccttgggaagggtggagacggagaaactaatgtcatccaaatgggtgctcttgtccatgtgaccaacctccagtaaaatgctcaacaccaaggctcagaagttggttaatggacacaaaaatacagttagatggaaggaacagaaaaatttttagtgttcaatagcac

SEQ ID NO: 478782 - DNA, 1117 bp, Homo sapiens
ccgcagacccctcctcatccttcccagggttgctctgaggccattcctcgtcatctaggaggggtctacataaaagcatttataaacacctccaaatgggagccaggcgtgcccacctttggagcacttttctctactgcaaatttatctactgctcgtgaaatctctggatttaactctgatgaaagactggaggctgaaggagaacttcaatatcatatattttaaaggttgattcacagtttggagcaagaattaaagaaccacgaacttcaaggtaaaacgggcaacggcgttggggcaagcctctctgcatctgcgtgtccagcctctcctgcatgccagaagtccccaggcaggagtgtggtgggacatccggctgggtctggataaagtgcttcatgcctgtaatccaagcactttgagaggctgaggcgggtggatggcttgagcccaggagtttgagaccagcatggaaaacatagagaaaccccatctcaatataagaagaagaagaaaaagaaaaaaaaaatcaaaaacgaaaacaacacaaattttagaaagaacacaatttaccctccggtgtgggaaggggaaggaggcagaggaagaaagaccccaagtccccctcatccccactgaccttcctgctggcttcatcctgcgtttgagtacttgcggtcatgatgacagggccaacctcctgaccagggctgttagcacctcccctgctgcccagagtccctgctccaaaccactttcttcatcttccgtacccccagccaatatttccctgcccagtgtcaacccaggcccagaaccagaccacaagggacagccccggaacccagaatcagacaaatcagcccgtcccaagctgtctcccctgctctgcccggctttcacagggaagccaacacaggctgtggcttggcctttccctagctcctttctgcctcctggtctgcctgcggcttccccctgccgccctgcggggcctgccacgtctctcatttctagcgaatgtttcaagagcgatgttagactttcctttcaatagcgttgacctctgttaggcacctttatggattaagacctgggcatagatgggttcttc

SEQ ID NO: 478783 - DNA, 1554 bp, Homo sapiens
ttctgctctctgcttcttacaattaactagtttgcaggactgtgtccagagttggttccttccggtgggttcgtggtctccctgacttcaagaatgcagctgtggaccttcctgtcgcaggtggcgtgatttgatttgtctgaaggcaatgaaaggatacacagatacaccgaagcctcccaaaagaatcctggttccaagactcaagaagatggattaatgtttttccattaattgttggaatttatgccattttttactatatgccatcaattttaaagcacttctgaaaagacataacaatctaaatgagatggcattttaaattcataaaaatatattttaaaaggaaacagcataaaactttggaaaatttgcagccaaacgatgtgatagaaaagaaaagccaattttctgaggagaaattcaagccagctgcagaaatttgcataagcaacaaggacccaaatgttcatcaccaagacaatggggaaaatatctccaggacatgtcagagacctttgcagcagtccctcccattacaggccaagaggcctaaaaggaaaaaatggtttcctgggctggattcaggggccccctgctgtttgccacctagtgacttgatgccctgcatcccagctactctagccatggctaaaagggtccaaggtacagcttgggctgtggattcaggtggtgcaagccccaaaccttggcagtttcacatggtgttgagcctgacagtgcagaagggaaatatggggttgaagcccccacacagagtccccactgaggtactgcctactggagctgtgagaagaaggccactgtcctccggaccccagaatggtacagccaccaaaagcttgatcatgcacacaggaaggctacagacaatgccagtccatgaaagcaaccaagaggggggctatgtcctgcaaagccacaggggtggagctgcccaaggccatgggagcccacttcttgcataagtgtgacctgtgacctgcattttttaattggagcctttagaattttctctatatgagatcatgtcatcttcaaatagagacactttcacttcttttccagtttggataccttttatttctttttcttacctaattgctctggctaggacttacagactttttcagaaaccccccaaaataatctaagggagtccattgtcagtaggcctgctttataagaaattctaaagggagttcttcaaactgaaatgcaataagactaattagcatcacgaaaacatatgtagttataaaaagtcaccagtaaaagtaactaaacagtcaaattcaaaatattcctaatactgtaatgatggagtataatcactttaacttttaaaaggttaaaagacataaaatattacaaataaatataactacaaaataaacaaagaaataaacgctgacatcaaaaaaacataaaaagtggaggggagtaaagtgtagggttttgtatatgcttgaagttaagttgctatcaacttaaaatagaccattataactataatcatacatttcttaa

SEQ ID NO: 478784 - DNA, 827 bp, Homo sapiens
ttttttttttttttttaggtttgctgtggcatcttccctcacctgaggccgggctggcctccaccatgttgcaaccagaagagcccacttccgtggggacagatcttccgtgctctccacagccacgtcacgctgccgctgtgcaaatgatgccaactgtaaatcccagaaaactgcaaaataatgctgcgccaggcacagtcggagacccagagaagatgtggagggagctcagaggctgtcctggaggagacgtggagacagttcagaggctgtcccggagaagacgtggaaagagctcagaggctgtcccagagaagacgtggagagctcagaggatgtcccaaacaagagagagctcagaggctgtcccagagaagacgtggagagagttcagaggctgtcctggagaagacgtggaaagagctcagagactcagagactgtcccggagaagacatggaaacagctcagaggctgtctgcaagaagacgtgcagagagttcagaggctgtcccagagaagacatggagagagctcaaaggctgtccacaagaagatgtggagagagttcagaggctgtgctcttctgaaggcaggtctcctgtccatgccttcccctttgctgtccggatggagattggagacgcagcatcatatacagctgacaggtgttaaccttattagctaattctgtttcacgggacacgatttatacattccatggaaatgcttctcactgcctttttttaccacttcaagtacttttggtcatattaatcagttgctctaaaatttcaacatggacattttgaaggtgcacagttg

SEQ ID NO: 478785 - DNA, 1087 bp, Homo sapiens
ctacaagctgagcagataaagaatctcagagagttcattctaaacaagaggcatgatctgattcgatcccacaatgggctgatgccagagctcaatttgattggatcctggatccttccatactgcgtctgcttcttaagtcagtccctgctccttggtcttctccttgatgtggaacttaaagtcaacaaatctgaaaccaacgttaatgtgttcctcaatacttcagtgaatacaattactgatagcaagtgtgcttccaaaccagaacagtcaacgactttgccttcatctggagaggacaacaaatatacccggatagtcataccccaggggctcactaaagccccctcttactttccacaagtcctcaatcaagacttaaaagttctaaatttcacttgtgattcagttttgatgcagtatatgcaggatcagatgatctccactgctttcttcagagaacgaggaagctggattcagataggccattataaaatatcagtgggtcaaccccagtttccaaacggaagtctggaaattccacctcagactggagcttccaaatgcggccacccttgattattcaggcagtctacctgggggagttactgactcactgtgtgaataatcagagtgagaattgtacaaatagaaaaaaactgtaagaaaaccatcaccaatagtttcatcaccaataactctggcagaagttattaatgacattgtctctattattacaagtaataataaccatatttctctagatttcttcttggctactcatggtagctctgtgttattgctaatacttctcactatatttgaatcaacgaaacaggcaaagtaaaacaggctctacatctcacatttccttatggaaaaaagataattgccattctaaggcagatcttcatggtctgtggcctatatgttctcttggtctggggtggaaaattagaatttctgcttctgtaacattttatagggactagtgattatttttgtttttgaaacccgacctttaagccaaagacagcctgacccctgaaaacccaactgccagttctaggtagagtccacaacc

SEQ ID NO: 478786 - DNA, 1477 bp, Homo sapiens
agcgcccccgcctgcggcccagagtgcactcgcgcctgcgccatctcccggaaaaatttcgcgccacgcagagatgacagccaaggagatgaaggcgaccgagagtgcggcgcagccggtgccgctgcccaagaaggaagtggatgtcagccccaaacaggatgaaggagtgctgaaagtcatcaagacagagggcacaggtacagagatgcccatgactggggacctagtctttgtccactacactggctggctgttagagggcacaaagtttgactccagtgtggatcgcaaggacaaattctcctttgacctgggaaaaggggaggtcatcaaggcttgggacattgccgtagcaaccatgaagtcctccaacgatctccccataacgccacgcttgtgtttgaaagatgggggaatcatccgcagaatagggactcgcggtgaaggctatgtcaagcccgatgagggcgctatggtggaggttgcgctggaagggtgctgcaaggaccagctctttgaccaacgggcgctccgctttgaggttagtgagggggagaacctggatctgccttatgatctcgagagggccattcagcacttggagaaaggagaacattccactgtgtacctcaagcccagctatgcttttggcagtgttgggaaggaaaagttccaaatcccaccaaatgccgagctgaaatatgaattatatctcaagagttttgaaaaggccaaggaatcttgggagatgatttcagaagagaagctggaacagaacaccgtagtgaaagagcagggcagtgttttttccaatgaggaagcacagaaggcacaggcccctccactggcctctcacctcgacctggccatgtgtcagctgaaactacaggccttctctgctgccattgaaagctgtaacaaggccctagaactggacagcaacaacgagaagggccccttccgccggggagaggcccacctggcggtgaatgactttgaactggcatgggctgacttccagaaggtcctgcagctctaccccaacaacaaagccgccagggcccagctggctgtgtgtcagcagcggatccacaggcagcttgcccggaagaagttctatgccaaaatgtttgagaggctggctgaggaggagaacaaggccaaggcagaggcttgctcaggagaccatcccactgacacagagatgaaggcggagtggaagagcaacacggcagggagccagtctcaggtggagacagaagcatagcgcctctcaccagccctactcctgaggctgcctgccccccagcctccccactccaccctgttagttttggttatatccaaaaaaattgctgatcaaaccaatatcttggatcattttctctgttttcatgtaatagttttacagtttcaagtcttatatttaagtctttcatcaatttagagttaatttttgtatatggtatgatat

SEQ ID NO: 478787 - DNA, 1427 bp, Homo sapiens
gtgcattttcctgctgattagtgatggcaaacatctttttcttaatatatacctattgtcaatctctttggtatgcctttatcagcagcatgcaaacagatgaatacagtaaattggtactggtagagtggggtgctgctgtaaagttatccaaaaatgtggaaccaacttcggaactgggtaacaggcagggttttaaaaggaaacagcataaaactttggaaaatttgcagccaaatgatgtgatagaaaagaaaaacgaattttctgaggagaaattcaagccggctgcagaaatttgcataagcaacaaggacccaaatgttcatcaccaagacaatggggaaaatatctccaggacatgtcagagacctttgcagcagtccctcccattacaggccaagaggcctaaaaggaaaaaatggtttcctgggctggtttcaggggccccctgctgtttgccacctagtgacttgatgccctgcatcccagctactgtagccatggctaaaagggtccaaggtacagcttggactgtggattcaggtggtgcaagccccaaaccttggcagtttcacatggtgctgagcctgtgggtgcacagaagtcaagaattgaggacagtgcagaagggaaatatggggttgaagcccccacacagagtccccactgaggtactgcctactggagctgtgagaagaaggccactgtcctccggaccccagaatggtacagccaccaaaagcttgatcatgcacacaggaaggctacagacaatgccagtccatgaaagcaaccaagaggggggctatgtcctgcaaagccacaggggtggagctgcccaaggccatgggagcccacctcttgcataagtgtgacctggattttttaattggagcctttagaattttctctatatgagatcatgtcatcttcaaatagagacactttcacttcttttccagtttggatgccttttatttctttttcttacctaattgctctggctaggacttacagactttttcagaaaccccccaaaataatctaagggagtccattgtcactagacctgctttataagaaattctaaagggagttcttcaaactgaaatgcaataagactaattagcatcacaaaaacatatgtagttataaaaagtcaccagtaaaagtaactatacagtcaaattcaaaatattcctaatactgtaatgatggagtataatcactttaacttttaaaaggttaaaagacaaaaaatattacaaataaatataactacaaaataaacaaagaaataaacgctgacatcaaaaaaacataaaaactggaggggagtaaagtgtagggttttgtatatgcttgaagttaagttgttatcaacttaaaatagaccattataactataatcatacatttcttaa

SEQ ID NO: 478788 - DNA, 548 bp, Homo sapiens
agttaacaatggttattttcacatttgaatcttggcacaaagccggtcccattgttccaggctacagacccaccttcatggtctcaggcaccagacctgttcccatggaatcaggctcaccccagcaccagttcagcttccaggttcgccccagcaccaggtcaacctttgcatccccaagctgcaggccaatacctgcaccaggcaacaggcccatccagagccatgctggcacccacaccttcaagctccaggatggcccctgcagctctaggctccagcataaggtcaacccctatggacccaattccaggcctgttttcatggtcttaggttctgggcccacccagtaccagaatagcccctatgaactcaggctcaaggaccttcccagtgccagattggcctcatggactcaggctccaggcctatccctgaagaccaagtctactctcatgggctctggtaccaggccagtcacctcagacccaggagccagtccacacccacagacccaggatccagacctacccatgtagacccatgct

SEQ ID NO: 478789 - DNA, 653 bp, Homo sapiens
cgggcacagtgttagtgtgtgtgtgtgactgtgtgtgtgtatgtgtgtaggtgggtgtatgtcatgctgaacatcaagaacttggcttcattgaaggtgtcaggcaggctgctggccaggaaagccaagatgaagctccccagtgccaaaaagagagttacttggataaggaaacagatgaaaataactgtgctaaatactcccagtccccaaaaccactttggctttctctctgatgctgtagccttacaggctataagcacagtgatagttttagctaacgcagttgaaacaaccacagtaaaaatgattccaaatgttgtctgtcagaggatacaagtgactgtgtttgtacagccagtgaagagcaaggagcagaagaaaacagacagagaaatgtcgctgagagtcttgactatgagtgtgtggtggggacacagcgaaaccataccaatggcagtgaggacagagaaacagagagctatgctggccagtgctgtccccagtgcatcttcaaaatccaggaaggtcacaactctgactaaacaatgttaacattagtcatcttaaagcacattgtccacctattcatatttcatgaaattataagatgctacaaattaactcattccagtttagcagtatttatcccc

SEQ ID NO: 478790 - DNA, 1585 bp, Homo sapiens
gggtttgaattccttaaacatgaagactataattaatctccacttcaattcaccaaatgcgtattgaatgcccattgtggattggtcactgtgtcacaccaggggtacagaaattaataatatggaatccccgagcctgaggaaatcagtttaccgtgaaaacaaatgtgcaaacaatcctttacaatgggcttatataaagtgggtggagccatcatgttatggagtcattgaaggaggggcagaattggccaatgcattggatgcttcagagaacctggaggttcaagcaatggtgaaaggaggaccaaaacaggtccagggcaaagcaagcttgatggagcacttgccagcagccaactgcacaggatttaagatggtacaactgactcaccctaaattcttgtgtgagatccaagaaccctctcttggggtctggatccagacctctttctgtaacactagctctgggaagaatcctaacttaacactgtcttggtaaaatgcagtctttgtatgtgtgggtgtttttctatgatgtgcagcaagggagaatataaatataaatataggtgatttagatatatagataccatacaagcatggtatatatacatctgtactttaagagagcatacccggtaaagaagttgcatatatcaagtaacaatttcatcagtttgtgttaatcgaagtatataaacctgctactcagagcctccaagtgaattgagttgataaaggctctctgcctcttacacttcgggtcacagagcccagggagagtgtagagcctaatgaagagtgtgggctttagagtcaggctatctgggctggatcactgtctctttcattaccatctgtgtgccccagggctacttacttactcttcatgaatcttggttttcttgtgtataaaggagggattttaataatagttacttcataggattgttgcagtaattaaaaaaagatagtgtctgagcagcacttgattaatattgggtactcaccatgtgataggcctgtctctaaagacttctaacagccttatgtgtaattatttcatttaattctcccttaactgagagatccacaaaggaaatgttggaaatgcaaatatatgaaagaccaatacaacatgacgtctggatttctaagatgcaatacattttattctaattcttctgtgcatttaaaaatagcacagaataacccctaaaagtgagttctaaaaggtatttaaaggaatacttgtgaggaatgctattttttaatgtctttatttttaatgaacaatgactcatttcataaataaaattgtctctttctctagttgtttcctctgaacaaagaaggcttatgttataaagcagaattatgctagattaagagcttctttacctttttctggaaaactatatgttgtaagtctggaggaatatattaatgaggaaatgaacctcaaatgagagctatgataatatgaaaaagattttagttataataatgattgttaacactgattagttgctcatgtttgtatagtaacactaagcactgaagtaagtacatgtgatgagac

SEQ ID NO: 478791 - DNA, 448 bp, Homo sapiens
tgagttcatgtcctctgcaggaacatggatgaaggtggaaaccatcattctcagcaaactaatacaagaacagaaaaccgaacactgaatgttcttactcataaatgggagttgaacaaatggacacagggaggggaatatcacacactagggcctgtcagggggtggggggatagcaggcatggcttgtttggctatgagaggcaggaatgggtagaattacccattctgccatctgagtgtttcccagcacaacggaaagctgtgcctgacaacaaccaatattccgactctaagggagttctggaggttgggaagcccaaaaccaagatgctggcagatttggtgtcctacagtattgacacaggaagagctggtgaatattgcgtagctcctgtcatgaaaatgtttctgggtccttagaatgcttcattatattagtgaggag

SEQ ID NO: 478792 - DNA, 714 bp, Homo sapiens
tttccaaggtgggttgctctacagaaccatggaaattgtcaccaagtgccacagatgcaagacagtggtcctcaacaaaagtacttatatggaggttcacaaagactttctaagggcatggataatgttaaggatgttttcacagccacacgtatcctgtgaattctttcctaaaaaacggtctgtagttacaaagaagccatgcttttcctccacctggaatcttaatatgaagcattgtcttggagggaaaaacacttcagctggtgtaggcgtggaagagggagagtttcatgtctggtataaagcctgtattctcctttccttttatcacacttgtggagagtattataattgtcatattagtttctcatatattacaaatgtaaatgaaaatgagcaaactgaagttcaaggagccagtatggttttgtataagggcttgagttttggagtcaaacagaaccaggcttgaattctgtcttagtaactatataaacttagacaagttacttgagtttgctgattcttggaattttctttcatggaatggagataataataattacttgctaggaatgccatggaggttttaattaaaattgtatatttttaatgcccgatgcttgtagattttatacaatttaacactttgtcactttctgtgataccattggtttttttggtgtaaatttttatttgactagtctgtgc

SEQ ID NO: 478793 - DNA, 1311 bp, Homo sapiens
gtgaacaaagtggccatggtggcagggatggaggttattcatgggcaacagggacttccactcaccaaggctgacctggctacagccactgctgagtgcccaatttgccagcagcagagaccaacactgagccctcaatatggcacagttcctcatggtgataagccagctacctggtggcaggttgattatattgaacctcttccatcatggaaaaggcagaggtttgtcctcactggaatagacacttactctggatatgggtttgcctatcttgtacacaatgcttctgccaagactaccatccatggactcacagaatgccttatccactgtcgtggtattccacacagcattgcctctgaacaagatacttactttatggctaaagaagtgtggcagtgggctcatgctcatggaattcactggtcttaccatgttccccatcatcttgaagcagctggattgatagaacagtggaatggccttttgatgtcacaattacaacaccaactaggtgacaatactttgcagggctggggcaaagttctccagaaggttgtgtatgctctgaatcagtgttcaatatatggtactgtttctcccatagccaggattcatgggtccaggaatcaaggggtagaagtggaagtggcactacttaccggcatctcagtgttaccataccccgtggttaaggtcgatgggaaactacagcagcccaatccaagcaggactataaatggcccagacccttcagaaatgaaagtttgggtcaccccaccaggaaaaaaaaaccacgacctgctgagctgcttgatgaaggcaaagggaatacagaatgggtagcagaagaagatagtcatcaataccagctatgaccacgtgaccagttgcagaaacaaggactgtaattgtcatgagtatttccttcttttgttaaaaacatgtttgtgtaggtgtacacttgtactaagaaaatatcttcattttatttcctttttcctttatcatgtgacataagatttattgacttcatgtcagcatttaagtattgttaactttatgtaacagcatttggattggggaaggatagttgtattatgttaggcggaattctgatcttattgtctttatttgaagattacgtatgttctcaggagatgtgtatgggttcaagttgacaaggggtggacttgtgatggttaataccgagtgtcaacttaattggattgcaggatgcaaagtattgatcctcggtgtgtctgtgacagtgttgccaaaggagattaaaatttgagtcagtgggct

SEQ ID NO: 478794 - DNA, 620 bp, Homo sapiens
cttcaagctgggtgaagtgtggcatgcctgtagtcccagctactaaagaggctgaagggcaggagaattgcttgagtccaggaattcaaggcccatgtgggcaatacagagaagcaggccaggcagtggggaccaaatcagcaatgagcagcacagtcgctgaggaagccacaacagctgtgaaggcggatggttccagaccttcactgatagagagaccagctcacagtgaagacccgtatcatcgacctgggcaaatagtgcaatcttcaaaacaaaaatactttactcaattattttgcaatggacttagctacaagctctattggtttctttgctcgccactgtttttcatgtcctatgtcttcctcttttcccacttctcctcctccttcaccttctttggggacgtctttgagtatctgtttcagaaagtattcctgggtggtcctgatattaaacctcagtaatacattcagaatattttttataactcaggtgcagagccttaaatgtctacccattacattgtacattgttaaatttagtctattgcatctaccctcccttagcatataactccagaaaacactagaaatggctttctggagaccagctct

SEQ ID NO: 478795 - DNA, 734 bp, Homo sapiens
cttgcatttgagtgggtggaagacagtcattcttttgacaataagacaatgcgtgtaaactgcaaagctttaacaaagttccattttccggctcttgcaaagcttcagacctctctgataccattggaagaaaacccttctaccccctgttctattacccaccctccaggaccagcctgctgcaccaatacctgcaaagactcatctgaaaatgagaagaatctaaaagctgagggtatgcctgcaggaccaaacttgacctaccagggcagaattccagagggagatagtagaggaaattcacaaataccaactacaaggaggagagcgatgaggcttgacagaggaattatgagtgttttcattggagaagactcaaatgagtgtgaggttgaccccaaatatttgaatgattatcacattgatagggccatcacactgcccaactccagggacactgtttacacagtagtctacgtgaaaagcagcagacgcccacagctgagcaatgtgcagtctgtacaactgaaagcacttgtcctgcatatggcaagtgccactgaaatcaatggaattgatcagtttctcccagatgatggtcatagcaaggcattagggcagccagatttggatcctcatctctagataccaaactatgagctctgagctgtgtctggactcttcatttggtgactgaattgtcctagctgggagggactgaaaatcaaaagtga

SEQ ID NO: 478796 - DNA, 770 bp, Homo sapiens
aaggtttgatcaaacaaaaggctgcggaaatgctgcatgaggagctgaatgttaatagccaagacaatggggaaaatgcttccagggcatttcagagatcttcgcggcagccctttccatcaaaggcctggaggcctaggagataaaaaatggtttcacaggccaggcccagggtcacactgctctgtgcagcatcaggacatggaaccatgcattgtggccactccagctccagccacggctatcacaggtgaagatttcagagaatgtatggaaatgcctggatgtcaaggcagaagtctgctgcaggagcacagcctttgtggagaacctctactacggcagtgcagagggataacatggggatggagccccctacacagtggagctgtgagaagatggccaccatcctccataccccagaatggtagatccaccaacagcttgtgccatgcacctggaaaagtcacaggcactcaacaggccttgagagcagccatgggaattgtaccctgcagagtaacaggggcagaggtgcccaagaccttagaagcccaccctttgcatcagcatgccctagatgtgagacatggagtcaaagattattatggagctataagatttaatgactgccccaccaggttttggacttgcatggggcctgtagcccctttgtcttggtcaatctctcctccttggaatgggagcatttacccagtgtctgtacccctgttctatcttggaagtaactaacttgtttttgacttgtg

SEQ ID NO: 478797 - DNA, 953 bp, Homo sapiens
ctagttgaaatattctctgggcctccgggggtgtcatcacatattggtaggaccatgatggcaaccctgagctgcaaaaccggcaagtttttattagggattttaaaaggagagggggtgtacgaacagggagctgtccctggcttgaaggcggggtttcactggggacccacccctttccgcccaggagcctatctgcttcctactgccatcaacttgccatccacagcacccactgtgcccaggatgttcatgcagtgggatgtctgcaggcccacgctgagctgccccaagttctccctcagcctccctcctatgggtgctcaaagtctggagggggtcaaggctgcaggaggctggcatgtcagcattgcaagtacctgcacacgtggccagtttgcgacagtgcctgggcttggcctcaactttgctccgaaatcggagcaggcgctgggagcacagagaggccaggcagcggaagcaggtacttctgagcctgtggggacagggggcttcttggacccccagagtgcagggatgccctggtccacagtggggctgggcggtggcagaggcacctgggaaggcgccaccaactcagaagggggtggggctcccgcgtgttcccagtacctctgcctgctcccagccagctccacagaggatgcagcccccaccgcacctccctccgctgcagccaggcgtcttcacagtggccgctctgggtgggctgccgctgccatcacttataaaagagcctatgaggccatgcacagtggctcacacgtctgaagtgaattctagacaggaactatctcaaggctgctgttattcaaaacctaagtgtttcatatgaacatgaagctatttagtgggaaaaatgaactacaagtagtttgatggaagaagcaagtataaaaaagcttagagctttacacagtagtgatcagaag

SEQ ID NO: 478798 - DNA, 2248 bp, Homo sapiens
agcagccaaacaggatttctaacaaatatgcctcttttcttgagttaatgtttcttatagccttgcattggtgtctgcatatttgatagagcagtcgcctcttccaaactttacagactggctttgatactcagatttctttctctctttcctttttcctttcctttccttcttcctcctccttcctcctcctcctccttcctcctcctccttcctcctcctccttcctcctcctcctccttcctcctcctcctgcttcctcctccttcctcctcctcctccttcctcctcctcctccctcctcctccacctccacctccttctttctcttcctacttcctcctcctcctccttcctcttcctcctcctccctcctcctccgcctccttcctcctcctctgcctccttcttcctcctctacctcctcctttctcctcctcctcttactactacagttgcatagtgtttgcttcaggaagcgtgcttgagtcatagttgatgggtctctggtccagggacagtgcagaagaggctgaaaattgtgaccctggtcctcccggtacagcagcacttagcctcgtttttaaagacttgttgaatggctttgaccaaaatgctgatagtgacatggacaataaagtccaggctgtggtggtcttagatggacaagaggaactttctgggaactggaataaaggtctctcttgctatgcaaagagagtggtggcattttgcccctaccctagagatctgtggaagtttgaacttgagagacatgatttagggtatctggcagaagaaatttctaagtggcaaagtgttcaagaggaagcagaacataaaagtttgaaaaatttatcccagaatggtaaagccactgacaacttgcacccagcacctggaaaagccacagacactcaatgccagcctgtgaaagcagccaggactggggctgtaccctgtaaagccacaggggtggaaatgatcaagaccatgagaacccacctctttcatcagcgtgacatggatgttagtcgcaaggtgaaatctgaaactgtatcaaggagcttttatactcaattatgtgaacaacctattggtctattttgtactttgaatggaccttttatccattcatgatgttagagtattgattcactgagttatgtagatctttcaaatgttgacacattttattatgtaacattgaaacatcaaaaagatttatatcaacaccaatctcagaaaaacaatttaagtaacttaaaggtagaaatgtctttaagtacaatggtacaggtacaatttttccaaagttgtgatttttgcttgaaagctcaaatattgtaattagcaataaacactgtcagttgtttttcttgaggtgatagtcttgcttttttaattttcaagaaagatgcctgtcaaacaaccaaatctggataagaatatttgtctttcagttgttctttcaagttaaaaaaaatcatgttccatgagaaaaaaaaaagctagttcagctcgctactcaaaattacacaagtgtttttcttcaatgaatatgttactttggtatgctttttaacgcatgctgccaagttcattatacagaatattaaaaagtaataagatttaataaaattaatactttttgctgcttcatcacggacatctgaaagtgaaactggctttccccttgtgaatgtgtggcagtaaagaatacaatgactgctagtctcttagtacattttggtgtcctgccttgatttatgccagcagttttgcccaatattgcttttgtaccattagttcaaaagtcaatgcagtgaaaaaggcatgatatcttagtattcttatgaaaatcattttttacctatggaccttccgaaaaatcaggtctcagggattctaattggtatatagaccatgcaatggattctcgtcgactctgcctcaactaaggtattggggaaagtaaaggtcttcacttctccacttcacttcttgaaaatttctccagtactgatacggagctgcaacaagctgttaagttcaacgccatgacaggggctgcccacagaacctggagttacaacctgctgttctggatattctttattcctagataagctaaattatcaggaataggaaaatgagatccttataaaacctttctttcaggtgctaggaggatgggaggaggaacagcaggaggcatggactgatgttttgccaagttcctgcagcc

SEQ ID NO: 478799 - DNA, 542 bp, Homo sapiens
ctcggatttaggcaactcgaagtcctgatcgaatggagccaatgttaaatttggagataaatgttacaaatctcaccaccaggttcaagtttaaaatcccacataagaaaataacaccgaaatctggacaccagccattggacttaggacctgccctaaaccaagatgatctcatcttaagatccttaattatacctgcaaagtctctatttccaaataaagttatatccacagatggaatttctggagactttttaatgaaggaactatgtacacagaccacgatgaaaggaacccaaaggaagctagcagcaccctttgacctgaaggtgcggaggaaagaaatatcagattctggttgtgagctgctgctctggatcatggattgcccaacaggaactgagcagcagcagttctccttgccaggactgtgcacaactttgtcatagcctgcatcatctggttgtggtggttgtggtgagagcaaaatcatatttatgtcctcacttacgtgatcttctccagtgagaacttggtgcttg

SEQ ID NO: 478800 - DNA, 1811 bp, Homo sapiens
cagcggatggcggagccagaagggagacggttttctcctgacatgacttgctccttcttgccttcggccatgattgtgaggactccccagtcatgtggaactgcccaagtgctctacaatcagcaggtagcaaattcagccgaacatgtgtccttcccttcaagctggcaagttctcccttgccctggtggtccagagatgccatctgggagccagagcctggacacagggaaggagcttctcctagagctgcaagctgcactgcctgtagttggggaagtttgcccaacacatgaaaggtcttgtgaacacatctgtgttcattcttcttataatggctgctccttggacaacccccagcctaaagatatgactgccagaggcactgtccactcaagggtagagggactcagaaaagggccagtggcagagctgaaattctggggcccctcatatctgaaatatggtttaaaagaagggagtcagtttctagagctcagaggcatgaaagtctgagttgtggaagaggacttttctgactcacacctgtgggaagtttgagctccttattacacctggtgagggagaagtctaggatccacactcggtctttgctggcgtgggtggagaagaaattgatataaaatgtatacaatgaggctaaagataataaatatggagggtagatctagaacatacattgtaacaggattcccaagaaaaactagactgttccaggatccacactcagtccaggtggagaacaatcagtagaagacaaacagtagaacatacttgacaattcacaaactgcccaaaaacagctggtaaaaaatctgaaaagcaaacaatatctgcaggaatttaaaagaaaaatcaaatttaaacagggagctaaagtttctcagttatcaaactggctaagaattaaatttgatgacatgctaaattagctgaagtatcagaaataagcactttcaaacattgctattggttgtgtaaattgttgcaagatttctggagggtaattttgtaacatatattaaaattcctaaaaaggtttattgcatctgacctaattatgttagttctattgctgtatctgcaggaaatagtaaaaagatctgtgtaatgatttagctatagtatgtcagttttctatataattgcaaaaaattagacacaattatattagcaaagtccttggaagtatttactgtgtattaggtacctttctaagccttttctacttattaaatcatttaatctttccaataacctatgagcttggtgctattcttattctcttttcataaatgaggaaaattgaacacaaaggggttaagtaaattgctaggatttgacaggcagcagactcagccctgagtccatatatttcaacactccatctgctgcctgtcttgataacacttacgcaacctccatatacatttgataacatgtatgcaacatctaatgatttattatgtcatcaccaaaataatgcacacattgatatttaaaatataaaaaagttctaaatttattgttaatggaaagctgttaggttagtaaataatacaaaacaatcttagaaaaaaaatctaagtgtagatttttgaagtgtagaatatttatgtcaaacaattaatgatttttcctttagggctgtgttgttctggaatcatcttctagtttctgttgtgaatataatgtattacctgttaatgctaagtttggccaagtgccagataaattcacagttattgcaataagaaaatagatctttcataagaataactaaattttct

SEQ ID NO: 478801 - DNA, 1560 bp, Homo sapiens
ttttttttttttaaagacctggaatataggaaaaccccttggactttctggtcacccaagacttgagttactcttttttgtgctcatcttcataatgtatgtggtcatccttctggggaatggtactctcattttaatcagcatcttggaccctcaccttcacacccctatgtacttctttctggggaacctctccttcttggacatctgctacaccaccacctctattccctccacgctagtgagcttcctttcagaaagaaagaccatttccctttctggctgtgcagtgcagatgttcctcagcttggccatggggacaacagagtgtgtgcttctgggcgtgatggcctttgaccgctatgtggctatctgcaaccctctgagatatcccatcatcatgagtaaggatgcctatgtacccatggcagctgggtcctggatcataggagctgtcaattctgcagtacaaacagtgtttgtggtacaattgcctttctgcaggaataacatcatcaatcatttcacctgtgaaattctagctgtcatgaaactggcctgtgctgacatctcaggcaatgagttcatcctgcttgtgaccacaacattgttcctattgacacctttgttattaattattgtctcttacacgttaatcattttgagcatcttcaaaattagctcttcggaggggagaagcaaaccttcctctacctgctcagctcgtctgactgtggtgataacattctgtgggaccatcttcctcatgtacatgaagcccaagtctcaagagacacttaattcagatgacttggatgccactgacaaacttatattcatattctacagggtgatgactcccatgatgaatcctttaatctacagtcttagaaacaaggatgtgaaggaggcagtaaaacacctactgagaagaaaaaattttaacaagtaaatgagaaagatacacaaataccattgtgacacaattgcctatagtgttcagtacagtagcatgctgtacagctttgtagcctaggagcaataggctatgctatgtagcctcagtgtataataggctatatcatctaggtttgcataaatataccctgtgatgtttacaacataataagatttgacaattatgcatttctcagactgtacccctgtttttatgactgtaatattttttcatgctgaaatctccatgagtctaaagaacattactctctgtaatactctttaaatttgcagacatgtagatttgtgtctagttttcctagaccccatggaaaatgttggtcagaaacatacagtttttaaagtatttagctgctgttacattttggcagaatatttaataaatagatccatacttattaaaaaaagaggtatgctcagtttttaatgtttggatccagttagaagggatgtcagcttattgttaataacactgactcaattagtatagataaccttttcatcttctcaaaaaaaagaaagctttatcctcaagtatattttttcaccttaagttttcaaatgcttcgtgatatgagttcc

SEQ ID NO: 478802 - DNA, 641 bp, Homo sapiens
gagaacgggccatgatgacgatggcggttttgtcaaatagaaaggggggaaatgtggggaaaagaaagagaaatcagattgttgatgattatgctggtcacctgcaggctgcacttaacgttgcaaagggctacaggtatgagctggtatttgctaagatcttggattttgaaattcatagagttccatttgaggatctatggactgtggagtttgggaagtttcttgtgacctattttcaaattcagattctttccttgtctatattgagtctaatgatgagcctattgggagccgaacctattgagaagtggctgcaggtggagcctatagacatagagagtcacagctacagccagaggcatggcaaggaaacagaaaaggagcagataagaaaacctatattctctggcttcctccctttggattgtctgcctgcctgtgcctccagcgtccaaaccaactggaagattttggtcagggaagcctggtagatggagtccatcaatgtcagactcccagggaaagtgcagaggagggaaaggcagagaatgaaccttggagaagtataggggaaatgcaaaacaatcagcacaatgtcccagaaaactttagcctcattttgaccatttttcatttcc

SEQ ID NO: 478803 - DNA, 506 bp, Homo sapiens
tttccttaccctgagacggtctaggttgaggacatgggctttgataggaaaaggtagacactgtcctctcctgtcattatggctctctctctctcctgccagccctgtgaagatgtgtctgcttcccctttgtcttctgccccgattagaattcattccaacgctggaaaaggaggacaagaagaaaaagagaaaataggtctaaagctctgttttccagtattgcatgacctgacctcttcggctttggcgtaccagagattaccttgtacggatgtgagacttcacaacctgctaaaaatgaactttcctaataactcgggacctacccatctaggaataaaccatcctattcatgacagccaactcaccagggtagcagggaagaagggattcaggatagccactctgagatatcatacatgtgcctctgtctggggcatcttatttttactcctctgagaaagggcatatgaggcaaggcctaagtagggaaatttgaaatg

SEQ ID NO: 478804 - DNA, 829 bp, Homo sapiens
tttgcacttcccgggtgaagagatgcctagccctgctttggctcatgctcagtgggttgcactcactgtcctgcacccactgtccgagaagcccctcagagaaaaagtgaagatggaaagctccctggccattagcaaagctagagaatcttatgaaaacgacttaagagggttgtgtgctgctggctgtgatagaaaatgcttcttttccttccctgtggaagcttcagtaatatctatgttgctgacggttatttctgctggtaacgaaataagttctaagtcctggctgcaggaatgtataaagctgagaaatagagatttgaacaacagctccataaatttaacaaaggtcaaaatcttggtcaacaacaggcctcctactggagtttcagaaaattgttaccgagcagtaccatcggtctgtctcaaacaacaatctctcatcgccctcaacctaccacaggacttctcaaggttctcatctctttctctgccccggcataacttcaggacaaaaatgggaatggatcataaggacacagaagtatttcacaatttcacacaactcaatagcaaaaaatgcacctgatcatcacaagggtctggaaacagaaactggggagaagactagattctaaatgtcagtatgaggagtccatcagggattgcaatctgtcatggctcctaactagtctttgtgacagaaagtagaatctttataattttctgagagattttctcatctcattaaaatcttcttagagagaagcattggaaggcatacattggaaggagataaggttaacatgggcattgtaaaatattt

SEQ ID NO: 478805 - DNA, 579 bp, Homo sapiens
aagtccctgcagcacagggagaacgaggagaggtgatattaccggaatgaagccgcagaccctcgcggtgagtgttacagttcttaaagatggtgtgtccggagttagttccttcagatgttcacatgtgtctggagtttcttccttccggtgggttcgtggtctcgctgatttcaggaatgaagctacagaccctcgtgaagacactgaaaagcctcatgaaaattcagcagaggacatgctagacgctttaatttatttgaaactgtcatatggaaatggattaataaaccaaacaaagatgggagttttgcagtatcagaggcttccacctagaatttcacgctatgacagatttcactccacagatccaatgctctgctcctcatggccccacttcctgtgccctcctgaacacctatcttgtactgaccccaatatgagtaactcagcagcctcctttaaccatgtcaaaagtttttacccataatataaatgtttctgttctccagtgttgaggcagtccataaaacatactcagcattgttatttaaagttcatcttgcccaattccttggt

SEQ ID NO: 478806 - DNA, 1211 bp, Homo sapiens
aggaaactgaagattatagctgttatgaatgttgtgaatgctcagggcctgaatctggggggcacttctcctgtggagctgtactcaccctggattgttccagagagactgtctataggtgaatccatgctgcattcctgtgggagaagccccagctatgtctacggtggactgccaggggtatacaaggaccccttttccaaggccctttatggttacaggggctgtctgcctaatgtggttccaggagatcagagtttaccgtcccctggagtaaacagttgctggtttgagcacttcagtgttgtcttggaatcatgcaaccagaaggactcggaaatatgtagtgccctttgtgggcagctctcattggtatggtacaagagttgtattcaatcactttgtcagaacaatgacagctgtgagaaggagcccataaagctattcattaaactctgaaacagctagcactttacttgtctggagttatttactagtggttgatgatgacactgttgactccatctcttcaacttattcttttatattttctgagacattttctcatttctattttccaaccagtagggtagcttggtagaagaaagttgtgtgtgtattgtttttcctgagccatttcagaccaagttagaaatatcatactctatgacctttacatacttgattatacatgtcttaagaacaaggacctctcctttataaccacagcacagttagcattttcaatatcaggagattttctaatatttaatattgatatagtactattatttaatctgcagttcttagtcaaatttcatcaattacccccagaataacattatagctattttgggcgggggaggatatagtccaggatttaattgaagatcactcattgcatttttttttgttatgtctttttagtcttgtttcaactagtaaatatagcctcacattcttctgtgtatgtatctagacctttacatttttgactagtacaggccagttactacatagaatgtccctcagtttgggtttgtctaatactttctcatgcacagttttagcttacatacttatcaggaaacacgtgctgtgagttagctccattacgagctatatgggcatagaaagttcggtgtagaaagttgtttacatgagcttcacaaatttttgaaaatgttagtgtttgatagacaattcttaag

SEQ ID NO: 478807 - DNA, 680 bp, Homo sapiens
accgaagctgctgcagctccctccttctgagtagtgatgatgatgatgatgatgatgatgatgatgatgatgataacaatgatgattgatgagtccaggttcctgaaaaataccttcagaactgcatgtgcttgtccacacgcccccccttccccgccaccccaggaagacctacttgtacttatacctgaaggcaaagttgaggacttaagtgggaaagtagcgaatggcattggccagattgcccacccagaagaacagcacaccctgctccttgggtatacggaccatgcagtccatgatgccattgacccacttgtcaggcatgatctgctcactggcacgttgcacctgcagcagcagcttgacccactcgctgggggccacggcatcatggagatggctgcaatgctgtatggctcagaaagtgacacccgtgaactgtacacaaagacgcaaaggaagtcaaagaaatgccttctagttcactttcctccagaaaaaagaaatcccaaatgaaggccagaaaattatgggactcaaacttagttgcaatcttgtaatggttatcagagactgatagctttgtgacaatctaaagaggtttaaatctggagagatcgttgggctagaggtataaaattgacagtcatcagaacagaggtgatatttgaaggcat

SEQ ID NO: 478808 - DNA, 1003 bp, Homo sapiens
accccctgactattagaaataacatcatagaggggtgtacactttctgcgatattgggaggagtgttcacctcttctgtgatattgttcctagtatccggagggggagaggatgataataattccactattgcaggctgtgttcacccaccctgtgatattgttattaatatcctggaagggagaggatgatattactccccatagagcaggaggtgtacaaccaccctgggatattgttcctaatatgcatggagggaagaggctgatattactcccaatatggcagggggtgtacatccacctggtgatattgttcttgatagtcaaaggccgagaggttgatattactcccaatatcatagaaagtgtacacccccgtgtgatattgttcctgatatccagaaggggagaagatgatattagtcctcctatcacaggaggtgaacacccactctgtgatatctttcctaatatgcagggggagagaggatactattgttcccaatattgcagaagatgtacacccccctgtgatattgtccttaatattccaaggcggagaggatgttattactcccaatatcccagaaagtatacgccccccagtgatattgttcccatgatccagagggcagaaggtgttactttcaatatcgcggggggtgtacatgcctccagggacactgttcctaatttcaatgtgggagaggatgatattactcccagtatctcaggggttataaacactcctttgatattattcctaatatccaggaggggagaggatgatattcctccctatattgccgagggtgtacacccgtctttgatattgttcgtaatttctagagagggagatgatattactcacaatatcataaacacgctgtgtgttcaccatggatcataatatccaggaagcgatattactccccacatcgcagggcgtgtcatattgtttcttatatccggggggagaagatgatattactaccaacatc

SEQ ID NO: 478809 - DNA, 960 bp, Homo sapiens
tgtacaaactttgcgatattgtgtgtaatattaacctctcccaacctggatattaggaacaatatcatggggggtggtgaacaatgtcccgagggggtgtacaacccctgcgatattaagagtaatatcatcctctttcaccctggaatttggaacaatatcacagggggagtgtacactccctgcgatattgagcgtaatgtaactcccaatttgaatattagaaaaaatatcaggaaggagtacaaaattacaaagtgggtgtacactccctgcgatattggaagcaatgtcatgctctaccccctaaatattaggaacaataccacagggggtgtgtacaccacctgcaatattggaagtaatgtcaacctcgttccacctggatattacaaacaatatcacacgggtggtgaacaatattacattgatgtgcacattctttgtgatattgaaagtaatatcatcctttccgccccctggatattacgaagaagatcacaggaacaacatcataaggggggtgtacaccctcttcgatattgggaggaatatcatcctttccttccctggatattaggacaatataacagggttaaggaacaatattacaagggggtgtatgccccctgtgatataaggaggaatatcatcctctacctcctgggatatttggaacaatatcacaaaagggtgtacacccaatgtgatattagtagtagtatcatcctctcacccctaaatattaggagtaatatcccaaagggaatgcacaatccctgtaatattgggagtaatgtcatcctctaccccttggatattaggagcaatatcacaggggttgtgtaccccaccttcaatattggaagtaatgtcaacctctccccacctggatattaggaacaatatcacggggaacaatataacgggggggggtgtacacttcctcggcattgggag

SEQ ID NO: 478810 - DNA, 554 bp, Homo sapiens
ttcttgatatttaatacaatttactaggacgtgactcatcgatgggtctcctagatgaggatttagatgctctgtgggcagcagataagagtgcagcctacttgcagaaagtaaattcattgaatactccccataaagtcaatactgtcaggcttatcagctgtcctcatttcccactctgctccctggggaccagacttgaaataaaaggccccagctccaggcgcttagaatctgtttctgagacttacactgtagctgatgcagactggtttaataagatacaacctgtgactggctcccctcccactcattgtccctgtgctctctgctgggattataggcttgcccaggcctcgtcagccagcggtccctgcctgagctgtcttatccaggcagcagaatctgtctgggtggaaacgaggaagagtgaagacaaaatggccttgtttttattatggtccagaaagccactggagtcccaagccttctcgtagaggtaaatgtagggtagaaggtcagttgttagcacaaactactctcctagtacaact

SEQ ID NO: 478811 - DNA, 482 bp, Homo sapiens
ccagccacctcctacagaaaatccaaggtgactagggaatggagcaggccctcagcatactgcagcagccctacggaaaagttgccatacttatatgggtgtccgttcccatacttccttactgggaaggtcctccaggcctgggtctccagccaccctgccaccagagctatcgagtcaatggaagctctgcaactccctggacagaaccctcaggggcaactgaaagctctctgccaccaccttgccttatccacacctccagcaagctgcagttaacccaaggagaggaggtcaatcggtgtcccacaggaacccctcccccaccgatctgctcatcactagacagggaacccctgtcccacagcatagactctccatcctggagtgattgcattgagcgattgctgacctgcatcactctggggtggagcccccagtagacaagcaaaagacccttgaccacaaccattactaaggtc

SEQ ID NO: 478812 - DNA, 860 bp, Homo sapiens
ctgtgaagagataacagcaaaagagaagcccaggtagcggtccaggccacctgtaggatcatctgcaacttctgatcccacaggttccccattttcctgggctggacctggagggagagtaccagtttatcagcttctaaaccaaaaagtgaattcttaggacttcatcactatatcatctgtaattcttattagaagccagctggaggaatggatgtttttggaagactgaaagccatgttctccctggaacctctggggtcccaagtggccatggaggccacagttctacttccggccctagccccgcccctacccgcctacccaccatcgcaatgcatgatgggccaccacttcacttgggccacatccacgagacccgaagcttcttccaggtgccacagactgaacagctccgtggcttttgaccatatttgcagtgtctcccagagttgtgagcagaagcagagagaggatgctgtgcaccaagcgcttgtaggatcaggcttgccctggcagtcaggccatggctctggtgtccagatgatggagggcaggcctctctgctgttgtagccgggctaagcaagaacgggctaaactcctaccatttcctcagctgaatgttcaccttcctcattttcccctgattagcagcagcctgcagtaccccttttacccttttgccctagctgggtaactttttaggccactttaaatctttctggaaacgagaggagtaaatagaaaaaaaaccaggaactgtatcaggtgctttgcgtaataaatccctaatctttataataacctgtcttagtctgtttgggctgctataacaaaataccttagactgggtaattt

SEQ ID NO: 478813 - DNA, 1529 bp, Homo sapiens
gggctgtggtgacgtaagctgggcctggtgggagtggactctgctgtcccctcagtcagaaggtgcgggctggtgactggggccacctccccttgagtggactctgctgtcccctaagtcggaaggtgcaggctggtgactggcaccacctccccatgaccggactctgttgtcccctaagttggaaggtgcaggctggtgcctggggccacctccccttgagtggactctgctgtctcctatgtcagaagctgtgggctggtgactgaggccacctccccatgagcggactctgctgtcccctaagtcagaaggtgcaggctggtgactggggccacctccccttgagtggactctgctgttccctaagttggaagctgcgagctggtgactggggccacctccccatgagtggactctgctgtcctctaagtcagaaggtgagggctggtgactggagccacctccccttgagtggattctactgtcccctaagtcggaagctgtgggctggtgactggggccacctccccttgagcagactctgctgtcccctaagtcagaagttgcaggctggcgactggggccacctccccgtaagtggactctgctgtcccctaagtgggaaggtgcaggctggtgactggggccacctccccgtgagtggactctgctgtcctctaagtcggaaggtgcgggctggtgaccggggccacctccctgtgagtggactctgctgtcccctaagtcggaaggtgcaggctggtgactggggccacctccagcttcaggttgtttttaaggctctggcagcccacccagcatcgctgtgtgaattccagaagggtgcctgtcttctggcccatttcccgctcactgagcccaccgctgaggggaaggatttgtggggagaacagacactcagctggattttagcctccttgtaaaccctcccaagtgctcttaaaaagttcaaggggagggggtatggactccacctcttgataggggaggggcaaggttctggaagagtgtatggcaagggtaattgtgcgaggccagttctggaaaataaacctgccaccatctcctgatggggcccaggtctgtagggcagagcacaggcccagggattctggaactctgaggccatcttgggccctttggtatcagcagtcaccgtgagccaaaggacagtactggcagctgctcccagggtccctggggatcgcagaggtgtttggggtttggatgagctagctgtggcctctgtagccgagactgaattgaattaacgggatcagtgtcagaatcccatcaatatatgctgtttctggggtttgctaggtgacagactcacccctaacttttgcaggctcaaagcaagagtacatatggagctctacctgccatatgtctaaatatttacagtttataaataaagcaaactaattgttaaatgactaccttatcctgtcatcttggcagatatccttcttaatgaactgaaaagctagatttgaatttgg

SEQ ID NO: 478814 - DNA, 817 bp, Homo sapiens
tgggctcctgtgcagcccgagcctccccgatgagtgcggccccctgctccacggcgcccagtcccatggaccacccaagggctgaggagtgcgggggcatggcaagggactggcaggcagttccacctgcatcccccgtgcggcatccactgggtgaagccagttgggctcctgagtctggtggggacgtggagaatctttatctcaaggtttgtaaacacaccaatcagcaccctgtgtctagcttggggtttgtgaatgcaccaatcgacactctgtatctagctactctggtggggccttggagaacctttgtgtccacactctgtatctacttcactcctgaagccagcgagaccacgagcccaccggaaggagcgaacaactccagacgctctgccttaagagctgtaacactcaccgcgagggtctgcggcttcattcttggagtcagtgagaccaaaaacccatcaagtccggacacagctatatgaccagccaaatgatggatttatttctctggcttccatcaaaagcatctaaaatatgtgtatttttgacctggtgacaaaagctgtctcttataattgttccctccttcacctcaaccttcacatctgtcttaatttggaaagttttgggggatttttctgatcattttggtggcataagtgtgcaagccttttgtgaccatcactaattgccagtgtgggaggcagcttgcatcggctctcactggctcatgagagctggctgcatcttctccaaaacctatgctcagtgtagccattttggtagcttgacatcagccatagtg

SEQ ID NO: 478815 - DNA, 846 bp, Homo sapiens
tgcagtaaaaatcatgtcaatgtgtggaggaagaagctagtatcactcgacaaatatgcttcctttacacttgcagaatcttctggcccggcatctgggaaacaatctttatgctaaactgcagcccgtgtggccctacttacctgggaccttcaccccaggtaacctgccagtctccagtgggttcatgttctcgctgacttcaagaatgaagctgcggaccttctcgtcccaaggcacaagaccacttgtgccagcagcatgcttcagcaagatggtagaagcaggaagagagctggccagaagacacataccccctggaaatggagagagtccttcggtgtaccacgtagcagttactggagaagtggtgggtgagattaacactctggtgaaaacgaggagtccagtcaagaatacgagctccgacgtgagcaggcgcagagtccaagtggagtcagaattttcaggaaactaccacatgggagtaactgcttaactgagtcctcagtggagaatgccataaaccctggctaaggtgattttgatcactaaaactttttaagcagaaataattaattacccatagagcttcagtatctctatcttggatcaactgatttgaagaaaaacatagcgaacctcctggggtaattgagcaggagaatgtgttcctgggttattaaattaatgcatctgcagcttgaggttagtcgatattagtagaataaattctgggaactgttaaaaataatgatgttagctttcaaaatgttaatacaattctaaagtcactgtttctgaaagtagaaattgttactggttcttaacaataaaagcatttgt

SEQ ID NO: 478816 - DNA, 600 bp, Homo sapiens
ctgtgctgtgatgtgatacttgttttcgtcgatgtgagagtgcagtgctgtgatttctcagagcaaggacatgtcaccaggcctgggaaccatgggaaaggttttacaaagaaggggacgagagctgggtcttgaggggctgggaaatggagctggctggagaggagcctctaacgcagactctggctggtttcagtcccaggatgctatccctgagacctcttatctgcattgcctcagccatcctgtggtcgcagtgtttgctccgcatattctgcccctgctcacgtcgcccttcatcctgccccagccagacatgctgtctgtacagcccactggttctggcagccaggagtttcctaggaccagcagcatcgattgtgctccactcagatcaaggaaagagttcccctcagctcttacctggcaaataaggtggactggaaccatttctaaagagatcaggaagtatcagggaatgggatctattcagtctttcggttacctgtaagttgaagctgaaagtcagccttgctatccatggaacctgcatctacatatccaggtactttttgcctactaaatcctcttctcatttca

SEQ ID NO: 478817 - DNA, 728 bp, Homo sapiens
aagccacaggcctgcaacagcaggattacgatagctgttatgcccaattttcaggtccagaaactgaggttcagagaatattggaggagaaagcagctctgagaggatattatgacatgtctctcctttgactacatgttccttcctccacagccaattgacaggagagaaagggacgatctctattcatttactggagaattagcattttctgtcaatgcaccttgctcttttacccaaggaatttcttcaggatcttcctctgtcaccctggctggagtacagcatagtaaaccctcagaaacttgtcctacagtttgtctgagccctacggaggacggctcttctttaatctcctgggttgcttattgtcttaaacatcaagaatgctccctgacagcagaggagcaggcccggcagcactcagaactgagtgaacacaagccagagagtgcctcgcagcccaagagctctgacagcactccattctgccccctgacattacacacggcattggagggctggtgccatgtggtggcagaacgcaaccaaaaccagaccagaccacagacaccacttgtggatgttgtgaagcgttcattggaaccttccttcactgtgtggttgatggttgagatgcttgcaaaacaagtatttggtatgtcttgtgtggtaacagttgtgacatctgggtcccgaataaagagtgtacctcccggaaggtaggg

SEQ ID NO: 478818 - DNA, 574 bp, Homo sapiens
ctggtttatcatctccccaatattattatgcctcatctgtaaactgaagatgatagaatcccggctcctccccttgctcttggcaaaggatggccgaagtcctggggagagtcgagctggctatgacacacttaaaagatgtattggagaaacagctctggacaagtccctggcctccaggagcttaccgtccagagggagaaaaggcaagaagatacttgtgctgcttattaaaggctatgttagaagaactatacactatgtcaacatcatagagatgagtctcttgctagtctgtggcccatttacgcagtcacagcaaacaatggcacatttccagcagtttggagcatcggtggtgtgctccagcgccaggtgtaggcactggcataatgctccctggtgtgctatgtttgtgggtttaatgcatatacttaggtcattgatatattttgattaagtttttcatctgtttttaaacccttataagtatagttgtacatatgtcttgttgaactttcataaatttgacaacaatgaggttactgggtcaaagcattttaaattttaaatt

SEQ ID NO: 478819 - DNA, 998 bp, Homo sapiens
ctgtcccagggtcatgagggcagagcatcctttttagggcgagctctctacaagcaccaggtcgccacagcagctcctctgcggctatgcattcgccattcttccctgtattgacccttggatgctgctttcaaagtgcctcacacatgttttgtggcctcttccagttatcctcctatctcttcccagccacccctgggattgtctttgccaccctgagagatctcaagtttccgcagcttgtctgcatcctccaagtgttcacacctcggctcctctggccctggcttcccaagcccctctctcggtgcccacctctcacgccaatcctgcttctggacatagcccaaagggaagaggcagctcactggagcaacttcccagccattccctctaacaccattcatagcttccatggattgaagatcctagacacaaactggggcaactgcctggtctaccaggatttccttaaccctctgtgtgggcggcaagccacccaggtgccaaggcaagagaccgagggcacgagctcggtagcaaaaagtgtcaaggaacaacacccgctacttagcagaccgggaaagggagtctccctttccccgggggagtttagagaagactctgctcctccaccttttgtggagggcctgacattagtcaggcttgcccgcagttatcccgaggcctaaccgtctccctgtgatgctgtgcttcagtggtcacgctcctagtccgccttcatgttccatcctgtacacctggctctgccttctagatagcagtagtaaattagtgaaagtactaaaagtctctgatatgcagaaataatggcgtaagctgtctttctctttgtctcctctctctctctgcctcggctgccaggcagggaagggccccctgtccagtggacacgtgacccacgtgaccttacctatcattggagatgactcacactctaccctgccccttttgctttgtatccaataaataacagc

SEQ ID NO: 478820 - DNA, 535 bp, Homo sapiens
ttctggaagaggaaatggactattcatgagcagtgctttcagtgatggaccagagcttttcaatgacagtgactcgaattgcaaggttctggtgcatgccaaagatccccacagaaggatcgacatcacagggacactaacccaaggggccgagtctgttctggagtcaggaagagtcccaccgggcaagaagaaatggtttcacgctttcaaacgttttcaagtgggaacaggaacatatagcttgggccaggctctgccacgacacgtggctgtggcacctcccttggtggtggctgggaaccttgtggaaacaaaagtccatttccaagaaaccagtggggccgtacaatatgctttggtagctagcttagtcagcaccagattccgcagaagatgctggtgcctgaagcagatcaatgggacgggtgccacggtgggttaccgtgtaagaagtaaatgtagcatccttaattcataagttaagctttttcataggtatttatgtacaaggaaaaatgtagtacagttgttc

SEQ ID NO: 478821 - DNA, 768 bp, Homo sapiens
tacgtcttccagtagttaaaaaacggggggccgaggcccccacagttaaagtgggcgagagagcagcttccagcatctatggcgatgatggcctttttttgcccagatgcaaccaggtctgccagtcggccagctcgcacggaggggcccacctccagccctggcctcaagagggaccaggcacaaaccttaccttgacaatgtttccagcaacacttcgctgggacaactagtcagtgtggtcaaccaggctaggacaactagtcagtgtggtcacccttgtggccgttcttacggggaatttggttattatggggaacttggccaccagggagctcagtgcctcctgcccatcctcctggacaagcctgagaggaaggagggaagtgctctgggaagctgtaaaaaccagagctcaaatgtgctgacttcagcaaatgccttcagggctaaagagctacaaatcacagctatctctttgggggtctggcttcatgtaggtttggcctgataatgatcagtttttggtgcaggctcatgcactctgccagtcatgtgggcattggcgatgaggcagactatgttgccgtaagtggttttgccttccactctccatctcgttgcttctcatggccaccatggatccctaagtgcccagcggtttggggtgagccatgagctgctggcgttttgtatggtggttgtagtgggaaaaacaagagctttcttttatttctaacccctaccctgagatgtttgaagtggtgg

SEQ ID NO: 478822 - DNA, 876 bp, Homo sapiens
ggacactgatttagagaatacacggcttcttggggagccttgcctcagccctgcaaggtttgaaggaggaagaagaaccatcaggtaaacaaagcacagttgaggaactgtgagagggaactgagggcctgaacttcacctggagaaaatatcccaagcaaaccaaaagcagcttgagatgggatgtcgtgagtggagcaataaaagagacaatggaaacatttccctcccttggaatggtcagcaagcagggctcacagatgctgggctgccagtcgtgggcaaccctgctctggtgcacccccaggaagcacatgaagctgaggggccaaggtcattcattcagccttttaaagatcttgccttcagcctgtatgaggacccaagcaggttgccgctgctggctttgggggaggggatgggggagtggccagcttttattcccttatttgtccccgcccatgtcctgctgattggcccattttacagagtgctgattggtccattttacagagcactgattggtgcattttacaaacctctagctagctacagagtgctgattggtgcattttacagagtgctgattggtgcattttacaaaccactagctagctacagagcgctgattggtgcgtttttacagagcactgattggtgcattttacaaacctcttgtaagacagaaaagttctccaagtccacactcaacccaggaagtccagctggcttcactaagggggcagaaggtcacatgaattttattcagccaagaaataacatctaagaacagtgagatccatgctttatcctttatacagctttatgcttgcaaataaagggcacgattatgggaatttttctcagttgaaaagg

SEQ ID NO: 478823 - DNA, 737 bp, Homo sapiens
tggaacccatatgaagtgcctctaagtgttgcggacaggctgacgcactaccacgccgcgcgacagcgaccgcgcgcaaagcgccaggaaccccccctactgcccgccccgcgctggcgaagcgcgacccgtcccgccccgccccgccctcggcacagcgtcagaggcggggacgcgcgctggtctatttttgggcatccggatggcgactgcgggaaatcgagttctcatgctggggcgaaaggtgtgtctgcaggagccaaatccaaatgagcagtccaggaccgtccgcccgctcggaagaggcgaatctcccacggcagacgtctgggtgtgcgaatgccagttgagcggggcctcgaggacgcgtcacacacagcgaggatttgaggagggaagcgccttccagaagtggagcaagcaagatggggaatggaaggcaagaagtatgaaatctgaggcggacctttgcaaaggatcgtttcagtatgacttcacaggggagttagggagtataggtgatatctcaagagttatctcggccagagacaagggagctgggctttcatacacttaccttgtttttcatgggttaagggccgctgaagaggatgtaagtgtgcagacacgcctagctctgcacatttagggaaagcagtttaataggctgaacaaaggcagtcctctcaagatgacccttcagtgtgggcatttgaaagtgaaagcaggttgaagtt

SEQ ID NO: 478824 - DNA, 639 bp, Homo sapiens
agctcaaggtttgtgagtgcaccaatcgacactctgtatctagctgctctggtgaggccgtggagaacctttatgtctagctcaaggattctcaaggtttgtgaatgcaccaatcgacactctgtatctagctgctctggtggggccttggagaacccgtgtgtggaaactctgtatctaactaatctgatgggcacatggagaacctttgtatctagctcagggattgtaaacacaccaatcagtgccctgacaaaacaggccactcggctctaccaatcagcaggatgtggcgagaccacgagcccaccaggagaaacgaacaagtccagatgcaccgccttaagagctgtaacactcaccgcgaaggtctgcagcttcactcctgagcccagcgagaccactagcccaccaggaggaacgaacaactccagatgcgctaccttaagagctgtaacactcaccgcgaacgtctacagcttcactcctgagccagcgagaccacgaacccaccagaaggaagaaactccgaacacatctgaacatcagaagggacagactccagacgcgccaccttaagagctgtaacactcaccgcgagggattcagcctctttatatttagtgaagcaactgaaac

SEQ ID NO: 478825 - DNA, 542 bp, Homo sapiens
cttcctttcaattgtggtgagacactgacctctattcgaagatggtggccacaggtgatgccccaagggatcctcagtggagcgagctcttctctaccagctgcccccaggctccacgggctgctctccctcaaggcccactgtgcgtctacactgcagcacctgactcagaagaggtggagtgtgttgcaggcctgggggcagctctgcctgtccctcttagtaccaccaggctaggctctagagtcaagctggtacatgggttctggggtcctgtgatcctgggttgtggggagtgggatgtgtgtttcctaggaaaggtgctgaggcgctgtggtatatggccttactccactccagtgcagccctgtggttctcaccaggctattggaagttccctttcccactgctcccattgccagctgagacacatgccaccttctccctttcttttctctctggacctgtgttgcgccaggaaagttgtttaatgttttagcaatcatgtgtattaatgtgtgacagacattgctgtgcttttc

SEQ ID NO: 478826 - DNA, 571 bp, Homo sapiens
ttctcactgtccagtgggcactctgagagcctttgctaaaaatgcctccctggctcaccctgcctaccagctccaaggcccttccctttacagcagtcatgaggccagactggaagaaagaccccatgaagctcatgtttctgtgtccagttggtgccatctactgcctgaggagagcttctaactcatcagcccaatctctaaacacaggcaacactcctgggggaggggataggggcacagggatctgtggctattctgtatgtcaaggtttctataaaacagatcttcagataaaggcagcggaaacaccagcaagagcaaatgcacaatgtatgactcagggtgaagctacacatttttcacagtctagaggccctagaccttttggttggacaaatgtcaatatcagcataactttcaagtctttctatgtaaatctgcaaaatagagcactggcctttgatttagcttagtttgagtgctgtaataagaactcttaggaatgacaggtttcttctggttttgaccagaaaatacttctgctacctactgtgcccatagaaatgta

SEQ ID NO: 478827 - DNA, 1093 bp, Homo sapiens
atcatacggaaacatcacagaatggaattgaatggaatcatcagttggactcgaatggactcatcaaatgtcctcgaagggacgcgtcaaatggactcgaacggaatcatcatcgaatggaatcgaatgggatcatcaaaaggactcgaatcaaatcttcaaaaggactcaaagggaatcattaatgcaatcatcatcaaatggaatcgaatggaatcatcaaatggaatcgaatggagtcattgtctaatgcaatcgaatgaaatcatagtatggaatcccatgaaatcaacatcgaatggaatcgattggaatcattatcaaatagaattgaatggaatcactgaatggaatcatcatcaaatggactccaacggaatcatcgaattgactctaatggaatcatcactgaatggaacagaacggaataatcaaatggaaacgaatggaatcatcatcgaatggaatcgaatgtggaacctaaaggaatcgccaaatggactccaatggaataatcatcgtatggaatcgagtggaatcatcgaatgtactcgaatggaatcatcgaatgtactcgaatggaatcatcgaatggaatcgaatggaatcatggtcgaacggaaaagaatggaatcatcaagtggacacgaatggaatcaacatctaatggaatggaatggaatcatcaaatggaatggaatggaatcatcatcgaatggaataaaatggaatcatcaaatggaatcaaatggaatcatcaatgaatggaatcgaatgggaatcgaatggaatcatcatcgaatggaatcgaatggaatcatcaacaagtggaaacgaatgaaatcatcgaatggaatcgaatggtgtcatcgaatggacacgaaaggaatcatcgaatggaatcaaatggaatcaccatcgaatggaatccaatggaatcaccatcgaatggaatgttatgaaatcatctcatggactcgaagggaatcatcatcgaatggaatcgaatggaatcattgaatgaaatggaaaggaatcaccatcgaatggaatgttatggaatcttctaatggactcgaagggaatcatcatc

SEQ ID NO: 478828 - DNA, 980 bp, Homo sapiens
ttatcaaacggactcgaatggaataaactttgaatggaatcgaagggaatcatcaaatggaatcgaatgcaatcatcgaacggaatcgaatggaatcatcgaatggaatccaatggaatcaccattgaatggactcgaatggaatcatcattgaatggaatcgaatggaatcatcgaatggactcgaatggaatcatcatcgattggaatcaaatggaatcatcgaatggaatcgaaaggaatcatcatcaactaacaaaaacattgaatggacacgaatggaatcatcatcgaatggaatcaaatggagtcatcaaatggactcgaatggaatcatcatccaatgggatcatcatcaaatggaatcgaatggaaatcgaatggaatcatcgaaaggaattgaatggaattattgaatggactcgaattgaatcatctaatggacacgaatggaataatcataaaatggaatcgaatggaatcatcaaatggactcgaatgaatggaatcattgaatggactcgaatggaatcaccgaatggactcaaatggaatcatcatcaaatggaatcgaatggaatcatcgaatggaagtgaatagagtaatcaaatggaatcaaaccgaatcgtcatcgaatggaatcgattggaattgaaggcaatcatcatcgaatggaatcaaatggaatcatcatcaaatggaatcaagcggaaggaatcatcaaatggaatcaaatggaatcattgttgaatggaatggaatggaatcattgaatggaattgaatgagatcaccaatgaacggaatcaaatggaatcatcttctaatggaatcaaaaggaatcatcaaatacactcgaatggaatcatcatcgaatggaatcgtgtggaatcgtcgaatgaactggaaatgaatcataatcaaatgcagttaaaatgaatcatcatcgaaaggaatcacatggaatcatcatcgaatgg

SEQ ID NO: 478829 - DNA, 699 bp, Homo sapiens
gtatataatcgatcgcaatactcaccgaatggaatcaaatgtaatcatcgaatggaatcgaatgcagtcatcattgaatggaatcgattggaatcatcatcgaatagaattgaatggaatcatcaaatggaatcgaatggaatcatccccaaacgtaatcgaatggaatcatcgaatggaatcaaatggaataatcgaatggaattgcatggaatcagcatcgaaagatatcgaatggaatcatcatcgaatagaatcgaatggaatcattgaatggaatcatcctcaaatggagaataatcatcaaatggaatcattgaatggaattgaatggaatcatcatcgaatggaattgaatggaatcatcaaatggactcgaatggaatcatcatcatatggaatagaatggaatcatcgaatggaatcaaatggaatcatcattgaatggcatcaaatggaatcatcatctaatggaatagaaaataatcaacatcaaatggagtcaaaagaaatcatcattgaatggaatccaaaggaatcgtcatcgaatggaaccaaatggaatcatcatcgagtggaaccgaaaggagtcatcattgaatggaatcgcatggaatcatcatcgaatggaatcgaatggaatcatcatcaaatggaatcgaatggaatcatcgaatggaattgaatggaatcatcatc

SEQ ID NO: 478830 - DNA, 1483 bp, Homo sapiens
tcatcaatgaatggaatggaataatgaaatcgattggaatcatcgaatttggtcgaatggaatcatcatcgaatggactcaaatgcaatcatcatcgaatggaaacgaagaaatcatcgaatggaatcgaaaggaatcatcgaatggacttgaatggaataatcatcgaatggaatcgaatggaatcatcatggaatggaatcgagtggaatcatcgaatggactcgaatggaatcatgctcgaaagagatcgaatggaatcatcaaatggactcgaatggaatcatcatcgaatgaaatcgagtcaccaaatagactccaatggaatcattgattggcctcgaattgaatcatcatcgaatgcaatcgaatggaatcatcgaatggactcgaatggaaatcatcgaatggactcaaaaggaatcgtcatcgagtggaatcaagtgaaatcatcaaatggactcgaatgcaatcatcgaatggcctcaaatggaatcatcatcgaactgaatcgaatggaatcattgaatggacccgaatggaatcatcatcaagtggaattgaatcatgtggaatcgaatggaatcatcgaatggactccaattgaatctttgaatgaactcgaatggaatcatcgtcaaatggaatctaatggaatcattgaatggaatcgaatggatggaatcgaaaggaaacatcgaatggacttgaatggaatcatcgaatggactcgaatgcaatcatcatcgaatggaaacaagtggaatcatcgaatggaatcgaacggaatcatcattgaatggaatcgaatggagtcatcaatgaatgtaattgaatggagtcatcgaatggattctgttcgaatcatcatcgaaaggaaccgaatgcagtcatcatcgaatggaatcagatgtaattatcgaatggaatcatcatcgaatggaatcgaatggaatcatcgaatagactcgaaagcaatcaaccaatggactcgaatggaatcatcatcgaatagaataaaaaaatgtaatcaaatggaatcatcaaatggaattgatcagaatcaacatagaatggaatcatcaaatggaattgaacagaatcatcatcgaatggaatcgaatggaatcatcaaatggaatcgaaggcaatcatcatcaaatggaatcaaagggaatcatcgaatggaatcgcatgaaatcatcgaatggcatcaaacagaatcatcattgataagaatcaaatggaatcacctaatggacaagaatagaatcacaatcgaatgggatcgaatggagtcatccaatacaatcgaatggaatcatcatcgaatggaagagaatgtaatcatcatcgaatggaatcaaaaggaatcattgaatgcactcgaaaggaaacatcaaatggactcgaaaggaaccattatcatgtggaatcgaatggaatcatcgaatggactcgaattgaatctttgaatgaactc

SEQ ID NO: 478831 - DNA, 729 bp, Homo sapiens
tatagagtttcagtttcagaagatgaaacgagttatggagatggatggtgagctccccaggttggtagtactccatgtttattgctgtacaacaatgacagcagcacgggagtttgatactgggcatgaagtgggaagaaaagttgaagacactcttgaaagaaaggaatggaatggaaagcagtggaatagaatggaatggaatgcaatggagtggaatggagtggagtggagaggagtggaatggagtggaatggaatggaatggaaacatcatcaaatggaatagaacggaattatcatcgaatggaatcaaacgaaataatcagcgattggaatcgaatggagtcatcatcgaatggaatcgaaaggcatcatcatccaatggacttgaatggaatcatcatcgaatgtactcaaaaggaatcatcatcgaatggaatcaaatggaatcatcattgtatggaagcgaatggaatcatcatcgaatggaattgaatggaatcatcatcgactggaatggaatggtatcagcatcaaagggaatagaatggaattatcatcgaatagaatcaaacggaatcatcatcgaatggaatcaaatggagtcatcattggaaggaatcgaaaggcagcatcatccaatggacttgaatggaattatcattgaatggattcgaaaggaatcatcatcgaatggaatcaaatggaatcatcactgaatggaagc

SEQ ID NO: 478832 - DNA, 1212 bp, Homo sapiens
tggattcgaatggaatcatggaatggactcgaatggaatcattgaatgaaatcggattaaattatcatcaaatgaaatcaaatggaatcatcgaatgtggaatcgaaaggaaacatcgaatggacttgaatggaatcatcgaatggaatcgagtggaatcatcatcgaatggaatcgaatggaatcatcaaatgtacacgaatgtaatcattgttgaatggattcgaaagaaatcatcgaatgacatcgaatggaatcatcttccaatggaatctaatgaaatcatcgaatggactcgaaaggaatcatcgaatggacttgagtggaatcatcatcgaatggaatcgaatggaatcatcgaatggactcgaatggaatcatcatcaaatggaattgaatataatcataatcaaatggaatcgaatggaatattcatctataggattcgattggaacaatcattgaatagaattgaatggaatcaccgaattgaatcaaatggaaggatcatgaaatggaattccaatggaatcatcattgaatggaatcgaatgcaatcattgaatggactcgaatggaatcatcatcgaatggaattgaatggaattattgaatggacacgaatgcaatcatcattgaatggactcgaatggaatcatcaaatggagtcgaatgtaatcatcatcgaatggaatcgaatggaatcttcgaatagaattgaatggaatcatcatcgaatggagtcaaatggaatcatcgaatggactcaaatggaatcgtcatggaatgtaatcgaatggaatcttcgaatggaatcgaatggaatccccatagaatgcaattgaatggaatcatcatcgaatggaattgaatttaatcatcaaatggaaaagaattgaataatcatcgaatggaatcgaatagaacaattgaatgaaatcgaacggaatcatcttcgaatggaattgaatggaatcatcaatgaatggaatcgaatggaaacatagaatggaatccaaagtaatcgtcatcaaattcaacccaatgctatcattaaatggactcgaatggaatcatcgaatggactcgaatggaatcatcatcaaatggaatagaaaggaatcattgaatgcaatcgaagggaatcatcaccaaatgaaatcaaatgaaatcatcgaatggactcgtatggaatcaacattgaatggaatc

SEQ ID NO: 478833 - DNA, 946 bp, Homo sapiens
gtcacaaagtagtttctgagaatgcatctatctagttcttacgggaagataattcctgttccacctcaggcctcaaagccctccaaatatccacttgcagattctcgaaaaagagtgtttcaaagcttctctctcaaaaggaaagttcaactctgtgagttgaaagcaaacatcacaaagaagtttctgagcatgcttctgtttaacttttctgtgaagattatcccgtttccaacgaaatcttcaaagaggcccaaacatccacttgcagatgccacaaaaagagtgtttggaaactgctgtttgaaaaggaaccttcaactctgtgagttgaatgcagtcatcacaaacaagtttctgacaatgcttctctctagtttttacgtgacgataattcgttttccaacacaggccagaaagctctccaaatgtccacttgcagaccctacgaaaagcatgtttctcatctgctctatgaaaagcaacgtgaaactctctgagttgaacacaaacatcacagagaagtttatgagaatgcttctgtttagtttttatgtgaagatattcccgtttccaaagacatcttcaaagaggaccacatatccacttgcagattccacaaaaagagagattcaaaactgctctatccataggagggttcaacgctttcagttgaatgcaatcgtcacagagaagtttctgagaaggcttctgtctagattttatttgaagatgtacccgtttcgaacgaaggccaaagagtggtccaaatatccacctgcagaacctacaaaaagagtgtttcaaagctgaactatcaaaggaaggttcaactctgggatttgaatgcaaacatcaaagagaattttgtgagaatgcttccgtttagttaggtgcagttatcccgtttccaacgaaatcctcagagaggtccaaatatccactc

SEQ ID NO: 478834 - DNA, 446 bp, Homo sapiens
tcatcatcgaatggaatcaaatggaatcatcaaatggaatcgaatgcaatcatcatcaaatggaatcaaatggaattatcatcgaatggaatcaaacggaatcgccactgaatgcactcgcatggaatcatcatcgaaaagaatcaaaaggaatcaacgaatggactcaaatggaatcatcgtcgaatggaatcgaatggaagcctcaaatagaatcaaatggaatcatcaaatgaaatcgaacggaatcatcatccaatggaaacaaatggagtcatcaaatgaaatcgaatggaatcatcatccaatggaatcgaatggaatcatcgaatggaatcgaagcaatcatcatcaaatgaaatcaaatggaatcatcgaatggaatggaatggaatcaatgaatggaattgaatgcaatcaccaatgaatggaattgaatggaatca

SEQ ID NO: 478835 - DNA, 1579 bp, Homo sapiens
aatgaacggactcgtatggactcatcatcacatggacttgaatggaatcaatggaatcatcatcaaatggaattgaatggaaacatcatggaattgaatcaaatggaatcatcatggaattgattcgaatgcctgatcatcgaatggaattgaatggaaacgtcatcgaatggaatcaaatggaatcatcaaatataatcgaatggaatcatcatcgaatggaatcgaatgtatccaatgaaagaaatcgaatggaatacaatcatcatcgaatggaatcagatggaatcatcgaatggaatgaaatggaatcatcatcaagtggaatcaagtggaatcatagaatggaatcaaatggaatcattagaatggaatcaaatggaatcatccaatggactcgaatggaatcatcatcgaatggaatcaaatggaatcatcgaatggagtcgaatggaatcatcatcaaatataaacaaaagccatcatcaagaatcatcatcgaatggaatcaaatggaatcatcatggaatggaatcaaaaagaatcatcacaaaatggagtacaatggaatcatcatcgaatggaatcaaattgaatctcgaatgccctggaatggaatcatcatcaaatggaatcaaatggaaacatcgaatggactcgtatggaatcttcatcgaatggaatcaaatggactcatcgaatggacttcaatggaatcattgaatggactcaaatggaatcttcgaatggactcgattggaatcatcattgaatggaatggaatcatcatcgaatggaatggaatgattcatcgaatggaatcagatggaatcatcattgaatggaatcgaatagaatcttcgaatgaaatcgaatggaatcatcatcaaatggactcgaatggaaccatcattgaatggactcaaatggaatcatcatccaatggaatcaaatggaatcaacatctaatggaattgaatggaaacattgaatggaatcgaatgaaatcatcaccgaatggaatcgaatggaatcatcgaatggaccctaatggaatcattatcgaatggaatcagatggaatcatcaaatggacttgaatggagtcatcaaatggactcaaatggaatcattattgaatggaatcgaatggaatcattggaagcatcaaatagaatcgaatgcaatcatcatcaaatggaatcaaatggaattttcatcaaatgggatcgaatggaatcatcatggattataatcagatgggatcatctaatgaaagaggaaggaatcatcatcaaaaagaatcaaaataaaacaaagaatggaatccatcggaatcatcgaatggaatcatatggaaccatcattgaatggattcgaatggagtcattaccgaatggaattaaatggaatcatttaatggacttgaaaggaatctttggactcgaatgggatcatcgaatggaatcgaatggaatcatcatcgaatgaaataaaatggaatcatcgaatggaatcgaatggaatcatcatcgaatgaaataacatggaatcatcgaatggactcgaatgaaatcatc

SEQ ID NO: 478836 - DNA, 1181 bp, Homo sapiens
tcattcattggacacgaatgcaatcatcatcgaatggaatagaatggaatcttggaatggaatcaaatgaaattattgaatggaatcgaatagaatcatcattgaatagaatcgaattggatcatcatcgaatggaatcaaatgatatcatcatcaaatggaatctagtggagtcatcatctaatggaattgaatggattcagcaaggaatggaatcgaatggagaaatcaaatggaatccattggaatcatcatcgaatggaaccaaatgcagtcatcatagaatggaattgaatggaatcaacgaagggactcgaattgtgtcatcatttaatggaatcggatggaatcatcgaatggactcgaatggaaacatcattaatggaatcgaatggaatcctcaaatggaatcgaatgtaatcatcgaatggacactaatggaatcatcatcgaatggaatcgaatggaatcatcaaatggactcgaatggaatcattgaatggactcgaatggaatcatccttgaagggaatcgagtggaatcctcgaatggaatcaaatggaatcatctaatggaatcgaacagatttataagaaacttacttgaaccaaaaaatagaaaaacaaacaaaccaaaaccccctaaaactgtgatgagcaagtagacgtcagaacaggaaatatcactggggatgaagaataacatttcaaaatgacgaaggggaaaatacaccaagaagtcatgtaaataagatatatgtatgcacacaatagcattatttcaaaatacataatataaaacctattaaaaatgaaaggtaaaatagtaaaaccacagtcatccatggggatttcaacagtctcctgccagaaatttttaatttttgttaaacgaaaatttggtaaggctagagaggatcttataaatataattagccaacttgatctaactgaatcttttagaataatctaaggatgaggaatgaggtagcagagaaagaaaaggcagacatcaacgtgacattagtgtttcaagtctatgagaatacaccaataatggtgtatgtgtgtgtgcagatggtaagctcaatcttaaaattattgagttttaactgacaattcattattaggaaagataagaggaaatgatatctagtgagaggctatatgactgaactctaa

SEQ ID NO: 478837 - DNA, 901 bp, Homo sapiens
ggactcgaatagaatcatcgaatggactcaaatggaataatcatcgaatggaatagaatggaatcatcaaatgcagtcgaatggaatcatcatcgagtgtactcgaatggaatcattgaatggactcaaatggaatcagcatcgaatggaattgaaaggaatcatcaaggggacttcaatggaatcattcaatggactcgaatggaatcatcatcgaatggaatcatcgaatggtcacgaatggaagaatcatcgaacggaatcgaatggaatcatggaatggaatcgaatggaatcatcattgaattgaatctaatggaatcatcatcgtatggaatcaaatggaatcatcaacgaatggaattgaatggagaaattgaatggaacctaatcgaatggaatcatcaaatggaatggaatggaatcatcatcgaaaggattcgaagggaatcatcgaatggaatcaaatggaatcatcaaatggaattgaatggaatcatcatcgaatcgactcgaatggcattatcgtcaaatggaatgcaatggaatcatccaatggactcgaatggaataatcgaatgcattccaatggaatcatcaaatggaattgaatggaatcatcgaatggattctaatggaatcatcatcaaatggaaatggatggaatcaacaaagggccccaaatggaatgatcaaatggactcgaatggaatcatctctaatggaatcatcatcaaatggaatcgaatggaatcatcaaatggactcaaatggaatcatagaatggactcgaatgatatcaatgaatggacacgaatggaatcatcatcaaatggaatcgaatggaatccttgaatagaagcggggattctttagagccgaaacgcaggttttgcaacac

SEQ ID NO: 478838 - DNA, 553 bp, Homo sapiens
tggaatcattgaatgacatcgaatggaatcatcatccaatggaatcgaatggaatcatcgaatggactcgaatgcaatcatcagcaagatcatcgaatgaaatcgaatggaatcatcttcaaatggaatcaaatggaatcatcatcaaaaggaatcgtcatcgaatggaatcgaacagaatcatcatcaaatggtatcgaatggaatcatcaacgaatggaatcgaatggaatcattgaacgcactctcgaatggaatcgtcatcgaatggaatcatcatcgaatggaatcgaacggaatcttcatcgaatggtatcgaatggaatcatcaacgaatggaatcgaatggaatcattgaatgttatcgaatggaatcatcaacgaatggaatcgaatggaatcattgaatggaatcaaatggaatcatcatcaaatggaaccgaatggaatcatcatcaaatggagcctaatggagtcatcatggaatggaattgaaaggaatcatcattgaacggaatcatcatccaatggtagcgaatggaatcatcaacga

SEQ ID NO: 478839 - DNA, 759 bp, Homo sapiens
tggaaatgaatggagtcaccaatgaatggaatcgaatggaatcatcattgaatggaatcgaatggaatcatcgaatggactcgagtggtatcatcatggaatggaattgagtggaatcatcatcgagtggactcgagtggaatcatcatcgaaccgaaccgaatggaatcatcgaatggactccaccagaatcatcattgaatggaatcgaatggaatcattcaatggactggattggaataatcatcgaatggacactaatggaatcatcatcgaatggactctagtggaatcatcatcgaatggaatcgaatggagaaacatcattgaaagtaatcgaatgaaatcatcgaatggactcgaatataatcatcgaatgcactttaatggaataatcctcgaatggaatcgaatagaatcatcatcgaatggaatcgaatggaatcatcatggagtagactcaattggaatcagcatcaaatggaaggcaatggaatcattgaatggacttgaatggaatcatcatggaatggaatcgaatggaatcttcgaatggaatcaaaaggattcatcgaatggacactaatggaatcatcctcgtatggaattgactggaatcatcatcaaatggaattgaacagaatcatcatttaatggattcgaatggaaacatcaatgactgaaatcgaatggaatcattgaatggaattgaatagaatcaatgaatggaagtgaacggactcatctttgaatggaatc

SEQ ID NO: 478840 - DNA, 1162 bp, Homo sapiens
gcctgaggagggtccatgagtggatccctgaaggatgaacgagattcgggatgaggatgcccggggcatgcccgccatgcccactagcaaacctttattgagtacttactatatgccacacactggggacacagaggcactcaacacaggcagccggactccctatggagctgccgttctgtgcaccaagcagatgaagaagcaggacgtggggtttaaactgagaccgccagagtgtgtggaggctgtgtcctcacagttgctgcctcatggtcacaagatggctgcggcacctccgggcctcacatccatgttccaggcaagaggaaggagaaggagcaaaaggccgaagagcaaagaccctgattccttggagaaaggcttgcagcccctctccttcctggattgcacacctccagccctggcagcctgtcccctggttggcacccagcagcaggccacagatggcttctggctgtcccatggcgtcgcatcagggcatgcagcggatagtgactcacactggcacctcttctgcttggaaaatgccctacacatccatcatctttggtttttctgctagaacgatggcatgagggatgattcaagggtcttggaggccctatgcggtcaatcttgttttcctgccacatcaagggagtgtgcaattttcgaggccccgagccctgtgttttcactgagggcagacatagggcattcgctgtctttgcccgtggagctgttcctcacactaaccatgcagggctgggtgggagacatgtatggggggtggggtggggtgggagggggccaagaagacatggctagttctgaattttcccaacccacccataaaattcacccttcaaattctaaagattccattccgtggtctaactctgtgtgtctgtccttggttccaaaagtccccgtccttgtggcccctgttgttttggacccatcacaggcctgccaccctgtgagatcttcctcctttgacccctgcccttaagagctggctgtgttacctcctcttctgggaacctgctggtctctttgcccctagaagatcctcctttcctctgagtaccaatggcctcggttttctgggactgccacatccaacattaagcccatcctctcccatgtgcgccttctcttg

SEQ ID NO: 478841 - DNA, 641 bp, Homo sapiens
gctatcgtccgcggccccagcagccctgtgccctcgttggatcccgcgacgcggctcctttaagagcctcgcgggtcgcccgccgctaggtcgctccccggccatgcgggcgctgcgggccggcctgaccctggcgttgggcgcggggctgggtgcggtcgtcgagggctggcggcggcggcgggaggacgcgcgggcggcgccgggactgctgggccggctgcccgtgctgcccgtggcggcggcagccgagttgccccctgtgcccgggggaccccgcggcccgggcgagctggccaagtacgggctgccggggctggcgcagctcaagagccgcgagtcgtacgtgctgtgctacgacccgcgcacccgcggcgcgctctgggtggtggagcagctgcgacccgagcgtctccgcggcgacggcgaccggcgcgagtgcgacttccgcgaggacgactcggtgcacgcgtaccaccgtgccaccaacgccgactaccgcggcagtggcttcgaccgcggtcacttggccgccgccgccaaccaccgctggagccagaaggccatggacgacacgttctacctgagcaaccgcccgcgccccgggccggtcgcggaatgaggggccggcgcctggcctc

SEQ ID NO: 478842 - DNA, 476 bp, Homo sapiens
ccagcaaaccctataaaatcagtatatgagagttgctgttgtaccacgtcctcaccaatacttgatgtgtgtgcttggtagacaggcttctgcagaacaaggggcttgtccagcgcctgcctactacttcattgccagtagccaggaacgtctcccaacactcttctctggcattattttcagaaaggagcctctggtgggacactttcctgtaaatagctttcccaagaaccttagatggctgatttctggcaagttctgtgacattattaccaaaacaccaggggttttgtctaggtcttgctgctggctgcacagaaagccagtcactgagacaaccagtactgccaggaaagaaagctttaatcaggtactgcagccatggaggtgggagatcagcttcaaatccatctccgtgaccaactaaaattaggagtttatacagcagaaaagaaatgtagctacatacaggaaaa

SEQ ID NO: 478843 - DNA, 1438 bp, Homo sapiens
tgcagagcacccccatggcccaacatgtctcggccatccatcttcctgcggaccatggccacaccccacactgcaggggcccaggaaggctccagagaatgccccacctgcccacagagcacaggcccacccctccacttgcccctcgagttatggggggctgaggtcgccgcagcttccccttcctccctgcacacagggttccacggtagccccagcccctttgctctggcaccttttggagcctcgggcgaggcccctgggtcctgggcctttctctgccccctccacatgctccccccagggcaagatccggccctcagcttgaaacagcctctctatgcactgactcctccgctggactccaggtgtgtggtgtccggatcctactggaagattccacctggattcatgcatctgcatgaattccgtgtggccaaaacagatctcctgacccctcccggctcctcgctgcccccctgctccccacctggctgctctgcctacaatttctcatctgcaaaatggttggagaaaggccttgcgtccgagggcgacggcggtggtgccgaccgcatggggcgacggcggtgatgccaaccgtatggggtgaccgaggtgatgccaaccgtatggggtgactgaggtgatgccgactgcatggggtgactgaggtgatgccgactgcatggggtgaccgaggtgatgcccactctatggggcgacagcagtggtgctgactgcatagggtgatggtggtgatgcccactgtatggggtgacggtggtgatgccgactgcatggggtgatggcagtgatgccaactgcgtggggtgaccgaggtgatgctgactgcatggggcgaccaaggtgatgccaactgcatggggtgacttcggtgatgcccactgtatggggtgacggtggtgatgccgaccgcatggggtgacggcggtgatgccgaccgtatggggtgacggcggtgatgcccactgtatggggtgacggcggtgatgccgaccgtatggggtgacggcggtgatgccgaccgtatggggtgacggcggtgatgcccactgtatggggtgacggtggtgatgccgaccgtatggggtgacttcggtgatgccgactgcatggggtgaccaaggtgatgctgactgcatggggtgacggcggtgatgccaactgtatggggtgacttcggtgatgccgactgcatggggtgacggtggtgatgccaactgtatggggtgacttcggtgatgccgactgcatggggcgacggcggtgatgccaaccatatggggtgacggtggtgatgctgaccgtatggggtgacggtggtgatgccgaccgtatggggtgacggtggtgatgccaactgtatggggtgacttcggtgatgctgtctgcatggggtgacagcggtgatgcc

SEQ ID NO: 478844 - DNA, 1480 bp, Homo sapiens
tcgtacggatgcctgtgcctgctctgcccaacacagtggaggagcgtcacgtgtgtgcacctgtggatgcctgtgtgctgctgaccgggtatgccaaggcgtggaaagctatggggatcctgggggtggaggtcgacacaagagccagatggcccaaggccgggcttgccaaggacatggacacttccctccgaggaataggaacaccagtaggaaggacagatgggaatttccatctggcgtccattccttcatcccgaagagcttcctggaacagctttcttacagtgcaggccatgaattctctcaatgtgcctggggcaggcggcccttactccagagtcacctgctggcgtgtcaactccgttcttgctgagacaggattggaggaagatgagctcgtggtacgaggcagcgctgatgttcctctggagtcctcctgggccgtgcatggtgccctgggctctgcggccccgccccacaccgtggagcctcctctgacagccggaaagggcgctggaaggggcccagagctttgggtgctgggaagcctgttattgctgatggccagtgatgccacagctgaaagcctgtgcgtggccgcctcttacaatgttggcatcaacaagggcgtgaatgacaaaccattagaaagaaggatggaaaagaagccatggtttccactgggttgccggagccctggggggaagccacggccccagctcaactctgggaaagacagcagccagctgaccctggctctgggggctgtggggacagccagcctcctcctggattttggaaaccagcccctggtaagaagttccctggccttcaatgccagcagcttcagtggactggaccaaggggttgatgtgctgatcgagtgcctccgtaacagtttctatgcctggactgtacccggcaccgatgccctgacatgttcagtggcccccacggtgacagtgaaccatgcccgcagacgaaccagccctgccgacacctagattttggacttctggcctccagaacggtgacaaaatggatttctgttatgctgagccgggggtttgaaagtcaaaaaccttcagaaccccgaaagcaggagcgcagctgccgaaatgacagaaccggcaggagctggaggtgtgagggcagccgctgaaactgtggcttacgagtgggcggctccctgtgcactacgtgggccccctctggacgacagctgctcccagaagcagcactacatgtgtggagagctctctgccgggtactgtctgatttatttccccaatttcagttctgtcccatgcagaaagccatgggatcccactgtacaggcggcgagatttgaacacacatcagtctgacccccgaacttatgttctccccagtgctgctcccgtttcccttctcaggacagaccccaagacagatctgcgcacacctggctgttccctttcttcggttcaactctagc

SEQ ID NO: 478845 - DNA, 712 bp, Homo sapiens
cagtccaacaatggcaagtggacggcatgttctggctcagggttggcccgaaagacttgcgggtgagttggatgtgagatttaaaaggaagcgggttgcccggcatagctcctggaatttgggcctgggcaacaggaagggcggaactgctgttccctggactgggaaggtggggcaggagctggctgggtctggggtaggctacaaagagccgtgctgcagactcgccaggtgcacaagcacgttagataccaagggacactgtcaggtggtgcagtatgagctgggaattcagagaagaggctatgctgagattcagatgaaggctggcattgccaccgttgcgtttgatgacgaggaagtcgctgggagcttcctgattttgcagacaggaacgccatgggatgaggaaaagacaagcatctaaatctgtcagcagtgaggtgtgttggtgtcacgggctgtggcctccctctacctgaacctcagccaaccccaaaggggtggacacaatgaagaactcggagcaacctcctcgaggggcccgagtggatgccagattccccaaaatccagaactagagccaaagagctaggagcttgggttgcagaagcaaatataaatattaaaagtacggacaagatacaaataatacaagcagtacagattgagaggagggacagggtggccagagaaagaggagctgaatatt

SEQ ID NO: 478846 - DNA, 902 bp, Homo sapiens
ctgtcatgccagtagttgacagtgactgtgtgtgccctccttgctggggccgggcccggcatcccgatctgagcagggacaccatggttggggagaaggtaggaggttcccccaggccccagtgctgcccaggatcagccttctggggtgtgaagaggatgtcagcggctaagatactccccattctggaagacagctcaggcccttgcatcctcaggctgcccccacctgggccagtgctcagacaccaagcactggacagcaaagactttccacggccctcaagtaacctggaaatctgctctatgcccagtggtccagggacaacatgggcttttggaaaggcccatagtgaggttttggactttaaggagtgggtaggagagtgccgcttggtcccatgggaggcagcccgggcagagatgcttgcccatgagcaggatgtgggtccaccagggatgctgcaggagagagccccagccccacagcagcctggggaccgccaggatgagcagaacctccctgcctgtgccagcggcgctagctctgtccggccaggtgttcaggctgaagctttggtgctgcccctgacactcctctttctacatctagtccatgagcaggccctgcgggcttccttccactatcaatggttccatgcgttttgtcccgccgcggcccacaccgcagggctggcttcccggcctgagacctgggcagcaggtctcacgctgacttgatcctctgctgttggaggcctcacccttttatttttcactgggtcctgcacaccgtacaactggctcctcctgcacaaatcatttcaacagcctcctggactcggaccatcctcctgccctccctaaccctttattctctcttctaactcggtggtgagagtg

SEQ ID NO: 478847 - DNA, 564 bp, Homo sapiens
gcgcctggagcagtgcctggtacagagtcggctggtgccatctatgtagtatagcctggggtatgatggaacccacactcacgctgggtgtgtttcagcagaggttttggccacctggggtgcgggccccgaatgctcgtttctggaagttgcccaccccacacaaagagaatggggacaagcgtatgtggcgttgcggtatgacctgctctagagacagccctgccctgctcaccctcctgcagacgacatctagcagtcaaggcagcagcggcgccgtgcggagcctcctgtctgctggtgtctcggggctctggcagctgctccccttaaatggacaccaggctggctcgcaatgtagccgcaacatcattgtgagaaacaaactcacctcttcaaacccaaagaatggactcagagacacggagaacagcggaagagagacttgcaagatcgggtgtctgatgggcaggcacacccagcacagtttcaacaagcaatttatcccctagtgcacagtcccctcccccggttcctcataggctgtgtactgtggggcctcaa

SEQ ID NO: 478848 - DNA, 3153 bp, Homo sapiens
cggagcagtcggccagccctgctggctccgggcaatgagggacttagcacccgggccagcagctgcagagggtgtactgggtcccccagcagtgccagcccactggcgctgcgctccatttctcgccgggccttagctgccttcccacggggcaggcctcgggacctgcagcccgccatgcctgagcctcccccggctccgtgggttcctgtgcagcccgagcttccccgacgagcgccgccccctgctccactgtgcccggtcccatcgaccacccaagggctgaggcatgcgggcgcacggcaccgggactggcaggcagctccacctgcagccccagtgcgggatccactgggtgaagccagctgggctcctgagtctggtggggctttggaggacctttatgtctagctcagggattataaatacaccaatcggcaccctgtgtctagctcaagaaggaagaaactccaaacacatccgaacatcagaaggagcaaactccagacgcaccaccttaagagctgtaacactcaccgcgagggtccgcggcttcattcttgaagtcagtgagaccaagaacccaccaattccgaacacagcttcacagagaagcctggacttcatcaagctcgaaatacctgcccgagagcaggaaacaggggacttcgctcttcaaacatgcctctacaccaggcactgggacgtggaaataaatgtggcatccctgcaccggtgccctcagggcatctgcaggagctccccacgatgtgcccaggctcatcccaccctcccagcccagttccggtttccagcgccacctgccaagcacagcactgttcacctccccactcgcggggtggacagtgggcacctcgtgctggggctggcatcgccctcggcaccatcttgaatcggtggcagtgatctctgcatgagatttcagtctcctaccattaggcagcggccccacttcctcagtctcccctcacacccctgaccaggacactccttcctgtgtggccacaagctgcctcgacctgcagagtaatgtttgttttccccaatcctgctaagtgtccagcccccaccccctcccgattttaaaagcacctgcctgttagtgtctgaaaagacagcagatacagtgtggaatctttgagcagctgcctgtcatttaaataatttctcttaattttttaaaaaagataaatttaaacatttagataatttaaaagaaaacgcagctcctactgccctccttgtataaccaccatcctctcactgtccgtcctccccgtggaatgatcattatctcgccatccttcctccctgtataaccatcatcgtcctcccgccgtccctcctcccagtgtagccatcataaccctctcgctgtccctcctctctgtatagccatcatcctcttgccatccctcctccctgtataaccatcatcctctcgccgtccctcctccctgtgtaaccatcatcttcctctcgccatccttcctgcctgtatagccatcatcctgtcgccatcccttctccctgtataaccatccctcctccctgtgtaaccatcatcatcctcttgccgtccctcctccctgtgtaaccatcatcatccttttgccgtccctcctccctgtgtaaccatcatcttcctctcaccatccctcctccctgtgtaaccatcatcatcctcttgccgtccctcctccctgtgtaaccatcatcatcctcttgccgtccctcctccctgtgtaaccatcatcttcctctcaccatccctcctccctgtataaccatcatcttcctctcaccatccctcctacctgtatagccatcatcatctcgccatcccgcttgtgtaaccatcattatcctctagccatccctcctccctgtataagcatcatcttcctcttacgatccctcctctctgtataaccgtcgtcctctcgctgtcgctcctccctgtgtagccatcatcctctcaccatccctcctccctgtataaccatcatcttcctctcgccatccctcctccctgtgtaaccatcatcctcttgccgtcccttctccctgtataaccatcatcctgtcgccatcccacctccctgtataaccattattctctcactggccctcctccctgtataatcatcattctccctgtataaccatcctcccacggagggaccagcatggtttgtggtgagcctttgtgggcaggcaactgactggcacagattccctccgtgacccactgcgagcctgggctgagccccgtctcaactaggccttgaccttggccttcgtgtccatggctggctgagtcttgttatactgagaaccctcccatcctttgcattggatcagattcctcgcccctgaccatcaatgtctaaatcctcggcctgcctttaacaggaactcctgcccttggtgtctaaccaggcaactaacgaccctactttaggtcactatggattagtcagcttccttccttccttccttccgtccttcctcccttccttccttccttccgtccttcctcccttccttccctcctcccttccttcctcccttccttccttccttccgtccttcctcccttccttccctcctcccttccttcctcccttccctccctccctccctacttccctgcctccctccttcccttccttccttccctctttccttccctcccttcctccttccttccctcccccctcctccctccctctctccttcctcccctccctctttctttccttcctccttctctctttcctctcctccctcccttctttcttccctccttccttcccctccctgcctccctccctccctctctcctccctccctctcttttctcctccctcccctccctccctcctttcctcccttcctccctccttctctccttccttccttcccctccctacctccctccctccctctatcctccctccctgtcttcttctctccttcctcccctccctccctcctttcctcccttcctccctccttctctccttccttccttcctccctccttctctccttccttcctcccctccctttcttcatttctttcttccgtccctccctgccttcctttctttcttccttccctcactct

SEQ ID NO: 478849 - DNA, 796 bp, Homo sapiens
cagtgattccaggtccccagcttcttctagcatgtggcttttccacgttccatatgtggcccctgtcctgaggtgggtctccactccagccacttggaactggaagagagcatgggggtgcccgtggcaggggcttctggtgactccctggtgcctaatgagcctgctggtgctgcatgggcagtgggagctcaggtggggcacagcgaatgccagatggccctattcccaggcccacatcgacctccacctgcctcacctgagggaatggctgtctcccccatgacatttgccgtgggacagggttggagctggaccaatgtggactggcggcatgtggcccaagctcccaccctggttgtcttggctccagctatgaaaaagggggctccctctaccccactgatccagcctccaagcgcaaagggcagagggctcttccaagaacagcattccatgcagacctccaacagacagacagacatcacaaaggcgtgcttgagaaaggtatccaaatggcttcttcggtacgtctccacgttccaccttcttgtggaagatacgcactcgccaagccaaggccgcacagcccgcaggttctggacactaagagattgctctgtgatcagtggcaccctgagatcccctggccagcacatggtgagcagcactggtgtgattgagtgcatgacagttgctggggccctgggagaaagcgtgtcccagccatgaactcatctgaccctacaagctgtggaagcacagtctgttttgtggatgagggaaccaggcagcc

SEQ ID NO: 478850 - DNA, 780 bp, Homo sapiens
cagccggggccgccagcttcccgcccctccttccagggaacaccagaggcgaggggcctgaggagcgcagcccaggcctccccgctcctgggaacctcccctcccacactgccctgtagaagccgttcacctgcagacacagcccacatcatgttcctgcagctgcttctccaaggctgcccctcagctggcccggccttccctgcaggctcgccgtgttttcccgtgtgtcagcgctgcgtcctttttaagcctaaattataccccatggcgcagttagaccgcttgttaatccacccgtctgccggaggacacctgggctgtttccaccttttggctgctgtaaatgatgctgctgtgaccgccccgatccccatcacagacctgaccccgatccccatcacagaccagaccccgatccccatcacagaccaggccccgatccctgtcacagaccaggccctgatccccgtcacagaccaggccctgatccccatcacagaccaggccctgatccccatcacagaccaggccctgatccccctcctccgcacggcgtcctgtgggcggccaccgcaccgcaatctattctgagtttgcaagtggaaattaaattccttgtagccgaaatgagcctccacttcaatcagcctgaagcctgtcctcccatcccccaccgccctcccgctgcagcatcttttgaatatgcaaatgggacaccttgctaaatggtcagcaggattgatcctgctgttttcatcaaggaaataaaattaaaac

SEQ ID NO: 478851 - DNA, 615 bp, Homo sapiens
cgcgatgatggtgctgtgcagcccccctcgcctgggggccagggtgtgggggacatgagaggccacccagggctggctcagagctgtgtctcgtcgcgagtctcggggttgcaggacgacagcttgtggctgcagctgctcttccggctctgggagctgctggccacccctctgctgagcggccccactgtggtgcctgtggcctcatctccccagtgcccacctggtgctcagggggggtctccacacagcccacaggccgagcccaggaaatgcctgccgcgggagtcctgtgagccctcgccccccaagcccgctgtggccatgcctgccctggagctgcagtgggagccgcaggaagctttggcgggccagggtggcccaccggtcacatcagagctcatcgtaaacagcaaagcaggagaagcagcaccagggcccgtcctcaacgcccagccaggggacactctgtcggcatgcgaggccttgcccaacagggccgcctgggctgacacctgggacgtgctctcacagctcctgtccacctgcctggccgggatggcgcagcaaggctgccggcggtgaagggttggcgagccccgttgtgcggtggtc

SEQ ID NO: 478852 - DNA, 759 bp, Homo sapiens
gccgtctccaaacctgctttgtggaggagcggatttcccgaagccttcggtctctacggccccgcagggagcagcgcgtctgacgcctgaagcccgccgcggtcagccggccgacagggggcgtgggagcctggcttcccaggggcgtccacggaggccaaggccctgccggatgtcccgccccggcaccccggaaggagtcgcgagagaggcggcccgcgctgacggtgtccctggggctctgcgctcgtccggccggccccggcctcgccgccccgcgcagtacccagcccggccccgccgacccgcctctactgccggctccgcgcccttccccgagggctggatgatgggctgtttcgccctgcaaacggtggacaccgagctgaccgcggactcggtggagtggtgcccgctgcaaggctgcaggcacctgctggcgtgcgggacctaccagctgcggcggccggaggaccggcctgccggcccccagaacaagagggctccagccaccttcagcgagctgcgactgtgctcctcagccctgacatcatcactgccagtcctattatgaaaaaaaggtcccccattttagatacatagcgatagtgtttttacctagagaagtcgacactggtgtctttgacaagcttagcagtggttgtgatcttagccgccagtctcttaaggggcatatccgcatcccagggctgtggagaccgtctctcaggacttgtttgggaaccagaagaggctgac

SEQ ID NO: 478853 - DNA, 710 bp, Homo sapiens
aaacattgcggatgcatcatctgcttgagtgtagaaaagattttgaactaggaaaaggtgcaaaacctgccagagtgtcatggctggggatggctgcacatcctgcaaattcagggtctctgctacctgataatgcagcaggaggtattgccagcgcaagtggcaagtggcccaccactgtgatagtggtgaccctgctgcatgaacgagatgaggctacaccagatgctgtaccagggaaatctcccatcctcgctgtgggaaaatcagtgtgccatcttctcagggctttgaccgttagaaacataatttgtaattttaaagtcatctcaatcccacctgtgccctttaaggaagaagatagaggccctcaagtgattcgagggtgcccaggctggtttaaaaattttcacaatggaaacttggggttggagagggtggatggagaaagctgcagggagactgaagcctctgatgaggggggatgcccaggaagctctgacttggagaatgtatcatgacaaggtgtctggcctttggtctgcagaccaggcgtttcatgtgcatttcactttcaacctatgtgcatccttagacctaaagtctccattatgcagcatagttttagacagaatactgtcttaaaataaaatttatagaatttcaaaggcaaccaattaagttgtccctcagtatacatgggtgcttgg

SEQ ID NO: 478854 - DNA, 860 bp, Homo sapiens
gtcaccacgcatgtagctggagggttggagagttggtatcagcatggctcttccaaggcagtgggtgcccaaggtggaatgccgcaggttcagggatcgggcccccccttcctttttgttacagaactctgaaatggtgctcagcatttctttaaacactgtcttgtttggacaactgcggcctggcctatcttctgcgtccctgtcttccactctcagggaagctcaagccctactgttgatcttctctccttactgggctcttcttctacgtccttcctcttggtacacagaacatctgcccactcacactctgaacctgtccctttctccatcctcaccactgaatccagccctccctccctatcacctggctgcccctccacgcctcaatccagtcttgacccagcactcagagggaccctctggaatgcaaatgacaacatggcagtgctgggcttcatactcttccattgtctccactcccagtgcccctgcctgggaagtctcgcttgatctagtccctggcctccttgcctcctggtcacctgcacactcattccccaccagatccagcggagcgcccatctcccctgcctccagcagttgctggggacgcctttcccccaacctgaggggctcagtggcagttagaaaggcaagaaactgccaagctgttttctggagtggctgtacattttacattctcaccagcaatgtctgagtgatctaatttctcattgtggttttaatttgcattttctaatggctaataatgctgaatattttctatgtgctcatttgctatctatgtgtctccttagtggaatgtctgcttatgtctttggtccatgttctaa

SEQ ID NO: 478855 - DNA, 700 bp, Homo sapiens
gctctggcaaccacttcctacctttggaattttgggaacctcaacgggaaaaatgcttttttttctcagcgtccatccacttaattttgtgctgtgtgctataccatctcagaaatgcctcattaggggattttgttgtgggagcatcatagagtgtgtttacacaaacctagatggtctagcctactacacacctaggatatacggtttgttcctgggctacaaacctgtgcagcatgtgactgtactgaacactgtaggcaattggaacacaatgctaagtacttgggtatctaaacacagaaaagccagcgctgtggttttgggcgagacgaaccgcacgctctttgggttcggtgaggtctctcggtgcgcccccgtgcgccctgggcgtccgccggctactgcagcacccacgtgcgcccagcctccgccgctgcctcctcagcccgcagggtttacccttggggagaatttgacagaagtagtcactactcggcagattaaccctatgcagatcgggctccgtttccataaccacccaagtcaaaccgctcctggagtgcagggagactgttgatactatttaagccctctattttggcaggtagttatcctgtttaagtttttaatataccgtatactttttaaatgtcatatttaagtttagtgtgtaggttctagtctactttcatgggct

SEQ ID NO: 478856 - DNA, 761 bp, Homo sapiens
cagctgcattccaagttgtaaatctctgtggctgagacctgatattgccgtagtgtgagcatgtgcgtgtgcatatgtgtatatgagtgtgcatgtgtgagcatatgggtgagtgattgggtgcgtgtacacacgtgtgaacctagtcagtggcaccaaattgccataacaggccatctggagaagaatgggggaaggaggaagggagaccacggcagccatgcaccaggtgttgaacacctcttttctgttccatcctcatcttgtactgaccaacacagacaaagagcagctggctccacagagaagaggcaaccgcctggccacgtggcccatgcatggccgaaattttgctggcaagtgcctccaccatcaaagatatcgctaccccctgtggaggagcctctgggaggcacccaggagggcgtgaagacatttttcaattaccattcaacaaggtgtccaattaagaacatggcacagctccaagcctccacgtggcttctgcctccagaaacaatgccacctgcagaggtaacaggctggctctaaaaactgaaatccgttactttaacatagttttaatgagttttctaaagtaacattattcttcatcttttttaacttactgcatttgaaaagtgaaatcaaattgtttttaaaacaaatattcttttgtaaatcctaaatcaggattcttgtctacaaattaagctagtccaagttcactctaataacttgggtttgcctggtgtttgcag

SEQ ID NO: 478857 - DNA, 1774 bp, Homo sapiens
cgttccgagactggagctctacaagcgggacttggagctgcctgtggctctgttattccttactccttggtgatactcttcactttgcctcacgcatttcaaggaaatcacttctcttctaactaaagcagacagaaagagcagacagtaaaacacagataagacagctcgggcacagagggaggtgaggggaaagtctcttgggtaactgccaaacttcaccatcatacaatggggaccagtaaaacaatgggccttaataagcaagcacattcctttcccttcaggggcactaagatagaaaagctaaaagcagactcgggggatatgcctgcagctgcagaaagatgtaagggaacagacacacagctctccctcccagataagcacaacaaagagacacagaagcagtctcagaatccacctccaaccaccggcaacgggtattcactccctaacccttgctcccctcttcctctctctctctctttctctctctctctcttcctcacatggctccagtctgggaggccctttgccaattccaactggaatatccaatatcggacacgaactcagccagctggtaagatctgccttctcctggcttcctcctggtaccagagaaagtccggcctgccatccaggtccttggaggaccaatgggactaagctagagaaaatcttggggatgcccagttccttctcagcttaactggcctctttcagaaagaggatattcacatttaatgtttatggaaatgtaatgtctttattgataattttattataaaatttcataaatcgtgtttttcaaaataagtttatatcaaatccagcttcccagaaacactaatagttcagcatgtcaatgtactaactaaatcattcacttgtacccatggggaagattttagtgttattgccctccacagtgaaaaaaaaaaaaaaaagaaaaaagaaaatctttcatttttaaaattagattaggaaatgttacataacttggcactttagtagtgcatatactagcattagtttatagactgcttttgccactggggagttcaagttgaaatgtccctccgtcatgtagctctggaatacaccttccattcataatttctgctcagataattgaatagtttaccatctaggttattttcatttatacggtaaaacaaagcaaactactcccgtttaatttttttatacttagaatattgcacattttctatatatgagtcattcggattagtatctatgtaggttcagtcagatccaaccatggattcgagttattatactatataaccctataaaatacatagaagtattattactttgcctttaaaacaaaacccaagagtctgtttcgatttatgaattcagcatttaagcaaagagattttagttcccaaagtcgggggaaaaaatgacaaaacaatgagggaagaaggaaccaggccttagtgccacacatttttctctttgggttgtaaggtagagcctccttctttacagaatgctttattatatttttttagacctgattttctgtgtcaaagcataattctcatgctgaagctctagcctaaaaaagcaaaagaaagtcttcattgtacaaaacatattcatcactttaacaagatcataagggaacaaaagttaggatttaaactgagcgataatactgtttgaatgagcatgtccctaagataaaccagaactggcagttaatttagacatctagaaaatctcatttcctaccagt

SEQ ID NO: 478858 - DNA, 541 bp, Homo sapiens
ctgcagtgagccatgactgcaccactgcactccagtctgggtgatggagcaagatcctgtctcaacaagaggaagaagaaggatgaggaggggaagaaggagggggaggaggaggaagaaggactaacaaaagactcaaagaagaaggaagaagaaggggaggaggaggaggaggagaaagaagaagaaagaaggaggagaaggagaagaaaagaagaagaagaagaagaagagaagaagaaaagaagaagaaagaagaagaaagaaaagaagaaagaagaagaaggaagaagaagaaagaagaagaaagaagaagaagaacaagaacaagaagaacaagaagaagaagaaggaggaggaggaggaggagaagaggaagaaggagaagaagaagaagaagaagaagacctaataaaagactcagtgtagtccaatggttaatagtgtggggctaggggtaggctttctgggttcaaatagagtttgaccactgtgggacctgagctgtggtcgtctccaaagatgaccaccatgctatcaa

SEQ ID NO: 478859 - DNA, 627 bp, Homo sapiens
tctggcacacgcactgttggctctgagaagctcctcaaccccttgtgggcatcaaagtaaagaaagaagaaagccctaagtaggagaggttgaagacgatgctgtgggctggcacagctttttgttttgcacatgcggaaattgagactgggagtggaatgtgagcagttcagagttaaacaactaattcgaaagacttatgagtggaggaatctcatcaacataagaggccacgctaagaagcctgggaagcctaggaagccctgtcgttgttcacgcgaatggtcaattgcttgcagttggaagctgagtgggaagtctggcaaacgtcggtattgcttgtgcttcaacttcttaagtgacattttcctacaggacgccttcagcagggagcctggaaggatcagaagaagatgggagaacttccttcctgctggtcacttaggagccagaatgacctttgttacctggacttttccttttctcctcctcatcattgttccatccccactaagaccttcattattttggaaatattaagttagaaatctagtcatggccagcatgagagagggacagggatgcatacaggaatcaaactgaatacattttgtgttttcattcccc

SEQ ID NO: 478860 - DNA, 497 bp, Homo sapiens
tgatcgatcattgcctcctcttgtgcccacaatgtttttgagtgaagacacctggcaatcaaaatgttggcagccctgtgttcattgccaaagtatgccaacgttaacattctcctggttctttgaaatcccagagtctgagaacctctgctccagcagaaaatgggggcaaggtgatggggcggttaagaacgaggagctcctcgttaagctgcaggtagaggtagaacaaaaatctcctacaagcatttgttacaacagcttccgcagaacggaaacaaaagtgtgccactgtgccaatagtgaggctgctgtatttgacgaggaccacagcgccctggcagatagaccctgttctgatttgccaaacctcctggaggtgaatgaaggtttgctgactgtggtcaggaaggtcccaattatgaatgattccctaaccaagtgttgaaaacactttactttgtaattaaaatgcaaaacacatacaaactgccaaa

SEQ ID NO: 478861 - DNA, 582 bp, Homo sapiens
tccaacattggagattgcaattcaacatgagatttgggcaggacatatatccaaactatatcaattgcccttttgtatgggttctaagagtacatagtccactgatccaaaaaagaacaatgcacacaaacactcaagaggccaatatagtaaggaaaataaatcaaaaggagactttattatctagtccaaaaggaaatttgcttccttaccctggatttgtgactttgatggctacaaaccagtggtctatttcaggcagtgccattgaagccataagaaggaaatactttcataaccgcctcataatattcaaagtttctcccccactaggcagtcaaatttcacattattatgccctttctcatatccgcttccaaattatgctgcctcaagcctgccagccaaagaaaggccctgttcccgagccagctgtgtctcagacagttgcttacctgccaaggcttgaagactacctctgcacgggtaattaattctgttctcagtcaagggctttcacatgaatctgttcctggttttccctatttataggttattttatactcacaactctccctcttt

SEQ ID NO: 478862 - DNA, 496 bp, Homo sapiens
gaggcagagactggagtgatggagccaaaagccaaggaatgttggcagctgccatatgttgaaggagtcacaatctttcctcataatctggaggaagtggcaccctgccagcaccttgatttcagacttctggcctccagaactgtgggaggatacctttctgttattttaaggcacacaatttctcatcaagaatgtggaaaagtagaactgctcccatcaggaatcgtggccctgtggaaccccagctcactctttctcttgggagctactgaattctcaggaaaagcctataccaagtccagcaacttcagggccatctgtgacactctgtggacccctcatgaaggttttccccctaactcttatgcaagagaagttgaccatgccccaaagccacatcgaccagacgaatccccatgatatgaggggatgggatgaaattttccaaggtgagggtcgtgaagctacctctacccaagagggagcccgttac

SEQ ID NO: 478863 - DNA, 916 bp, Homo sapiens
tccaggatagagctgacatttcagcttgagcctggaagcagtctgcaggcagtcaatttctcttaagtccttagcaactcactgggaggagaatcataatgcatactgagacctggtttttatacctgttcacacgagtactcagacccaccagccaacttgggaaggtggatgatgtttcccagttccttgctactcagtgtggtccaaggactggcagcattggtgtcatctggaagcctgagggcagcgcagggcagaatgagcttcctaaacatgtggggagaaaccaaggctcccactcaggactgggcacctgggcctgtgagcacgaaaggagcatcggatcaggctcattgtacatttctggcttggagctggctgaccctttccttcttgagccactctgcccacctgctgccgagaaagcagaggccagttcaaacctgggcatggcccttgcggaacaggggctgagagctcatttgaagaagaacagaccactaataaatctcatggtcattaccctttatgcatacttgttctaataggtactttttttcatgtgtctcctcctttggctggttctaatttatatataattaaaatacttctttatttgcggaaatgaagcattgtcataagtatagcattttcctgtgttctgtgagtcattccagttgaggaagttcccttttattcctagttctttgagtatttttattaagaaaaggtaactattgttttgtgaagagccaagaagaacagctgaatgaaacaccctataaagcaacaatatgaggcctcttccatttagttacttccttattttccataccagttgtgaatcttgagaacagaacctctgaattgtaggcagttgccaatttatagcaagcatgttactctgctgcca

SEQ ID NO: 478864 - DNA, 745 bp, Homo sapiens
ccgctgaaaggaaaagtggggtgttaccagacccccagcatggatacacagtgcactgcctacgatgatgactgactgtccatctgtgcacattccccactaccctcagattgcaaagatctcacaacaccctgggatccactttaggagagtagaagggaaattctgcaaaaggatagcaggtctccggagagcctatgcttcaatgcctgtcagaaggcagcatagaagtgtgtctctcatctgccacctggcagcgagctcagggcatcccattacagccaggattctggagactgagaaatacaagttcaagacgccagcatctggtgagggctcctccttgcttctaagatggcaccttgaatgccgagtcctccagaggggagaaatgctgcatcttcacatggcagaattcaaaagaccaaaactgggacaaataattccctttatcaggcccttctataaggggacccaatcccattcacgagggaggagccctcatggtctaatcacctcttacaggccccactccttaatacgatcacactggcagaacctgaattttggaagagacacattcaaaccataacagggccttcactagattattcattataatgaaaagtgtttttggaaagttacaaaagttaaatcagttattgagattgacagaaagccaatggaaaacttaaataggagaataacttgatccaggagggcacctgggtcccttcttggtgtt

SEQ ID NO: 478865 - DNA, 451 bp, Homo sapiens
gccctgatttagactttgggccatgctgacttaccttggaatagagctgggccctcctcctaaggaaggaccagaaatcgggccctcatccaacatcgaacctgctggcactttgatctggacttccaagattccagaactagatttggttcaaacagtctgtgatttccacgttgggctctctctggaaacactccctgtggaggaagatgccacatttgaggacatttgggcagcctatggaaaggcccgtgtgaaactaggtgttggctttgcaggagggatgatttatagaatgccaagaaaggtgattggaaagacaagacggaaggcatgtgatctgaccgtcacatcttgccgtcctcttgggacacttgctgtgagtcctgaaggaggtgacgcaggaggactacctttcagaggaagtttatgaatggctcctgttcccagc

SEQ ID NO: 478866 - DNA, 595 bp, Homo sapiens
aaagatctcaaaatcaaggaaacttttccatcaggagtttccatgtctagtgattttctcctggccaactcttcaatagcacaggtccaagaccgccatgacataggaatggatgaacagttgatatggatcatgccagatgtgttctgctctctcttcatttgttggcttcgaagaagcaaactgccatggactcagctgaaaggagtcaaatgcctccaacaatcacataagcagggaagtggacacttccctggtggagcctctggtgagaacccagccctggctgacgcattaattgcagcctgtgagacctttagcagaagccctcctgatccacagaaactgccatggtatggagcaggtggactgggggaagtactgggagcagtaagtcaatctcccagtgaaaaacatgggatttggagtccagacgacatgtgacttctaatctttccttccaacatagcctttagcaaatcaacttctctcttcaggtcctagtttcctcatcaataataggggaggttgtactaaatttgctacagccttgaaaataattgttaaatatcttctatgagcaatgaactacttc

SEQ ID NO: 478867 - DNA, 667 bp, Homo sapiens
aggggttactttcttttccataaagttgagaaaagaaggcaggaagcatccaacacgggagaaagatgaaggccagaagactcagcaaatcagcttcttccaccttcttctgcctgctttttctggcttcactggcagccgattggatggtgcccacccacattatgaaagaagacagaaaaatgtggaaaagtttgcaacttcatagagacttgttgaatggctttgaccaagtggacaatgaactccaggctgaggtggtctcagatggagacaagaaacttatggggaactggagcaaagttgactctcactatgctttagcaaagagaggggactgtaccctacaaagcccaggggcggagcttcccaaggccgtgggaacccacttcttgcatcagcatgccctggatgtgagacatggagtcaaaggagatcattttgtagctttaatatttgactgcccatctgggttttggacttgcattgggcctgtagcctctttgttttggccaatttatcccatttggagtgggtgtatttaccaatgcctgtacccccattgtatctaggaagtaactaacgtgcttttgattttacagattcataggcaaaagggacttgccatgtctcagatgaaactttgggcttggacttttgggttaat

SEQ ID NO: 478868 - DNA, 1015 bp, Homo sapiens
ctcttttccatggctccgcggaggcattcagctacttcaagatgaagctgagcatctccttcccagccactgacagccggaaactcattgaagaggaactcaaacttcgtactttttatgagaagcctatggccacagaagtagctgctgattctctgggtgaagaatggaaggattatgtggcccaaatcagtggtgagaactacaaacaaggtttccccatgaagaagggtgtcatgacccatggccgtgtccgcctgctactgagtaaggtcctcttacagaccaaggagaactggagaaagaaagaaagaaaatcagtttgtgattgcattgtggatgccaatcttagcattctcaacttggttattgtaaaaaagggagagaaagatattcctggacagactgatactacggtgcctcattgcctggggctccaaagagctagcagaatcctcaaacttttcaatctctctaaagaaaatgatgtccaccagtatgttgtaagaaagcccttaaacaaagaaggtaagaaacctaggaccaaagcacccaagattcagcatcttgttactccacatgtcctgcagcacaatcggcggtgtattgctctgaagaagcagcgtactaagaaaaataaggaagaggctgcagaatacactaaacttttggccaagagcatgaaggaggctaaagagaagccccagaaacaaattgccaagagatgcagactttcctctctgtgagtttctgcttccaagcctgaatccagtcagaaataagattttttgaaaaggcatggaacttaggggaaataaatgaagaggacttttaatcttttttatatagtttattttgaggaatatagctctttaaaacactatacacagtttaatacatgaaaattgcccttgggaagattaacagtgtttttttagaaaagctaacttttaaggcatagtttcagtggatagcatcttaaaatacttcaggaagttttgtaaaccagtgcaaa

SEQ ID NO: 478869 - DNA, 1762 bp, Homo sapiens
tgagacagcgctgagcgccggaagtggggccgaaggaaaacacggagagggagcccggccgggacaggaagaggctggggaccgcggcgaaggtggtgagtgctcttgggcgccttctcccaacgtccctgccagactcgcctccgggctgattctccagttggtttcctggactccagagtagctgtccggcctggccccggaggtgcaaagtaagaaaattgaagtcaaagaccatgggagatacagcaaaaccttatttcgtgaagcgcactaaagaccgggggactatggatgatgatgacttcagaaggggtcacccccaacaagattatttaataatagatgaccatgctaaaggccatggcagtaaaatggaaaagggccttcaaaaaaagaagataacaccagggaactatgggaatacccccagaaaaggaccatgtgctgtttccagcaatccatatgcatttaaaaacccaatctacagtcaacccgcttggatgaatgacagccacaaagatcagagtaagagatggctgtctgatgaacatactggtaattcagacaactggagagaattcaaacctggacctagaattcctgttataaaccgacaaagaaaagactcctttcaagaaaatgaagatggttataggtggcaagacacaagaggctgcagaactgtaagacgactgtttcataaagacctaacaagcctagaaaccacgtcagaaatggaagcaggaagtcctgaaaacaagaagcagaggtccagacctaggaagccacggaagactagaaatgaggaaaatgagcaggatggagacttggaaggccctgtgatcgatgagtctgtactttcaacgaaggagctgctaggcttacagcaggctgaggagagactgaagagagactgcattgacaggctaaaaaggcgaccacgaaactaccctacagcaaagtacacctgcagactctgtgatgttttaattgaatccattgcatttgcccataagcatatcaaggaaaagaggcacaagaaaaacattaaggagaagcaagaggaagagttgctcactacgttacccccaccaacaccctcccagataaatgcagttggcattgccattgacaaagtggtacaggaatttggcttacacaatgagaacttggaacagaggctggaaattaaacgtatcatggaaaatgtgttccaacacaagttaccaggtattttctagatttgtttttctatttaactacctaaaagtacctcattcatttctcctaccaatagtaattttcatcaaataaaaatttatttaccatgtcatgaagctcttgtgttttctatttttttgttttttgttttccctggctttccctaaggtaacaaggactttcatatgcattgtcattataaacctgtttccattataaattttaccctgtgtgtgaactttaagttgaatgccctgcattattggggcactgtgggactcttgtgtatgtatgtttccctttccgctcatctaaattgacaccatattttgagttaaaatcaagagaagtatcctgaagttattttcaggttattcatgtcaaaaaaaaaaaaaaagattttatttaactgtacttaagagaattgcagcatctaaaatgaactttgaaaactagttttaagaaatttgtattggattttgtgcactgttgaattgattttccaagttatgtctgtcttctgcctgtttttaacttt

SEQ ID NO: 478870 - DNA, 535 bp, Homo sapiens
gagtctgtggcgtgggccgtgcaagtggttctcgatcgcaggcatgttttatccatcatgacttggttgttacgatacacagtgtttatttttcttcataaaaagatgcaagctgtgcgcctccaaatgctggcagctcagaatattccatttgtttgtgaagagacagactggatggcacaatttcaatcaaactatgaaatgcaggctggcatgcctggagagaaagatcataacagggcccctggtacacaagcagtagcagggcagaaagaagacgggattggtgatttccagcacgttgtcgttgccacaatttgtccagcacaaggaaaacataagagaatcgagtccaaatcccttattgttgcagatgggaaaactgagacctatgcaggtcacatgcctctgaagcttacacagtgtttatggcaaagcaaaggcttgaacctggtggttagctactgagtcccagtatttaaacatttttatttcattgcctccttatgcaaaccaggtgcacacagatatgttt

SEQ ID NO: 478871 - DNA, 896 bp, Homo sapiens
aacaagtatatgctcaatcaatatgtgctcagcagaagctgaatccgccttgctcttgtggatcttggcggtgcctgcgttggggaaggggcccctggctacctctgggccgtcacccagcaagtgcttttgcacgggctgcctgctgctgccgctcccgccgatgagctgctggggcctgtggcatcatttttcatggctgtgcaatagcccatggcaagtgagtaagtcaaggcctcggtggttttggaggacaactgcagctaaagagtcaacttgggcctggaggactgataaagtttgtgatatgtctgtgatgctagcagagaagtcattagacaggctacaaaatgtcgtgacagaggttgaaatgcctgctattccagtactgagagcaatagtggaggcagaaagtcctaaaccgaccatcaagggaattaagggagttaagagtggcagtttggggatagcaccaagagctatcagctgtgatggattgaagaaacagtgtaaaccggcggtaaataagagtgagtttaagggaagtgggggagagtacttgcgacttccaggaggaagaggagggattaggctggctgtccgatggccacagctttattctggaaaggtgaacccagtggggaggatcctgcaggcagacagcagttggggtactatagataagtaggggtctagggctgtaaagtgtctcagggttgctgccaaacaagtcatgaactgggctggatttttatatttgatgaaaaagagcctaaacgctatctggtttgggataaagaaaaaggagcattaaccttgactatgcctttagctccagccacctttttaagagtaaattgctgggcaggagggggagggctagtcatggaatgaaa

SEQ ID NO: 478872 - DNA, 782 bp, Homo sapiens
ataggacatcgtctctggggttcgctggaaggacttggagttgggtgccacccgtttacgtgggggagttcagctgctggccgggtgcctgttgctaagtacctggaaaactaaacgtggccactagggggtgccgctctcccagagtcctgacccgggtccccatttgggaagggagagagagcaccgggaagggctgctccagcgccctccatcttcctcccgagggaccccgcagatgggcatggtaacaggaatgcttcagagggttgttgtgaaggttacagaaggtgaaggcacatgtcctaagcttggcctggtggacactggctcctggcacattggacctgaagtaaaggaagccaagatgaagggaatagtggagagcttcaaatgtgagaacacattccagctgcaggatcagaggacttttcctacagcccataaatgcctgcagctctatcggatttgcaaatctacaaaagagagcacatcctattgttcccgagaaggcggtaagaacaagggagctgccatttcaaaggagattgttactgatgcggtgacagctgagctgagactcaaaggaggtgagggagtgccaaaagagcctgtgcccagaaaacccggtggtggagcagttcaggcaggggcgagggcagccctaaaggccgaaactgtgctgagcagttaggcactgcacagagtgggtttatagggaagagaacctatacgtttaggagaaaatggaatattaactccagagtttttcatttttaaag

SEQ ID NO: 478873 - DNA, 1799 bp, Homo sapiens
attatattggacctcttccatcatggaaagggcagaggttgtgtatactctgaatcagcgtccaatatatggtactgaatctgccataggcaggattcacagatccaggaatcaaggggtggaagtggaagtggcaccactcaccaacacccctagtgattcgttagcaaaatttttgcttcctgttccctctacattacgttctgctggcctaaaggtcttagttctagagggaggaatgctgccaccaggagacatgacaatgccattaaactggaagttaagattgccacctggacactgtgggctcctcctacatttaagtcaacaagctaagaagggagttacagcattggctgtggtgattgacctggactgtgaagatgaaatcagtctactattccacaatggagggaaggaagaggacatggatgaagctgtaagccatcatcctcgcaaactaacacaggaacagaaaaccaaacactgcttataagtggtagttcactcataagtgggagttgcacagtgagaacacatggtcacagggaggggaacaacacacaccagcgcagcgcccgtttggtgggtggagaaagtttccagtcttttatcataaattatgatattcgcggaaaggttttggtagatggtcttatcagatgaagaaaagtcttcttccctttttatgtgcagaggtttttgtgtgtttttcatttcattttttaacaatcataaatgtgttcacagtttttgcatctctttaaatcgtcatatacttcttccttttttattttctttatatagaggatgatattaattgactttcaaaagttggaccactcttgcattcctgtaataaacactgtctggtcatgatatagtactttttgaaatgtattgctagatggtaatggctaattatgctaaaaaggttttgatatgaaagttatgttggccacattaaatgttgaaaagtgcctttttttatcttctgaaaaccttgtacaatattagttggtgttatttcttccttaaatgcttgatgggatttgccaatgaagttatctgatcctgaggctttctgattgaaaaatgttcttttaaattgtgaaagtttagatctttccttttaaaaatttcttttgtcccatttagggacttccctctcaatattgctttagctgcatttcacaaaattttgatatgtttgtttcccttatcattcaattagaaatattttctaatttcctttgtgatttatttttcgccccatgagttatttagaatactgttgcttagtttccaaatacttagaaaatttcatatctttttgttattcatttgttgtgttggagatcatacttttagttgctttgttattattggataatatactttgtatacattcagttctttgaaatgtattcagaccttttcatggtccagcatatgatttattttggtgaatgtttcatgtacacttgaaaatatgtgtattctgtggttgttgagtgcagtattctataatgttaataatgctaagtttattgataatgttgttcaaatcttctatatatttattgattttctatatatttgttctaccagtttctgaaaaagaaatgttacattctccaacttaaactagagattaatctctcccttagctctgatagtttttgtatcatatattttgaacctgtgtcttaggtgcatacacatttgggattgttatgtcttcttaatgaattatttattgcatcattatgaaatatcattatctttattcatgtcat

SEQ ID NO: 478874 - DNA, 795 bp, Homo sapiens
ccaaagaccgaaggtagataaaccacgaagatgaggaaaaaccagcacaacaaggctgaaaattccaaaaaccagaacgtctcttctccaaaggatcacaacttctcgccagcaagggaacaaaactggacagataatgagtttgacgaattgacagaagtaggcttcagaaggtgggtaataacaaactcctctgagctaaaggagcatgttctaacccaatgcaagatagctaagaaccttgaaaaaaggttagaggaattgctaactagaataatcagtttagacaagaacacaaatgacctgatggagctgaaaaacacagcaagagaacttactgaagcatacccaagtatcaatagccaaattggtcaagcagaagaaaggatatcagagattaaagatcaacttaatgaaataaagtgtgaagacaagattggagaaaaaagaatgaaaaggaatgaacaaagccttcaagaaatatgggactatgtgaaaagaccaaaccgttgtttgattggtgtacctgaaagtgatggggagaatggaaccaagttggaaaacactcttcaggatattatccaggagaacttccccaacctagcaaggcaggtcaacattccaattcaagaaatacagagaacaccacagatacttcttgagaagagcaaccccaagacacatattcatcagattcaccaaggttaaaatgaaggaaaaaatgttaagggcagccagagagacaggttgggttacccacaaagggaagcccatcagactaacagtggatctctc

SEQ ID NO: 478875 - DNA, 606 bp, Homo sapiens
cacaaacaacggcagaaatgactggacaatgaaagcctttgacaacctcggtgaaaatttcaaagggcatgacgaggatgaaattcaggctgtggtgggtggaagcagggagatcagatcaactccctggtgggcttcactgccaccagggagggggaagcagagagcttactcacgctgctttggtgctgaaaggcaagtccagaacctcagttccccactagcaccacagggagagggcaaacagagtggccaactagccctgctttccctaagctcattcagccctacagattttagggagaagtggagtttctgctccctacaagacatggtgatgggttgggggtgggagaagggaagattatctccatggtcagtcctgcagataccacctggtaggggaatcggagcatgccaccctgctttggtggaagtgaagaagctacaaaaatgtcaacctaaccttagctaaactcacttgttagtgattgacaacacattttttgaaaagcatattacctctttgaaatgaaatgtatttagtcctccacagattttcaataaggcataatttataatttcaaaaaataatagagtgtgaca

SEQ ID NO: 478876 - DNA, 579 bp, Homo sapiens
gacaattggagcccacagctgtaagggctctggaagttaggaaacctggggagccaagggacaatgacatatcacttctttgtggaggcgttcgattctctcatttcattaacaggaaaaattcaattgactgccgcggatggcaaagctcgctatcacgtggatcacccagactccctcattttactggttcttcacagcacccaggaagattttagatggacctcaaatacaaaggctcactgggagactgaccttgtgttctacctggcatcctggggaaaggccagcctggggcagcccctagttcttcagatggaaggtgcactttcaatacccagcacaacagaaaacaagttcggagagttttatttacagattgtggacaaggaaggaataataattcaggggagcagtcctccatccccgggtcttgcaatcaacccaggaatgatgagaatgatgagtcaggaagagagagagcacatctagcgattagcagcacatataagggaatagggaatggagtactttaaattcatgggcaaatgcctgatggtccatttaaaggaagctgta

SEQ ID NO: 478877 - DNA, 1037 bp, Homo sapiens
gaagaattgcaaggaatttcaacatggctttattgtctctctgggtgcaagtgggctgtgggcacaagcaagccatatgtacagcatcagcaagggcagtgcagaggggaaatgcagagttggaggcccgacacagagtccccattgggtcactgtctagtggagctgtgaggagagggccactgtcctccagaccccagaatggtagatccaccaacaacttgtactatgtgcctggaaaaccttcaggcactcaatgccagcttgtgaaagcagccaagggggctgtacctggcagagccacaggggtggaacttgccaaggctttgggagcccactctttgcatcagtgtggcctggatgtgagatatgaaatcagaggagattattttagagctttaagatttactgactgccctgctagatttcagacttgcatgaggcctccctttgatgttaggcagagtcttctggtgatggagctgatggtggtggccactgggaattaccccatttgggcatctgagtctgctgagcaagtgggttcagccaggcaatccctgagagaggctggcagaaaaggtagtgctgacatcagactggccctgtgtcatgggcaagatagtcccattatgtctaggtccggcagtcaacaaaggcaagagcctcctataggagtatggcaagccttgggatatgggcatccctggctgtactcccctgcagccattcctgtgcctaaccccctgggtttatacagggtgaagtcctgtctatgtgaactctccgagcagctctcccagacagctcaaatgtccttgggggtcatggggtctcctgcagctaaaattctggagtgttcggatctggaaaagcaacatcctaagcacaacaatgatacaagaataagtagatgagatactgtcaggaaagcaaatgcatataatattcaataaataatatatcccagatttaataaatgcttctaagtgcttcatgtattgaatggttacttcattccctgaagattaatactt

SEQ ID NO: 478878 - DNA, 744 bp, Homo sapiens
tggtttaggaagccttaagaagtttaggactcctctttctctctctttctctttctctttctctttctctttctctctctctctctctctttctctctctctctttctctctctctgtctcattaattccattttcaggcggctggagcagcacacgggatgggggatggtggtggtgattgagatggagtgtgtggctgtaaaagggcaatggaggaacccccttgcctatgtcaatgtcaatatcctcattgtcatttacattcacgaagcacttcaggactcattgccaaggctcttgtgtaagcatctctttggtatgcaggcacagatgaagctcttgaagatggttggtgccccagttatgcttggaatgcctgatgcatttgaattttcaagtttagaacagtattatgtgaaaatgcctcgaaaattccagaaaagaatatgtctaaggggaatgaagaaatataagacattagaggtaagagcccctggtagtcattacagccatctgtctgctttgacaactgctgagatgttccttgctcctgcccacatggcctcttcagtcctggcatctcctgttctttttatgtcatgcttgtgacctgaagctccctgaaaggctgtctgtggccacactagtttgaagcacttctctcaaatcttgtcacctccttaagagcagcacacaaattctctttctcgtcaaaacgagtctttcattaaggaaataactaa

SEQ ID NO: 478879 - DNA, 578 bp, Homo sapiens
tgaaggggtcagggaaatattctgcttcaatactgtgagttccctttcaaagggcggcccagtggtatgcttccaaataatgaagatgaggcagaattcaagggtgataccaagggcccactcacaatttctctttcatgggaaaacagtgtagtgctgaggggcattagtaagaatttggcagacacttgtcctaattccatgggacaaagaaataaaggcaaaggcccctcttctgcagttctgctggagtttgctgggggtccactccagaccctgtttgcctgggtatcaccagcagaggctgcagaacagcaaagattgctgcctgctctgtcctctggaagctttgtcccagagggggagcctcctgatgccagctggagctctcctaggctaatctttatagacagcatgaaaggacccacttgtcctttagggtccatttggatatggctgttgagaagcacctacaagtatttggagaatgggtaagtgcaggatcatggtttttccttctctgaatttctccttgtcaggttgtcaaggcttagctccattgctctactgaaaatcat

SEQ ID NO: 478880 - DNA, 781 bp, Homo sapiens
agatcaaggcagggagttaaattgaaggaggaggcggctgcggccaaggattcagtctgcataggcctggggtggagcctgagcttctgcatttttaacaagtctctagaggatgctgctgcatctgggctgctaactacacttggagagaggaggttctggagagcagaggaaggagcatgaaccataacctaggggctggtagtcctgacttccgagccaaggtttgcctttatgtggctggcaacttgcttggactcctacctcaattctttgggcccaaggtttgtcctgcctcagaaggatgtcaagaaaattgagaagagcctcccagatcagcatcttctgtttctggatactctccctttgaaaagccagatttcagcaaaaagctttcctaatggtgaaattgcacaactgaaaccctatgggagcaatgggaaagatggagaaagaggtggttatatcatgagtcagaaaacagtgaaaggaagtaacatcctatgttggatacctggtagggttagtgaagaaacgttattgctgagctctgtgttacgctcacgaatgatgccattgaggaagtcacacttgttgaaaggaacgcagatacacaaagagttttgctgctgtctgttggataagaaccccctggtcgatttcagctcctactgcaagttagaaaaatcaatccaatgataaatgaaaagtgaccagtgtgctgggaaataacttattttttggcttcagaggaaattttagaaacagtgccaagtgaaac

SEQ ID NO: 478881 - DNA, 1158 bp, Homo sapiens
gtagggcgcggtgggcactgtcagcaccgggatggggctcccctccatggcgcctcctggccggtcctgctgcggctcccggagccggagggaatctgcagcctgccgggggcctccaccagcctggctgcgcgccgggactccgcctcgcgcccgggccccctctccagcagaccgcccgagctgccctcagtttctccccaagttggactcactttcggggtgtcccaaaagcctgattccagggcctgctagcccgaccccggtgacgcctccacccgcgcctggccccagccttcacccgcgatcgccgccctccggggcacaccctccgccagaaaacagccggcgggcggcgagactttgggcagagtccgggttcctctccggcgcccggcccgtctccctgtctccctgggacgaacagcctcagccaaaaataaccctggaaaggcgagctaagaatggttatctcctgccagcgctgaaatcggaggctgggcgctgcacttcaatccaacaggacccactcgagccatccacactttccccagcctcctccaaaacagcacactttccggctgaagaaaagaagaatggtattcatgcagttcccattttacagatgaaaacaagaggactttttctgtgaagtcaagaaagtggttacaatggtactttcagcctgtccgaattatgtattgcccctcccctttttattaataacattgaagtgtgatgggacaaccactgaagccgtctgttgaaacctgctgggactttttagccattctcttcaacataaagaatgggtgtttttggagggggtgagaggaatggggaaatgttgtcaaagagtacaatgttttagttgagacaggaggaatatattttgttgagatctacagcacagcatggtgactgtagttaacaatgaagtattgtgtatttcaaaattgctaagacaataaatttcaaatgttctcaccacaaaaaagataggttttgaggtgatgaatctattaattctctggatttaattattccacaatgtatacatatatcataacatcacatcatacctccgtaaatacatacaattttaatttgtcaattaacatttttttaaaagaatagtgtggccagtcggggaggtag

SEQ ID NO: 478882 - DNA, 638 bp, Homo sapiens
tggaacggattggaattgcaatggaacggaatggaatggaatggaagggaatggaatcaaccccagtggaatggaacggaaaggaatggaatggaatggaatggaatggaatggaatggaatgtatccgaatggaatcgattggaatgtaatggaatggaatcaaacctagtgaaatggactggaatagaatggaatggaatggaatggaatcaacccgagtggaatggaatggaatggaatggaatggaatggaatggaatggaatggaatggaatggaatggaatgcaatggaatggaatctacccgattggaatggaagggaatggaatggaatggaatggaatggatcgaaatggaatggaatggaatcaacccgattggaatggaatggaatggaatggaatggaatggaatggaatagagtggaatggatcgaaagggaatggaatggaatcaaaccgattggaatggaatggaatggaatggaatggaatggaatggaatagagtggaatggatcgaaagggaatggaatggaatcaacccgattggaatggaatggaatggaatggaatggaatcgagtgaacctgagtggaacggaatggaagggaatgaaatgaaattgaaactaccc

SEQ ID NO: 478883 - DNA, 653 bp, Homo sapiens
tggaacggattggaattgcaatggaacggaatggaatggaatggaagggaatggaatcaaccccagtggaatggaacggaaaggaatggaatggaatggaatggaatggaatatatccgaatggaatcgattggaatgtaatggaatggaatcaaacctagtgaaatggactggaatagaatggaatggaatggaatggaatcaacccgagtggaatggaatggaatggaatggaatggaatggaatggaatggaatggaatggaatggaatgcaatggaatggaatctacccgattggaatggaagggaatggaatggaatggaatggaatggaatggaaaggatcgaaatggaatggaatggaatcaacccgattggaatggaatggaatggaatggaatggaatggaatggaatggaatggaatggaatagagtggaatggatcgaaagggaatggaatggaatcaaaccgattggaatggaatggaatggaatggaatggaatggaatggaatggaatagagtggaatggatcgaaagggaatggaatggaatcaacccgattggaatggaatggaatggaatggaatggaatcgagtgaacctgagtggaacggaatggaagggaatgaaatgaaattgaaactaccc

SEQ ID NO: 478884 - DNA, 5055 bp, Homo sapiens
cggaacggaatggattggaatggaatcaacccgagtggaacggcatggactggaatggaatggaatggaatagaatggaatggaacgaaatggaaaggaatggattcaacccgattggaatggaatggaatggaatggtatggaatagaatgcaatggtacaaaatggaatgaaatggataggaatggaatcattctgagtggaatagaagggaatgtattcgagtggaatggaaaggaatgtaatcaacccgatggaatggaagggaatgaaatcgagaggaatggaaaggaatggaatcaacccgagtggaatggaagggaatgcaatggaatggaatggaatggaatcatcctgaatggaatggagtggaatggaatggaatggaatgaaatgaatggaacgaaatggaatagaatgcattcaacccacttggaatggaatggaatggaatggaattgtgtggaatggaatggaatggaatggagtgtgaaggaattgaatagaatcaacccaaatggaatggaatggaatggaatggaatggaatggaatggaatggaatggaatggattcaacccgaatgcaatggaatggaatggaatggaatggaatggtatggattcatcccgaaaggaatggaatggaatggaatcaacccgattggaatggcatggaatggaatagaatggaaaggaatggaatggaatggtatgtaatagaatggaatggaacgaaatggaatgaaattgattcaacacaactggaatggaatggaaaggaatggaatggaatggaatggaatggaatggaatcaacgcgaatggaatggcatagaatggaatggaatggaatgaatcaaccagaatggaatgaaaaggaatggaatgcaatggaatggaatggaatggaatggaatcaacacgagtggaatgaaatggaatggaatggattggaatggaatgcaatggaatggaatggaatggaatggaatggaatcattccgagtggaatggaagggaatgtattcgagtggaatggaaaggaatggaatcaacccgagtggaatggaagggaatggaatagaatggaaaggaatagaatggaatcaaccggagtggaatggaatggaaagaatggaatggaatggaatgaatggaatgtaatcaacccgagtgcaatggaaaggaatggaattgaatggaatgctaaggaatacaatggaatggaacaaaatggaacggaatggattcaccccaattggaatggaatggaatggaatggaattgtgtggaatggaatggaatttggaatggaagggaatgcaatggaatggaaaggaatagaatggaatcaacccgagtgctatggaatggaatggaatggaaaggaatggaaaggaatggtacaaaatagaatggaatggaacgaaatgagtggaatggaatggaatggaatggattggaatggaatgcaattgaagggaatggatgggaatggaatggaatcgaatcattccgagtggaatggaagggaatgtaatcgagtggaatggaaaggaattgaatcaacccgagtggaatggaagggaatggaatggaatggaaaggaatggaatggaatcaacacaagtggaatggaatggaaaggaatggaaaggaatggaatggaatggaatcgaatggaatggaatgaaatcaaccctggaatagaagggaatgtattcgagtggaatggaaaggaatggaatcaacccgagtgcaatggaatggaatggaatggaatggaatggaatggaatggaatcaacccgaatagaattgaatgaaatggaatcaacccgagtggaatggcatggaatggaaaggaatggaatggaattgaatggaatggaacggaacggaatggaatggaatggaatggaatggaatggaatggtatggaatggaatcaactcgagtggaatggaatggaatggaatggattggaatggaatgcaatggaagggaatggaagggaatggaacggaatggaatcattccgagtggaatggaagggaatggaatcaagtggaatggaaaggaatggaatcaacccgagtggaacggaagggaatggaatggaaaggaatggagtggaatcaacccgagtggaatggaatggaaatgaatggaaaggaaaggaatggagtggaatcaacccgagtggaatggaatggaaatgaatggaaaggaaaggaatgcaatggaatggaatggaatggaatggaatggaatcaacccgagagcaatggtatggaatggaatggaatggaaaggaatggaatggaagggaatggaatcaacccgaatggaatggaatggaaaggaatcaacccgagtggaatggaatggaatggattggaatggaatggaatggaatggaatggaatactatcattccgatggaatggaatggaatcaacccgagtgcaatggaatggaatggaacggaatggaatggaatataatcaacccgaatggaatggaatggaaaggaatcaacccgagtggaatggcatggaagggaatggaatggaatggaatggaatggaatggaaaagaatagaatggaatggaacgaaatggaatggaatggattcaaccctattggaatggaatggaatggaatggattggaatggaatgcaatggaatggaatggaatggaatggtatcattccgagtggaatggaagggaattggaatggaagggaaagtaatcgagtggaatggaaaggaatggaatcaacccgagtgcaatggaatggaatggaatggaatctaccagaatggaatggaatggaatggaatggaagcgaatggaacggaatgggttgtacccgagtggaataatggaatggaatcaaatcgcgtggaatggaatggaatggaactgagtcaaacagagtggaatggaatggaatggaatggaatggaatggaatggaatggaatcaccccaaatggaatggagtggaatggaatggaatagattggaatggaatgcaatggaatggaatggaatggaatggaatggaatggaatggaatggaatcaacacgagtgcaatagaatggaatcgaaagaatggaatggaatggaatggattcaacccgaatgcaaatggaatggaaagaaatggaatggaatggattcaacccaatttgaatggaatggaatggaatggaatggaattgtgtggaatggaatggaatgcaatggagtgtaaagaattgaatagaatcaacccgaatggaatggaatggaatggaatggaatggaatggaatggaatgcaatggaatggaatggaatggaatcagctcgagtggaatggcatgctatggaatggattggaatggaatgcaatggaatggaatggaatcattccgagtggaatggaagggaatagtggactggaatggaatggaatggaatgcaatggaacggaatggaatggaatcatcccgaatggaatggagtggaatggaatggaatggaatggaatgtagtggaatggaatggaatcaacccgagtgcaatggaatggaatggaacggaatggaatggaatataatcaacccgaatggaatggaatggaaaggaatcaacccgagtggaatggcatggaatggaatggaatggaatggaatggaaaagaatagaatggaatggaacaaaatagaatggaatggattcaaccctattggaatggaatggaatggaatggaatggattggaatggaatgcaatggaatggaatggaatggaatggtatcattccgagtggaatggatgggaattggaatggaaaagaatagaatcaacccgagtggaatggaagtgaatggaatggaaaggaaagtaatagaatggaatgaaaccgagtggaatggaatggaatggaatggaatggaattgaatggaacggaatcaactcgaaatggaatggaatggaatggaatggaatggaatgaaattgtgtggaatggaatggaatggaatggagtgaaaagaattgaatcgaatcaacccgaatacaatggaatggaacggaatgcaatggaatggaatggaatggaatggaatggaatggaatggaatggaataaatcaacccgaatggaatggaatggaatggaatggaatggaatggaatgcaatggaatggaatggaatggaatcagctcgagtggaatggcatggtatggaatggataggaatggaatgcaatggaatggaatggaatcattccgagtggaatggaagggaattgcaatggaatggaatggaacggaatggaatggaatataatcaacccgaatggaatggaatggaaaggaatcaacccgagtggaatggcatggaatggaatggaatggaatggaatggaatggaaaagaatagaatggaatggaacgaaatagaatggaatggattcaaccctattggaatggaatggaatggaatggaatggattggaatggaatgcaatggaatggaatggaatggaatggtatcattccgagtggaatggaagggaattggaatggaagggaatgtaatcgagtggaatggaaaggaatggaatcaacccgagtgcaatggaaaggaatggaatggaatggaatggaatggaatctaccagaatggaatggaatggaatggaatggaatggaagcgaatcgaacggaatgggtttggaatggcgtggaatggaaaggaatggaatggaatggaatgctacgtaatagaatggaatggaacgaaatggaatggaatggattcaacccaattggaatggaatggaatggaatggaatcattccgagtggaatagaagggaatatattcgagtggaatggaaaagaatagaatcaacccgagtggaatggaagtgaatggaatggaaaggaaagtaatagaatggaatcaagccgagtggaatggaatggaatggaatggaatggaatggaatggaacggaatcaactcgagtgcaacggaatggaatggaatgga

SEQ ID NO: 478885 - DNA, 7532 bp, Homo sapiens
ttggaatcaacctgaatagaatggaatgaaatggcatcaacccgattgcaatggaatcaaatcacgtggaatggaatggaatggaactgaatcaaacagagtggaatggaatggaatggaatggaatggaatggaatggaatggaatggaatggaatcaccccgaatggaatggagtggaatggaatggaatggaatggaatgaaatggaatggaatggaatggaatcaacccgagtgcaattgaatggaatcgaatggaatgcaatggaatcgaatggatttaacccgaatggagtggaaaggaatggaatcaacccgagtggaatggcatggaatggaatggaatgcaatggattggaatgtaatggaatggtacggaatagagtggaatggaacgaaatggaatggaatggaatggaatggaatggaatggaattgtgtggaatggaatggaatggaatggaatggaatggaatggaatggagttggaatggaatggaatggaatggattggaatggaatgcaatggaattgaatggaatcattccgagtggaatggaagggaatgttatccagtggaatggaaaggaatggaatcaacccgaatggaatggagtggaatggaatcaacccgagtggaatggcatggaatggaatggaatggaaaggagtggaatggtacggattagaatggaatggaacgaaatggactggaatggattcaacacaattggaatgtgcaatggaagtcaatgtaatcgagtggaatggaaaggaattgaatcaacccgagtgcaatggaatggaatggaatggaatggaatgaaatggaatggagtctaccagaaaagaatggaatggaatggaatggaaaggaatggaatggaatgtacccgaatggaaaggaatggaatggaatcagtggaatggaatggaatggaatggaatggaatggaatggaatggagtcatcccgaatggaatggagtcgaatggaatggaatggaatggaatcaacacatgtgcaatggaatggaatcgaatggaatggaatggaatggaatggtttcaacccgaatgtaatggaaaagaatggaatcaacccaagtggaaaggcatggaatggaatggaatggaatggaatggaatggaatgtggaataaaagggaatgttttcgagtggaatggaaaggaatggaatcaccccgagtggaatggaagggaatggaatggaatggaaaagaatagaatggaatcaaccagagtggaatggaatggaaaggaatggaatggaatggaatggaatggaatggaatggaatggaatcaactcgagtgcaattgaatggaatggaatggagtggaatggaatggaatggaatggaatggaatcaactcgaatagaatggaatgaaattgaatcaacccgaaatcaacccgaacggaatggaaaggaatggaacggaacggaatggaatggaatggaatggaaaggaatggaatggaatggaatggaatggaatcaactcgagtggaatggaatggaatggaatggattggaatggaaggcaatggaagggaatggaagggaatggaacggaatggaatcattccgagtggaatggaagggaatggaatcaagtggaatggaaaggaatggaatcaacccgagtggaacggaagggaatggaatggaatggaaaggaatggagtggaatcaacccgagtggaatggaatggaaatgaatggaaaggaaaggaatgcaatggaacggaatggaatggaatggaatggaatcaacccgagagcaatggtatggaatggaatggaatggaatggaatggaatggaatggaatggaatggaatcaacccgaatggaatggaatggaaaggaatcaacccgagtggaatggcatggaatggaatggaatggaatggaacggaatgatacggaatagaatggaatggaacgaaatggaatggaatggattcaacccaattggaagtggaatggaatggaaaggaaatgaatggaatggaatggaatggaatggaatggaatggaatggaatgaaatggaaccaacttgaatgcaatggaatggaatggaaaaggaatggaatggaatggaatggaatggaatggaatggaatggaatggattgtatccgaacggaatggaatggaatggaatggaatggaatggaattgtatggcgtggaatggaatgaaacggaatagaatggaatggaatcaaatcacatggaatggaatggaattgaatcaaacagagtggactggaatggaatggaatggaatgcaatggaatggaatggaatcatcccgaatggaatggagtggaatggaatggaatggaatggaatgtagcggaatggaatggaatcaacccgagtgtaatggaatggaatggaacggaatggaatggaatataatcaacccgaatggaatggaatggaaaggaatcaacccgagtggaatggcatggaatggaatggaatggaatggaatggaaaagaatagaatggaatggaacgaaatggaatggaatgcaatgaaccctattggaatggaatggaatgcaatggaatggaatggaatggaatggtatcattccgagtggaatggaagggaatgtaatcgagtggaaaggaaaggaatggaatcaacccgagtgcaatgtaatgtaattgaaatggaaaggaatggaatcaacccgagtgcaatggaatggaatggattggaatggaatggaatggaatggaatggaatctaccagaatggaatggaatggaatggaatggaatggaatggaatggaatcaaatggaacggaatgggttgtacccgagtggaataatggaatggaatcaaatcgcgtggaatggaatggaatggaactgaaacaaacagagtggaatggaatggaatggaatcaacccgagtgcaatggagtggaatggaatggaatggaatggaacggaatcaactcgagtgcaatggaatggaatggaattgtaaaggaattgaagagaatcaacccgaatggaatggaatggaacggaatgcaatggaatgtaatggaatggattggaaaggaatggtacggaatagaatggaatcgaacgaaatggaatggaatggattcaacccaattggtatggaatggaatggaatcgaatggaatggaatggaatggaatggagtgtacagaattgaatagtattaacctgaatgcaatggaatggaatggaatggaatggaatggaatggaatggaatcaactcgagtggaacggaatggtatggaatggattggaatggaatgcaatggaatcattccgagtggaatggaagggaattggaatggaagggaatgtaatcgagtgtaatggaaaggaatggaatcaacccgagtgcaatggaatggaatgcaatgcaatggaatggaatagaaactaccagaatggaatggaatggaatggaatggaatggaatggaatggaatgtacccgaatggaattgaatggaatggaatcgtatggcaatggaatggaatcaaatcgcgtggaatggaatcaaatggaactgaatcaaacagagtggaatggaatggaatggaatggaatggaaaggaatggaatggaatggaatggaatggaatggaataatcccgaatggaatggggcggaatggaatggaatggaatggaatggaatggaatggaatggaatggaatcaacccgagtgcaatggaatggaatcgaatggattggaatggaatggaacggattcaacccgaatggaatggaaaggaatggaatcaacccgagtggaatggcatggaatggaatagaatggaaaggaatggaatggaatggtatggaatacaatggaatggaacgaaatggaatggaatggaatggaatggaatggagtggaatcattccgagtggaatagaagggaatgtattcgagtggaatggaaaggaatggaatcaacccaagtggaatggcagggaacggaatggaatggaaaagaatagaatggaatcaaccagagtggaatggaatggaatggaatggaatggaaacaactcgagtgcaatggaatggaatggaatgcaatggaatggaatggaatggaatggaatcaactcgaaatggaatggaacgaaatggaacggaatggattcaacccaattggaatttaatggaatggaatggaattgtgtcgaatggaatggaatggaatggaatgtcaaggatttgaatagaatcaacccgaatggaatggaatggaacgcaatgcaatggaatggaataatggaaagaaatggaatggaatggattcaacccaattggaatggaatggaatggaatggaatagaattgtgtggaatggaatggaatggaatgcaatggaatggaacgcaattgaatggaatggaatggaatcaactcgagtggaatggaatggtatggaatggattggaatggaatgcaatagaatggaatggaatcattccgagcggaatggaagggaatgtaatcgagtggaatggaaaggaatggaatcaacgcgagtggaatggaagggaatggaatggaatggaaaggaatggaatggaattaacccgagtggaatggaatggaatggaatggaatggaatggaatggaatgaaatggaatcaacccgagaattgaatagaatcaacccgagtggaatgggatggaatggaacagagcggatgggagtggaatggaatgaaaacgaatggaatggaatggaatggaatggaatggaatggaatggaatcaactcgagtggaatggaatggattggaatggaatgcaatggaatggaatgtaatggaatggaatcattccgagtggaatggaagggaatgaaatcgagtggaattaaaatgaatggaatcaacccgagtgcaatggaatggaatgcaatggaatggaatggaatggaatctaccagaatggaatggaatggaatggaatggaatggaatagaatggaatggaatggaatggaatagtggaatggaatggaatggaatggaatcatcccgaatggaaaggagtggaatggaatggaatggaatggaatggaatgaaatggaatggaatgaaatggaatcaacccgaatgcaatggaatggaatggaatggaatggaatggaatgcaatggaatggaatcgaatcgaatcgaatcaattcgagttgaatggaatggaatggaatggattggaatggaatacaatggaatggaatggaatcattccgagtggaatggaagagaatgtaatcgagtggaatggaaaggaatggaatcaaccgagtcgaatgaaagggaatcgaacggaatggaaaggaatggattggaatcaacccgagttggaatggaatggaatggaatggaatggaatggaatggaatgtagtcgaatggaatggaatcaacccgagtacaatggaatggaattgaatggaatggaatggaatggaatgaatggaatggaatcaactctagtgcaatggaaacgaatggaatggaatggaatagaatcaactcgagtggaatggaatggaatggaatggattagaatggaatgccgtggattagaatggaatcattccgagtggaatggaagggaatgtaatcgagtcgaatggaaagcagtggaattaacccgtgtggaatggaagggattggaatggaaaggaaaggaatggaatggaatcaacccgagtggaacggaatggaatggaatggaatggaatagaatggaatggaatggaatcaacccgagtagaatggcatggaagagaatgcaatgtaatggactggaatgccgaggggaatggtatggaatggaatggaatggaatggaatggaatggaaaggaatggaatggaatggaatggaatcaacccgagaacaatggaatggaatggaatggaatggaatggaatggaatggaatcaacccgaatggaatggagtggattgaaatcagtccgactggaacggcatggaatggaatggaatggaaaggagtggaatgtgcaatggaatggaatggaatggaatggactggaatctaccagaatggaatggaatggaatggaatggaatggagtggaatggaatggaattaaatggaatgcattcaacccgattggaatggaatggaatggaatggaatggaatggaattgcaattgaatggagtgtaaagaaattgaatagaatcaatccgaatggaatggaatggaatggaatggaacggaatggaatggaatggaatggaatggaatcaactcgagtggaatggaatggaatggaatggattggaatggaatgcaatggaagggaatggaagggaatggaatggaatggaatcattccgagtggaatggaaaggaatgtaatcgagtggaatggtaatggaatcaacacgagtggaatggaaggaatggaatggaatggaaaggaatggaatggaatctacacgagtggaatggaatggaatggactggaatggaatggaatggaatggaatcaacccgagagcaatggaatggaatggattggaatggaatggaatggaaagaaatcaagccgcgtgcaatggaatggaatggaatggaatggaatggaatcaacccgaatagaatggaatgaaatggaatcaacccgagaggaatggcatggaatggaatggaatgcaatggaatggaatgaatcaacccgaaaggaatggaatggaacggaactgaatcaaacagagtggaatggaatggaacagaatggaatggaatataatcatcccgaatggaatggagtggaatggaatggaatggaatggaaaggaatggagtggaatggaatggaatggaatggaatcaactcgaatggaatggaatgcaatggaatgcattggaatggaatgcaatggaagggaatggaagggaatggaatggaatggaatcattccgagtggaatggaagggaatgtaatcgagtggaatggaaatggaatcaacacgagtggaatggaagggaatggaatggaatggaaaggaatagaacggaatcagcacgagtggaatggaatggaaacgaatggaatggaatggaacggaatggaatggaacggaatggaatcaacccgagaacaatggaatggaatggaatggaatggaatggaatggaatggaatggaatggaatggaatcatcccgaaagttatggagtggattggaatcaacccgagtggaacggcatggaatggaatggagtggaaaagagtggaatggtacggattagaatggaatggaatgaaattgactggaatggattaaacccaattggaatggtatggtatggaatggattggaattgtgtggaatggaatggaatggaatggaatggagtgtaaaggaattgaatacaataaacgcgaatataatggaatggaatggaatggaacggaa

SEQ ID NO: 478886 - DNA, 570 bp, Homo sapiens
cttgacactcaacatccatccatgctgctgtgtgcatcaacagtttctttttatttttttggctggcctgagagggcctctggagcctgcaggcccatgggacatgatcaaacataccatgttgtcacaagccccgagctattgtctaagaaaggggaaggccttggccatggacacaccctcagcccatctccacggagcagtcactcacacgtgtatctcaagcctggtcactgtcaaggcatcagaccctcctgcctgggccgtggagagcaccatccagggaccccccggggccccagacttctaggagcagtatatgtagatggagagggggaaaagagacagtggaggagtaacactaaccagttagacatcattgtggagaagaattttgtgtctggtataattttgtatcatggccattatggaataaaaaaagataatgatcctcatactattaatactgtagaccactgaaagcgtaaagtaagatgtttcttttctccatttctttcatttcactttttaataagtggtgaattctatgaaccaattccccagggtcac

SEQ ID NO: 478887 - DNA, 496 bp, Homo sapiens
atcacactgtagattccatttcaatacatgaatttcagggggatgcacgccaatcatagcagtcaccaaaatggatattggtacagtcacacagtgcgaaccacagtagaagtttccagctccaacaacatttcctgtggactgaacagcacggtggaattgcttctggcaggttctgatcctgggaaagaaggccctgaggccctcagcactgacactgatgtacctgagtgcctgcggttcctggaacaacctcgcacagcacgacacaagagggaaaagcctagagcaggccccgtgactactatggccagtccagtgccgctggcagcaagcttgcatgttttgggcatctcagctgccctgactccggctgtgccccaccatgaggtgcgaagagctcccaggctctcatatccctgtgtgatcagcctcagaagaaccttggaagcacagacatagggatgaatcaggttaccatgaattactaactaca

SEQ ID NO: 478888 - DNA, 805 bp, Homo sapiens
ttccgttaagtggaaaaacccattttaattctggtacaaaggagatgcacactcctgctcggagtcactctaatgacatcagccgggatgaagccgttcccgccactaacatcatcggcagtccttatgaggaagatgagaaacctttctgcatttgactcttgcagaaataagaaccaggggagtgaaggggctcacccagtgtcacaggagcagtcaggggtggagccagcgtgtggacacaaggcctcttccagctgcccactgtttctatgctgcctctccgcaccccaccgcagtcaggaacctcgaaggctttctgtggttctcctgcgcaccagctgccaggacctgaccactgcacccaccatcgccagcacagaaaaaatatcaccactgtatcagggcagatggtcgggaacagcaacaaaacattccccaactagagccgcaaacacaaacagcgcccatcatgcagaaattgccttggcgtgcgggtcattggtgatttcatttgacgccgcggggccgagagcagagctcacccttgagtctgcaaccttggctctgaaggtcctcggccctttctccaagggtagttccagaatctttcagacagtagtttcaacatctgtttgtggcttcaaggacaaagaaaataaagttaatgctctcaaactctgccactgctctatccactaaatttatggaatattataaagcctttgttgtcatttcaatgatgtttatagcatcttcaacaggaggggacttcatctccagaaactactttctttgctcatcc

SEQ ID NO: 478889 - DNA, 766 bp, Homo sapiens
gctttgtggggtcagtgccctgaaaggcaactgcggcgtctccaggcaggcagttgtgaacactgaccacccatcctatcggtcttctgctgcttcagcgtcggttcacgactctccactcagggccacactgcgctcggtgattgagccccacctgaggcacaaccccaggccacagcaccgtggggggttctgcccacggcttggggcacaggtgccagtgctgcccagagtgtggactgtggctctcggccatcgtcacggcaggtgatgcttgggacaggatgttgcctctcctcattcctgagtcttctcctgcaggaagagagaaactgtctgctgaggaacccgttattaagactgttgaagctcaaacgcgtggaatccagaaagtggaggctctcaggaggttttctctcacagaacaggctcacgctgccggccctgggggcaccctgtgccagtctcacccatccccatcctcacacagcaatggtgagtctcccttacttctgtttggagatgaagggtttgggcttggaggcccgcagagtggtggacccaagattaaagttcatgtttgtcttatagttcaaactttacgttcatcggattacaggaaatcacaggtggtttcgttgcccatggccaaagagggatcttttcagtatatcccactccttccccaactccaaggggaatgagatgggaatcaggtgatttctgcttcgaggatttgccagtgggaaggaggcccgaggtgacc

SEQ ID NO: 478890 - DNA, 651 bp, Homo sapiens
gtgatgggaacccacactatacgtatataccaaatactctatgtacagacatgcatcacgccatgatgcggatacctcctgagaagtgcattgttaggcaattttgttaccgtgtgaacatggtagagagcatgtacacagacctagacggcatggtccaggcacccctaggctgtatggcgagacggcaagaaagaagcacaggggctttggagattcacatcagtaatggtaaagaagaaaggatgctgcaggcagtgtcagaggcaggaatgatcaggtgtcagggccacagaaatgtgctctattttcctctggaaaatgttgaatccatgctccccctaaatgcacactatttccccaagatatgggaagtaataaatggttttgacataggagactggcaggacgtgtttcctggtcacagccctgctgacccaagcagggtccggtccagacaagataaagtgaagaaagccatgggaaccagcagatgctgctcaaagcaatccctggctgccctcactgctggctggcataaagatgcttccaccagcgccatgacagtttaccaatgccatggcaacagcccagaagttatcactgctttcagtggcaacaacctagaaggggctgccctttcctagggag

SEQ ID NO: 478891 - DNA, 740 bp, Homo sapiens
ttatagaagtcagtagaatattcagaatttcatttgcatttctgatcatcaaggtgaccaccactgccagcatgtgcagggtacctgcattgtgtctcttggccacagcgggtccttctgcaggtggagctgtggtctttgcagaaagtaaacaaaactatttcaatgaatcctgtgtcaaaaaaattaaaataaatctgtgtgatgtcatctgcgtctgccaacctgcccttccaaagagacgcaagatggaagctttcagtgcttgtcctgaccacccagcaacagctgcccataagggcaacctgtcccaagaggcttccgatagcatctgcgtcctcttctgcatgttgtcacccacgaaggaggcctgcgtggcacagagcccacagtgccatatttctgaagcagtggaaggaattgctctgggtgacgccggtggaaggaattgctctccgctgaccctagcaatggatgctgagccaggagcaagtgagaacaaggtcccacgagatcagccggagggcatggggaataagcttctgtcccttcaaggaggccaaagtcctattcgtctaccttgtcgtgtaggtttgtgtgtgggcgagtatttgttctcctttgccctgtagagtcctattcctctacctcgtcgtgtaggtttccgtgtgggggaatgttgctcccatatcagaacagaagcaccttgcagggggaaggcttgtttccttaaggtctcc

SEQ ID NO: 478892 - DNA, 539 bp, Homo sapiens
gctgtgttgcttttgcctgtctccagcagcctagtatatagacaactaactaaatgtctcattgtctccacctgggggtagggaccagtgtcggagaaaaaggctcatacgatgaggaccagcttcttgtggatctccaggtctctgaccacagcactgaattcctcaaaggatatcttcccatcgccatccttgtccaggatgatgatggttttgtcgaccagctgctggagctgccagtccgtcaggttgttgcccaccatcatcttcagcacctggaagagctccccgttggaaatgtagccatctttatccatgtcgtaaatgctgaacgcaaacctcaacttctgctcctcgtcgcccttgacgctgaactgggaggtccccaggatgaattccttgaagtccacttctccatcaccgtcggtgtcgaagacgtcgatcactcgccgcaccaacgggttgtggcgcagctccggcagggacatgaactcctccacgctcagagaccctgatttgtccaagtccaacttcttaaa

SEQ ID NO: 478893 - DNA, 740 bp, Homo sapiens
acccaacagctccgaagagacagcgaccattgagaacgggccatgatgacgatggtgtgcgggtacgcagggagcacagtcgttgtgccaggtgggtgccagcacacagcagtcattgacattgtacagacttctggagtaaatggagggatggatgaaacacttgtgcaatcgaaatttttgcgactccttccatttgacaagtacggtccacgccattcattccccaacccaaagcccgcgaagccccgcagcttacacagaggccccgcccaaccgccccgctctgcgcgctccctcagctccagcgcagcagctctgggagacacgctgaacggtagtcaagttccgggtcacagtgcgcttgctggtcaagaattgctgctttgcagtgagacagatccagattccagtgtctggtgtgactgtgtgtggccttgggcaagttatctgtccaagtttcaatcgctacctgtatcaaatgtagttgattgtagttgtgtgcatcacagggattttgtgaagattaaatgacgtcgtatgtatcaagggcttagcgcactgcctgaaatatttattataaattggacacaatactgacagtttatatttaattcttaacttatgaaaacactgtaagcaaatcctttcagatgctacagaagagtaacatcatcttgtcatcttccattggtgtcttgcttttttagctttgcctatacatactaactactcatttt

SEQ ID NO: 478894 - DNA, 488 bp, Homo sapiens
cccgttcccctgaagtcattggtggccaggaatgatcccctgtattgtggccacagggccccagtcacttttggcttgtaagttttcagctgagaagtctgctgttagtgtgatgggcttcctattggtacatgtgcacaacgtgcagtcaaacccctcttctccaaatctgctgcagtttgctgaggtccactccagacactgttctcctgggtatcaccagtgtaggctgcagaacagccaagattgctgcctgctccttcctctgggagattcatctcaaaggggcaccggcctgatgccagccagagctcccctgtgtgagatgtcctgggcctggtgcactgtgctgggagaatcccctttgccaggatcagttgctcttttcagagcctgcaagcaggaaagattaagtctgctgaagctgcaactgcagccgcccctccccagatgctccgtcccacggagatgagagttttatctgtaaa

SEQ ID NO: 478895 - DNA, 814 bp, Homo sapiens
ggtccctttcagccataactggtttttatggttttaggtctaacattcaagaccctcagctgtaggtctgttggagtttgccgatggtccactccagactctttttgcctgggtatcagcagcagaggctgcagaacagcagatattggtgaacagcaaatgttgctgcctgatcgttcctctggaagttttgtctcagaggagtacctggctggtgagatgaacccagtacctccattggaaatgcggaaatctcccaccgtctgcgtcactcatgctgggagctgtagactggagctgttcctatttggccatcttggctccacccccgaaaactggtcttttaagttgtctcctgaagtctgggaaggctctgtgggctgggtgacctcctgtcctctgtccccaggcttaagaatcttcgagcagacaaaatggaacatttatatgcaagtttggtgacataaatcaagtgaggaaaagtccattttcatgtggtcattgtgtcaactgttattatttcagttcagcctggccacatatataaatctcctttaagaaaccagaaaaggaatatgtgaaataacatttctagtatgcatggtcacttgcttctattaataattactacttgtaaagcctggaaatgcttaagttgttcatattttttgagcgattgactggctcttttatttatacatacaagaaaaaaagccaagtggagagaggaaatcatctgttgctgcagaaacatgaaagtcacatttttggcactgttccctggttgacaaaccagctggatttaggttaggaa

SEQ ID NO: 478896 - DNA, 674 bp, Homo sapiens
ccggccatttgcactgcctctggcttatctgcctcattctgcattaggtatatctcctaatgctatcccagccctcttcccccaacccacaacagtccatggtgtgtgatgttcccttcctgtgtccatgtgttctcattgttcaattcccacctatgagaccctcagctgcaggtctgttggagtttactagaggtccattccagaccctgtttgcctgcatatcagcagtggtgactgcagaacagtggatattggtgaaccgcagatgctgctgcctgatcgttcctctggaagttttgtttcagaagagtaccaggctgttcttgagcctgctcagctgtgacacaaatcttccccatgtgcaatgtccatctgagccttttgaaatccctctaaaaaatgtagtatggacaaggagaactaatacaaatatgaggcttttgcctccaggtagacagtaaatagtaggtatttttttcatacttcagtgtctcatgccttctaccagcatccatggaaatggaaggttaataggtttgtttacaaataggatgaaatcttagatccttcacaattatttaattttggagatgacaatgggatgctgagataaacacaactttctgaaaggggaaaatacacaaatacttgaagagcttgcaacggatatg

SEQ ID NO: 478897 - DNA, 1715 bp, Homo sapiens
tcgaacggattggaatcaaacggaatgggatggaacggaatggaaaggaatggaatggaatcaaatggaatggagagtgtaacggaatgatatccaatggaatggaatttaatggaatggactcgaaaggaatggactggggtggaatggactggaatggaatggactcgaatggaatggactcaaatggaatggactggagtggaatggactcgaatggaatgcaaacgaatggaatggaatgcaatggaatggaatggaaaggaatagaatggaatggaatcggatggaatagaatggaatggaatggagtcaaatggaatagaattgaacggaatggcatcaaatggaatggacaggaatggaatggaattgaatggaatggaatggactcgaatggaatctatggaatggaatcgaatggaatggaatcaaagggaatggaccggaaaggagtggactggaatagaacagacacgaatgtaatgcattgcaatgtgtatgattcgaatggaatggaatcaaatggaataacggaatgcaatggaatggaaagcagtggaatcaagtggaaaggtatcgaatggaatggacttgaatgcaatggactggaattgaatgcagtcgaatggaatggagtggatcataatggaatcgaatggattggaattcaatggaatggaatggattcgaatggaatggagtcaaatggaatggaatcgaatggaatggaatttaatagaattgaattgaatgaaatggaattgaatggaatcaaaaggaataaaatggagtggagtgtaacggaaagatatcgaatgaaatggaatggaatggaatggactcgaatggaatggactggaatgcaatggactcgaaaggaatggaatggaatggaaaggaaaagatggaatggaattggatggaacggaatcgaatggaatggagaacaaaatggaattcaatggattggaatcgaatggaacggaatggaatggaatggaatgcattggaatggaatggaatggaatggagtcgaaagaaatggagtcgagtggaatggaatcaagtggaatggagtcgaatggaatggaatgggattgaatggaattgaaaggaatacaatggaatggagttgtaatggaaagatattgaatggaatggactcgaatggattggactcaaatggaatggactggagtggaatggactcgaatggaatggatcggagtggaatggagtcgaatcgaatggaaacgaatggagtggaatacaatggaatggaatggaatggaatggaaaggaaaggaatagaatggaatggattcgtatggaaagtaatggaagggaatggagtcgaatggaatagaatcgaaaggaatggcatcaaatggaatggactggaatggaatggactcgaagggaatataatcgaatgaaaaggcatcgaatgtaatggaatggaatggcatggaatggaatggactcgaagggaatataatcgaatgaaaaggcatcgaatgtaatggaatggaatggcatggaatggaatggaattgactcgaaggaatataatcgaatgaaaaggcatcgaattgtatggaattggaatggcatgggaatggattggatggaattggacccagatgtgattgacacggaattgaattggactcaaacagagtggaatccgaaaaaatggtcccgaaatgaat

SEQ ID NO: 478898 - DNA, 1787 bp, Homo sapiens
aacatcgtcaaatgaattcgaatggaattatcatcgaatgaaattgaatggaatcatcatcgaatggaatcgaatggaatcaccatcaaatggaatggaattgaatcatcatcaattggaatcgaatggaatcatcgaatggaatcgaatgaaatcatcatcgaatggaatcgaatgaaaatggaatggaatagaatcatcgtcgaatggaatcgagtggaatcaacagtgaatggaatcgaatggaatcctcatcaaatggaattgaatggaatcatggaatgcaatcgaatggaattatcattggttcgaatcgaatgcaatctggaatccagtggaatcatcgaatggaatcgaatggaatcatcattgaatggaatcaaatggaatcatcgaatggaatcgaatgaaatcatgatcggatggacacaaatggaatcatcatcaaatggacaaaaatgcaatcatcatcagatggactcaaagaatggaatagaatggaatcatcctagaatggaatccaatggaatcatcaaatggaatcgaatggaatcatcatcaaatggaatcaaatggaatcatcatcgaatggaatcgaaggaatcatcgaatggaatcgaatggcatcattggatggacacgaatggaatcatcatcggattgactcaaatggaatctcgaatggaatcatcaaatggaatcaaatggaaacatcatcaaatggaatcgaatggagtcatcaaatggtatcaaattgaatcatcatcgaatggaatcccatggaatcatcaaatggaatcgaatggaatcatcaaatggaatcaaatggaaacatcatcaaatggaatcaaatggaaacatcatcaaatggaatcgaatggagtcgaatggaatcatcgaatggaatcaaatggaaacatcatcaaatggaatcgaatggatcccatggaatcatcaactggaatcgaatggaatcatcgaatggactcgaatggaatcatcgaatggaatccaatgggatcttcattgaatggaatcaaatggaatcatcatcaaatggaatcgaatggaattattgaatggaatagaatggaatcatcatcggatggacacgaatggaattatcatcagattgacttgaatggaattaatcttcttccaatgcacatgaatggaatcatcattggatggactcatatggaatcagcatcgaatggactcaaatgcaatcatcatcagatggactcgaaagtaatcatcatcggatggaatcgaatggaatcatcatcaaatggaatcgaatggaatcatcaacggatggaattgaatggaatcatcatcagatggaatcaaagggaatcatcgaatggaatcatcatcgaatggactcgaatggaatcatcatcagatggacccaaatggaatcatcattggatggactctaatggaatcatcatcggatggacccgaatggaatcatcatcagatggactcaaatggaatcatcattggatggactcgaatggaatcatcattggatggactcaaatggaatcaccattggatggacacgaatggaatcatcattggatgaagaagaatggaatcatcattggatggactcaaatggaatcatcatcggatggaatcgaatggaatcagcatcaaatggaatcgaacggaataatcaaatggaatagaatggaatcctcatcaaatggaaacgaatgcaatcattgaatggaatggaaaggaatcgtcatcaaatgaaatagaatagaatcatc

SEQ ID NO: 478899 - DNA, 638 bp, Homo sapiens
gaatcgaccagaagtatcattgaatgaagttgaatggcatcatcaaatggaacctaatggaatcattatcgagtggaatcaaatggaatcatcgaatagaatcaaaaggaatcatcatcaaatggaccctaatggaaccatcatcgaatggaatcaaatggaatcatcatcgaatggaccctaatggaaccatcatcgaatggacacgaatggaatcaccatcgaatggagtcgaatggaatcaaaggaatcaaatggaaatatcatcaaatggaatccaaaggaatcatcgaatggaatcaaatggaatcactgaatggaatcgaatgaaatcatcattgaatggaatcgaatggaatcatcaaatgcaatcaaatgaaatcatcatcaaatggaatcgaatggaaacatcatcgaatggcatcaaatggaattatcatcgaatggaattgaatggaaatatcatcgaattgaatcgaatggaatcatcatcaaatggaatcgaacggaatcatcatatattggaaccgtataaaatcattgagtggaatcgaatggaattatcatcgaatggaatcaaaagggaccatcatcgaatggaatcgaatggaatcatcatcgaatggaattgaatggaa

SEQ ID NO: 478900 - DNA, 2060 bp, Homo sapiens
gaatggaaccatcatcgaatagactcgaatggaatcatcatcgaatggactcgaatggaatcatcgtcaaatggactcggatggaatcatcttcgaatggactcgaatggagtcatcatcgaatggactcgaatggagtcatcatggaatggactcgaatggaatcatcatcaaatggactcgaatggaatcatcatcgaatggactcaaatggagtcatcgtggaatggacttgaatggaaataatcatcgaatggactcggatggaatcgtcatccaatggactcgaatggaatcatcatcgaatggactcgaatggaatcatcatcaaatggactcgaatggagtcatcattgaatggaatcgagtggaatcatcatccaatggactcgaatggaatcatcatcgaatggacctgaatagaataatcatcgaatggactcagatggaatcgtcatccaatggactcgaatggaatcatcatcgaatggaatcgaatggaatcatcgaatggactcgaatggaatcatcatcgaatggactcgaatggaatcatcatcaaatggactcgaatggagtcatcattgaatggaatcgagtggaatcatcatccaatggactcgaatggaatcatcatcgaatgggctcgaatagaatcatcatcaaatggctcgaatggaatcgtcatccaatgaactcgaatggaataatcatcgaatggaatcgaatggagtcatcatcgaatggacccaaaaggaatcatcatggaatggactcaaatggaatcatcatcaaatggactcgaatggaatcatcatcgaatggactcaaatggagtcatcatggaatggacttgaatggagaatggaatggaatgcattggaatggaatgcattggaatggaatggaatggaatggagtggactggagtgaagtggagtggagtgaagtggagtggagtggagaggagtggaatgtagtggaatggaactggattaaatggaatggaatggaatggactcgaatggaatggactcgaatggaatggaagggacttgaatggaatcatcatcgaacggactcgaatagaatcatcatcgaatggactcgaatggaatcatcatcgaatggactcgaatggaatcatcaccgaatggactcaaatggaatcatcttcaaatggaaccgaatggaatcatcatcaaatggaattgaatggaatcatcaaatggagttgaatggaatcatcatcgaatggaatagaatggaatcatcatcgaacggagttgaatggagaatggaatgcaatggagtgaaatggaatggaatggaatggagtggagtggagtggagtggagtggaatggaatggaatggaatggaatggaatggaatggaatggaatggaatggaatggaattgaaatgaatcgaatcaaatcgaacagaatggaatcaaatcaaatggaattgcatggaatggaaaggaatggaatgggagctgagattgtgccactgcactccagcctgggtgacagagtgagaaactctcgaaagaaagtaatggaatggaatggagtggaatggaatggaacggaatggagtgaacctgagtggagtggagtggagtggagtggagtggaatggagtggaatggaatcggatgttatggaaagtagtggaatggaatggaatagaatggactggaatggactggaatggaatggaatcgaatggaatggactcgaatggattggaatggactcgaatggaatgaaatggacacgaatggaatcatcctcgaatagactcaaatggaagcatcatcaaatggactcgaatggaatcatcatcaaatgtacaccaaagaaatcatcatcgaatgaactcgaatggaagtgtcatcaaatggactcaaatggaatcatcatcgaatggattcgaatggaataatcatcgaatggactcgaattgaattgtgatcacatggactcaaatggaatcatcattgaatggactcgaatagaatcgtgctagaatggagtcgaaaggaatcgtcatc

SEQ ID NO: 478901 - DNA, 720 bp, Homo sapiens
tgcagcaaaccaccatggcacatgcatacttatgtaacaaacctgcaagttcagcacatggaagcacagcataaaggtttggaaaatttgcagcctgacaatgctgcagaaaagaaaacacccttttctgaggagaaattcaagttggctacagacatctgcgtaactaataatgagccaaaatttaatccccaagacaatgggaaaatgtttccaaggcatatcacaggtcttcatggcagtccctcccatcacaggtccagaggcctaggaggaaaaattggttttgtgggcagggtccagggtcccctttgtgtgttcagtcttgtgacttggtgccctatatcccagcttccccatccgtggcttcagagggttcaagcctcaagatttggcagcttccacgtggttttgagtctgcaagtgcacaaaagtcaagaactgaggtttggcaacctccacctagatttcagaagatgtatggaaataccaaggcagaagtttgctataggggcggggccctcatggagaacttctgctagggcagtgcagaagagtaacatggggtgggagccctcacgcagagttcctaccggtgcaccacctagtggatctgtgagaagagtcccaccttcctccagaccacagaatgatagttctaccaacagcttgcaccgtgtgctagaaaagccacaaacactgaatgctagcctgtgaaag

SEQ ID NO: 478902 - DNA, 1017 bp, Homo sapiens
ctgccagcatgctgtcacctctcagtttcttctgaaggctctagagatatgcggaagtttgaacttgagggagatgatttagggtatctggctgaagaaattcctcagcagcaaagcattcaaaaggttacttgggtgctattaaatgcattccattttaaaagggaaacagagcgtaaaagttcagaaaatttgcagcctgatgatgcagtggaaaagaaaaatctattttttgaggagaaattcaagctggctgcagaaatttccataagcaacaaggagccgaatgttaatccacaagacaacggggaaaacgtctccagagcatgtcacaggtcttcatggcagcccttcccctcacagacccagaatcctaggaggaaatatggttttgtaggcgggacccagggtccccatgctgtgtgcctagggacttggtgccctgcatcccagctgctccagccattgctgaaaggggtcaaggtacagcttggttcatggtttcaggggtttcaagccccagaccttggcagcttcaacgtggtgttgatcctgtgggtgcacagaagtcaagaattgaggcttgggagcctccacccagatttcagaagatgtatggaaatgcctggatgcccaggggacagttttctgcaggggcagggccctcttggagaatctctgctaggtcagtgtggaagggaaatgtggggtcagagcccccacagagtctccactggggcactgcctagtggagctgtgagaaaagggccagtgtcctccagaccccacaatggtagattctctgacagcttgcactgtgcacctggaaaagccgcagacgctcaacgccatcccatgaaagcagccagggggaggctgtaccctgcaaagccacaggggcggagctgtccaagaccatgggaacctatctcttacatcagcataacctggatgtgagacatggagtcaaaggagatcactttggagcttttaaattttactgccctgctggatttc

SEQ ID NO: 478903 - DNA, 590 bp, Homo sapiens
gactggtgtatttacaatctcttagctagacataaatgttctacaagtccccaccagactcaggagcccagctggcttcatccagtggatcccgcacaggagctgcaggtggagctgcctgccagtccctctccatgcgcccacactcctcagcccttgggagcccacggagggtggaggctaaggaatggcgggctgcaggtcccgagccctgccccacggggaggcagctaaggcccggcgagaagtcgagcacagcagctgctggcccaggtgttaagcccctcactgcccgggcatgcaaggctggtcggcagctcctagtgcggggccaccaagcccacgcccacccagaactccagccggcaggcaagcagcatgcctgtgggctgaagggctcctcaagtgccgccaaagtgggagcccaggcaaaagaggcgctgaaagtgagcgagggctgtgagggctgccagcatgctgtcacctctcataaggagtgattaatctgagcttctccagaaagtccattcctgtgtttcctgagcacctactatgtgctgccccctgtgagagctgttagggttgaaata

SEQ ID NO: 478904 - DNA, 970 bp, Homo sapiens
aattgactgagttgtgtccatgtgggcagtgcaggaaagggtgcaatgggaggcggctccagggacgtctttggcttccatcatgggggagcaagcgcctggattatccaccctaacaaatctggacaaaggaaaacgaggttctctgaggaaggagacatagagcccaaggagctaaccaagagactaatagtcatcctgtcttcccggcgtgtggacctggggacccaccagaagggcccgatgtggagtctcacggagcgtcggcggaaggcgcacaggatgctaaagctttacaacggcctttgggaaggggaggctgtgggactccccacagggcccgaccccctggaccccactgatctgaacggggcgcacttcgacccggaagtttacctagacaagctgcctagagagtgccctctggcccagctgatggacagtgagacagacatggtgcagcagatccgggctatagacagcgacgtgcaaaccctggtatatgagaactacgataagttcatcccagccacagaaattgacaaacaacataaaactgtatgaggaattgcaggagacccagaatttcccaaataaccttgtaaaagaggagcaaagttggaagactcacacacacaaatatatatatatatatatatatatatatatataaagttgtgttttcgttcagttgtaaatgtttagtaatttctattgtgatttttcatttaactcatgagaggatgtttttaattttcctaatgtatgcttgtgtttagctatcttcttgctgttgacttctaattttgttgcattatggtcaggaaaatgtggtctggacaatgtcaatcgtatagtggattttgttgagacttctttatggcctaatatgtggccagtttttttttttttttttttttgcaaatttgccacgttgttaaaaggaatgtggattttttttttaggagag

SEQ ID NO: 478905 - DNA, 1196 bp, Homo sapiens
tatttctacatctcgcctttgtcagcccttgccaaaaccgtgaggcagcgatgtgttacctgctgacagcatgatgcgaggcaaggtccagccattccgcccggcatacgagcttatggagcagccccctttgaaggtctccaggtggacttcacagagatgccaaagtgtggaggtaacaaaggatccagaactgcaaccggtcctcgctttgctctccctgtccctgtccatgtatctggtcacggtgatgaggaacctgctcagcatcctgactgtcagctctgtctctcccctccacacccccatgtacttcttcctctccaacctgtgctgggctgacatcggtttcacctcggccacggttcccacgatgattgtggacatgcagtcgcatagcagagtcatccctcatgcgggctgcctgacgcagatgtatttcttggtcttttttgcatgtatagaaggcatgctcctgactgtgatggcctatgactgctttgtagccatctgtcgccctctgcactacccagtcatcgtgaatcctcacctctgtgtcttcttcgttttggtgtccttttttcttagcctgttggattcccagctgcacagttgaattgtgttacaattcaacatcatcaagaatgtggaaatctctaattttgtctgtgacccctctcaacttctcaaacttgcctgttctgacagcgtcatcaatatcattttcatatatttcgatagtactatgtttgcttttcttcccatttcagggatcctatggcttactataaaatcgtcccctccattctaaggatttcatcgtcagatgggaagtataaatccttctccacctgtgcctctcacctagcagttgtttgctgatttgatggaacaggcattggcatgtacctgacttcagctgtgtcaccaccccccaggaatggtgtggtggcgtcagtgatgtacgctgtggtcacccccatgctgaaccttttcatctatagcctgagaaacaggaacatacaaagtgccctgcggaggctgcgcagcagaacagtcgaatctcatgatctgttccatcgtttttcttgtgtggaaataacttctcacctatatgttcaaatgattttccacatgagtgctaagaaagctcaatggtggaaaagcagccttttcaataaatggtgttggagaaa

SEQ ID NO: 478906 - DNA, 1015 bp, Homo sapiens
ttaaaacatccagaggtggaaattggtggctatgctcatggccattggtggcattgaagcatggagccagcgcaggtggcttttggcactggctggtgcactctacatggacctgagggcagcacaggtgaaggactcggttgagatagcagaggccagccaagtggaggaggtcgctgatgtactagaggagacctgggtggagaaggtggctgaagtcccaaggccacgagtggagactattgaagtaccagaggagactcatgtgaaagtggtaggggaggggccagaggccacccagctgcaggaggtggatgaggtctcagaagacaggcagctgcaggaggtggatgaggtcccagaggacaggcagctgcaggaggtggatgaggtctcagaggacaaagagcttcgggaagtggtcgaggtcccagaggacagagagttgtaggagatagttgaggtcccagaggacactccagtggaggaggtgcttcagttcccagagggcagtcgagtggaggaggttgatgaggtcccagagggcacttgagtgcaggaggtggttgaggtcccagaggaaactttaataagaaggttgttgaggttccagaggacactcaactggaggaggtggttgaggtcccagaggacactcaactggaggaggtggttgaggtcccagaggacacttgagtggaggtggttgaggtcccagaggacactcaagtgcagtaggtagttgaagtcccagaggacactagagtggaggagatgattgaagttccaggggacactcgagtggaggacattgctgaggtccattaggaaacttgagtggaggaggtatctgagttctcagtaaaacttcagctggagaaggtgtttcaggtcccagaggatgttcgagtggaggatgtatcagaggtcccagaaaaccttcagttgcagagagtggttgaggtcccagaggacacggaggtggagggggtggctggcagcccatcaatggtcc

SEQ ID NO: 478907 - DNA, 835 bp, Homo sapiens
aggagatctgtgcttaggaaaggtcttccgaatgttaactcaacaggatttaattataagttttactttggagcagttcaaacccgcagtaagctatgggtgttagagatagtcaggcgtctgatttagctagagtcttctttagagtaggattagccctttcacctttccagaggactgcggtctgcatacagagtgaagagactggtgccgccgcgggtcctccatatggtaagcgccgatgccctgggcccactttttctctatactttgtctctgagactcttcacaagtctcttgttccacctgaggagaaacgcccacagaatggcttcacgactctaaaagacagcccacttgccaggtgtcagctgattgattctgtgtggattgttttccttggagtgagggtcttgtcttggtgtccgttcatggtgttgctgaaagatgttgctggaaaagagggtcctgatacagaccacaaagtaggattcttagatcttgtgcagtaaaaaatttgaggctgtacagaaagcatagcactggcttctgcttctggggaagcctctgaaaactgacaaggtgaaaaataaatccggtgcttgcacatcacatgttttcagtctggtcctacagacttttttattaaggctttaattttgttaattgttattgatctgttcaggttttaggtttttttcctagttaaatcttgtgaaggtgatttctcttgaattataatctaatttcttgctttttactttttgtacatctttggtacaccttttgatttgaaattcccatgaggtttgaaaataatataatacatgatttt

SEQ ID NO: 478908 - DNA, 573 bp, Homo sapiens
caacgataagagctactgtataatgattgcggttctgcaaacagcaggctttccatatcacatgtggcaagctctgatgacaaccctgtgtgacagccagagaccaagatttctgcagtgccttggctggggcccacagataagcatggccaagcagtgctcccagaagccagcagatgccatcaatcagttttacatcctccaggcactgagaatctctggacaccagaagtgtcctctgttgccagagctgaactctcaagtgaaaactccagaaggccctgaaatgtgggcaggctcccattattgcctgtctggccacaaggacacagactctttccatggctgcctactctgctacaattgcatttctggcaggcagtggatcagagaagcaccggcagttgaggaccgtgtggagaaccactgctggccaagcattcccaacctgacagcagaacaggagtacagcagtgctgaggtgaacttgacagagaactttgagaccatgaaggcaaccaacacttccaactcatcacaacctgcctctcccatagatttattgtagaagaa

SEQ ID NO: 478909 - DNA, 475 bp, Homo sapiens
gcccgtgctgccttgagtttctctgacttccctggctttgggaatgcatttagagcctcctggccaggttgcagcctggattctatccatggaggccatggcaaaggtcaagtgtaagaaaattatattggaggccgtgcccagtggctcctgcctgtcatcccagcacttagggaggccgagtgttggaggtgaggccaggtggaagtgtttgggtatcatgctgaaatctcgccccagtgttggaggtgaagccggctgcatggaggtgtttgagtctcatgcagaaatctggtccccagtattggtgtgttggaggtgggtctgggtgagggtatttgggcctcatgctgaaatctggtccccagtgttggtggtgaagctggatggaggtgttcgggtctcatgctgaaatctggtcccagtgatggaggtggggctgggtgaggggtttgggtctcatgctgaaatctgg

SEQ ID NO: 478910 - DNA, 1069 bp, Homo sapiens
cttataatcaagtgaattatattgaaaacaaagagagaatatttacaccatggaaatcagcaaaagttacaaatcaaggtcctctttctccttcattaaacatttaccagccaaccatgggctaagatacatcaaggtttatggtaattgggcctctagactcctgaatgccaaggctggttctccttcatgccagcatgaacttgggcagaaggcagaatggtgtctagagaatggagataatagaaatcaggagaatgatattctgaagtatgttttccggtttgattccattctccccatctctttcagtcaggaggaacaggatcagggaccacttaaagaagcagtctggctgctttttgatagagcaggtgtgctgcactgggactggggggcccttcctcgtctggaccatttggactctccaaagctggcaggctgtgtctgcataaccctggctggagctggagtgcctgaaaccccgacagagaggtcccacccagaacctggtcctgtctcaggcagactccagcctgttgctgttggctggctggaattccaagccagtatgaggtgccgtggaagtgggacctgcagaatgacgctgcttggcttcctggattcagcccccttcctaggggtacgaacaggtcacttgctcaaggtcacagaaccaagtagttgatagtgagttgaacccaagtagtcttatgccagagctcaacatgcttaatcactatactagagtttacatatcatgtcaagggtacatgctattaacatgacttaccattgttgattttcacttgcattggattttaaaatgaatcttatataaaactctatttttaattgtataaactatataatggaggataaacttacaaatatattctcctaatcctaagggaccctgtaccgttttagttattacgtggattaaatgcatgaagatgtatgagattttaagtcaatgggttaactattataagcatgataaataagtttaatttctcataacaaatataaggtgagttcttagtctgttttatgctgctattctgtg

SEQ ID NO: 478911 - DNA, 459 bp, Homo sapiens
gaagaccaaaatctatgaagatggggagaaaccagcacaaaaaggctgaaaattccaaaaaccagaatgcctcttctcctccaaaggatcacaactcctcgccagcaaggaaacaaaactggacagagaatgagtttgacaaatcgacagaagtaggcttcagaaggtggataataaactcctccaagctaaaggagtgtgttctaacccaatgcaaggaagctaagaaccttgaaaaaagtttagagaagaacctaaatgacctgatggagctgcaaaacacagcaccagaacttcgtgaagcatacacaagtatcaatagccaaatcgatcaagaggaagaaaggatatcagagattgaagatcaacttaatgaaataaagcgagaagacaagattagagaaaaaagaatgaaaggagtgaacaaagcctccaagaaatatgggactatgtgaaaag

SEQ ID NO: 478912 - DNA, 1031 bp, Homo sapiens
tcagagtgccagcagggatgtggcttttaagttgaagcctgaaatgtcggaaattgtggaccagatgattaatgggaggaagtgggttttagaagaaagaaagaatatgtatgaaggccccccaggatggaaagaactttgtatgttcaaggaacatacagaggagggacctacatatagggacaaagggcaggtggtgctggatgaggctggacaagtgaataagcacagccacacccagcttcgtagatgctgggatagaagtgtaattcatatcaactcattggctctccagtttatagttgtttcttctcatgtaatggcccctgtaacgcagtggccagatttcctcgttgtccttgtgcccatggccacagttgattctaaggcagttgttctcaaacaggagtgtgcatcagaatctccttgttacaatagagttctggatcccatcaccagtgtgtctgacgcagcaggtctagggtggagcttgagaagtttcatttcaataagttcccaggacaaaaagaagggtagaagggatgataagaatattgaaaataagaaagcagataggcaactgttccaactggcttctgtagacctgggaattctgagctgtaagcagcagaagctggagagcgaggggatttgcacaccagagccccagaaaagttctggattctggaacttctgaatgagtcgacttaaatattcatggacctttattcctctatgtaagtttttagaatatttccatttttcagctcttctgtatctattattattttaaagttttcctcatggaagtcttagactcaaggataatactgagtgcctaatgtaatgtgaagttctatgtagaggcttaatgatagcgttactcatttatagggattaaacagaatgtccacaaagaactggttgaaaataggctgcaaaaatggtacagaagatatgtgttcttagttactcaagttttatgcattcactagactgtaagattcaggtgggggtgggctgtatgcttg

SEQ ID NO: 478913 - DNA, 682 bp, Homo sapiens
tctctcctaaagaggaaaccagacctgcccttcctcaggtcataagatgggtgctgctcctccagccatcacaattattttccggtgcaaagaagggcaggaccaaaagccagaggggacatttcgtttcagagaagttaaccatgacctctactcattgaatattacctacaactcaccgggcagaactggatcttacaactacttctattttcaaggatgttggcgtgtgcacgtgcatgttttatccaaggagctgaagcctctgctccctcttcctagatgcctccagtcagaagtaccttctttacccctgagcacccagctcttcactcaaagctcaacctggtgctcaggtcggttggcttttcccttttccgtggtcgcctatgagtctgtccccccgtcccacccccatctagtagactacagccacttgctactaacagagatagtttcaggtgctacatagtgtggctattagtaacatggaaatatattctatttgcactgtggagatcctatcagttctatattaaattgagtgtgatgcatgactgtacttttttcctctgaattcccttccatttttccccaacatcctttttttaaaatggaaatttttattgagataattataaattcacatgcaattatgagaaataatagagatcaataataa

SEQ ID NO: 478914 - DNA, 648 bp, Homo sapiens
ctgtgacttgcacgcatacacccagatggcctgaagtaactgaattaatcacaaaagaagtgaatatgccctgccctaccttaactgatgacattccaccacaaaagaagtgtaaatggccggtccttgccttaagtgatgacattaccttggattgggaaaaacaaaatgctctccctcagcccgggttgctcatatccccagtggaaagaatttatggaaagcttggcatggctcctactttgattggctcagaagtcaagcatggccccattatatctacagagaggagtgatgagctgtgtgctgctggactaaagcccaagcgggctagccaagccagagcagtacccaccacactggccctggagcaggaccaatgcatgaatatcctccctagtctacctctgggtgctaatgtttccaatgagattgggaggcctgggcccgtctactggaggaatggatctcaggctttcaaactggctgcagaactaactttacatatatctgacttccctgacttattagagcctgctgaccctgggagatgacagctttggttggatggatgaaggtggggtgagaatgattaataaccagagtttctctggaatcaacattcatggcagaagataagtactaatc

SEQ ID NO: 478915 - DNA, 604 bp, Homo sapiens
cagtgttgagggtggtgacgaggaggtttgcgtttcaaaaaaggccattctgtctggtgtatggtgcatcgtctgataggagcacgtggacacgaggaggccagtccttctcatatccacaccagggcagggctgaggtgctccaaaggcccagaatatccattgccacctattgatgcagcacaaggtgagagcaatgaaactggtggaaaaaacttgccaaaagagtctttagcagctgggagtgggggtggctgttggagatccacttcctgccatgatgggggaaggcacgtgtgtcctctgggcccaggcaaggcagcagccatcaggcatcttgaaagggactgtgcacaaaactgcctgcgggtgaggaaacctaatggagacagtccgtgtgaggtagagggatggattgtggggctgaggtgtggtcataaatatacagccagaggggtattggaatcagaggtcatcaaattagggggccctgctatgatggggctggagtcgcaaattcctaacaaccccagaggcacctcacaaaggaaagaaacagtctttgaacatctaccacattcactccagtgtcagctttaaattg

SEQ ID NO: 478916 - DNA, 659 bp, Homo sapiens
cccaggtgaaataaacagccatgttgctcacacaaagcctgtttggtggtctcttcacacggacgcacatgaaactcactatgccaaagggaaaactcctgaatgtaaatccagactggatgatggcaaattcagtgttttttaattcattacagctggagacagaggcagaaaaatactgtgtatctatgaggagacagcacttcaggtgcatcttaaaggctagatatggtttaagggtaggcattattgaagaaagagcagaggcagaagaaattcctttaattcatgcttccacagttggtcctgattctcctcaactaacagattacagcagtcccacaaatcttcccacagggttccactcagagatgggttttaaaccgaaacctaaggcagtcaactcccaatatcgctatagattcaacgattggttcagagattatcaattgtccagttcctggagcccaatcatgatggagcatcgctacagatgtcccggggcctgtcttggtgaggaggacttctgcattgggtagcaaggcatgattgtgtatgtctatgcttcccacatctccttttaaatggctagatttagcatgaaaatttcaacttcaaatagtctccaaagacatggttggtgaccagcataatacttt

SEQ ID NO: 478917 - DNA, 1584 bp, Homo sapiens
ctgatggccgaataggaacagctccagtctacagctcccagtgtgagtgacacagaagacaggagatttctgcatttccaactgaggtactgggttcatctcactggggagtgccgaacagtgggtgcaggagactgggtgcagcgcaccatgcgtgagccgaagcagggcaaggcatcacctcacctgggaagcgcaaggggtcagggaattccctttcctagtcaaagaaaggggtgacagacggcacctagaaaatcgggtcactcccaccctaatattgtgcttttccaacgggcttaacaaatggcacaccaggagattatatcccgcacctggcttggagggtcctatgcccacggagcctcgctcattgctagcacagcagtctgagatcaaactgcgaggtggcagcaaggctgggggaggggcgcccactattgctcaggcttgagtaggtaaacaaagtggcccgaaagctcaaactgggtggagtccaacacagctcaaggaggcctgcctgcctctgtaggctccacctctgggggcggggcacagacaaacaaaagacagcaataacctttgcatacttaaatgtccctgtctgacagctttgaagagcgtagtggttctcccagcacgcagcttgagatctgagaatgggcagactgcctcctcaagtgggtccctgacccccgagtagcctaactgggaggcaccccccagtagggggctgactgacacctcacacagccgggtactcctctgagacaaaacttccagaggaacgatcaggcagcagcatttgcggttcaccaatgtacactattctgcagccaccactgctgacacccaggcaaacagggtctggagtggacctgtagcaaactccaacagagctgcagctgagggtcctgtctgttagaaggaaaactaacaaacagaaaggacatccacaccaaaaacctgtctgtacgtcaccatcatcaaagaccaaaggtagataaaactacaaagatgggaaaaaaacagagcagaaaaagtggaaactctaaaaatcagaatgcctctcctcctccaaaggaatgcagctcctcaccagcaatggaacaaagctggatggagaatgactttgacaaaatgagagaagaaggcttcagacaatcaaactactccgagctacaggaagaaattcgaaccaatgtcaaagaagttaaaagctttgaaataaaattagatgaatggataactagaataaccaaagcagagaagtccttaaaggacctgacagagctgaaaaccaaggcgcgagagccacgtgatgaatgcagaagcctcagtagccgatgcaatcaactggaagaaaggaaactctacaagccagaagagagtgggggccaatattcaacattcttaaagaaaagaattttcaacccagaatttcatatccagccaaactaagcttcataagcgaaggagaaataaaatactttacagacaagcaaatgctgagagattttgtcaccaccaggcctgccctacaagagctcctgaaggaagcactaaacatgaaaaggaacaacc

SEQ ID NO: 478918 - DNA, 2155 bp, Homo sapiens
ttttgtaggttgaagagttacagaaacatagtgctggcaattccatgcttattcctagcatgtcagttacaatggaaacaagcatgattatgagcaacatccagcgaatcattcaggtgagggtgattaagaacataccactcaggctgaaggtcttacccatcctctcttctcagaggtatgttgagcagagtaacctgatgatggagaagaggaacaactcacttcagacagccacagaaaacacacaggcaagagtattgcatgctgaacaagagaaggccaaggtgacagaggagttagcagcggccactgcacaggtctctcatctgcagctgaaaatgactgctcaccaaaaaaaggaaacagagctgcagatgcagctgacagaaagcctgaaggagacagatcttctcaggggccagctcaccaaagtgcaggcaaagctctcagagctccaagaaacctctgagcaagcacagtccaaattcaaaagtgaaaagcagaaccggaaacaactggaactcaaggtgacatccctggaggaggaactgactgaccttcgagttgagaaggagtccttggaaaagaacctctcagaaaggaaaaagaagtcagctcaagagcgttctcaggccgaggaggagatagatgaaattcgcaagtcataccaggaggaattggacaaacttcgacagctcttgaaaaagactcgagtgtccacagaccaagcagctgcagagcagctgtctttagtacaggctgagctacagacccagtgggaagcaaaatgtgaacatttgttggcctccgccaaggatgagcacctgcagcagtaccaggaggtgtgcgcacagagagatgcctaccagcagaagctggtacaacttcaggaaaaggcccaaatcacagctctcaccaagcaaaatgaacagcacatcaaggaactagagaagaacaagtcccagatgtctggggttgaagctgctgcatctgacccctcagagaaggtcaagaagatcatgaaccaggtgttccagtccttacggagagagtttgagctggaggaatcttacaatggcaggaccattctgggaaccatcatgaatacgatcaagctgttaaaccaacaggagcaagagaaggaagagagcagcagtgaagaagaagaagaaaaagcagaagagcggccacgaagaccttcccaggagcagtcagcctcagccagttctgggcagcctcaagcacccctgaatagggagaggccagagtcccccatggtgccctcagagcaggtggtcgaggaagctgtcccgttgcctcctcaggccctcaccacttcccaggatggacacagaaggaaaggggactcagaagctgaggcactctcagagataaaagatggttcccttccacccgaactgtcttgcatcccatcccacagagttctagggcccccgacttcaattccacctgagcccctaggccctgtatccatggactctgagtgtgaggagtcacttgctgccagcccaatggcagctaagcccgacaacccatcaggaaaggtctgtgtcagggaagtagcaccagatggcccactacaagaaagctccacaagactgtccctgacttcagaccccgaggagggggacccactggccttagggcctgaaagcccaggagagcctcagcctccacagctcaagaaagatgatgtcactagctccaccggtccccacaaggagctgtcaagcacagaggcaggttccacagttgcaggagcagccctcagacccagccatcattcccagcgttccagtctctctggggatgaagaggatgaactgtttaaaggggcaactctgaaagctctgaggcccaaagcacagcctgaggaggaggatgaagacgaggtgagcatgaagggacgcccgcccccaacgcccctttttggagatgatgatgatgacgatgacattgactggctgggatgaagacccaggaaactggtgcaaaggtttctctgcaacccttccctaagcatgattttgcacagccaaccctgggtctaggcgaaccacagggtgaggtcaagactttttaatctcttcattaactctcagactgacctgggagccctcctctacctgaa

SEQ ID NO: 478919 - DNA, 598 bp, Homo sapiens
ctcaccacagataactaccctgtccctgaagcagtgctcagaggaacatacctggaacgctgggaatgatggctggtgggccatctggtgctacttccctgacacagacctttcctgatgggttgtcgggcttagctgccattgggctggcagcaagtgactcctcacactcagagtccatggatacagggcctaggggctcaggtggaattgaagtcgggggccctagaactctgtgggatgggatgcaagacaggcctgaggaggcaacgggacagcttcctcgaccacctgctctgagggcaccatgggggactctggcctctccctattcaggggtgcttgaggctgcccagaactggctgaggctgactgctcctgggaaggtcttcgtggccgctcttctgctttttcttcttcttcttcactgctgctctcttccttctcttgctcctgttggtttaacagctgaagagtcaccatctattcaaaagccaaggaagagatggtcactgaaaggaacacagtagccactcctaattcttattaacactactggtcatgtagtttaaatgactttgcttctttcctgttaaaa

SEQ ID NO: 478920 - DNA, 509 bp, Homo sapiens
tcctattcccagcacacagcacaggatgtggcatgcagcaggaacctcaggtacatgtgcacaatgtgcagatcaggggtccacaacccccgggacctggactggaactggtctgtggcctatttggaattgggccacacagcaggcagcgagcagtgggcaactccttatgagaatctaatgcctgatgatctgaggtggaacaatttcatccccaaatcatctccccaaccccctgtccatggaaaaattatcttccacaaaactggttcctggtcccaaaaaggttggggaccgctgttttacacagtccattcacatgtcccaaacacttccatgactttccatgaggaaggaaatgggaggccatttcagacaggaagacgtacatgggtaaaggtatggatttcctcaacgtttcttgccatttgtccatctttgacgtcaccctctcccttgttggagtggttaaggcaggataaagtccaaattctgtcacttccataaaa

SEQ ID NO: 478921 - DNA, 454 bp, Homo sapiens
taagtgacttgctcaaggtgataagaccaccaaggaatgaagcagggcttgacacccctatatatgagtccagaaacctatatccttgtaccactctatctcataaatgagatgcatggccctgaaactcataagcgtggtcatgtcattcccaacaacgttgtgcgtttcacccagagaaggggccgtattcctacatggaccacaccccctgtgtcacctgcctccattgcctctctgaccttatcttctaccatctttcctgtcacttgcttcccttcagcaacactgacctccttgctgttcctgggacactgcaggcatgtgcttgctgttccctctgcctggattgtccccacccccatcccatgtgtccacatgactcacctccttccctctttcaagtctttgctcgaaggtcaccttcagcaatgcctaccctgaccaccatatc

SEQ ID NO: 478922 - DNA, 891 bp, Homo sapiens
ttcaaggatcaaacaacttttttgatgagggaagtgttatttctactcagccaagacatcaaagcctgtgaatcgtgctttttaggtccccagtgtgaacgtttcctggaggacctggtagctaaggcagtgccaggaaaagtacagccactgccaaatagtctggtgcagcttagtgtgtccggggcaaatggaccaccttgtatctttgagtgccagctatgtctttgggatcagtggtctcaaggctgggctgagcaggagtgcaatgcacttgtcaggcagctggagttccatgagccagacttcgtggcaaagtttgaccaagcagtggctgctacagctgattatccaactttggtcactggaggctcctgtgtccctttgacataccctattattggggggcattgctttattgtttttatttttgtttttcagtatttacaagatgctccaggacacagcaggaaggtgtcatctgtgagtcagaaaatgggccctgaccagacattgaatctgccctgatcttggccttcccagcctccggaactgtgagaaataaatttctattgtttccaagctacctagcttatggtattttgttacagcagcctgaagggactaagacaacccccttggacagctggtacaaaaactgagaatatttagtctctctagcttcagtttccttatctataaaatggggatagactttgtgttggggaggccaaaagaaaaaaaaaagacaacttttgctaaaaatagcatagcttgattcatcatcattttagacaaatatgtaatgaaacaggaagtaactttgaaagccctcttaactacactgatatacatgtgttttaactatggtgggggaggatgctagatctg

SEQ ID NO: 478923 - DNA, 595 bp, Homo sapiens
gcagtcttctctcactatggctggagcattctgctgggccattctctgctccttcctgttcctgctgcatgatgaccatgtcaccatccgcacccacattcaaggtcagcggggtggaaccactcttctcagctgcaagggaatcctgctcagtctatgtagtgagcttattccgccttctctccctcaccccagggatgagcttaaggttattagaactgggtttctgtcccatgaaacccaaagaatcctgatgtatacagctagtaaagggcagagtgtgagttttaaatcaggcctatgtgattccaaagttgtcctcactccacggtccctgcatgacccctttcttgtactcgcactggctgggtggatgtttgagaggcttcaggggataagtgaagcttgcagcaggaaaattgctgccaaacctcacggagcttgagaaggctgatcagaagagcaacaagcctgaagtttagaattaggttaaagaagatttagctttattaccctgaaatatatacaatgactcagaaaacatcatattgccaggcctgcaggaattaacaactggaaaagaacagaatgaatg

SEQ ID NO: 478924 - DNA, 637 bp, Homo sapiens
gcagttgtagtagaaacagaagatgaagattacacctgaggttgtggaaaaggaagattactcagagattatagggagcatgggtgaggcacttgaagaagaactggattccatggcaaaacatgaatccagggaagataaaatttttcagaagttcaaaactcagatagcccttgaaccagaacagattctcagatatggcagagaaaaggatattccagagaatatcctttgtgatgccaagaaaatgtttgaattccaggttatgcctcagctcctaaactacctgaaggctgacagactgagcgagagcattgactggggcatcctggctgtcttcacctgggctgagagctgcataccggctatacagaataatttgtgtggaagcaggatgtaacagatacactgtaaaggcatcttagagccttaaaaaaagttaataatcttttataccttgcaattccatttctgggacgtcatcctaaggaaatacttataccaaaaatagaggtgcagagatgttgagacattgcttacacagtgtcttcatattagtgaaacaaaagtgtccagtgacagggaattaaatacattttggtacatccacagtggaaggctacacagtcttaattat

SEQ ID NO: 478925 - DNA, 1520 bp, Homo sapiens
ttttatgtgaaatgccagtgaagcggctgtttctgcctatccttgccaaattaaaatatatatatgtatttctaaataaaagtttgaaaaactggtcctacagtaagacaagaggggttaaaggggtcgtctctgcttccctggacacgaagtcaaaatggtcagcataccatcctctcagtgcagcaagtactgactggagtctctgcgctcaatccaaactcagaatagagaatggaggagaagttgggaaggagttgggatcaaccagcagcaacgtacttcctcaaggagggaccttgcaggtcatggtgaagtctccagagaagcagcagatgaggggagtgaggcatagaaaagtaaaatggaatgtttctttcaccagtaattggacaaactgccagcatgtgactcttgatgggatgcaccgacaaccaacagtgcttacacagaattcctgccaaaaatgcataacccaaatctaatcatgaggaaacatcagacaaatccagatcaagggacattctacagaacaactggcctgtattctgcaaaaatgtcaatgttatgaaagacaaagaaagaccaaggaactgtttcaaattaaaggagactaaagagataagtatgacaactaaatgcaaaaagtgatcttgaaccattttttttttttggctcctggatcagagtgggaaaaaaattactataaaggacattttggggacaattggtgaaatttgaatatagttgtatattagagaatagtatgtattcattttaaatttctggattgatcatcattttctggttgtgtaaaatcttctcactcttagaaagtacacacttttgatggaaaggcacatgattatctgcaactctcgaaaaatatatatacatatgtatatgtctgtatgcatacatatattatatatataagataaagcaattatatgtgactgaatatgaattggcaaatttgaacaaagggtatgcaaaaggtctttgtcctattcttgcaactgttctataattttgaaattatttcaaaataacaagttaacaaaagtgaaatatttaatatgtttgaaaaagctagaagcctacactgaaactattttcattggaatggaatcttttcattgtatattcaacggaaaaaaatttgattcattgatcagtggcttgtcaacatcaaaatttgctgattatctttcttcgtaacatgaatatgttcttttgtagctgttattcccatgaggtccaattttcctaggcaaattttatgatctcaattttgtcatgcagatgtagggtcttcccatccatgtttagtcaatatttactggacgcagtgttagtctttgtgttttattttctgttgcttatttctaccaggctgaataatatttcattgtatggctataccccatgtcatttatccattcatccattgatggatacttgggttgcttctaccttttacctattgtgaataatgttgctatgaatattcatgtata

SEQ ID NO: 478926 - DNA, 758 bp, Homo sapiens
tcttccctcgggatggatgcagttggtatcagatgttcaccactctttgtggtccagacatctgcctgggttctcctggaggcctggagaaagccagtggtttgaggcttacagagtcacctgaacaatatgtcctgaatccttcagcacagccactaccctgtgcaggtcatcgtctgcaggtcatcgtccgcaggtcgttgtctgcaggctttctccttgtggcaggtctaccagcatttggatcatgtcggtggacgttctatgtatccactactgatgggaaacttcctggtgaaggagagatgaactttgctatgaggacatccaccaccatgctcgtcatccagcatccgcatgcaagctgggtggggtgggagctcaaagttggtcaaagacaagactttaatgctctcaacttttagttcattccttcatttgttcaattaattcaattgttcattcacctatatacttcttccttcattcagtcattctttcaacaaacactggttcaagagagaagaacttttcaaacttgaatgtgcacaaatcacctgtggactttgttcaaatgcaggttctgattcagcagatctggggtggggttgagaatctgcatttctcaagagattccagggcttagcagaatgttcacaaggagtgggtaataggcattcttacatactcctgatgggagacgctacctatgaagtctttttgataggtgctggcaaaaagtatcaataatagcctct

SEQ ID NO: 478927 - DNA, 1367 bp, Homo sapiens
ctggaatgacagtcaggtccaggacacagggaagcccaggggacaagggaaccataaaggaaatgcctcaattcatcccaggtttaagagatggcttcctggctgggacctggcaaagcagagattcacgttttccagctacagtcttaagttcatctagaaaacaaccctgcccagagaactgtgctggacctccaacatctgtggttcaagaaggcaacgctacagggaaagactggcagagtggaggctccatgtcctttccacagatcttctgttgttgccgcaagaccagcgaggggtcttccaccactgttggcttccacaatccaagaatgttcgaacagcatcatccacggtccttcaatctgaacacaaattctctccacagtgctgtaccaaaaagacatccacgcctcccctatgacaaccgcatgatgctcaaggcgtgcatccttaggaggccatgagcattctagccggcggcacccacgtggtccctgcggctgcacagctgctgggcttccatgaggaagagggcagtggacaagagtcatgaagactgattcagaaactcccctgcaggaggagaagacgtctgagccatccctgtgccaccaccaagagtcactccagcttctgaaaaagccaccgtgggggggagccgcctccaattaaagtccttggtcacatcagaggaagtgtctctcctccttccccctttgccagccctacctctgagattcccaaaaacatggagcaattagaccctggcacctcttggaaagaaatgtggttttgtcattttaacgcattaacacatttgtttcagtcactcctaaccaacctaacagggaagtgctatattaggagaggccagtttgtataacaggccactgtcataaacgtccagagcttcagggcacaattctgcttgcctactgtgcgactccatttgacgctcagggccatagggaacagcagggcatgttgtgaaaaactctacaaacagcagccctagagttatgcaatgcgtagccagtgctgatacgcagcaccgcttgtgctgaaacacggagtatgcaactatcctcttccaagtgcttcataaatatcaacccaatcagcacaataacccaacaaggttagaactgttactacctgattttacagattagggaagtgagacacaggttaaataaatcttttaaggtttacactaactcacattaagtgccagagctaagactttaactcaagaaacccaactgcagagtccacactcttaacaacttggttatgcggcccctcgataatggtagaatgacattcagttattactctggaccccaaatttactgttcatc

SEQ ID NO: 478928 - DNA, 694 bp, Homo sapiens
tggggaattggaggaattgaagacagagttggtgatgagggttgtgggtggacaggagggaagaaggatgattagattacagagtatcttaagacccagggactgtcaggagccctatgccatcaatgactccaaggttcccagtcaaacccaggagcacaagccatcgacccaaaatttgctgcttcagaaggatgagcttgacagacaaaatcccaagcgcattaacgcagtctcccatttgccttcgagaacacccctgatccagacaaaaaagagcacttcctccagcagcagtgagtttgaggatctgaatgcatatgcttcccaaagaaatttttacaagagaaacttaaaccgctactgccaggagcactggccattccagccatgcctcactgggaggccctgagcattctagccggcggctgcacagctgctggggcatctccatgaggaagagggcggtggacaggagtcatgaagactaattcggaaactcccctgaaggaggagaagacatctgagccatccttgtgccaccaagcaagagtcactccagctcctaaaaagccaccatgggaagagctgcctccaattaaagttcttgattgcaccagaggatgtgtccttctcttttcctttcccccttaccaactaatgtcttattatttttaaatatattgtcacatct

SEQ ID NO: 478929 - DNA, 742 bp, Homo sapiens
agttgttacactgggatcctaatgaaccccaatgttagccctacttgactcacgagattctggtaatgggtcactgataaagcccagggagaaacagatgagagaagaaagagggctgtgtggttcccatagaacttggagatgatgctaccttatcctgaagccgggattacttccttctttctctctaccagttcctctgttctctcgttctttagcagaagacttgatgacctatttaatctagagtctggatcatcagcaattaaaacaagccaaaaaagaaaaaagatcatttccttttccttaagcggtcaggagcgctcagccttcaaactgcataatacagttggggcaaaaattgtggcagcctcactctgggaaggaggtggtcttctggcaaaagaagatatcaaagttcttccatcagaggagatccttatcagcaagacattcactctgagatccaatggggggagaagtacaaagaggtatctagaaaggaatgaagacaggataccaagaagacttctaggcatccatgaaaggcagacttgatatatcctgccagctataaaatacacatgttgagtcataaagcaaagcaccaggagatttctagaagtgttcctagaggagcactcccatgtaagtattggttatcatcatcacaatcatcatcaatcaatcatcatcatcattatcttcattatcatttctaatgattcctggtgataccctg

SEQ ID NO: 478930 - DNA, 2543 bp, Homo sapiens
caggctgtgtgaccttcggaccctgccccgcttaggctctgccctgtctcatcccagcccaacagcatggtggtggaacaccccgagttcctcaaggcagggaaggagcctggcctgcagatctggcgtgtggagaagttcgatctggtgcccgtgcccaccaacctttatggagacttcttcacgggcgacgcctacgtcatcctgaagacagtgcagctgaggaacggaaatctgcagtatgacctccactactggctgggcaatgagtgcagccaggatgagagcggggcggccgccatctttaccgtgcagctggatgactacctgaacggccgggccgtgcagcaccgtgaggtccagggcttcgagtcggccaccttcctaggctacttcaagtctggcctgaagtacaagaaaggaggtgtggcatcaggattcaagcacgtggtacccaacgaggtggtggtgcagagactcttccaggtcaaagggcggcgtgtggtccgtgccaccgaggtacctgtgtcctgggagagcttcaacaatggcgactgcttcatcctggacctgggcaacaacatccaccagtggtgtggttccaacagcaatcggtatgaaagactgaaggccacacaggtgtccaagggcatccgggacaacgagcggagtggccgggcccgagtgcacgtgtctgaggagggcactgagcccgaggcgatgctccaggtgctgggccccaagccggctctgcctgcaggtaccgaggacaccgccaaggaggatgcggccaaccgcaagctggccaagctctacaaggtctccaatggtgcagggaccatgtccgtctccctcgtggctgatgagaaccccttcgcccagggggccctgaagtcagaggactgcttcatcctggaccacggcaaagatgggaaaatctttgtctggaaaggcaagcaggcaaacacggaggagaggaaggctgccctcaaaacagcctctgacttcatcaccaagatggactaccccaagcagactcaggtctcggtccttcctgagggcggtgagaccccactgttcaagcagttcttcaagaactggcgggacccagaccagacagatggcctgggcttgtcctacctttccagccatatcgccaacgtggagcgggtgcccttcgacgccgccaccctgcacacctccactgccatggccgcccagcacggcatggatgacgatggcacaggccagaaacagatctggagaatcgaaggttccaacaaggtgcccgtggaccctgccacatatggacagttctatggaggcgacagctacatcattctgtacaactaccgccatggtggccgccaggggcagataatctataactggcagggtgcccagtctacccaggatgaggtcgctgcatctgccatcctgactgctcagctggatgaggagctgggaggtacccctgtccagagccgtgtggtccaaggcaaggagcccgcccacctcatgagcctgtttggtgggaagcccatgatcatctacaagggcggcacctcccgcgagggcgggcagacagcccctgccagcacccgcctcttccaggtccgcgccaacagcgctggagccacccgggctgttgaggtattgcctaaggctggtgcactgaactccaacgatgcctttgttctgaaaaccccctcagccgcctacctgtgggtgggtacaggagccagcgaggcagagaagacgggggcccaggagctgctcagggtgctgcgggcccaacctgtgcaggtggcagaaggcagcgagccagatggcttctgggaggccctgggcgggaaggctgcctaccgcacatccccacggctgaaggacaagaagatggatgcccatcctcctcgcctctttgcctgctccaacaagattggacgttttgtgatcgaagaggttcctggtgagctcatgcaggaagacctggcaacggatgacgtcatgcttctggacacctgggaccaggtctttgtctgggttggaaaggattctcaagaagaagaaaagacagaagccttgacttctgctaagcggtacatcgagacggacccagccaatcgggatcggcggacgcccatcaccgtggtgaagcaaggctttgagcctccctcctttgtgggctggttccttggctgggatgatgattactggtctgtggaccccttggacagggccatggctgagctggctgcctgaggaggggcagggcccacccatgtcaccgcccctggtaacctgtattttactttcagtctcagaatttgactattccagggacctcatataagtggaatcatacaacatttgtcctctgtgtgtggcttatttcacttagcagaatgttttcaagactcatctgtgttgtagcatatatcaacttttcactcctttttgtggctgagtaatattctactgcatgtctataccacatctggtttattcagccatcaatggactctttgttatttgtgcctttt

SEQ ID NO: 478931 - DNA, 710 bp, Homo sapiens
gaaccaaagcatgtacgagtgtgcatatttaaacttctcaaggacccgcggcgagactcccgtgtgccgcatgctgctgggtctccatcctgctggcagctagtgttgacctaaacctgcatgcaggggttctgctggggtgaaaatggaataagctgcttccttcctcatgggcagggaatgcacagtgcctggattagtgtccttgtaagagacaccagaaggcttcccccacctcttcctccatacacaaagaagagatcacatgagcatgcagggaggctgtggccacctacaagccaagggcagaaacctcagaatgagatctaccttgctggcaccttgatcttggatgtccagcctctagaactgtgggagatacattgcggtgtctacgccacccagtccatggtattttgtgctggcagcctgagcttactcacacactgcatgagtaagcatacgtctccactaggtgtctgcagtactagtgataactgtaagaacttagattcaccatgcagtaatgacttgctgagtttagatttgccatccagtgatgacttgctgtgtgcctggccctgttaaacactctaatctgtatttgtttctccttttgctgtgggacattttccttccatgttcttgctgagccctggtctgcagtctgtagggaatcttgcacatcaacatgaagacaatgtgctatg

SEQ ID NO: 478932 - DNA, 1308 bp, Homo sapiens
agcagtctgcatgtttgtgggtctgcgtccatcttgagatttgaggaacagatgtgacatcccatcacttttgccatatggtctctgttagaagcaagtcactgggtcccaccctcactcaagaagaaggtatcacaaagggtgtgaataccaaatgtactggggtccttctagacgctttctactacaattataagaagaaatgcactagccccaaatcattggaaacagggtcacagggagatagagcaagttggaaagtgccttgggacttggcttccctcttttctgacaagaatcgtcttcatgaatgtgacatcacctctttgataggtggaaggaggcagggagcaggggcagatcaaggctcatgtcagcatggtcctactgaggcagccctgtcctttctgcaggcagcagcaatcagatgcaggtcttcatctccaacaggagctggaatcctggtttctgatgttggcccagagcacttctggagaaatgtgtgagggagacaagtggagaagggatgtccacagcccaccatacttagggtggtgtgcccgagtgaggtgcccgtgctctcatgttctgtaacctgtatggtattcagtaaattatgtgagacattttatactttactataaaataagctttgtgtttgatgatttttcccaactgtaggctaatggaaatattctgagcacaattcagtgctacaattttccctctcaccactgcttttgtgatgtttaataaagtttgttatgttgtattttcattttcattcaactctgtgcatctcatttcccttgagacttcctctttgacccatagattattaagaagtgtgttatttagtttattgggtcatttccaccattctttcttctacttcactgattctttcttgtgctccctccatctgctgttgagttcttccatttatttatttttttatggttactgtgtttttcagttctaagatttctatttgattcttttttacatctcttagttctttgctgggactttctattatttcatggtttttaagcttgttcataatcactcattgaagcatttttatgatgactgcctttaaatatgtgtcagagaattctaacatttctgtcatcttgacgttggaatctttttttttgtccttttgatttagtttgaaatcttcctggtgcttggtatgatgagtgattttttattgaaaactggaaatgtgggctttgtggaatgagaagttgaatcttatttaagctttctgtgttagttgtctttttattacaccactctagc

SEQ ID NO: 478933 - DNA, 474 bp, Homo sapiens
ctctgggagtcttaagactttaatgcgcacaggaaacaccccatgattgtgttaaatgcagattttattactgtgcacctcagcagacttgaggaagagtcacacagccagcaactgactgagctagatcttcaagtggctgcttccagacactgtgcccttgacccactggctcactggtggaagtttaatgacctgctctccaaacaaaaacgccctggtttgaagcatttgccaaatcctgtgatacaaatccttcaagctaccaatatgacatcactgagcagagtccgggaggaattagactgtgcatgtgagtcagagtcactagctgtggaaatggagccccttccaaaaaggcattttgatccagctcttaatgttcctcctacgttgttttggagtggtccttctcaggacagctggtgttcacttcatcctgggaagcttctttgctgctgaagtcagggaccc

SEQ ID NO: 478934 - DNA, 454 bp, Homo sapiens
ttggtctatgtctttttccaaagatgcttttgagggcttttgagtatttaaaggggacaagcaggctggaggagaaagagggaggttatggtcacataacagaattcacatgtggcaagagaaaaggagcaggcagaggaatagtccatgacatattaatcttgggctcagtgtcaggcatgctgcaccatgtggatgacagagtgcaaacaggctcagcagaagctgcctctcactgccctaccagctcatctcagagcatggggccttcggcttcactgttgtggaagagcctggcagaatgttctaggccacatgaaaatcaggctgctgcagccattcagaaggaagaagtggttgagtttttaaacctgctttcccaaatgccctgttcaagagggttagaacaaagtttcactcttgttgcccagtctggagtacaatagcacaattt

SEQ ID NO: 478935 - DNA, 587 bp, Homo sapiens
ccgaccgtgggtgcccgctgcgtgatctctatgtgatggatgcgataacctttttcttaaagtgaagagaatggttttatcacatagtttccttcggcaaaaggtgtccaatctctacagacccacaaaatctaatagatgtctttgtattcctcctcctggaacctcagaggatccagaacggcagctggtccttgctgggctgttcctgtccatgtgcctggtcacggtgctggggaacctgctcatcatcctggccgtcagccctgactcccacctccacacccccatgtacttcttcctctccaacctgtccttgcctgacatcggtttcacctccaccacggtccccaagttgattgtggacatccaatcttacagcagagtcatctcctatgcaggctgcctgactcagacgtctctctttgccatttttggaggcatggaagagagacatgctcctgagtgtgatggtctatgaccggtttgtagccatctgtcaccctctatatcattcagccgtcatgaacccctgtttctgtggctttctagttttgttgtcttttttttttctcagtcttttagac

SEQ ID NO: 478936 - DNA, 714 bp, Homo sapiens
catctgcagcttgtgagcaatgcatgaaagatgaatcacacagcagcaatgccttcagcttccagaactcttgtaggcttaatttaacctttatctcaatagttttagaaatgaagcactctttttcaaatactgcccacaattcatttttaattgctccttcaaaagcaatacttgaaaatattcccacagcaaaaaccaaatcactttttttttccttctcagaagatggagaagggaggagtcctttggcagaagggacacattcagtcagccacgtgattaaccagcgtgtaactcatgtggtcaagataatgcttgactgggattcaagttatagggagcatctaaatcacatgaaaagagttagtgagcttattgggagtcctgtggtctgggacttataccaatatcctctgcaaagatacagaattctcagtcgatagtttttccctcaaatcttgaaatatttcactccactctcttcttgctttcatggcttctgatatcattcttatttttgttgctctgtaggttttatataatgacttattttctcatctagacaattgctgatttaaataatgtttcaagctacaaacttaaagaacttaaaacatgagaagttacaagaaggcattaatatgaagaaacagagtgttgtcatttttccccttgtcaaggataggacttacattataattttatatcatc

SEQ ID NO: 478937 - DNA, 673 bp, Homo sapiens
aatgctgctatgaacgtggtgtacaagtatccatttgagtctctgttttccgatcttttggttatattactaggcaaggaattgggcagaggtgacctgcttagtgagcaggccacgttcagcaatagcagatcaaagacccgtatgtcttgtgatcttcatgaagtggctggcaaggccagagattctgatcccatcaccaccgcattcagtgctgtctctcctcctatttatctggctgcctgttgtctgcatggcctcctgctactcattgtgggtaacatcggagaccttcatctgcaggaagatagaaaaaggcaaaggagacaccaggaaagaggagcagagtggctagggcagtgcactgcagatgcatggacgaaagctcgcagcgacacaggtatggggtgtctaatcagggatgagtgtgagcagcagaatgaggagcatgctttcccagaggaagagaggaagccactggagagatgaaggatgccatggacagatacttgaaaggaaaataattgggaatgtagaaacaatgcaaacagtctgcggataatgacccacagagaatattaataaactagatagcatcatgaaatgtaatttccagcaataatatgatgatcatgtaaactataaaaataatatcatgttctaaaatggtatg

SEQ ID NO: 478938 - DNA, 1058 bp, Homo sapiens
ctggggtcaccctgcagctataccagccagcctgctgagaagattctgcatctcctaagatcattctctgcaaaatgccgctgttctcatcatcctggtccaagccaagttctgaatctgagagcgggacaccagcccgaagccaaagggatccccctcccccaccccgggcctgtctgtggcctgttaggaaccgggccgcacagcaggagaaaacctgtgggatcatctcctcccagtgtgcactgtctggtgggggtgtaattaagatgccttcctctctcttagcaaagggctgggtgaggccctcagatgctgaatggattgacacaaggacaagaggacagtgttgtgtgtgcatcagtgtcatggaagtccgcggcctatttttcaaggaagctacaaagcccccgatgcattcgacaccttttcaaggtttgttttttgccaatggactttgcaaggctccaaacatcactacttatacggagaaggcacagctctgaaccatattctttaatgctggagaacctgaagagaagtttgtctgacataattttcattgacttgtggaagcattaacaccttatctgctttgtaaatgcaaagagaagatcaacactctgctatccattctccttatcagacacttagcaaatgaaaaagccaaagatgctactgagatcatcaactgttgaagtgcttctgagcctctctgatcttcttaggatgctcggcggaatgtcaactgctagaccgccccagcctctagtcttagggtccccactggagctgtgtgataaataaggaagacagagaaagacttgcagattcaaaactgcctttgaagggctcttggacgaatgtttattcagaagtgttgaatcagattttattgtagtttgataggactactgattgcaagatacctgctagaggaccaaagaagggtttctagagatgagtcaaggaatatttagatgccggatgtctacacagttaagaagagaagtgacaatgtccccagaagagaaataatgaggcttagattttccctt

SEQ ID NO: 478939 - DNA, 527 bp, Homo sapiens
gcaactgatgcaaggcacatcctacacccttcaccacacggtggagaagatctttaggagcaaagaacaaatgatatgaatgaccacactgactgtcagcaaactgcagagctgcttaaccaagaaatagcgagactgaagcaacgcttgcagtcaaagaaggagaaggcggaaaggccagagcagggcaaggcaggaatcaaacaggccacaaatgttgcaggcagtagagaccacgtggaggatgaggacttagcagtggaggggaacaggaaagcagaacatactggttccccagcgtcccagccacaagtccctctgaagagtatggatgacaatggtgacttaggtccatccttcaaatgtcctgaaggggagattggaacagcagatgtacaattgtgggaagaattaacaaggagtaaagaacgcgtaacacaagaccaaagtctgaccagagcaggcctctctgcaggacaagggcacagccatggagggagctcctgaagctgcagctgaggcttccc

SEQ ID NO: 478940 - DNA, 671 bp, Homo sapiens
gctccggcctggcactgtcaccgccgctgcacgctcctcctactctcttcaatctctgccttctcagatgtgccaactgctgcagaggctgctgctcctgcttaaatggcgcctctgggccatggcctggttttctgattctgtaggtccggggtggggtccctggtaatgctgatgctgcttagagcaggaatccagatgagctatgccactcaggtcatgcagacaccagcagcaaatggtagtgggctattcaatcctcaggtggaagaagtggctgtaaaaagagcctcttcagccgagttcctgctttgctctcacagcttaggactctgcaagcttacacttggcccttgtgcaaatgagaagatgtcccctctcttggtggacacaacccttccctctgctcagacagtgcgtggcttgaggggcagaagaccctttgtgcaaagaacttcctggacaggtgcagacactctggatacccagctggctctgctcccctaccaggccagcatggtctgtgtgatggctcatagctccatttatgaccttagtccacagagtgccagacactgccaacaaagaggaagagccaaattctgacactggggacacaaactaagggagaaggcagcagatgtactgatcaggtgctgagcaagcaagca

SEQ ID NO: 478941 - DNA, 764 bp, Homo sapiens
gaggagagtgccatttgatgtcttcttgcatttggtttggacctactacactgaggagaccaaggtgtggcagctgcagccgagtgctagcagatgcaggagtgcttgccaccatgcagtcattcgccacagtgacagaggcaaggcggttgcagggagaacgggggcccctgctggaggagactgtgctctggagaacactggtgggagtagccagagaccctgactggaaggctccacctagtgaaaagaccctgagtgccttatccacacctccaacaagctgcagtcagcccaaggagaggagtttggactctccaaagcctgaaggatgtaatagccaagtggccaaacagcagaagtggcaccccttccacccctccctcgaggagctccatcccagggaggcaaaatgctgctatcggttgctggctgaaattccaagccattcatacaacggtgatattgcagaacccaggatctgcaatatcctgcaagtccaagaaagcctcttaattgtcttttggctgcagatcaagaaaaactttggatagtttttatcctctcagggtgaaaaaggtaatttaactagacggttagtggactcagagtatgtaggtagagacggataaagtgaaggaacagttggggttagttcagtcagagtagttttgtcatgtctttagtctgtggcttaagcttttcatttgttttttttgcaaagaatcttttaaggaggcaaattttgattcatttagtctttt

SEQ ID NO: 478942 - DNA, 655 bp, Homo sapiens
gtggcggagggcatgggcctctctcaaggcctgcaaataaaatcattctccatcctcacttggggtggccccacagcacaagagggtggcccacctgctgtgagtgtccctgcagaagccttcctgtccctgtctaatgttcctctagtggccttcctttcattcctgtggccctgtcatagctacagcgtgaacctggttggaggagcccgctcctcaacagagaggaactgcaggcttcccccgaacccgttctgctcagcagaaactgctgccgtccaccacttcctggtttgtcacagctggaggaaacctaactgtcctaaaggccacagggagcctcctgctggatttggcatcttgtggggagcccagtctactcctgtgggctttgcccatgtctcctacagggaagcctggcagggtacttgcccaccttcatccacagggccatggccagctcctcacccctagaggaagcacccatattgattagccaatgtttccattcatggaaacgacgtcttcagaaaaaaaaaaatgcctattgttctctcaggaatactagacacatacactccggtatttattccccaataaggtgaaacccaatcacacagacttttgaaagcattcagaaggaagggaagcttac

SEQ ID NO: 478943 - DNA, 795 bp, Homo sapiens
tccccgcgggaggcggtacacccccagtgatattgggcataatgtcatcctctccttccctggatattaggaacaatatcacagggtatgggaagtataaagccttctccacctgtggctctcacctggcagttgtttgcttattttatggaacaggcattggcatgtacctgacttcagctgtggcaccaccccccaggaatggtgtggtggcgtcagtgatgtacgctgtggtcacccccatgctgaaccctttcatctacagcctgagaaacagggacattcaaagcgccctgtggaggctgcgcagcagaacagtcgaatctcatgatctgttccatcctttttcttgtgtggcggatgttcccgcagttgcacttgtgggtacctgccaaaaagaattagaagccaggagtggaagagagattcgtacacccaaattcatagcagcagtattcacaacagccaaaatgtggaagcaacccaaggcctccaatgtgcaccatgcagggaggacagtggacctgttctccgtggtcatggcccagcagaggggaagggcagttcagtgagtgctgagggaccgtcgggagccttgtttgtttcctcatcctcaggacaaacaggagagtgccgtgggcagatgggaggagaccaatgtgcaaactgtcagctcagcagactgtggagtttcagttcttggttgtggtggggggtctctctcaggaatcttcttcaaaattttgcttccctcccccactggttgtccttttcatagacatctcacccacgata

SEQ ID NO: 478944 - DNA, 781 bp, Homo sapiens
tttctggatatgaggaagaatatcacaggggtgctgtacaattacttcgatattgggagtaatatcatcctctactttcctggatattgggcacaaaaacacagaagggatattacaattagtatcacagggtgtgcagccactgtgatattaggagcaacatctttctacgatattacagacaatatcacagggtggatccttttgtcttactataaaattgttccctccattctaaggatttcatcgtcagatgggaagtataaagccttctccacctgtggctctcacctggcagttgtttgcttattttatggaacaggcattggcatgtacctgacttcagctgtggcaccaccccccaggaatggtgtggtggcgtcagtgatgtacgctgtggtcacccccatgctgaaccctttcatctacagcctgagaaacagggacattcaaagcgccctgtggaggctgcgcagcagaacagtggaatcacagccatctttttatatacatgaagtccgcacttcgttttggaattccctgaaaattgacttcatggaagcaatgtacagcaggtcctccaacaccattggtgcgttcaaagatgtgtagttataatgttgcccagaaataacttctcacctatatgttcaaatgatttttcacatgagtgctaagaaagtccactggtggaaaagcagccttttcaagaaatggtgttggggaaacttgatttccacatgcagaagaatgaaggtggactctatgtcacaccaggtgc

SEQ ID NO: 478945 - DNA, 2094 bp, Homo sapiens
cgcttggtggtaggcttgggcactcagagtatccccggacaccatgggacaggccagtactaagtactcggcttatttaaactttataaaaactctccttaaagaaggaggtgtaaaagtctctactgataagttaattgcagtgtttgaggtcatagatctcctctgcccttggtttcctactgacggaactttagaactcaaagattgggatgagattggccaacaattcaaaattgctcataaagggggaaatattcctcccaccatttggtcaatctgggctttggttcactctgttctagagtccttgcagactcaggagaacaacatggagactgacccctgtttcctgtcctctgaggaggttgaggaagtcctcagttctctttcccctgaggaaactgcacagattgaggccgtcattttacagatgaacctccattctgacattcctttgaccctgccacctacaccagagcctaccgcgcccccattatcactttatgatgaacttttacatgatttaaataatctcatttccccaaaccagagaaatccaaccgaaatacattctcaacagctacctgctgtagggcccccgaccttccatctgcgcagcccgaatctggctctaaactacctttctatggagcccggtaatgaggctctcaactctgtccctgttcagccctgctgcagggccctcaactttccatctattcggcctggcaatgaggccctcaaacctgtccctctgcagcctgattatccatctctcacttttgtttctccttcagcaaatcaggctcccttgaagcctcagggtcccttgaagcctgtcccgcagttaccactgcagcctggacctcaggcccctgaaggacctgcccagcaggtaatctcacctcaacctggcttacaggttctcaattcttcctccgttcaaaatcctaacttcgtttctccttctggtctggtcactactgccgctcataagcaacaagttacatacatccctcaagatgatactcctcttatgagagccatcactcaggccagagaatatggggctcctgaggcctggcaatttcctgtaattttacaacctcctatacctgccgtccctgcagcacaaaatcagccacagcccgctgaccctgctcagcaggaggctgaccccgcggctcctcaagatctacagcctgagaatcaggtccctcagcctgagaatcaggctcctcaggcaaataatcagcccccacaactgcctgctgctgtggcacagccagttccagatttcaaagcatcagtgaagcagtacggcaccaactccccgtttgttcattccacattaaaggccctagcagaagatgcttgggataacattcagaatgatggtaaaatatgtccatcttttacggctgttacacagggacagcaggaaccctatccagactttattgcccatcttcaagatgcgacagagaaaaccatccctgatagccacggccaacgacttgttgtagaacttaaggcttatgaacaaacaaatgcagactgccaagtggctattcgccccattaaaggcaaaattccaccaggaggtgatatactcttctacattaaagcctgtgaaggcgtgggggaactctacatacagcaatggtcctggcacaagccatggccactattagaatgcctggacgattctctggcaaatgctttcaatgcggccaatcagggcattgtagaaaaaattgtccttggctttcaggctgccattcttttcaatgccaacaacaaaaccctatacagcaacaaatcttgccctccagtctgtgcccacgatgccgtaagggaaatcactgggctgctcagtgccgcgcaaaatttgacattgatggtaaccctttaaagccattcagcaactagggaaatggaaagaggggccagccccaggcccctccaaacaatggggaattcctcatatcaatagcctagacactggcccaaagaatatgcatccacagccttagttggtgttggtcaggcttcagaggtttatgaaaattccactattttacactgtac

SEQ ID NO: 478946 - DNA, 1071 bp, Homo sapiens
cctggtgtcactggaggggaaggtgagcctgctgtcactggtggggaagttgagcctggtgtctccagtggggaaggtgaggaaggtaaacctggatgtggaaggtgagcctggagtcaccagtggggaaggtggacctggtgtctccagtgggggaggtagacctggtgtctccagtgggggaggtggacctggtgtctccagtggggaaggtggacctggatggggaagtgggggaggtagacctggtgtctccagtaggggaggtagacctggtgtctccagttggggaggtggcctggtgtctccagtggggaaggtggacctggatggggaaggtgagcctggagtcactggtggggaaggtggacctggtgtcaccggtcaggaagatgagcctggtttctctggtggggaagatgaacctggtgcctctggtgcggaatgtgaacctggagtcaccagtgggggaggtgaaagtggagtcactgggttttctcctcgccttggtgataagggtccgcggataacagagcaccttgttttacagctttacaatgttctagtcagattacacagaaagggcactaatcatttctcttcctaactcacccttcaattctggaaaacagtagacaatttttaatactgttgtctctctgctatccacatttgcgtgaaaaaaaaactgcatattagtggaccctcaaagttcaaacccatgttgttaaagggtcagctgtaattccattagtaatattagctgcacctggagataaacacccggggaccctcgagttcaccggtgggggagattttcccaaactcttaccttcaagcaaatgtggagcagagcagacctctgagggaaagtcctgggtggggtttgctccatgttccttccactctcagggtgtggagcccccacaatctcccaaacctagagagagtaaactgaagcttactgtccaccaagactgaaggatgttccaccttgtaagtaactgacagtcggatgactctttagttgtcatggcaggtgctgaagggccagtgctaaactccgctcag

SEQ ID NO: 478947 - DNA, 989 bp, Homo sapiens
cctacctcaccgtaggaggagctgtgggtccagcagagagctcctttccctgctgtcccccttagatctggaactttctctagatattcatgcatactggacaaatagggcaagatctcctgctaccaagatgtacatggtccagcacatagtccagatttatgtggcctgtcgatgcacacactaacccttgctactgttagcagcagcaagagcactgactcttccttaagcatgatattctggaaaaatctacgtgatgcctgctccgatctggccatgtgacagtctggcagtgtcccctgcatctgtcccgtatccccggctttattcttgtcagtgggacatctcgatcagcctgcaagatagcactcccatcaccctacaaggaaacctcacccttatttacatcaccctcattgccctacttctctgcacccattcatggcagggcagggaggaacacccaaaagtgagtcctaatgtcctcaccatccatttcctgttttctctcgaccagacttccaccacgttctcacctccatcacccactaagattgctgtggtaggtaatgttgatggcacagtgtcaaatccagtgctgggcatggctcctggcttcattcattcctgcaccctggggcccatcagtaaggaacatcaggaatgagaaaggagttctgactgcagattggtcttgttcacctcttgttggctcaatcacgtgtgtttcattctgtgtttctttaaagcttttgttttgagattgttttacactcacagaagagctgctgaatacacagaattcctgtgtcccctttggccgccctgcccttgtgttagcattttacacttgccatcctacttcaacctcacaataaccagagggggaaaagccgttgatactcccacttcacagacaagaaaatgaaacaccccaacgcttagcagcaggtctcagttcacacaattggtaaataaaagagctt

SEQ ID NO: 478948 - DNA, 1301 bp, Homo sapiens
taaactttcccttataactgcttttgatgcatcccctttgccttctgaaggcggaccgtgcactgagaatcataccaggttgcctggtgactcgagccgaccaccttcagtggcgcttctgcggtcagaagagcagctcgcggggtcaaggaaaggctgtgatttgtgcaccctgccgcctgggagctgcagagattctctccggctgcccggtgtgtggcccaggaccacgctggtgtgcaggctgcagcacccgatggccttgtttgctttacactcagtgttgccacagagcatcctggaaccatcagataagggagccattctccgctgagcggaagctggagcagaggacggagttgtgtggtgtgtcggatgactgccccccagtgtcctggtatgagagaggagtgcaaaggggtgtgcaggatgcagccgttgcagcgggaggggagccctggggcggagggaattgtgtgaacagaggatacaggagggtggttttttcagaagcaaaacgccccagcggcagttctggagcgctgccaggtgtcagctgtttgcattgccctccgtggtacaaacgctgccgcgtggcatgtgttctctgggcgcctgggtaccccaatggtggtcgtggggtccacgctgcatcttggtgccgtgttctacctcgcgggagctgtgtctggaaggacaaatgtctgacctttgctggctcccggggccgcccgctggcccacatcgcacatgtgtataaacctctcaaaggcctcttcccaggagacttcccctctgctggacacagccaggtatcgggggctgtgagccgaacctggctacaagcctcccagctgagaaagcaagcagacttacacttcctcggctgtccggcggagcccgaagcagcaatccacctccttcaaagggtctgtggattctctcggcttttttggtatgtttctgcagtagttcttggagcaaaagtttacaatgtgggtctccacacactgccctgtccagccaagtaggagctgcaagttagtcctgcctcctatccaccatttttcttctactccagtgtgatattttgatacttgtatacaatgtgcaatgatcaaatcggggtaattagcatatccatcaaacatttattttttgagtgtgtgttgaaaacattcaaaatctgctcacctagctatttgaaaatgtgcataagctgctgtttattgtagtcaccccacagtgctgtagaaccctagaacttgttcctccaccctagctgtgcttttagatccatt

SEQ ID NO: 478949 - DNA, 552 bp, Homo sapiens
attttcaaatgcttattttccatctgctctgtctgctgggcaccccctgatgatccctgctgatggtgcctcaggattaccccagtgaaggacagtcttcaccttctcatttcaaaatacattttgcatccatccaccaactcagtgagaggccactggaggttcttcatgaccttgaccagccattccagagggtggagggggcagtatggggatgggggatggccgtgcaggagctggaagcagagatagcacagatagcatctgcagacagcactgtttggtgcataacaggtgagcacaagaacagctgttacctggatgaacctaagaacagccctattacctgggagaactctgggagactttctgtgggaatcccaggaggccctccagggccatgcctgtctgctcacagcagtgaccttgaccaggcagttcgataaccttctttcctgaacactcccaagaaaactagctgatggccgaagaagctttgcttccattcttctgtctggactgcattcccatgggcattcttggagaggacat

SEQ ID NO: 478950 - DNA, 624 bp, Homo sapiens
ttaattgagtaatgaatgatttgcgaatggggcagcttccagaatcacagcggattcagagactccagggatgcctcatggtcagaacatatttatagacaaaaaaagggaagtgacatacagaaattgcagggctgtgaaagtatgctgtatgatattacaatggtggatacacagcactatacgtttgttaaacaccatacaatatacaacaccaagagggaacatcagtgtaaacttcaggctttgggtgattatgatgtgtcaaatggtctcttcttagttctccatttaaaaggataccttatgcacctccagacctttctaccaccatatctcattcctactttctttgttgatgagctggatggactctgtgaagatgtgatcccacatactgcatctatcaatgctctccactttcaggatgttattctgttgctgttgtattgcagtgacatcaagttattttctcttggttattcaatcggttcttgagttttttaaaaaattgaatgcaggctcttatcaaattttgtagcctgtgcacttaaaaattctttcagactggattttatttttaatttgtgcatgttattttcttttaaggtttgcatagctgct

SEQ ID NO: 478951 - DNA, 1145 bp, Homo sapiens
agcagagaaaagggccacagcttagaacatgtaggaagggagcaaggtggacacctgcgcaggtgtgtgccctccggcccctgaagcatggccagcagcggcatggctgacagcgccaaccacctgcccttctttttcggcaacatcacccgggaggaggcagaagattacctggtccaggggggcatgagtgatgggctttatttgctgcgccagagccgcaactacctgggtggcttcgccctgtccgtggcccacgggaggaaggcacaccactacaccatcgagcgggagctgaatggcacctacgccatcgccggtggcaggacccatgccagccccgccgacctctgccactaccactcccaggagtctgatggcctggtctgcctcctcaagaagcccttcaaccggccccaaggggtgcagcccaagactgggccctttgaggatttgaaggaaaacctcatcagggaatatgtgaagcagacatggaacctgcaggctctggagcaggccatcatcagtcagaagcctcagctggagaagctgatcgctaccacagcccatgaaaaaatgccttggttccatggaaaaatctctcgggaagaatctgagcaaattgtcctgataggatcaaagacaaatggaaagttcctggagagtttgccagcatactggatacagtccaagtctaccatgcttccagcacggggcagggtctgcatccctgaatacaacgtctcccaagtccaggttgcctagacgttggtccagattctttcatctttagaagtgtttgtttgtgtgtttctttcatgggaaatagagctaaaaggctccagggaactcttgtaaaccatcaccagatcctgtggctgccctctcagtgtgagtgcgtcagctcctgattcactgtgggagtctgtcctatattcccctgttgggtcaggccaacgttgcaggaagtcccagacctggttttgaatcatccaaatctgccctacttgcagatagttttataaaatgcacattatttgcaacgaatagccacagcacaaggtctttggagtcagaactagattccagtcactgctggatgtcctcactgagccagctgctgtttttttcccactgttcttctc

SEQ ID NO: 478952 - DNA, 2021 bp, Homo sapiens
tgtaaggactcttccatttgcattcctgccaagttctcaaatgatgctgatgctgctggtctggggatatgtgatctttctgagcttatgcctgattgatattaatctaagatggctggttaaaatgcccaccaaacacccccacccacactccaagctaggtggtagagctgtccatcttggatctaacccaaatgcaggccctggtgaagaaaggatccgagccagagacaacaacggctcctacgccctgtgcctgctgcacgaagggaaggtgctgcactatcgcatcgacaaagacaagacagggaagctctccatccccgagggaaagaagttcgacacgctctggcagctagtcgagcattattcttataaagcagatggtttgttaagagttcttactgtcccatgtcaaaaaatcggcacacagggaaatgttaattttggaggccgtccacaacttccaggttcccatcctgcgccatcatcacccaatgactacaagaagttagatattttggaataactttttaattgactggtaagatacatacgggaaaaaaaaggcatacgccctatgtgtacaactcaattaatttccacaaaattttccaccgtggaaccagcacccaccatgaagaagcaacacaactgagcactcagatctacttgtagtttctttcggtggtttgtcttgagcttacaacttaataattccacgtgaagcatgagctagtgaatgtaacagctctaattttgtagccttcagtggaacatatttcccaaatatatttctagatccttcttcccaagtggcaggcccttccagaagccttcccaatgatcaggtgttgcccgtggtcgatctcattggcagggacaggagggggttagtggtgcgattatagaagcaaatttaagtagcatgtcatggaagggatcctgtatttgttttctgaaacatttactgttcctctttgccgttgtggtttctagacttggtcagcgggtggaataatctcaagaatcaaatcatactccttcccaaagcctggccacagaaaggtgctaaagcaacccctgcttgctgtccaactaagtggtaggaccaacgcgcactcagctcccgcccgcccagtctgccctgtgtgtgcgctgccccccatctcttgccactctgcttccaggcctctttgcccttgctcacacctgctgttcctgggcagccgcgccccaggtacatcatgtgcttttcatgtgggtcctcagtccgtcagctggaagtccaacagtgtgagcatgctttctgtgctcaagcgtcattttaaagtcgtttcagttggcgtcatccgtcatagctaattatcatgtcggaaaatcttttcaaagatggcccacttactttttggtggccagactcacgtgttgcagtgttctggtaattgattatgtaagttacgttgtgatggagggaacaccaaggttttgtgaggcgcgctgcacagtgaggtcaggcagtgcatggtaacttcattatggcttagacgtctaacatagaactgcaaatgtgacatgtaaagaagaggtgtaatctgaggtctagaaaaaccagttttctttttgaggcagtaatgttgacatctcattgatttccatgttttgttctattattggattttgagggaaaataaaaataagttctttttcatgacttttatttataatgacttatttattccttcccccaaaatatgtatatataatgtgtttgaattgctttttttccattctacttttattatcagtggggtaaaattggttcttttatcagtaattctttttattttcatattacttggtgtttttaccgacattttagcatataattgagcatccactcatgaaatagattgcctaaagtatttactagaaacaacagaaataaaagacataaaacccttgagattttatttagtaataattttccaagtttactcatactcaagaagttctcaatc

SEQ ID NO: 478953 - DNA, 1625 bp, Homo sapiens
ttaaacacacaccacaaagaagaatcgacagaagtacatagatcagcatcaacgttaaatgcaaaaactcccccactgcgagttcatttttaattcaaagtttttgcatttgtatcacaatgatttaaactctaccctcctcacccttctacaagaagggaagccttgcaaagggagctgcaggctggaccaaagaacactttcaaggctctggcaatgtcagctgtatctgaaggcaaacctgattccgcaaagcatcaaatccatggccaggatttgtgatgtcctcctgatcacaaaccacatcgattttcagctgtgtgggctctgtgtgcacagttcagtaccagggagctggagatggcggcttggggtcaccgtgctatgcacgcacaagcaggctgctgagcctggcaaaactgtactcctaattttcagtggcaatgcattttccttccttgctgagctgccctgaacatcacctaagaataatgccaggtgtactttaaaagcataacagcacctgggatccactaagcgagacttttttgaaattgcttttgtagaggaggtctttttcctgaaaatatatatatgttgttgggtatatatatgttgggtatatatatatatacacatatatgtgtgtatatatatacacatatgtgcatatgtatatatatgtatatatacacatatgtgcatatgtatatatatgtatatatgtatatatgtatatacacacatatgtgtgtatatgtatatacacacatatgtgtatatgtgtatgtacacatatgtgtatatgtgcatgtacacatgtgtatatgtgcatgtacacatatgtgtatatgtgtatatgtacatgtacacatatgtgtatatgtgtatatgtacatgtacacatatgtgtatatgtgtatatatgtacatgtacacatatgtgtatatgtgtatatatgtacatgtacacatatgtgtatatgtgtatatatgtacatgtacacatatgtgtatgtgtatgtatgtacatgtacacatatgtgtatgtgtatgtatgtacatgtacacatatgtgtatgtgtatgtatgtacatgtacacatatgtgtatgtgtgtgtatgtatatgtacacacatatgtgtatgtgtatgtatatgtacacacatatgtgtatatgtatgtatatatacacatatgtgtatgtatgcatatatacacgtatgtgtgtatgtatgtatacacgtatgtgtatgtgtgtatatatacacgtatgtgtatgtgtatatgtgtgtatatatacacgtatgtgtatatgtgtgtatatatacacgtatgtgtatgtgtatgtgtatatatacacgtatgtgtatgtgtatatgcgtgtatatatacacaaatcttccactaccctatcttttcggtagttttgtctctttttgctgcttccaagatggcttttatttccctagtggctttttttcttcattgattgtccaaagacaatctttggtttactttttagtttagtttactttttaatggtatgctgtttaatatctacagcagttttagaattggccccatgttctttgactctttgacacttctcctcaaaagggtgg

SEQ ID NO: 478954 - DNA, 2172 bp, Homo sapiens
cgcttggtggtaggcttgggcactcagagtatccccggacaccatgggacaggccagtactaagtactcggcttatttaaactttataaaaactctccttaaagaaggaggtgtaaaagtctctactgataagttaattgcagtgtttgaggtcatagatctcctctgcccttggtttcctactgacggaactttagaactcaaagattgggatgagattggccaacaattcaaaattgctcataaagggggaaatattcctcccaccatttggtcaatctgggctttggttcactctgttctagagtccttgcagactcaggagaacaacatggagactgacccctgtttcctgtcctctgaggaggttgaggaagtcctcagttctctttcccctgaggaaactgcacagattgaggccgtcattttacagatgaacctccattctgacattcctttgaccctgccacctacaccagagcctaccgcgcccccattatcactttatgatgaacttttacatgatttaaataatctcatttccccaaaccagagaaatccaaccgaaatacattctcaacagctacctgctgtagggcccccgaccttccatctgcgcagcccgaaaatggctctaaactacctttctatggagcccggtaatgaggctctcaattctgtccctgttcagccctgctgtagggccctcaaacttccacctgttcagcccggtaatgaggctctcaactctgtccctgttcagccctgctgcagggccctcaactttccatctattcggcctggcaatgaggccctcaaacctgtccctctgcagcctgattatccatctctcacttttgtttctccttcagcaaatcaggctcccttgaagcctcagggtcccttgaagcctgtcccgcagttaccactgcagcctggacctcaggcccctgaaggacctgcccagcaggtaatctcacctcaacctggcttacaggttctcaattcttcctccgttcaaaatcctaacttcgtttctccttctggtctggtcactactgccgctcataagcaacaagttacatacatccctcaagatgatactcctcttatgagagccatcactcaggccagagaatatggggctcctgaggcctggcaatttcctgtaattttacaacctcctatacctgccgtccctgcagcacaaaatcagccacagcccgctgaccctgctcagcaggaggctgaccccgcggctcctcaagatctacagcctgagaatcaggtccctcagcccgagaatcaggctcctcaggcaaataatcagcccccacaactgcctgctgctgtggcacagccagttccagatttcaaagcatcagtgaagcagtacggcaccaactccccgtttgttcattccacattaaaggccctagcagaagatgcttgggataacattcagaatgatggtaaaatatgtccatcttttacggctgttacacagggacagcaggaaccctatccagactttattgcccatcttcaagatgcgacagagaaaaccatccctgatagccacggccaacgacttgttgtagaacttaaggcttatgaacaaacaaatgcagactgccaagtggctattcgccccattaaaggcaaaattccaccaggaggtgatatactcttctacattaaagcctgtgaaggcgtgggggaactctacatacagcaatggtcctggcacaagccatggccactattagaatgcctggacgattctctggcaaatgctttcaatgcggccaatcagggcattgtagaaaaaattgtcctcggctttcaggctgccattcttttcaatgccaacaacaaaaccctatacagcaacaaatcttgccctccagtctgtgcccacgatgccgtaagggaaatcactgggctgctcagtgccgcgcaaaatttgacattgatggtaaccctttaaagccattcagcaactagggaaatggaaagaggggccagccccaggcccctccaaacaatggggaattcctcaactcacagcctttggcagccagccagatgagcactttcccagcccaatccattcaacctgccccccagttcccacttcagccatttgtaccacaggatctaacgactcag

SEQ ID NO: 478955 - DNA, 2756 bp, Homo sapiens
ttccctgagagcctggtgtaatgggtctggactggggccagagaccaggcactgaaaatctttaaaaaaagtgaatccaggtattgacaggaagccccaggtcggctgccccaccatgctagccatgcccccacctccccgggcccctgagttttgtcatgatgtagacatcactggagacgctggagctgaagttcgggccacggttgtcaaaggagagatgcacagaatttcggcagcacggaaacctgcttgtgctcatttctcccggcatgtcctccacgtctttgactcctcacaaggcggctgtacaggcactttcccatgccaggcctcactgttggcctggcatgggctcccactcagcccgtgctgttccagcgagtccttcctggggcctgaaaccttagcccatggctccttccccacatacgcacaaacccgcagcacacagagctggccctgcccatccactgacacaggaaacctgagcctcgaaagcagcccatggcgcacctcagtgctggtgcactcaccctcttcagcctcctggttcttccacggagcccagctctggagcagcagagctcagggacactgtgttcctcctgtcctcacatgctgcagcccaccaccttgccaagctgtgtctgggcacgtttctggaacctggcttggctccagcactggccctgccagctctgtgcagacaagctcccaggagacgccctgggatttcacaatgagcctcgtgtgcccagtctacccctgccccccagctgctgtccgctgcaccttcctttggtttccagaccaggtcaagacatgggatgagcctgctcagaagggatgagcctgctcagaagccctgggccacacacaagccctggccagccacagtcggtgccctatgctcaaagagccacagcgctcttgacccagctccacattgctggccgcaggcacttcatttcttgtaaattaacccttctttctctctggaaacttcaaaaacttctctttacctttgaagttccaaaataaatctttttaaaatgcattctgccatgcgttggtgggcccttttaaataggactggctatctggtctgcagaacctggtgctaaactaaaatgtggaagtcctgttcaaaaagcaagaaaaaggcataacaatactaaaatatacagctttttcctctcttccagagtctctttcttgatgtgctgcatttttcatgttatttaatgtcattccaagttaaaattttaaagtattagcatgaattttatcatttgtgcaatgctagttttaaatgcaaatacaaaagtgtttaactcacatgaggaatcactgaaattatggtttgtgttatgtggctcgagcatgcatgtgtatttcatttctaccataacagcgacaatgctgctgaaaagtagctcaactgtttgtattttacttcttgctacatgcacgtgcgccagcaccctcttatcttcagctgactaatgagggagaaagcactgaaggacaggaactctgggttgccctgtcctcatctttcctcgtatgtcatcattttcaaagttcgtggttgtcgaatactggaagtagcccaggtaagaagggatgggataggatgccttcattgttctgtttcttagaaggcctttgccttctttaggcatttgaaacaagttctggttccaacagatcgtgtgtggctttgtacggcttccatatgcccctccttctgtggtagagcacgattaccttctactcgccttcagtgtcgctgaactgcaccggaatccactggaattctgtatgcatgggccttgggagcgtgaatggagcagcaaggaacggggacacatatatcacctgtgtctctgcacatgcacacggtttgtggctccgtcggacttcacttacaaaacccaagttcaaagatcaaattatgaagcatttcaagatggcaacagatgagaatcagacaagcatagagtccttctgagcttagagccttacgtgaccacaagggccacatatccaggaagctggccctgcttttgaactggaaaagttctgatcaattttcttctatcagttatttaattattttcctccctcaagtctctctgttctctcctcctggaactcctagtaaatacataaagaaacgtctagctcccgctcgtgtcaattgtctcttacttggatttctttgtccccatgaatgacattctacaagaaccccttggtctttcagttcactaatttattcttcaatcacgtctgttttgctaggtttcattaacaatcatcttttaaatttcaaagttttatagttcttttttgtaacagcctcttcttgtttcaaggatagtttacattctctaatcttctcaaacatgttaaatatgatcacctttaaaactttaaactgctgtgtttagctgtttccttgagcagggagagttccgtttgttgaagttgaatgccactgtttcgtagcattcattttgctgacatgtttgacagctctcatctatctgattatcttcctctttgagaatccctgaccagtcatgtttctccctgctcaagtgaaataaaggcctcaaatagatcagtggttttcaactctttttagcatagataaatgttgtaaaataaaattttatttgtggaaatacagtgtgtaaatccacagtggaaaggcaataattgaggcagagatgccctgcaaccct

SEQ ID NO: 478956 - DNA, 613 bp, Homo sapiens
gactttctgccatcacaatacaagccacacacaccttgaaaactaatagtctcacacttacggcagccatgaaaaccagcagccaccataggagaatgaatgtctttgtggcatccccaaagccctattcccagaaacttctctcacctctggctgaccttaaggctctgcacaaggaggaagtgaaggctaaggccgagttgccaattgcctgtcagtgtattgaaggcatgccccaacatagagagcccttcagcaagagctggagatttactggttcaaggcatttaaggaaatctgagtccagtcaagagctgaacactaaaataaccaagcagagacttcaggaaccacacacaacaaaacacacagaattagttcaggaaatgatagccattcaggtctgctatgttaactcttttctacaaacaacataccaaaacttacaggatgctgctaaagcagtgcttagagggaaatgcatagctgcaaatgtctatattaaaaggaataaagatctcaaatcaataacttaatgtcctatgttaagaaattagaaaaataaaagcaaactaaacctaaagcaagcagaaggaaggatataataaagttt

SEQ ID NO: 478957 - DNA, 967 bp, Homo sapiens
ggcccgactcctccacgcttgtacatcccgagttccttagcatcagacacacccatgtttgcagaggagtacctgaggccgttcctacactccgcaaataagcacttcatgacaggctaccgagtgatcttctacatcatggtggacgccttcttcaagctgcctgacatagagcccagtcctcttcgaacgttcaaagcatttaaagtgggcaccgagaggtggtggctcgatggccccctggtgcatgtgaagagcctgggtgaacacatcgccagtcacatccaggacgaggtggacttcctcttcagcatggctgccaaccaggtcttccagaatgagttcggggtggagaccctgggcccgttggtggcccagctccacgcctggtggtatttcagaaacaccaagaacttcccttatgagaggaggccgacctcagcagcttgcatcccgtttggacagggagatttctattatggcaacttgatgatccaatacgtcaaggtcgcacatgattcccagaggaaattatgaattacgccatgaggtttatgacgaataaatgaatcacggcaatttcttataaatgagggaagtcttaagaccttccattttttagagacatacaaatttacatccttcccaaataaatgtttcttcttgccattttgagccatcttatttggctaatgtaggataaagaataaaaggataattacttaatgttaatacacagtaatgttattatctatgtattgtagacaatgtgaaaatacatttgacatagaatgaatatttttaatggagaaagactctagttgagaaaaaacattcataaaatggaaaagtagttcacgcaaaggaaaaaataaatgccaggccactcactgagtagtcactgtgtttttccacactgggatatgtgtggcttgtggtcgacctcgcctattgtctcagtctgttc

SEQ ID NO: 478958 - DNA, 749 bp, Homo sapiens
ggaagagttgaggagccctagaaaggaacatgagtgtcaccgagccttggggaccggccaccctatcacctttcaaggtcagccctgcactggcgcccaaggtttccaccttgagcttctatacgggagctgatgctgcgtgtctggtcgtggctctccagggacctgggatcttatctgcctttgggattccctccaagggtccctgcagctcctctgaggagcccccagcccaagcgggccccatcaggcggggcactatgagggtggggccacctcgctggtccctgcatcacctcttgactgtctgggccctacctgcttccagcgagcagtgccctggagtcgcctcctgtgacacctggcttccaggggaggggcaggggcccaggccccccgggaatggcagtggagggctggaccaccagaggccccgaccagcttgtccgaaagggtgggctgctcggagcctcctgccctgcacttggctccgttctcaaacaccccttggcacgagtgaacggctctcggtccacttcagaagaagcatcctgccggccacgcggacacgagagcctgaagcaccgatggcatttcagacctgatgcctgcgcagggacacagggacattcgggacgtgtccagctccacaccaggcccgggaacgcaggatgaggaggacagcctgggctggaggtgcaggttggggaacaggccgctgctgttggcccccacaggctttcagaccc

SEQ ID NO: 478959 - DNA, 611 bp, Homo sapiens
cagcagggagctagaagagaatggtcaaaacaaaattcaacattacgttaactcctggtaagaagtatggggcatggagttggtgaggagcacaccttcaaaagtattggtagtgttcagctctcaggcccttctgctgcaggtctgctggagtttgctgggggtccactccagaccctgtttgcctgggtatcaccagtggaggctacagaacagcaaagattgctacctactccttcctctagaagcttcgtcccagaggggcacccacaagatgccagccagagctctcctgaggcagtctataccttagcagagctcaagtgttgtgctgggagatccactgctctctttagagccagcaggcaggaatgtttaagtctgctgaagctccacccacatccgccccttccccctggtgctctgtcccagggagatgagggttttatctgtaagtccctgactgggtctgctgcctttctttcagagatgccctgcccagagaggaggaatctagacaggcggtctggctacagtggctttgctgagctacagtgggctccacccagtccaaacttccgagtggctttgtttacactatgaggggaaaa

SEQ ID NO: 478960 - DNA, 517 bp, Homo sapiens
ccactgtgtgctcggatgacgatgagctatcttctccccacttggaagcatgccttcccccaagagagcgccgggttccaccagtggcattgtagcctctgtctccctccaccatatggacctgagaacttgccttctcagcctagtcctacagagaaaggggtatcaagtgggtacagctggtcaaagggagtcactgaagatttagaaagagataaagtctatgctgggcacaactttggtgaagatcaccctggtcaagggagactaaatgaattgaaagacagcgtccagaaaatcaaccaggagatggctgcagtaagccagggtgagggagtggaaccactacaaccaaaatggtaccaaaatgatgaaagaaatgtcatcacctacacattccttcagaggggccatcctgtccttggccagcagaactgtctggcggaagagttgcacatccgtagatacttggcataaaactcacacgaagagaagatgaagaagctaataattagag

SEQ ID NO: 478961 - DNA, 799 bp, Homo sapiens
gagactggcagacggtcttctgaaccctccaccctgtgtgtccggctcgaccacactccgcttttgtttaacgaggtttgttttggaagtacttggctcagttctctctgcaagcttacgtgatccagacagacttggctcacagctcgacttagcagaaaaatgatgtaaggatgatgatgctggtaactgacagcctcaggatcagtgagacaactgggaatggtggggactggggagagatggagagcagcctcttttggactccagaattcatcagggtgactttccagagtggccctaagtatcagaacatgtggtattcatgtttgctggacagatttgacttcattgttccagaaacaagggggatgcctgggagtgatcatcttagaacatgtgaaatattagtcacgtacccatccttggcccaagatttggacctaacagccagcatgccagaaactggctgggaaaacaatcccgaatctgcttccaaacaagctaactggtgcctacagggacgaaatccagattataggccccaaccaaacccagccaacagtcagatggagatcagatgtaggcctcaagcaccttgttcctgtattggcactggcttgtttaaacttcactgtttccagagctagaaccaaccctgaactggggggtgggccatttcaatcccaggtttggaagaaggttgggtgggacaaggcatcctgaatagtatgtcacttgcagtcttccatctcattcattcccataccctgaaagtctgtgtcatttgcatctgttt

SEQ ID NO: 478962 - DNA, 984 bp, Homo sapiens
ggggcactaccggtttcgcatcttgatggtagtggtcccccgagccagctgttttctctttatctctttgaatgagtcacttctccagcaggtcagcttctccagttgcactctgtcttccttccacaggggctcttatgcagaagacgacatatgtgaacgctgtagctctccttgcagaacatgtgaaggaaacgccaccaactgccattcttgtgaaggaggccacgtcctgcaccacggagtgtgccaggaaaactgccccgagaggcacgtggctgtggagggggagcttcccacaggagagcaaggctctgctgagccaccagttgggggccgattatctgagggtggatggcaaagagctgtgggaaccagtctccctaccattcctgaaaggtatgtctctgtgcctgtcatcagagaaactgaggagtgcatgcctgagttcttcctgcacgatgatatgtgccaccagtcctgtccccgtggcttctatgcagactcgcaccactgtgtcccctgccataaagactgtctggagtgcagtggccccaaagccgacgactgcgagctctgtcttgagagttcctgggtcctctatgatggactgtgcttggaggagtgtccagcaggaacctattatgaaaagcagactaaggagtgcagagaaacacaaggactttggatccattccaatcacccagattatcctgtaatagatagtacagacacctctaaaagtcccatacctttcctgaagcactggagcagaagcagcaaggcagttgctaaggtcctgggctcaactcctgatactaattagcgcactatgtattcaaaaataaatgcaaaagggacctttatttgtcaacagacaattaaatacattccaacaattgctgtattcgtgataagctcaagcctcctttaatatgaaatgtttccacacactttctttttctttcacaatatcaatgcttt

SEQ ID NO: 478963 - DNA, 852 bp, Homo sapiens
tctcccgggtcctgcaggagcagtctgcttccttcagagagtacgtgggtcctctcaggatttctggtttgttcttgcagttgatctggagctaaaatttacaatgtgagcttccgcatgctgttctggctgctttgcgcgagattaggggcggcatgggaacctagagtgggagagattaagctgaaggaagattttgtggcttccgaggtgattgggcagtgtcagtcttcagctgctaagccgagaagatctgggaaggagtcagtcagagagccttgggccagagttccaggggttctgggagtggctgctgggagagttggacagtctgatttccaatggggtcccgcacagatgggacacggcttaggaggaatcccgggctgtgggcattccttggtctggtggccagatttctggcacttgtggcaagctcctgggggtggtgggcctggaggaacacctggccactgcagtttaggcatttggaagttcttgtgtgctggagatgtggctggggtttctctcacagtggaggcaaggaattgcaactcagaaatatgttgctacttggctgcctctactctattactgtacaccttgaaggcaaggttaattaagtcctgttatggggtttgagggctggaatgtaatttttggagttttatttaatgtcgggagtggattgggtaataaaatgtatattgagaataagatggctttttgaccttttagggtctagggctgtaaagcatctcaaggttgctgccaaaagagccatgaactgagctgggtttttatatctgataaaaaagagcctaaatgctatctgatttgggataaagaaaa

SEQ ID NO: 478964 - DNA, 841 bp, Homo sapiens
ggcggcaggcgcctaggccggcttggagcagggagccattttctttttctttttcttttttttgggggcgcgggggacggagaaggtgcgtcagacttaaggcagcccaatctcaggaggtgaactggaaaaatggataggattcagtaggtaggcgggccatgaggtctgcttacaaatcattggaattcaaaacacaggacatgtgctttattaatggcccaaagatcagcaagaggaagatgaggagcagacatggaaaaggatccctgaaggaatccacctgcttcccctgccagcccatgtggttgagtgaggctgaatgtccacttcaacttcaggagagggcatgggatccaggtctggttagtgagaggaattcctggaatttcgactggagtgaccaggaagaggcactctcatctaggcttgctaaattggaagagtttaagcttggggctgctggtggccatcttgtcatcacaaatggagaaattattggtggaaaggaaggaggagtcaaggaagacactgagatttctggcttgggcacctttgggcaagggccgaaggtggtgctgagcagaaatcacaagaggaggaaattttcaaaagaagatgaattcagcattggagaatttgtgtttgagacatttggcatatttgagggaaaatatggaataggctgtggatattctggtcttaggtcaggaaaatgagagtcgtgctagagatataaatttgaaagatgtggtataaataaagctatgattgtagataagatattttggagtcaatgtgctaggtaagaaaaaaaggcttgattataaccctgagaaac

SEQ ID NO: 478965 - DNA, 1050 bp, Homo sapiens
cacaggaaatgctgagactgggcatggctagtgctggtgatcatactaacagcccacagtcctccagtcctagtgccggtgatcatgctaacagcccacagtcctccagtcctagtgccggtgatcatgctaacagcccacagtcctccagtcctagtgccggtgatcatgctaacagcccacagtcctccagtcctagtgccggtgatcatgctaacagcccacagtcccccagtcctagtgccggtgatcatgctaacagcccacagtcccccagtcctagtgccggtgatcatgctaacagcccacagtcctccagtcctagtgccggtgatcatgctaacagcccacagtcctccagtcctagtgccggtgatcatgctaacagcccacagtcctccagtcctagtgccggtgatcatgctaacagcccacagtcctccagtcctagtgccggtgatcatgctaacagcccacagccctccactcctagtgccggtgatcatgctaacagcccacagtcatccagtcctggtgctggtgatcacgctaacagcccacagtcatccagtcctagtactggtgttcacattaacagcccacagttgtccagtcttagtgctggtgttcacactatcagcccacagtcttccaatcctagtgttggtgtaacagcccacagtcatccagacctagtgtgggtgttcacgctaacagcccacagtcggccagtcctagtgtgggtgttcacactaacagcccacagtcgtccagtcctagtgtgggtgttcacactaaaagcccacagttgtccagtcctagtgtgggtgttcacactaaaagcccacaatgctcagaaccctagaatgtacaaaaatcccagtggtcatgtgatttttaccattttagacacagaggaaaaggaggttctgagcagtcaaggcttgcccagagtcaacaaatgagtgacagaaatgtgaataggctagacctataacttcagccccggactctccactgagagctgtttctatggtgtcataggatcac

SEQ ID NO: 478966 - DNA, 1260 bp, Homo sapiens
cacaggaaatgctgagactgggcatggctagtgctggtgatcatactaacagcccacagtcctccagtcctagtgccggtgatcatgctaacagcccacagtcctccagtcctagtgccggtgatcatgctaacagcccacagtcctccagtcctagtgccggtgatcatgctaacagcccacagtcctccagtcctagtgccggtgatcatgctaacagcccacagtcctccagtcctagtgccggtgatcatgctaacagcccacagtcccccagtcctagtgccggtgatcatgctaacagcccacagtcctccagtcctagtgccggtgatcatgctaacagcccacagtcctccagtcctagtgccggtgatcatgctaacagcccacagtcctccagtcctagtgccggtgatcatgctaacagcccacagtcccccagtcctagtgccggtgatcatgctaacagcccacagtcctccagtcctagtgccggtgatcatgctaacagcccacagtcctccagtcctagtgccggtgatcatgctaacagcccacagtcctccagtcctagtgccggtgatcatgctaacagcccacagtcctccagtcctagtgccggtgatcatgctaacagcccacagtcctccagtcctagtgccggtgatcatgctaacagcccacagccctccactcctagtgccggtgatcatgctaacagcccacagtcatccagtcctggtgctggtgatcacgctaacagcccacagtcatccagtcctagtactggtgttcacattaacagcccacagttgtccagtcttagtgctggtgttcacactatcagcccacagtcttccaatcctagtgttggtgtaacagcccacagtcatccagacctagtgtgggtgttcacgctaacagcccacagtcggccagtcctagtgtgggtgttcacactaacagcccacagtcgtccagtcctagtgtgggtgttcacactaaaagcccacagttgtccagtcctagtgtgggtgttcacactaaaagcccacaatgctcagaaccctagaatgtacaaaaatcccagtggtcatgtgatttttaccattttagacacagaggaaaaggaggttctgagcagtcaaggcttgcccagagtcaacaaatgagtgacagaaatgtgaataggctagacctataacttcagccccggactctccactgagagctgtttctatggtgtcataggatcac

SEQ ID NO: 478967 - DNA, 705 bp, Homo sapiens
tgaagaggaggagtgaatattcagtctgcataggcctggggtggagcctgagcttctgcatttttaacaagtctctaggggatgctgctgcatctgggctgctaactacacttggagataggaggttctggagagcagaggaaagagcatgaaccataacctaggtcctgacttccgagccaaggtttgcctttatgtggctggcaacttgcttggactcctacctcaattctttgggcccaaggtttgtcctgcctcagaaggatgtcaagaaaattgagaagagcctcccagatcagcatcttctgtttctggatactctccctttgaaaatccagatttcagcaaaaagctttgctaatggtgaaattgcacaactgaaaccctatgggagcaatgggaaagatggagaaagaggtggttatatcatgggaactctaggagaacagcagattactctaaatccccagatggagatgatggctgatgcctttttgagagcaagagagtccccaggggaagcaagggtatatcagttgctcctatttcatgccaaggatcctcagtctttagaggctcagagaaggctgaaaggctactctaggctatcagggctaccattcattgtgacccatgctacagagaagctttgagctcagtgcaaatgagtgaccagcccttgagaatcaggaaaatttatttatt

SEQ ID NO: 478968 - DNA, 710 bp, Homo sapiens
ggggctggcattgggggacagcatgttctgggcatctctgctcctttctgctggtgcctgtgcctttgctggccgacgactcatagatatcagagccacaggacggccccgcagaacccctgcgctggccctgctgggggctggctttggtgcacatgcgacccgtcatcgtggtccccatggggcatctctgctcttctcgaggcagcttgggccttcgcttgcccctacgtctgcagagctgagcacctgccgcctctccccaggaaaggcaaccaaatgccaccaacttaaggcacccactgaaggccaccaactgaaggccggttgccgtgccaacctgatcgtgtcctgcttaggaagaaccaatcaggccttgagttccctccacgcgctgcccttccatttgtgctttcagaaaaaaacattgccacgatctaaggttactctgtgatgtcaagtcatatttcttatgccatacatattcatatttatattcataattcaaaatgcacatattcaatcaaaataacaggactaaaaaggaaattttctaaaatttatacactaagtacattatatttttctaatgatcactttgatagagcaaacttagaatctatggtttcaacaaatgaagaggcttatgcaagagaaaaccaccacctaacacaagattttcaatgtgatcatcattgctacttttcact

SEQ ID NO: 478969 - DNA, 805 bp, Homo sapiens
cctaagtgaattatcatggggacagaacaccaaatgccacatgttgtcacttttagcatattcttaggatttggccactgcaaacagccagggatgccagctgtggaggcgcagtcagctccaggtgccggcatggttgccagctccctgcatggaacggccacgggtgtgtgtgggagcataggatctggccactgcgcacagccagggatgctagctgtggaagggcgggcagttccaggtgccggcatgggtgccagctccctgcaaggctgtggctggaccaggcataccataagcagcttccatggctggcacctgggaatgcagtggtgtttggaagcctggagacaccaggaactgcagagccccaaagagggtgtgacagccctggctcagagagctcccaggtctgggatcctcaaagggccgcagctgcttctctccttcttgctgcctgcaatgtggcgagcaaggggcagtttcagctttatttgtgttacagctctttcagccctgccattcggtgggttccaagttcttgtcctgccattcaggaagaatgagcctcactcccatgctcatcggtgcccaaagtccagaagaggccaagatggcagaaggctggcatgccagcactgctccgagtgtgtgaacacccgcccaggctgcaacagcatccaggtttggccccaacctcacaccaagagtggagcaggagctgagagtggggagaggccaggaagcaggagcagacacctctgagcctgtgggaatgggggcgccttctcaggactctgagaat

SEQ ID NO: 478970 - DNA, 893 bp, Homo sapiens
gagttaatgggtgcagcacaccaacatggcacatgtatacatatgtaacaatcctgcatgttgtgcacagcatcccgttatgattaaaactctcagcaaaatcagcatacaagagacataccttaatgtaataaaagccacctatgacaaacccacagccaacttaatagtgaatggggaaaggttgaaagcattccctctgagaactggaacaagacaaggatgcccattctcaccactcctcttcaacatagtactggaagtcctagccacagcaatcagacaagagaaagagataaaaggcatccaaatcggtcaagaggaaatcaaactgtccctgtttgctgacaatatgatcgtttgccttgaaaaccctaaggactcctccagaaatctcctagaactgataaaagaattcagcaaagtttctggatacaagattaatgtaaacaaatcattagctcttctatacaccaacagtgaccaagaggagaatcaaataaaaaactcaacccctttcataatagctgcaaaaaataaataaataaaatacttaggaatatacctaaccaaggaggtgaaagacctctacaaggaaagctacaaagcactggaagagaaatcatagaagacacaaacaaatggaaacacataccatgctcatggatgggtaaaatcaatattgtgaaaatatattgttgattgaagtgtggattggtacagttatcaatgacaatcagaaaatatcctctacatttagaaatttcacttgttctttgactaacaatttcacttctagaatttttaatgtttgcatatatttgaaatgcatataaagaaatatgaagttaactgtaacactctgaagagattttttaaaaaaccttgtacac

SEQ ID NO: 478971 - DNA, 752 bp, Homo sapiens
ggcaacagcaagggaatcttggttttgtcctgtaggctgcaatggtggcttaagacaggaaataatggttttagacattcggaaatatgagaaagcagatttgaaagggagcatggcccgaaagagggtaaggccagcacactgtgatgacaggactgtgcagcagcggagctattataatgataatatctcacccaggacagcagagaattggaaacaatatcatcctggtgttgccagtgctaaagcacatcataaggattctgaatacaagtatcattatattcatgttatagctgagaatgccaagacttggagatatcaagtgatctgtacaagactgcagaccagtggatccctgaaccttacaatgggtacttcagccttgcagccagcagttctcttaacagttcattgtaataaaagatcttcccagacacctgtccttatcttcaaattacataacctgagggactcaatccttttgaaaagctgaactagttcataactctaatcataaagaatctttccaaacacagataagttgatcttcaatctcttatatcctttcttccacttgatcgattcggctgttcatacttgtgtatgtttcatgaagttctcttgctgtgtttgtcagctccatcaggtcatttatgttcctctctaaactggttattctagttagcagttcttgtaaccttttatcaagtttcttaacttctttgcattgtgttagaacatgctccttt

SEQ ID NO: 478972 - DNA, 1711 bp, Homo sapiens
ctctctccggtccgtgcctcgaagatgacaaagaaaagaaggaacaacggtcgtgccaaaaagggccgcggccacgtgcagcctattcgctgcactaactgtgcccgatgtgtgcccaaggacaaggccattaagaaattggtcattcgaaacatagtggaggccacagcagtcagggacatttctgaagcaagcgtcttcgatgcctacgtgcttcccaagctgtatgtgaagctgcattactgtgtgagttgtgcaatccacagcaaagtagtcaggaatcgatctcatgaagcccgcaaggaccgaacacccccaccccgatttagacctgctggtgctgccccacgtcccccaccaaagcccttgtctcacatccaggtcacgctgatgcaagaggtgggttcccatggtcttgggcaggtccaatcctgtggctctgcagggtacagcctccctcctggctgctttcatgggctagcattgagtgtctgcggcttttccaggcatacagtgcaagctgtcagtggatctaccattgtgggatggaaccatcctcctctctatgaaattagttataatgagggctaactaggtgcaaggagggatgtttaatgggttgattccaggggatccaaggttaatgtgtaatattttcaattattttttcaaacagtagctttaattttatatttttctgaaataaaacgagagcatgtcatttatgcaagctgtaagcaccttcttaattgtagcatcaattcagagatgaataaataattgagctaagaggtctgtcagagtaaggttaatgggattttttaagtgccctgaattccatttcagaattatgaagggaattaaatatttatgttacatggataatagtattcaatattcatcaaacgcatgcaaaataagcaattaagaatatgcaactgtatcccattatgaacatatccttgatacaccttccaaacttaaattccaaattctttctgctattcagctagaagtttttgctaatattttcttcatggaaaattgtattttctgaactgattaataattaataacaaaaaaatttccattttttgaaatagcctatttcttattaattttttaatcattcgtttacccccccccccagcatatacaaagaattatatagtaattactttttaacagttaacaagtcacagtaggtttgggttataacgaacatagtgtggcttacaagataatatggaatagtggataacccatgaatatagtgagaaaactttttaaaagttatattggagtaatcccttagctaataattattattgtagtttagctatttggctatgacaaagtaatactagttgaacctcacttgaaaatatatgatagcaacttagtacatggtattgtacataccttcacttggttaaacaacctttagaggatatgcttagtgattttatatttcaactctaaattgttagttttcaacagtagcttcaatgcattattggtagattttgcaacctaggtttttcgtatgctcattttggtagaatgttttcaacactcctattttgctcacttatcctctgtaattttagaaaaataaattgcttaactaagttttgttagattatttcagtcactccattatttgaaagacttaatggttcacaaaacatttttgtttctgcatttcaga

SEQ ID NO: 478973 - DNA, 716 bp, Homo sapiens
cttcacaaatactatggacaatgcccacattgttctgcaggttgacaatgctggtcttgctgctgatgactttagagtcaagtatgagacagggacagtcatgcgccggtctgtggagagagaaatccatgggctccacaagatcattgatgacaccaatgtcacttggctgcagctgaagacacagatcgaggctttcaaggaggagctgctcttcatgaagaagaaccatgaagaggaaacatccgggcccaataacgaagagctggctcagaagaaccgagaggatctagaaaagtactggtctcagcagattgaggagagcaccacagtggtcaccatgcagtccgctgaggttggagctgccgaagtgacgctcatggaactgacacatacagtccagtccttggagatcgacctggacttgatgagaaataacaaggccaattgggagaacagcccgagggagaaggagcagctcaacaggatcctgctgcacctggagtcggagctggctggcacagacccgcgcagagggagactcagcagttaaagtatgtaatagattagagagatattaactggaaaaagaaaatcagctcactagttaccttcacctttgaattaatgtaataattttgccaacatcttaaattctatattctcaaaaatcttatttaaaagttatgtgtacatagtaggtatatatatttatg

SEQ ID NO: 478974 - DNA, 623 bp, Homo sapiens
gtcccacaaaatcggtaggggatggggctcccgcctcttccaggcccccaccggctcgaagtagagcgcagccccggctgcacttcctctgctgcagccatcgtctttgcagcagccagtccagatgagtcgtcactgccatcacttggacatcagactccagtgccaaaagaggagacacagaaatgtagaggctttcttaacagctgttcaaatgcagtgccaaaggggaaaggggaaggcctggaatggcgattatccaaaggggactgttttggtggtaatggcaaaggtgcacatgcacaagcacacacaaacacatacatacacaaacacaccagaattacaatgcaccttgattttacaccaaaggctgcgtcttcttggtttgcaaattgttcactggaatatagtgtctttcctccaaattacttctcagagaacttttgttcaccctgtgacgaaacaagtactagaaaaaatcaaggaaataaatgcataaagggcctgttagaccgcatgtttcagagtgggggtaccccaaagattccaaactgaaagtatagtatatgtgcagatgccatttgaatatttctgacaaagataagcagtgcaacgagttg

SEQ ID NO: 478975 - DNA, 503 bp, Homo sapiens
gaggggttgagaggtggcattagttttgatatcaggatgatgctggcctcacaaaatgagtcaggtccctctgctgcaactctgctggagtttgctggaggtccactccagaccctgtttgcctgggtatcaccagcagaggctgcagaacggcaaagatttctgcctgttcctcactgtggaagcttcatcccagaggggcacccaccagatgctagtcagagctctcctgtgccactggggtatggaaaacaattcctgcagctagctttgtgtctgcccaaatggccacccagttttgtgcttgaaacacaagcccctggtggtgtaggcacccgagggaatctcctggtctgtgggttgcaaagaccatgggaaacgtgtatatctgggccagggtgcacagttcctcacagcacagtccctcaaggcttcccttggctagaggaaggagttccctgaccctttgcacttcctgggtgaggcaacggccaccctgcttc

SEQ ID NO: 478976 - DNA, 2730 bp, Homo sapiens
tggctttagcccaaggtttcacagtggatcactagcaatccagagcctaaactcatcctgcgtctagcatgagtgagaaccaggatggcagtaaaattcagaaagccaaatctcattcaatttgtccaaagaaataccaagctgtccactgtgggcaatcaacttcccaggcctgagctcaaacacaggacccttagaaaactacatatgtgttggttctggagctcattggagcatctgttccaccttgtccatcacttgactggctctaaagttgatactgcagataataaaacagtgctaaatgatgtgaccaaagtcccgcaaaggtctccaaaagaattaattctatatctcaggtctttttccatacagtgctctgaccctgctaatgcatattccactgaattccagaatgtgaaaattaaattacctttgtatgaagaaaaatctaccccttcttcatggcaggtaacaccctataccaaagtgtgctgacttggtaatgatatggtaataccattcacgaaggaagaaaatacaagaggaaatatttgtgtggccaaagttttttagctcagttccaaaatactaaattttctatacctgtgtggccaccaaagaaaaagaaaaatcaggggaaaacactatcacaaaacaaaagaaggtggcagtttttgaaataaaagagccatctccatatctaaagctgcagagatcaagtaagccaagaactgctgggcacctacttattttagcaattcagagatcactgacaaccttgtcaaaatcatttcctcctgatcagagggagagctcatcttccatggtttgaagggtaaaaatggtgttctcataaaaagagtagtttttttctttcaaaagagattattagacccaatgcttttattttacatgtcgaagctgacactcaaaagcaaacctgggtagtttgctcaagagcaaatatccatgtcagagattctgattcccgttgcaatgacccatgaacattatgcattcaagcaattagaatttcatttaattaattatgctgtatttaattgtgttgactatttaaggtattcatagttacattagtttgtcagttcgaacaaaacaaaatgatgaagtgtagacatactttaataatactctatcccatatgttaacacaaacacttgaactaacagcaaaatcatctccagtagacattatatgaatttcatttactataaggaacaatgtttcatttacaattacaagtccattgcatcaactgatgttatatttaaatattataggagagccagccacggtaacatgagcctgtaatctcagctacttgggaggctgaggtaggagtatcaggtgagcccaggagttcacgtccagcctgggcaacacagggagaccgtatttcaaaaaaaaaaaaaacactaaaaataaatgggcgatcacacaacattttaaagtttttatttttctttatattccttagagtcatatgaaaccaaaacatctgtagatttatttatacttcctagatatgaataagcctactaatgggacatgggctggtcaaacttgcaatacgacactgtgacaaaagatactgtcctgcttatttcataatagtctaaataataaagattcataatcttcatattttaaatttttaccttatttttcctttgaaaatagatcatatgacttccactttattatattaatttcttttaaaaataatgatatgataaatgcaggggctagaatttttatagttttgcaaactatttgaccttctgagtatgtgtgtacatgtgtgtatgcctgtggtttttaaaatatatcttaagtcctgatacaacctcttatttaatagcaatagctttaaacacatgatagtagttgaggataaagaagttgcttccaagtaatatatctacaatttaaatatcaaatttataaatattattcaatgtaaatataccaaagcaaagtctccttagatctgttcttaccccatcagtagggactgtttcttggaaagaatttggtaaaacttactgtaataccccatatgccttcactacagaagagtcttatccctgcagaatgatacaaaattttgaagctttatccttcaaaagaattaggtgtgaacatttaaatgcactgctaccatcatttaaatttaatattcagatcctaaatggacaattatacttttgaccaagtgattaaatttcctttcagtttctctttgatggaaattttattaactgtcctcatagactccaagttctattctgtaaaataactcagtatcttttctcaactacttttttaaaattccggttagacagaaatacattaagatataattgggcattggaaaattggtgcttttattctagtttttttgacctaaaatcagacatttaaaccaaatgattaatatttaaaatgtgagaaagattgaatctttggaattaaactagattttaggtatatcatttgcataatgttctttgcctaagtcattatgaatcattttttaatatatttgaaaacttagagtgtatagcacaattatgagcacctgaaactgtctcattgcaagaggaaaatacatttttccacactttactgacatattaaatgttatccctacagaggtgttgaaatttgaaacatgtatgaatttgcaacaggtagggatatttt

SEQ ID NO: 478977 - DNA, 456 bp, Homo sapiens
tttgggtcaagtcaatggtggcgcctgcatcccatgggttgatattaagaatgatgatggcatggcccacagttggacctcattcgattggcatatgcccaccccccaaccccaccatctccacagctctactgggaataatggagtctgaaggacccaactggagggcagcgggcacagcaagtgcaaatgtcctgagtccagtgcctgcccagcacatccagggaaggaggcactggagcagagcacgctcagacaccagtgcgggtcaggtcacacacggctttgcagatggtcatgggacttctactctcagtgcactggggcagaaggtgatggcaattcggaccagggtagaagggaagtgtcagggtgtagggcatgctctgcagctggaggtcctttgagagtcttggggcccgtcaggccggcgtgggtggtctgcctgcagcctcc

SEQ ID NO: 478978 - DNA, 678 bp, Homo sapiens
gctcggagaacacagcacagccggtgaaatgggcccattactcggcgctgtggcagccacagcctctccgcagtctttgatggagtactcctcagacgcagattttattgagagcctgcctctggtggttaagtaccgagtgtacactctcaaaaagcttcaggccaaatgtgccgtgctagaggccaagtacctgagggaatttcattctgttgaggactatgagtataatgaggtggccggtgattctaatgctcagatgtatggtgcagaggagaatccggagtatgaggacttggtggaggatcgtgaggaggatttcgaggatgtcggggaggtgtttggggagtatgaaggaatcgagggacataatagtcccttcttcaatgctctccagtggggcctagatgctaatgaggatgaggaagacttcttcatcgctcacaccttgcacacttttgtcatcccaagagctgtgttacactttacaggagaagcccttgaggcagagcaagatacgatgatcagggaatgtaataatccggtttatgacagaatgactcaggagaattgggtgactgcagtttatggtgctaaaggccaaaaccgaaactcccaggcagaagtcaatgattgttgaagcagaatggttggaggtacatgtgcacaatgtgcagg

SEQ ID NO: 478979 - DNA, 1148 bp, Homo sapiens
ggtacctcagttggaaatgcagaaatcacccgtcttctgcgtcactcatgctgcgagctgtagaggtaggaagaagtgtcttccgctatgccattgctgaaagcaatgtgcccactagtgtcatcttgttgcttttggagagggtttcagaggtccggaatttaaaaaaggagcttaagccattactggatgacccttatggagtagcagatcaaattgatcaatttttaaggcctgacataggcacttgggctgagttgatgtccatcaggggcatcctcttttcaggggaagaacgaagtatgattcggagggctgctgtggcagtctgggaacgtgagcaccctccgggtcaaaatgttcctcctgtggaccatgaatttcccgcccacgaccctcagtgggacaataacaatgcaaatcactgggaaaacatgcaggatctaagggaggcatgccccttggctgaggatagccgagatacatttgcttttgagtcagaagacccctattcggggcagagacaacaatatcgatggacagtcttgccccaggggttcacagactcccccaacctctttggtcagatcctagaacaagtactagagaaagttacagtccctaaacaaatacgtctgcttcagtgcatggatgatcttcttatatctggtaaagacataaaaggagtaggtgacttctctacacacattctcaatcacttgcaatgtgagagtttgcgggtctcaaaagggaaacttcagtatgtagaacctgaagttaaatacttaggccacctaatcagtgcagaaggtcatcttgtcatcgatgtaactcaggctagtcatcctttaacccttcagtttgatgtctgttcagccaccccgtgtggagatgagcaagctcaaaagaagctattccatgttgataagtatcgatgtccataccatgaagaatccagcagatgcccaggcactcctcaggaccaagtgttatcagtaccagctcacattcttttccttatttggaaagaggactaactttctagctcattacaaacaccccttccccttcctcaccactttcttttacgtgtccaccctatctaaaaaaaaaaaaaaaaaaaaaaaaaatcaactgtttagccaacc

SEQ ID NO: 478980 - DNA, 577 bp, Homo sapiens
ttaagacttctccactatagtttctagagctctccagagagaagctgcaggtttctagtgaggatgtgtgttcaagggtggacaatccccctttcactctttcacactttgggcactcacagatttctggctgtcttgcagtgcctgcaggagcaatctgctttcttcaaagggtttgtggattctctcagctttcctgggcaactgcagtttgctggaattgtggataacgcactcaacgtctttgttccttcttcagtccgagagtggcaaggacagtaccactgcagtggcagtggcagagggctttcagttatctctggtagctccatcttagagaaaaacagagacactgctactggaaatgtgcagccaccgagtggagcagattctctggtggcccaagctggggaccaaagtcggcaggagcagaactttggttatggcagtggttggtgggagtggggggcgttgtcagttgcctctgggatccccacatcagggaaacatagagccactaccagtgggtatgctcagtaagaagtgaggtgactgttctgtggtcccaagctgggga

SEQ ID NO: 478981 - DNA, 606 bp, Homo sapiens
gacatcaaagacaaaaggtagataaatccagaaagatggggagaaaccagtacaaaaaggctgaaaatttcaaatgccagaacatctcttctcctccaaaggatcacaactcctcggcaacaagggaacaaaactggatggagaatgagtttgatgaattgacagaagtaggcttcagaaggtgggtaataacaaactcctctgagctaaaggagcatgttctaacccaatgcaaggaagctaagaactttgaaaaaatgttagaagaattgctaattaaagtaaccagtgtaaagaagaacataaatgacctgatggagctgaaaaacacatcacaagaacttccgattggagatcaacttaatgaaatcaagagagaagacaaaattagggaaaaaagaataagaaggaatgaacaaagtctacaagaaatatgggattatgtgaaaagaccaaatctacatttgattggtgtgcctgaaagtgatgagaagaatggaaccaagttggaaaacactcttcaggatattatccaggagaacttccccaacctagcaagatggccaatattcaaattcaggaaatacagagaacaccactaagata

SEQ ID NO: 478982 - DNA, 1088 bp, Homo sapiens
ttttccgttcttgcattagtttgctgaaaataatggcttccaactccattcatgtccctgcaaaggacatgatcttttttccttctaatagtcagacccctaagctgcaggtctactggagtttgctggaggttcactccagaatctctttgcctggttatcaccatcagcgtccacagaacagcaaagattgctgccttctttttcctctggaagcttcatcccagagaggcacctaccagatgccagccagagctctcctgtatgaggtgtctgtcagtttctgctgtgatctgtcccagggagatgggggttttatctataagcccctgaatggggctgctgccttttttcagagatgccctgcccatagaggaggaatcaggagaggcagtctggccacattggctttgctgagctgtggagggctccacccagttgcaacgtccccacagtaagtgttttgtagaatacttgggattttccacatagacaattatgacatttgaaatagggacagtttaatttctttcttttctaaaagcatgccttaaattatttcatactttattgcactggctagaacttccagtaatatcaattataagagtggtgagagcagacacctttccttattcccaatcttgaagggaaaatatttactctttaaccataaagtatgtggttagctgtagaccttttatagattctcttcattaagttatggaatatttctgttattcctagtttgctgagcattttatcatgtgtgagtcctccattttgtcaaattatttttgtgttacttgatatgaatatatatttttcttctttagcttattgatatagtggattacattggttaattttcaaatactgaatgacaattttatacttgaaataaatcttacttgctatgatttataatcttttaaatacattgtttgctttgatttgttaatattttgttaacaattttttgtctaaattcatgacacatattgatatgtagttttattttttaaaatttgtactgtctgcctgattttagtatcatagcagcatttatcagggcaaattcagccccc

SEQ ID NO: 478983 - DNA, 591 bp, Homo sapiens
acagtgacatctgaatgtgttcagggtttttttgttttttttttttttggcatggctgacacctggctctacctggacccgggtggacccacctggaccagaccactcctgtgggcctgcttaagagtgattcagctcaagaggaccactttgacccatcatgatttcatctccaaaccaaccaatcagcagcaagcacgcatttcctacctaccaccaccccatcacccaaactgcctttgaaaaaccgccaaccaaaagagtctttgatgagattgatttgaataataactccatctcctacatgacatggcaatacgaagtccaaagaatctggagttccaatgtccaagagcaagagaagaaggttgtctccactccagaagaaagtgagcaaatttgtctttcctctgtgtttttgttctatccaggatctcaacagattagatgttcctgttcccattggatgacagtggatagtattagctcagtctaccgattcaaataccagtctcttctgggaacaccctcacagacactcccagaaataatgcttcaccagctatctcgataacctttaattcagttgaa

SEQ ID NO: 478984 - DNA, 525 bp, Homo sapiens
tcacgtaatttctgatgtgtgcctcaagatgcatgaccacacgactctgatggtgatcagagaggcaggtgtgagaaatcattgtgcaggtacaggtcgtggcacacatggccttgaccacgttagaaccaagcagcttgggaggtggaccaggcagttccctggaagtagcttaatgctggcttcattgagaacctgcatctatcaaggaactttgggactcaaccctggaagaagattctcacagcatattccagaacttctaacagataaagtgcaagaagtggtagcccttgggctgaacccattacccttgatagttgcagttctgcatcctgctgcaaaaccaattaaactagaacctttggggaagtggggagagtttgctggtcggagtatcttcaaacctccaaaaagcccaatacagaggatataattttaattaagagaaagtttgctcatttttgcatacatcattaaaccctgctatttccttttctgtcacttgcctgataaaacttttgg

SEQ ID NO: 478985 - DNA, 569 bp, Homo sapiens
tgttgcacgtcttgccaggggatgcagggaactctccaccgtacaatgataactttgacacaaaagtgtggtgctgtttgggggttttgtttgggtggaggaaacaaaccagcaggcttcccagatagcatcaaggagctgaaactcgccagatcaccacaattggacaatgagatgccagacccttcaggaatagactttgcctatactgtgactatacgactctcctcccatcaccacacacacagtgacccatcgagaggtgtatatggaaaaaaaaccttcatcctacagctctataagaacttgtgtcaaaaaacaaatccctatatgacagttgtttttgcagacacacacatacgaaagacttgtttccatggtgtctgtgaacagatagtgcctgtagtcatagcaggaggaatcgaggttgccaaaatgcagagtttgccactgggcattccgctgagtgataaaaacaccccccaaaggctcacatcaggtcaggcagcatcctcccttaatggtgagagggaagcagtggaactctgtctgcactgcctatgaaacat

SEQ ID NO: 478986 - DNA, 854 bp, Homo sapiens
agtgccagacctttggtgaggtccagtttgtcaactgataagacaatgatgaaattcagatataatagggattctaattggaaagaatctgaaaatttagctcctacacacgtgggattttcacagaatactctacaggaaaaaaagcaaaatcatcaaataaatacaacccaggttccaagaaataatggattcaattcaggaaacagtgaagagtttcacagacagactgttccccacttaccccaagtggataagaacatgaaaatggacctattattgacttcacttgagctcctgtgtccctccactacagcactgatgatgtttcctggagtgatttttcaaactacttctaaaagagatgccttgactcaggacagttttctgggaaaactaaactatgacttttccacaaaattcttacttttctatattaccattgacgaaaataaacatctctctttgatttaagcatgctttgtagaaaatttttagaaatattctatatctgactcattcatgtaagcagcaaaatattgctttgtgttctttctgatttctccaaattttagttaggaacatgggaaatagtggtttctaactttagggagatgcattcagtaaaataatcataaatttaaaatgaaaaagcatgaacaagtacctatttgcaatctcagcacacaaatattaattttttatgcaagaacactcaaattgtttatgaataagttttaacactgaaaacatcatttatatatatttatatacattatattttatatattatatattaatatatattatttatataaatatgttgtataaaatataagtattcatatatattt

SEQ ID NO: 478987 - DNA, 528 bp, Homo sapiens
tatagagccctgacatctacgtcattgtaacatttcttattatgccggcgttcaactgctgggtgcaattgacaagtgatgatgatggtgataatggtgatgatggttatgatgaagatgatgataatggtagtgatgatgatgatgaatatgataatgatgttggtgatgagggtgttgaccatgatgatggcgaggtgatgaagattatgatggtgatgaagaaaatgatgatgataattcttcacagaactgctcatgaacttcaagatctcaacagagagaattgtgcagagaaagaagatgggcagaggggagaaggagcccctgggaacacttctgaatttgtagtgatgatgtacatcgccaaatgtgcaatggatgttttatctcataattatgttacaagaaaggggtcctggtccagaccccaagagagggttgttgaatgtcacgcacgaaagaattcagggcgagtccacagtgcaaagcaaaagcaagtttattgagagtaaagtggtgaaagta

SEQ ID NO: 478988 - DNA, 759 bp, Homo sapiens
gctgattcatctgagcacgagagctaaccacctcttctgtgtcttgttagaaattctaaagttaagacagacatgcatgaattgtatcagtcatgaagaacacctggacaaagggaagacccatggaccctggcatgaactgtcaacaatgaaagtattacctaacaatgaaatcactgtctacagatttgattttgccaaggaaaaacagactcagcgacagagggttgtgtgcagaaagctttctggagagtgtttttgggaaatacaagtgcaactaaaaaagaaagaaagtcagattggactgaaggagaagctgtcctgcaatatggttgcaacagagacatcagcctacctggagacgtgggccgtggcttttcctctccctgatggattagagcaagaagtacaacaaagaaaaggggtagcaatttattttaaaatccaaaattacaacaaactttccataaccaaatgggctggtaagacagattagagttccaggagggtctgcgccagagacagcagcaaacatttctgtaaaatcaaattatcttcttctgataaatcccctcaaaggttcagactgctcaaaaaaaactgattttaagagggcatagaatagttttattaatgttataatttcatacttaaaaggtagcattaaaataatttctggtttacttttttaaaaagagcagttttttctgccagtccacaaatttaggaagaagatggttaaatttcaatctggtcttc

SEQ ID NO: 478989 - DNA, 1182 bp, Homo sapiens
tgttagtccaggtcagaggactaaaatcatgctggaagagaaccgtgtgagcccaaacatgcagaggcattgtagaaataaggagaaaaagggttcgtccaagctgatcaatgaaattcaggtgctcagtgatccaggattctttcattttgagctctgtgtggaaagagatggacaaaaaggagtggggaatcttggtttatttataagtgatccaaatcaaccagttcctcaggataccaagttcattcacacaaaacccaaccgctttgaagaagtggcctggtccaagtataatcccaaagaccagctctatctgcatattggcttgaaacccagagtgagagatcactaccgggcaacgaaagtggctttctggttggaactcgttcctcatttgcacaacttgaacgagatattccagtatgtttcaacaaccacaaaggttcctccaccagacatgacatcatttccctatggcacccggcgatctcccgccaagatatggccaaccaccaaacgcccagcaatcactcctgccaacaatcccaaacactctaaggaccctcacaaaacagggcctgaggacacaactgtcctcattgaaaccaaacgagattattccaccgaattaagtgtcaccattgccgtcggggcgtcgctcctcttcctcaacatcttagcttttgcggcgctgtactacaaaaaggacaagaggcgccatgagactcacaggcgccccagtccccagagaaacaccacaaatgatatcgctcacatccagaacgaagagatcatgtctctgcagatgaagcagctggaacacgatcacgagtgtgagtcgctgcaggcacacgacacactgaggctcacctgcccgccagactacaccctcacgctgcgccggtcgccagatgacatcccacttatgacgccaaacaccatcaccatgattccaaacacactgacggggatgcagcctttgcacacttttaacaccttcagtggaggacaaaacatgaagaaagagtcaatgagattttgcccagcacatggagctgtaatccagagagaaggaaacgtagaaatttattattaaaagaatggactgtgcagcgaaatctgtacggttctgtgcaaagaggtgttttgccagcctgaactatatttaagagactttgt

SEQ ID NO: 478990 - DNA, 973 bp, Homo sapiens
aaaccacaaaaacacatgtgcatcatgttacctcaaccagatgtgcacttgaacaaggccatcattcagagcggcaccgccctgtccagctgggcagtgaactaccagccggccaagtacactcggatattggcagacaaggtcggctgcaacatgctggacaccacggacatggtagaatgcctgcggaacaagaactacaaggagctcatccagcagaccatcaccccggccacctaccacatagccttcgggccggtgatcgacggcgacgtcatcccagacgacccccagatcctgatggagcaaggcgagttcctcaactacgacatcatgctgggcgtcaaccaaggggaaggcctgaagttcgtggacggcatcgtggataacgaggacggtgtgacgcccaacgactttgacttctccgtgtccaacttcgtggacaacctttacggctaccctgaagggaaagacactttgcgggagactatcaagttcatgtacacagactgggccgataaggaaaacccggagacgcggcggaaaaccctggtggctctctttactgaccaccagtgggtggcccccgccgtggccaccgccgacctgcacgcgcagtacggctcccccacctacttctatgccttctatcatcactgccaaagcgaaatgaagcccagctgggcagattcggcccatggtgatgaggtcccctatgtcttcggcatccccatgatcggtcccaccgagctcttcagttgtaacttttccaagaacgacgtcatgctcagcgccgtggtcatgacctactggacgaacttcgccaaaactgggaggctgaggcagagggatcacttgagctcaggaggtcaaggctgcagtgggccatgtttgcaccactgcactccaacctgggtgacagaccgaaacctttatctttaaaaaaaaaaaaaaaaaaaaaaaaaaaaagcac

SEQ ID NO: 478991 - DNA, 979 bp, Homo sapiens
ttcccttctcctctctctgggtcttcattcatattggctccaggaaacgaaagaaggggagtttgggagataaggcgcaggtgggagggcagagatctaactgcggaaaagctcagacacagccgaaaaactggacctagtaatgttagaagacaccagagttgaatcacagctcgcagccacccctcactcaagccttcactggagctggcatctctcctctcctgtgtttagtgacaaaaaatgtggcccttctgctgcctggcaaagagtttgccttgactacattcagcacctcatcagctgtccttccatctgtgcctgccacctagaagttgaaacggaagagaagttgaaaccgggagttgcatatctactcaggtgtcatggacatcttaaactcaacattgtctattccaaagccaacctttcatcttcctcatcatacttatccttgctgtgtgtttctgtcagcactgccaagttctgggcaccaagtggacggagcccgcggcatctgccacagagctataagaacccaggcagcaatatgtccttgtggagtggaaagacaaatccaggagagcaggatagattccataccaaccccaaccaccaccagtgcccttctcaacttcctattacattgagaaacagaacagaagcacaggatggaatattttcaatcacagagctttgttggaaggaagattccaggtgaattaacttgtccattttttgcaaaatggcatttggaattttgataggcattggactgaattcatagatcaatttgcagtgtattgctatctaaataatattaagtatatcaataatgaacacaggatgtctttccatttatttaggtttccttaatatctttcaaaaatattttttagttttcagtttatgtgtcttgcatttccttattttaattcatttaagtttaaaaacctaataaagtaaatagtttataacc

SEQ ID NO: 478992 - DNA, 613 bp, Homo sapiens
tgtccctgcctcctgccagctccatggagcatggcgccaccctgggctcagctccacctcctccctgtgccctccctacagcagcagtgggcaagagtggtgacacaggacaaggttctggagcagcagaggctccagacctggaagcaggtcttgcctggccacatgagggtaggggtggtgcaatccatgctgccatcagcctttccacctttgtctgaggagataaaccctgcgctgcctgaggcaacagtgatggcctcctctgaggcagtggccaggcaagataatgttgattctcctcaggagccacccccaacagccctgtttgcttctagacctatagctagactaaagtccctgtggacccctagagccataaagtgggtcatgcacagcagcattccatcatcaaatggaagtggtgtattcattaaccaggatcgaatgggtcctgatggcacaaatgtgcaattatacactgattcatgggctgtagccagtggtttggctggatggtcagggacttgcaagaagcatgattggaaaattagtgacaaagaaattcggggaagaggagcttgacaaagggtacatgcgcacaatgtgcagg

SEQ ID NO: 478993 - DNA, 3163 bp, Homo sapiens
aggcatagagtgagggagagagtgggggaggcattagtggagcccactcaatcgatagtatttttttacagcagctggaaaagactaaggcacttaggtttcagtcttctctggaccatttatgtttgggtgtcctgagcaagccactgaatctctctggacttctgctgtcacctgttcagttggccaccaaaggatctcattctccactgctgctgctgccagttgttaccctaaagctgaacactcagagaaatctggaacaaatgtcaatgcaaagccacgacaactgttctgggcactgatttctcctggtgttaggtcaagagagactttagcacctacctcagggccagacctccccgagttatttgctccaaaacttgatacagtcctctccttagccatcactcctccccacccaccagctgcaggcagcctgcagagcttaaagaaggcaaaaataattgtcccaaatacattttccagacctaggatttttagctcatgtggggcaccagaatttcaatctaaatcttaaaaaattttagggcaatcatttttcttcctccttgaaagccacagacaatgatgtgcactatttaccccataagaagaacacgtattaaccagggcacagcttctcagtgtctccaaaaagccttatttgtttaagagattcatctttgacagtttaacaaataataataatgttagtcaatattattagtagatatagtactttcacctctagaaacagaaattgaccgcaaccttccaaatggtagctcttctaaaaaaggttttttaaattaaagttactttacattgggcaacttgctacacatgtatgtttagaacttcagtaaataagtacattaaattattgaaatatctctaattaataacagctaacatttattgatgttagcatacactacgctaagcactttatttaatcctcatggcaaatctataagattgatacagttatcatcatccccattttacagagaaggatattgagacataaaaggtgtaattgtccttggtcacatggtgaggacgtagaacatgctcaagctaaataattaatattctagctgatttttgttgttttgttttgtttttgtcagtattcttgttatcttctttttgcctgttttacgtaataaaaactttcatatttggtctaatcatttatcttctaacagaactttgattaattctgtaaactccaaatttagcttgacagttacttgtgagaaaatgtcagtgtgacatcgtggtaggccttaggggacaaattccaataattcagaacactatggtggaatcttttcttcctgtttgctggaaaaggcaagctcagggagccaaatccctcatccagataattagcaactatccaatctgttaattgaggacaaatatgccaaaccttcttggcaacttcagtcaaacagctgtagggtggtcagtcaggcaggcacagtttgatttgaactcgtaatggaaaaaaggaactggcattgaaaataggaaggcaagttcagggttaaaaatggcctaaaagagagcagaattcttgcctgccaattgtgaaaaaagcaattatataactctgtgtacattggacaaagacccattatgaaggaatgtgcatgtgagcctttcaaaattaaggtcagttttagtgagctgtaacttgctagtaaaaccatgtttgtcaaacatgtgaaaagtgagtaagatgctgccacaacttatgtgcatgtgaatacctcaactgtaacacatttgaaggatttttagtgtgttgttaactactttacagttttaaaaaaatagtacttgacatttggaagtgaaatgatatgtgcaaaacattagtcagatggtgcttcttgctttgtgaatgaactgtatgtagtctgaacaaattagatccaaggtttagtgccatcaactcctcagtcagaggcccacaaacaattatgctcccaaaacacctgatattttaactgcaaaaaccaccaaatttataaagttgctgatgatgcattggtaacaagagacagcttactaagtgaaagaaagaaaaaaatctcaagagaaggaaataatctatactgcaatggtaagactagctagaatataagcttcaacctcccacacgtcctgtcttgttcatggtggtactttcagcacacagtaggtgcacaataaatgctgatggctctagagttaaaatgcctgcttaaatcccggctatagcatgcatcagctgtcagaccttggtgagttactaggctctgagggtttgctgttcacattatgactgccttggaaggctgtggtgaaaataaaatggtatcatgcacatttgtgcatttgtagcacattgtgaatcctccataaatggttgcttttgtgatgaagataataatttgggtttatctgggtcctttgtttgaaaaaaaagtccacatctttcacacctacagccttcccactaggggaaaaattagtagtttaattttacctttactacatagagttgaagatatactcattttttctggctaagattttacaatgtaaagttcaggaaatggagtttgattgaaattctttttgaacactgacactttgaaaatgcatagactacaatgacattatgaaatgatataataatatctgtaatttctattcatctaaaataatggtgaaatcccactgttaaattatacatcatgactaattctagacagcaaattatcaagtatttattgagcaaaggtgacctttcctgacacaggtgtcgagttatgaagtttagctatttgagtacaatccctcccctctctccaattgttttgttctaaaatggtatcatgcttttttttgccaaaaaaattataatactcaataaatatttagtgaataaattaataaaaatgttctacctccatgaaatattttataattaacatctttttaaattgtattcaacaggtatttagggggcatcttctaagtccaagtctccactggagacactggatcatgcatgtgacatgatcctggaactgcatttagtctaggctcttctcacatatatcagtcctcagagcctcacaagaccttccgaaggctttgg

SEQ ID NO: 478994 - DNA, 745 bp, Homo sapiens
cgtggcggccctgccgggaggagcgaggaaacgagtggaaacccgaaagtgtgctcatggaatgcaggaggtaatgaatcctggtcaggttgcaaacacaccaaatgacgtccacgcagcactcgcgcccaccgcgctgtttttgcttgcgcagtgctcccgaagggattcgggatccgcatccggagggattcgggatccgcatccgaagagcaccccttctctcaggacttcccctgggaccgacgtttccagtcacccctgcgggcgcaattgtccttcaaccgccaagctccttgggacaaaaagagaacttcaggggctctgcctcaaactgtccttcgagggtggctcgaggatcgggttgtcccctgtatggcagcaggcatgtgggttcacacgcagctgccaggcttgtaagaggcaccccgcagccgcaccaaacccgaagcatccgcgaaagcgccccggttttaaaccccaaagagctgctcgcttcctcacgcagcagggaaactctgctcgctttccctgaggttagatttgtgttaaattctactaatttttctaaattactcgtcttaacaaatccaggagactgtttcttaactattgcaaaattatcaagtatactagaatgtgtgtgtgaattttccttctttctcttctccacttttctctactgtaggcagtacagaagtacagatttgagagctctgaaagagaaatgaatgggttgggaagg

SEQ ID NO: 478995 - DNA, 870 bp, Homo sapiens
agcggtgggctgaagggctcctcaagtgccgccaaagtgggagcccaggcagagaaggcgccgagcgagcgagggcttgccttctcggccttggcgtccactctggcagcgctcgaggagcccttcagcccaccgctgcgctgtgggcgctcctctctggggctagccgacaccggatccggctccctttgcttgggaggaggtatggagagagagacgccagcgggaaccgcggctgcgggcggcgcttgtgagccggcacctactgggtttgatcagaggctgggtcctgcgtggatctccgttctctcttcacggggtcgctagccacaatggagagtctccgtctgtttctcctttcttttctttccctcttggttgtctgggacgagctctcagctgctggagtgcctgggctaggtgccgcaaagctccctgccatggcttatggtcccaagaagcatctaaagcaggagatgaagaagagttgcatgcagcagttcattaagatcgatggcaaggtccgaactgacaaaacctaccctgctggattcatggatgtcatcagcattgacaagatgggagagaatttttgtctgatctatgacaccaagggtcactttgctttacattgtattacacctgaggaagccaagtacaagttgtgcaaagtgagaaaaatctttgtgggcacaaaaggaatccctcatgtggtgactcatgatgctcacaccatctgctaccctgatcccctcatcaaggtgaatgataccattcgtattgatttggagactggcaagattacttgatttcatcaagttacactggtaacctgtgtatggtgactgaaggtgctaacctgtgaagaat

SEQ ID NO: 478996 - DNA, 940 bp, Homo sapiens
caccgcaaggttatttgttttccttcttgccaggcccctgccatgaagaagagccattccattcttccccatggaggatccagatgtgttgcagcagggacaggccattcccactgcatcctgcctgaattctcgcctcacagaatccatgagcatagtagaagggtgttgcttcgtggcaccaagactggggtggcttgctatgtagcaatagataatagggctgaaaatctgtgcaatgtgtgcatgtgcatgcatttggggatgcattggaatgtggggtgtgagagagaaatcaaggaggactccaagatccctggcttgagaaacgggaaggagagagtcatgatcagccaaaatggagaaggctatggaaggatcaggtttgggattgggatagaccaggaaatagaagagatattggtaaaaaggggagatatttgactaccatttcaatatttttaatatttatttgttggttcaagttgattcatatgtctgttcaagtccaattccccttgcacaaattttggcattttatattttcctacacatttttaatttattttttaatttttttatcctatacagtttttatatagattcttaaacttgttagcatctagctcttcctaacagtcttttattattattaatttcgatctcttttaattagatttttccaagaacaaacttttggttttgttcattttctccacttttttccttcattatgtcattgattagtgggtttattgtttctttacttatttggggggatttgcgctgttttattctttttattttttaatttcttgataaataaatctgtttatttgatgcgataaatttctcactaactgttgttcttggctatgcccatagttttgacaagtactgtttccattctcatttacttctaaaatacttcttcagtaca

SEQ ID NO: 478997 - DNA, 600 bp, Homo sapiens
tccaactgggtccatgctcttctccttagcaaaagatgtgttttccttgaagatctgggctccaatcctggccccgtccctcatctgtgaaagcagtcacagaatccaccttgcagggctggtgagggaacagtgtgagatggaagcccgtgtgggtgccagtgggtatccattcccattgcttccccaaaaaccacagccttctgctgtgcccccactccccagaggctctgatgggctgcacctggtccgggaggtctcctcctcctgcccttctgtgccttccttagctccatgctgcatcctccttgccttccccagggacctacactcgccaggtgccaggctgtgtgctggcaccggagctctgggctgggtgcagacagtgatctctgccctgaggagctcccagtcttcccagtctgatggaagaagcagccacgaaggcccagcatcaccatgcaggggtgaagcaatgctgggcaggcacactggctcttccaggcaccccattctctctggtggttctgacccccaggcctgcctgcccaccctgactctatctctggccagaccacacttctgagcatcagtcatgtt

SEQ ID NO: 478998 - DNA, 561 bp, Homo sapiens
gctaggcacttcaaatgcctgattgctccgaatcgccacaaaactctcggggagctggaattgctttgaccacaaagacaccgaggctcagggaagggagacagcgaggaggccagtgtggacacccggtggaagtgacaacacagggaggtgacacaggaaggaatgaaatgcctgaagccagtgttaaggagccagctccaaggaccaggggcagatgggatgctgtagatgggatggaaagagcccagggcaacacacgggactcagccccaagccccggggaggatggtggagaacaggaagaacaggcttacgggaagactggaggtatggattttggggaggaccgcagagctaagccgccatttcgtcccatcatctcatggccacatgctgtccctgtcaaggccatgccctgggcaaaagcttagagaaggggaggagctaggcttggctgcccaccgcccttgctgtgccttcaggcctcctccctggctgctcactccttttgtctgtgtacatagagctccatgtttctccaggccccacgttcctctc

SEQ ID NO: 478999 - DNA, 572 bp, Homo sapiens
tacttgaatgactcccaggcatcatgggaagcagaaattggaaagccttcagaactgggagctgtccagctgtctgcccatcccccaccaccacactcctactcccctccaggcatggaagtttcttctttctatcaacatattgtagcataattcttaaagaaacttttactttaaatcacttttattgtaagcctagaaaagaaacaggaccaggagatgaacctagtgttgacaagaagctggatataaagttgaatgtcaacagaccttttcttcaaggagcacagtacatcggatacatccatggaagctccattaaaagacggagtttcactcttgtggcacagggggctaagaaaggctttctcaaggagacacttgagcagggagagaacttgtatggtggaaagggtcagaagtactgatctcagttccactctgtcacttagtagcagaccttgtacataccttgattgggactgagcacattgtcttcagaataaaatcaggcttctattggtgtagaaggaagtaagccaatggatggcaggccaacaactggtcatgtc

SEQ ID NO: 479000 - DNA, 740 bp, Homo sapiens
gccagcagttctacctactacgtaagcccccctcctccctgtgcaagttcccacagaggccgccatgtatatgcctgaaaaggggaggaaaattttacctgggagcttgccaattacacaaagaacagaaggcatcggtgctggaccctgcatgcttatctgttcagggcttatctatgccccctggccccctcaacccctgtccacctgtcaagaagaggccatcctgggcagcacattagaggcaaatggcccagatgcccagctgagggcaaacctccattcctggaggaggaggtcgcctctgggagcaggaggacctgctggaacccctgctcacaggctccttttcttgctctccagcacctcctgcaggcaggcaaacacctccagcagcagtagcggcagggccttcagcagcagggctgctgctctgctgaatgagagaagtccctctccagctggtcctgtgcagtcccagggcagcggcaggagggctctggagcttcctctagctccagcgctgtccctggaaggggctctgcccctggtgctggcactggctcaacagctggcactggaaatagctgtgtttctgcacctgaagcaggagctgcaaaaggagagaggtcaccaatatcactcactttccactggaatttccaaacatgaaaacaacctcactgaatttaaaggaatttcagcctgaaaacattgtccctggaaagacttccagactg

SEQ ID NO: 479001 - DNA, 562 bp, Homo sapiens
gtttctgtgagctgatttttcctggatgccaaacaagagctcaggagtgagtgtggatacaaaaaggcatgctgagctgctaacacttcagctgtctgaagatggcagagctaaaggagcactgtaatatgcccactggggcttcaggaatcacaggcaccccccctaaccccaggggctgctatggggcccacatggagtttgctcctgccaacaccccaaagctctcttcctggctcctatacctgctcacctgcatgctctctcctgcaagaggtggaacacagcagtgtgcatgcccagcaggacagaggaaagccatccctgatcctacctcacaggggacctcacagaagtcagccagtgttgactgcttggaaccaagctgctgtgagtgggaggctgcaggtgcaagacttgctttgccaagtgtgtgggagctgagtggggctaactgctgcctgctgctccctattcctcatacagatgcttctctgcagaagaggcagctgtggtactccctgcaacattactcctacagccagaggaccactatctgatc

SEQ ID NO: 479002 - DNA, 534 bp, Homo sapiens
tatgactaaacacaaccaaaaaggaaagctagaaagattatattagacacttacgtgtatggatcattatggccaccattgtaaaatggcagaggccaaaagaaagtattatcaattggttacaaggtcaagctcctaaggacataaaacaagatgaagaactgcagcaaggtttgttactgaccagtttgccaggctggcttgatcagcaaacttttggggtcctaggcctgcattctatcctaagtttaagggatgcatacaaagggagtgtcctgtggtacagcgacacaaggacccacccacaaagagaggacagaggaggaaaaaggagaaaggagatgttttttcagaagagtcctagtgattcaggaggcaatcaagagaaatatgggctgcagatgattggttactcacctaagaagaggggagcaaggcatccctagtttcttctttttcctagtaaatacctgagtgttttctttacctggttgaataattcagatttcaggccagtaggggtggtgtccctga

SEQ ID NO: 479003 - DNA, 476 bp, Homo sapiens
ctctggaactgcttacatgcagatgaggaggcctgaagactctctggcatatgaacagatgctttgggcttcctcaagttcctttccgactcctcagaggtcgcccccagaaccttccctgggaagctttccatgcccctggatagattttctggagcttcaccttctgtgtctccttgctgctttcacctgtggacatggaggactgccagggcctgggcttgcccttggcctgacttgtccctggagattcatcctgaagctgcatcagatccagagactcttggatccttccaggttgccccatgtgttgctccagttgtctccagagttcaggactgactggaaagttctcaggcagaatggatgtcaagctttcctggggaaggttaggagtggagacactaaagacgtcctgagatttttggaccctagaggttgcttcctcaacaaaggccattcagggtgctgagttt

SEQ ID NO: 479004 - DNA, 1723 bp, Homo sapiens
gggttttgacaaatgcataatgttagggatacctatgacttacaggaatgctgccactgtctgtacagaggtggaggggccctgtcttttgtacaatctagggcccagtggggacattgccagtaaggatgcagtcatccttaatagccctggaatggctgtctacaggtgttcccttggcatgctgcactctgccttttccttggaacagcatgccctgagggtcagaccctcagctctcctgggtccagctggccccatgtgggtgccacaatctcagtgggtgctgagggatgtctgcaggggatttggtgatgtggagacacaagaactgagattccctgggcaggatagagtcccaaaatgggtgcacacccagtgtggtgcccgctaccatagctcaaatttgggggttgctgacagcccagtgcagtgccctcaagaaattcccaaattgccgcccacaccgatgcataagcttgtgagggcagaggagctcttcaacagtttggaaactagcaatctgtcacaggggtgagggcaacccaaaacatccccacttaccctttccatgggaccccaagtccttcaggattcaatttctgccaaattcttgcctcctccttttttctgtgccctagcttctgcttgtgaattttccaataggccttcacactcgtctcttaatcttttgagttatgatttttcacctctaactttggttcttcttttttggggagattgggtgatcagtgtctccagtcagccatcttgaagctgccctaaaagttttacattttaactgagtccaacttatgcttttgatgtgttgatgtttgttgatttttatcaccaaactgaagattacctaaattttccctcatgttatctcctagaagttttattgtttacatgtgagtcaatgatttattttgacttaaaatttgtgaacagtgtgtggtctatgtctatactcatttttttgcatgtgaatgtctagtttttccagcaccatttgtcaaaaagattatcctttctccattggactgactttgcttctttgtcaaatatcaattgactgtatttgtgtgggtttctttctggtccctctattttgttccactgatcaatttgtttattcttttgccagtaccatactgccttgatcactttggttttatattaagtcttaaagtcaggtaatatcagtcatctgagtttgtttttcttcagtattgtgttagctactctgggtttttgcctttccatataaactttaaaaaaagtttgctgatatccacaaagtaactagctcaggttttgacttgggttgcacttaacctatagatcaatttgggaagacctgaaatcttaacagtattgagtcttcctatccatgaacatggaatagctctccatttatttagttctttgatttctttcaccagagtcttgtagttttcctcataaagatcttgtgcatattttgttagatttatacctaaatatttctttttaagttatcaattttaatggctgtaaaagtgcttaaaatgaaaaaattcaagatgcaatatttacaaccatcaatcttttgtgggcaggccacctgttatctatttgtggcttaccaaagtgttataacccattggttaggcatattttttggtaaagaatatcagttactatcactgagcgtgagacactaattaatctcacccat

SEQ ID NO: 479005 - DNA, 622 bp, Homo sapiens
gggcctctggcttcatcacatcatagtgagggggtgtttgaaggatggctaggagttcaacaggatctgttgaaaaattcctttgtaagaatgtctctaaagatgtggagacagaaaataagagcagcacgccctccacagccgtggagaggggcattccccacaagctaacaccgccctcccatctcatttacccctgctttccctttgatcagatcctccgttattccctgacaacattctatacttcccaaggctgttcctttgcccccggtgtctccttcaccaatgtacacgtttcccctatctttaccagtctcataagtcaaaggaagatttatgaccataaacaaaacacttctgatgtggtgccaatgtcggtggattggtctgaacttcacctgatacttgtcaaagattccagtttttgtgacagtgtcagggtggaatttgaagctaataattaactccctgggttaacaagactgaatggctggaagcagcacacttgtgtctcagacccgatgcagcagtgtttgagacactgggcatggcattttttatagtgagagggactcctgtgcttgcatcctgcagatgaggccaaatgtttagagctacc

SEQ ID NO: 479006 - DNA, 2620 bp, Homo sapiens
ctggagaactgacactatccaacttcaagatgtgctataaagctacagcaatgtatgctggcacctgtgttggcagttatgggcaaattgattcttgggccttcaggtggttttctcagatgctggtagtgacatcagtggaccaggcaggtgggaaggttcctgggcccctgggcagtcaatgtggtatgggaaacggcatctcagtagcaactgcccaggtttctgtaatgcctttgtttcggcactactgggacccaggacagcatgcagtctgccaaaggctaggtttgaaaatggtgacttgctgtagacacttgggtcttagaaagggtgtgggacccagtgcaagccccatccctggagcacttctgtcccatggcagcttcctatgttactatgaggccaaaagtacgattcataagagaaaaaaaattgataagtggaacttcatcaaaattaaaaacttctgctctaaaaaagactattgcagagagaattttaaaaagaagctacactagagaagatattcataaaatacatatctaataaaggaattatacccaaaatacataaaaactcttaaaactcaacaatttaaaaaatccaactaaaagtgaagaaaagatatgaacagacatctccctaaaaagaatattgaattgcaaataagcacaagaaaaaatgttcaacatcatatgtcattaggggattgcaaattaaaatgacaatgagatactactacatatgtattagaatggctaaaatccaaaactctgacgatatcaaatgctagtgagtatgttgagcacaagagcttttatttattgctggtgggaatgcaacaggatacagtaactttggaagaaagcctggtagtttcttacaaaggtaaccatgcacttactataaaatccagcaatcatgcttcttggtatttacccaaattatttgaaaacttatgtccacacatgaacctgcatacaaatgtttagagcagctttattcataattgccaaaacacgaatgcaaccaacatattcttcagtaggtgaatacataaacaaactgtgatatagccagacaatggaatattattcagtgctcagaagaaatgagctatcaaatcacaaaaaatcatgcaggaaaccggagtgtattttgttccctgaataacagccaatgagaaaaggctacatttctggaaaaggtgtgacattctggaaaagagattttcaactgtaaattcaaattattaaatagttaaggacccttcagttaatctatttcaactttggagagttttgcttttatgtgtttttgaggaactggttcatttcatctaaattgttgaagtacgtgtatagagttgtttgtagtgttcccttattatccttataaaggcatcatcgagagtaatatcccgtctatcattcctgttactagtaatttgtgtcatctctcttttatctttgactgtattgttaaaagttcatcagttttaaaagacaagatttttaaaagcaagattttagttggatttttttaaactaaggttttagttttattaatttctatccgttatggttgttttaaaatttgttgattttaaggtggaagcttagattgttgatttgagaactttattcttttccaatataagtatttaatgttcgaaaaaccttctaagcactgatttggctgcattttacaaattttgatacattgtaaatttattttcattcatttcaacatattttaaaattttcttgctgcttctttgacccatagattgtttagaagcatattgttaaactgctagtttggagactttcttgttgtctttctgtcactgatttctagtttaattttactgttattagaaaacatacattttacgattttcaattctttgaaatttattaatatttcttttgggacccaagatatgttctatcttggtgaatatatgcacttaaaaagaatatgtgttttgctattgtttggtggtattatataaatgtcaattcagttacaaaacaatcacaatcacaaattataatataaatgtcaattacagctaggtggctgataatactgttcagttcttctatatcattactgtttttctactaattagttatatgtattattaaaaaagaagtgttgacatctgtgactgtaattatggatttgcctgtttctctttttcattctgtcaggtttatttcatgtattttggatttgtattagttttctaggactgccatagcaaagtaccacagactgggtggcttaaacagaaggaattgattttctcagttttggatgcttaaagtccaagaccaaggtattggcagggttgtttcttcggaggcttctctccttgacttacagatggtcatcttctttttctatcttcacatgttctttcctttatgtatgtctacatcccaaactactcttacatagacatcagccatactgaaataagttccagcccaatgacctcatttaactttaattatgtatttaaataacttatctccaaatacattcacatttcaaggtgctggacaataaggtttcaaactacgaatatggggggaatgcaaattaa

SEQ ID NO: 479007 - DNA, 736 bp, Homo sapiens
agcggggatctcatgtaaaggggatggttaatgctgttcacctgaagagaaaaaagatgactggtgcctgtcctgttttgtttcagacacaaaagcaagtgacgccttggaaccagatcaaagagggctccaagtgcatgctgcacagagcaggcagtgaccctggaaggttcgatgtccctgggaacattcccactttaagttggacagaccttgaagcacatctgcgccagcatttgcacgttcatgtctcccttacatgcctttcctcctgtttgtttgggaaaaaagataaccaattccctgctggggccactgtctccgtggagtttgcacgttctgtccatgctttctccagagattctgacaaacaccttatttgtaagatgtgccccgaaggcaagtgcagcaaatattttgacaggagaataactaatctaccagttggatcaaggaacagaatcatctattataaagtggggaacataggactatagaagtttcagatggtggggttgctcttaaggtgtgaagttactgtctagagcttcctgttccccattcacaagagggtaaagatgcctgtacagatggcaagccaatggctcctaaaccatatagagtgtggcaaatgtatgacctagttgttctataccagttgctccctttgccaggaactgccaaagctcttaagctaaagccactaccagatatgctcaccccttgaaaaaggcta

SEQ ID NO: 479008 - DNA, 498 bp, Homo sapiens
aagatttttccctggacctgctgctgtctcctttatcacagtgccccttgacaaattccgatcagcatgatatctctgggcattcatatgaaggagacagtaggttctcgccaatggggtgctaatagacgtgatgcaagcaaaggcttcaaatgcgcttatgctcttatactttgccatgggaacagcctctcccacgtagccgccaccctgctgcctgggacccagaatgaactgtgtatggagtatatctttgccatctgccccacatctttaagcagaacccagcttacaagagctgatcaccagcctatctgcagccaggaggctggtagtctgaggcaagttctcattcctgttcaccgctgcctggaaatgaactcagtgctgttggcgggtgcacagtgggagtgggactcgccttttgggctgcatgggacctgggtgaggcctgtaactgctggttttcccccacttccctggcaaccttcatgacat

SEQ ID NO: 479009 - DNA, 2825 bp, Homo sapiens
cgatggaatacaaggaagcagcaaaaggaggcctcacaatcatggcatcagacaagagaaaagcttgcgcaggaaaattcccctttataaaatcatctgatctcataagacttattcactatcatgagaatagcatggtgggtctggacgtgtcatccagaagtcaggaactagagccaaaaaccttagaagtctgcctggtgttctattgtacagtgcatcagctggcagtcaaaccacaagatgcagtcttttccactcttccctccccttttcaaaggcagagaagcctcaccctgaagccaccaccaccccaggccatgatgagtactgccagattaccaccaattacctgggtatccctgctgcttatttggggcccaagagctcttcagttagcagataatgaatgctgccaggactgggtcctgtccttcaaggtagcagagtaactcccatgatagttcctcttccctagtcaactggcctcagcatttcccaggctatggatttagtatgaggtcattcagtgtcaaggtttgggaatgtgaatttctaaatccaaggccctccctccttagcttcactattctgggctctcacaacccaaaatcaagtatcacactctttgctgaccatcttgcttcattcctttccttttaagttgccttaagcatctatatacttattcaaaatgaaactaccctcagtattttaataataaacagggaaaataaatgcaaatttaatttctgttatgtgcgaggtactgtgctaagctatttacaaacattatataatcttcaccacaaccctataaagtagatgctcttttttatttctattttacagataaggaaattgagacttataggggtaaaatgtactttcaaatcttactctatacttcctttagtttttcacatttagtttgaatacttgcattaggtttagaatactttccttcatacaaaatatatatccttctattacgatttcacaaaacattttcttcatacagtgaaattgaatttcacaaatgccttttagcatacactgagatgatcacaaaatttttctttctttgttctcttaatatgatgaattgttttaataaattttttacttttacattttctttgcaggtctcagataaagtcagcatgtgcacaatgtattagtattttaatataatgttgtatttgagtcgatattatttatttagggtttttgaatctttattcctaagtaagctagctatttttgcaattcataaaatgaactggggaacaattcatctttttctaaacttaataaaatattaatagcagattattttaatacagtctatattggaattactattatttatttaggatttttgaatctttgttcttaagtgaactggctatattttttattcataaaatttgaattggggatcaattcatcttttcctaagctcaataacatttaaaataatacagaaattgcttttttcttgaaggtttggggaaaattatccttaaaatattctttacctggtattttcttcagagttagttctttaacaaccttcttaatttattctgtgattattcaaattttctattccctcttaaattatttttagcaattcacattttctttaataaaactgtccattttattaagcttgtcaaattaattaccaaaaaaggtgattaatgacatatacttttagtattttatctcctgcatatcttatattaaaatcattttctccatcaattgccctattgctgaccttctactctgtgcctagcactgctcagggtgctgggtaattactaatgaacaaaatctatggttccagactcttagggatcttatagtctagtgggcaagaacaatggtgaataagtaagaaaataaaacagtaattaaaaattgtgataagtggtacgaaggcaacaaaatacaataatagaaaataattggggtggggatacagggctcagggtagctcaaatgtagattaaaaggtctgagaagaccttatcacggggtaacaatgaaatccagacctggaaaaccagaaagaaccagctctttgaagaaaatgaagagaaaaattccaaaatatgccaaggcggtatagaacctgtcgtgtttggggtactaaaagaagtataagcttgctgaaacatgaagagtgatgtggggaaggactcgggaagattctaaagagttgagaagatttttgaagcatgctggtcttttagtggctgcctgagaatttctggaaaggtgattaggtactgacattttttaatcaaaaatggaaattgaagctgaatttgcaaagttctttgtgtaaaatggaaaacagttcagctatctatattcaagaatgggacaatttgtaataaacattgtgtggatcatgatagagtttatatatttgtaaaaataataaacttgacttttaggcagttgtaggtttacagaaaaaaatgagcagaaagtatggtaagctcccaataacacctttgtcttccaccctcatttactctcccatttcccacaacacgcaccccatacacaattttccatataattaacatcttccattactataatatacttgttacaattgatgaaccaatattgatacattatgaactaaagtccataggattttacattaggcttattctttgtgttgtacagttatatgggtttttaattttgcaaattatactttatcattttttctattattttgaaaaatgttttcatttttttcttttcaatttttttttaatttcaatagcttttggggt

SEQ ID NO: 479010 - DNA, 674 bp, Homo sapiens
agcgtagtatctgggccagaatgcaccatccctcacaacacagtcccacatggcttcccttggcagggaagggagttctgcgaccccttttgcttctcagctcaccttctgtgggctgcacccactgcctaccgagtcccagtgagatgagccgggtacctcagttggaaatgcagaaatcacccgccttctgcgttgatttccttgggagctgcagaccagagctgttcctatttggtcatcttgacagccaccaaaggccactgccaccacaggatcatggggagtactgccaggcttttgctaatgttcccttaaggccaagcccccttcagtcagcttgtgatgaatacttcctcttgtgggactcacagttaagggaagtaggctcccttgtggtttggggcaggtccagaaatgccatccaagagccaaagcctggaaatggggaccccaggagctctcttggtgctctacccaactgcggccaagctggtaactaaggtgtgatactatcaggctttggactgggggaggtggtcaatgatataaaagaagctgccctccctgccttcaagttacttataacagagtcataaacagaggcaaggctgtcacactgatttttgtcaacttttataaaatgccttaataaattctaagcacgataataa

SEQ ID NO: 479011 - DNA, 3113 bp, Homo sapiens
tctataatgagtttgtccctgaagatcaagatttaaaagaaagagctcaaaggtgtttcatctccgatatatgattggtatatctgatgaaggataaagaagtatttgatgtgagcaagttacctatacctgaatatgccctgtctcttgggcttgctgtggcaccatgcataagatttcttcagaaaatgcagaaacaacccaccaaagaattggtaatgagccaagccaataaagtaactgagccaagggctccctccctcaccaatgacaaagtggaagaatttagagccttcttcaatgagaaaatgtccatccttcagaaaggtggaaaaagactcaaagggacagagcacagactggctaatgatactagtgatgaagaacaggaggaagaggaagataatgaagaagaaatggaagagaaactggcaaaagcaaaaggatctcaagctccatctcttcctaacaccagtgaagcaaagaagatcaaggaagttcctatgcagttcctggacagagatgaggaggaagaagatgctgatttcttgaaggtgaagtggcacaatgtgtttggatttgactttaaagaggagaaaacattacagaagaaagaaccttctaaatccagcatcaagaaaaaagtgaccaaagttgcagaagcaaaaaaagtaatgaagagaaattttaaagcgaataagaagataacatgtactgatgaaggggagttggttcaacagtggccacaaatgcagaaatctgccatcaaggatgctgaggaagatgatgacacgggtggtatcaacttagataaagcaaagggaagacttcagaaagaggacaaatttgacaaagaagaatataggaagaaaattaaggcaaagcattgggagaaaagactgaaagaaagggaagccagaagagaagccaacacgagacaagcaaaggccaaagatgaagaggaagactttctggattggagtgatgatgatgatgatggatttgatccaagcacactcctagatccagataagtacagaagctctgaagattcagatagtgaagatatggaaaataaaatgtgataccaagaagaagcagggaatgaaaaagaggaagaacagtgaagtggaagatgtaggaccaacaagtcataacagaaagaaggccacgtgggacactttagagcctttggatactggcctgtctttagcagaggatgaagagctggtgttacatctgctaagaagttaaagctaaatacttcctgcgcctgccttctccttgaaaccttggttatgattgtgtagacaagatgctgaaaaacaattgatttgggggcacttagtgtttatgacaaatttctctatttgtaaaattctgaatggaccaagtaaaatatgtctacggtctgtgacccataggctgtcagtatgcaaactccgatataatggaaccaaatcaatctcatttcatatgattttatagtaccacatttcatgtgatattaaaccataaatgtggagaagattttaatttttgtgagagtaagttttacattccctccaataagagacccaaaatccaggcttatttagctctgacttgatagccaaagacctacacctgcccaatgtcaagagcacagaacttgtgctcaagaggtgactactgacacatataatgtgagcctttcagggtaaactaagacatcaagtttggaatgtcactcaagggagtacttcagaattcacaaaactacttcctttcaacatgaatttccaaaattcaaaagtattttggagtgcacagaaccagacattacagaacataaaggtttatatcaaaaattaagtttgatgtgaaagacaatgtcaagagaataagaagataaaccacagactgggagaaaatatttgcaaaggacatatctgacaagggaatgttatccaaaatatacaaagaactcttaaaactcatcaataataaaatggaataaaccaattaaaaatggtcaaaagacctaaacagacacttcactaaagatatatgaaagcaaataaagcaaatgaaaaaatgctcaacattttggtgtacattatatgggttttggcatgtgtgtgtgtgtgtagactgataaataacaaaatagtagtcagccttcaaaaagaaggaaattctgccatttgcaacaacatggttgaatctggaggacattaagctaagtgaaataaggcagacacagaaaagcaaatactgctggatctcacttatatgttaaatctaacaaagtcaaaattcacagaagcagagagcagagtggtagctaccatagactgggggtgaggaaaatgcagacaagttggtcaaagggtacaaagcaacagttatgcaggatgaataagttttgtaaatctaatgtgaagcatggtgactatactgtattgaatacttgaaacttgctaagagagtagatctcaccaaaaaaaaaaaaaaaaaaagataactatgtgatgtgataagtgttaattagcctgacagtagtaatcatttcacaatgtatacatatatcaaaacatcgtgttacacaccttacatatatacaatttttatttgtaaattatgtattttacaaatttctatttgtaaattatatctcccaataaaactgaaaaaataaagtgtaaaaaagaaaaaaataaaaataaaatgtaacaaagaaagaaaagacatggaggaaacttaaatgcatatttctaggtgaaagaagccaatctgaaaatgctatgtactgtgtgattacaactctgtgacattctgtgaggacagatcagagtatccatatgatactataattgtggatacatgtcattatatacttgccaaaacccatagaatggacaacatcaagaatgaaccctagtgtaaatgacagactttaagtgataatgatgtatcaacgtagaattcatcgattgatacgttttttgatttctgcaaaaaacatcattagaatttaaacagggattgcaccgaacctgcaaattgctttggaaagtattgccatcttaagaatattaaatgttgtaatctggctgggcgccatgcctcac

SEQ ID NO: 479012 - DNA, 675 bp, Homo sapiens
ggaaccagttccgttggacctggagttcatgctaccaaccttcatgccctcctgtgacagcaagagagagccaggagcttttcaaagagatgaccagggttataggtcacagatctgcatggagggcatttttagacacacaaatccaggcatgactgtagctgaaaaggaacaagggggaaggaagcaactagaattgcatttatcatcaatattgcctttggtccactttacatgggtgactaatgaatatctgaagactgccaaagaacaccagtcatcaccagaagctacaggaaagccatggaagaagttttcctccaagtcctcaggaggaactaaccctgctgacaccttgaaaatcataatagcaacccagtgtgaggatccaatggacttctttataaggggaaagcttctatgtttggctacctggggcttctggccttaagacttgcacccttccctgtcagcaatactgctgcagtttagagaccggtggctgttaaactgcagtacacatcagaatcacctggagggcttgttaaaacacaggaggactgaccccacctccagagttgctcatccaggaggtctgaagttgggccttgataacttgtgagtctaacacgttctcaggcgatactgatgctgcaggtccggagaccacatttc

SEQ ID NO: 479013 - DNA, 1314 bp, Homo sapiens
tacaaagacaagaattttacagctgggccaccgggggtgacatcacatatcgggcacaagatgcaaactagcttgttacgactatggctttggtttctgagaaacgggaaggcacagtatagtcacaaaactgaggtctggagtcttggtacttgcggaacagccatggcccattgggcaggaggtgcagcagctaaaatagttggagtgaaaatgggtgacatgaataacactggttctcacttcattctctacagagtaaccaaatttcttcgaaattctgtggacatggatgaagctggaaaccatcattctcagcaaactaacactggaacagaaaaccaaacactgcatgttctcactcataagtgggagctggacaatgagaacacatggacacagggaggggaacatcacacacaggggcttgtcggggggccttccagtgggcaatatgtggaagtggacatgaaaggcagtgatattgacaatcctggcctgtgtaggcaggcacaaagaagcttttctaagctctgtactgcaaaaaccagatttcttcacttatttgtcctagaattatagcagattcattcagtgtaaataacactctaaatattcctttgaaacagcattttatcattatgtgggccagcatcaataataagagttggaaatatctccacctatagctgtgcttttaagcacaattatctgtaacagtcagtgttggctgcaatctcagttggatttggtttcttaaaaaataaataaatgcaaagccaacaatgggaagcagtatgagatagatttaaagatgaataccaaaataaaggttattgttatgtgacactgatgggtttcagttctataaacttatgctattaattttcagacttattaagtatagtctgtacttaataataatttcattttgtggatagtttctattgaattatgtgaaatttactaatcttttcttctgcaatttgtatactacttttgtctttcaagtaaaataatcatttcagtttgtatttttcagctctagtataccttttgtatacatatggctctaattgcacagtgtgttgtgctacttgattacatttttagaaatttttaatggtcacctaataattttgcatatttgatcctttcttcatccttgacctttgggagttagattatttaatgtcttaatgtagtcttattggggttaaatcttcttggtgttctataattttcttttacttgaatgtttatatctttctctaggtttgggaaattctctgatattatctctctgaataaact

SEQ ID NO: 479014 - DNA, 538 bp, Homo sapiens
tcctcagataattgcctgctgacaattagctagtagaagatgtacctaaaagcaggcgaggggcagtatggacagggaattcttcagtcctgggcaactaaagcatggtctagaagtgcggggagagccttgccaccccttaaagggcaggttccagggcaagggccactcctgccaagtgctaagtgcagttttacctgagtttaagactgtgaagagttatgataaaccttaccttaaatcagaggtgtggcctccacactgtgctgtggaagagctagacttgtggacagtatacctgagctactttcaagatggagtaactgatgtgcccagagaaagtccaggccttgaaggtgacggagagataactcacaagctgccatatcaggactttggcctggcctccaacctagaaatgctcctgggcattgactgtggtagtggttttaggcacttttcattgaccaaggtggaaccctgtagtcctgtgcaacagagaggttgactgtgttagcaaaacaaaagggagcatact

SEQ ID NO: 479015 - DNA, 595 bp, Homo sapiens
ggaaattatatcatgccatgcctcacaccttgctccttcagagcatacgctggagtggtaagcatattgatcagacactggtggctgtggaggctcctgctgtctcttggagtgatggctttggtgaaaagcatctgggtggtgattttggctactcacacagattatctgtggaagctgaatctctggacaaattacctactccccaggacaggctgagctttggtgttgatcttactgctgctgcctctgaccatggagaagacatgggcctctctcctggtgccaggcagatcactagcctcagccaggcagtttctgtgagaagctggctcaggtacaggcccctgagtcctgatactctgcaattgcctcgaagagctgacttccatgactttctgagtttagtcagggtggagagtaacatttctcaagtcctggaacatctaccagggtaagactgcaggtagtctttttccatctctgggagacgtgctttcaggctgggtggccaacccttcccgttgccaagttcacttcatctcagacatggaaatgtcctcaggtcactctgctcaccatcattttgccaaaa

SEQ ID NO: 479016 - DNA, 644 bp, Homo sapiens
cctatgaccccatcaacccagatgcctcaagtagtcactcaccccattcccctaccaaattttctcagccaccttggaggattattgcccccagttgaagaatgtgataccctgagaggttatggagttttccaagaatcacacttaggaatagagttcagacaagtccctggtctcctaacttgctggccaacacattttctaccactgctccctgcattaggagttctgagaaatgagcccctggcaaaccactgctgtaagcccaagagtccaaaagctgaagaacttggagtccgatgttcaagggcaggaagcatccagcacgggagaaagatgaaggccagaagactcagccagtcagcttcttccaccttcttctgcctgctttttctagccacactggcagttgattggatggtgcctacccagattgaggatgttaattctcccaaaattgatctacagatccaatatgattccaataaaaataacagtaggttgtgtgtgtgtaaattgacaagctgattatgaaatttatatggaaatgcaaagggttgagaatagtctcaggtattcctgcatagcaacacaaaatggtctaatacacttcctaagaaacactaacatatgagggacccatg

SEQ ID NO: 479017 - DNA, 667 bp, Homo sapiens
ctgtacaagaagcatggcaccagcatctgcttctcataagggcttcaggaagtttccactcatggtgggatgggaaagggaacaagcatcacaaagtgagaggaaggaagctgcacatgtgtgggcaaaagaaagaaagagagacaggaagaagaagaaggaggaggaggaagaagaagaaggagaagaagaagaagaaaaagaggaaaaggaggaagaggaagaggaagaggaggagatggaggaagacagtgggcaatcggacagaagggctcctcacttcccagaaggtgccgaggctgggcagaggcgctccttactttccagacagttgggcggccaggcagaggagctctcagaggaccccgtatgcgttatgtatcaaatggcaagtctttttaaacgggtacgaatgaccacactattcgtgagagtacaaattggtgggcactgtctttcagcacgggagagtgaaaatggtttagtctttctggaagtgaaaatgcgggttttactgtagatgtggttaatatcagtttataattcagctaaatacttctattccccatggtcattttgactcattatacagtttaaattgattttattcttctgtaaagaaaatattgactatttatattcgtaaagggctactacttcaagacat

SEQ ID NO: 479018 - DNA, 481 bp, Homo sapiens
tctgagtcatagagctgcttcagactactgcctacattatgcaatgtcattgggtaaatattccctatccaaaagggagaaattggtcaaaagaaaggggctacaggctccatgcacatttgaaactcagcagggaagtcattaaatctaaaaattccaaaataatctcctttgactccatgtctcacatccagggcatcctggtgcaaggggtagactcccaaagccttgggcagttctacccttggagcttcccaggattcagtccccacagctgctttcacaggctggttttgagtgcctacggcattaccaggctgtacaggaagcacggctgcatctgcttctgggaaggcctcaaggagccttttactcatggtgaaaggaaaagtgggagcaggcatcttatatggcaggagcaggaccaggagagagaggggaggtgctacacactttaaacaaccagatttcacaagaactc

SEQ ID NO: 479019 - DNA, 646 bp, Homo sapiens
acggggtgaggctcctctgcctttgaaaaggggagtgaagagattttccacccggcaggcacttgtgatgcaggaatcgttttcttgtgtaggaacccaagtttttcagacttctaatcctggttcttactctcatgtgattcgctctgggctttcttccgttctgtcctatagttgcctaaagaaaacaattactattaacatcacaataaaaatgatcaacaacagtgatgtaacatctgaactcaaagttccattccctccacagaacaatgaccaacaagatagttgcaaaactcacagtggtccactatcaccttgctctgactctattccagtgaatactcaatcaaatcttctgtatgtcagcctcttttccaatttaagcaaaaacaggaaacaccagaaattacccagagccattctgttgatattcctcaaaaagtactgttgtaacttatatgcacacaaccaaatgaagaaaacatcatttgcccaactgcctaattttacattctgtgatgcccatacccacaaagtgcatgaaattttactatgataataatatcaaacaacaaaaataacacattaacaagagcaactaagtaaatctcttacaagggaataaatcttgttaaaattattt

SEQ ID NO: 479020 - DNA, 862 bp, Homo sapiens
ccaacagcaaagaccaaaggtaaatccacgaagatgaggaaaaaccagtgcaaaaaggctgaaaatgccaaaaaccagaaagcttcttctcctccagaggataactccttgccagcaagggaaaaaaactggacagagaatgagtttgacaaattaacagaagtgggcttcagaagttgggtaataacaaactcttccaagctaaaggagcatgttctaacccaatgcaaggaagctaagaaccttgataaaagggtagaggaattgctaactagaataaccagtttagagaagaacataaatgacctgatggagctgaaaaacacagcacgagaacttcgtgaaggtcacacaagtatcaataaccaaattgatcaagtggaagaaaggatatcagaaattgaagatcaacttaacgaaataaagtgtgaagacaagattagagaaaaaagaatgaagaggaacaaacaaagcctccaagaaatatgggactatgtgaacagacaaaacttatgtttgattggtgtacctgaaagtgatggggagaatggaaccaagttggaaaagatgcttaggatattatccaagagaacctccccaacctagcaagacaggccaacattcaaattcggaaaatgcagagaacaccacaaagatacccctcaagaagagcaaccccaagacacataattgtcacattcaccaagattgaaatgaaggaaaaaatgttaagggcagccagagagaaaggtcgggttacccacaaagggaagcccatcagactaacagcagatctccctgcagaaactctacaagcctgaagagagtttgggccaatattcaacattcttaaagaaaagaa

SEQ ID NO: 479021 - DNA, 498 bp, Homo sapiens
tgggaagcagcagcgacatcaccaggtcattgtcagctcaactatgtccatgatgtcaggcaacgactgtggatcactcctctacctgatccctgcccagcccctctccaggtttaggagagttttgaacttgctccagtattggattcctaatctaccttgggcacatcagctgccccagaacctgggctctgactgggcccttaagttcatatatcagacactcattgcagattccccaccttctctcactgtggtttctggtccacctgaaagggcctactggattcagaatccagaatttaatgacatagttgcttacaaattgcaaattgatggacggtttggttccaagagcttttcttcattttttactgtgattgtctttaacattggctacatacagaactttgttaaacatgtgcactgcagcaatgtaaaagacacagtcctggtttccggaatttagacttatatgaattacatttacctgtttaa

SEQ ID NO: 479022 - DNA, 3019 bp, Homo sapiens
tttgtcaacgagagtctgagctagccggataccccgctctctcccaagccatctctccaccctgggcaacttccatgcatctctctctctccattctctctctactctccctccttctgtcattctccctcccatcaatcacctttttatctcctggcattatccatgccccacatgtactcttcaccacactactcttccccactcgcaagggtggcaactgctcatgcgaagtatgccaggggacagcgatgggtcctgaggaacgcccctgtcagtaggccgcactcatggcatgtggccaagctgctggagggatgccctgaagcagccaccaccatgcatttcccttctgaagccttcagcttgtcctggcattctggctgcaacacaagtgacgtgtgtgtgcagtggtgtccactctcccggcattgcagcaccgagaaaagcagctccattggcagcatggagagcctggagcaaccaggccaagccacctatgagagccatctgttgcctattgaccagaacatgtaccctaaccagcgtgactcagcctacagctccttctcggccagctcaaatgcttctgactgtgccctttccctcaggccagaggagccagcctctacagactgcatcatgcaaggcccagggccaactaaggcccccagtggccggcctaatgtggctgagacctcaggaggtagtcggcgcaccaatgggggccacctgacccccagctctcagatgtcatcccgtccacaggagggataccagtcagggcccgccaaagcagtcaggggcccaccacaacctccagtgaggcgggacagccttcaggcctccagagcccaactcctcaatggagagcagcgcagggcatctgagcctgtggtccccttgccacagaaggagaaactgagcttagagcctgtgctacccgcaaggaaccctaataggttctgttgcctcagtgggcatgaccaagtgacaagtgagggccatcagaactgtgagttcagtcagcctcctgaatccagccaacagggctctgagcatctactgatgcaggcctcaaccaaagctgttggatccccaaaagcctgtgacagagcttccagcgtggattccaacccactcaatgaggcttctgcagagctagctaaggcttcttttggcagacctccacatctcataggacccacagggcatcgccatagtgcccctgaacagctgctggcatcccacctgcagcatgtgcaccttgataccaggggcagcaaagggatggagctcccacccgtacaggatgggcaccagtggactctgtcccctttgcacagcagccacaaagggaagaaaagtccatgcccccctacaggaggaacccatgaccagtccagcaaagaaagaaagaccagacaagtggatgacaggtctttagttttgggacaccagagccaaagcagtcccccacatggagaggctgatggacacccctcagaaaaaggtttcctggacccaaacagaacaagcagagcagccagtgaattggccaaccagcaaccctctgcctctggctcccttgttcaacaagccacggactgttcttcaaccactaaagcagctagtggcacagaggcaggtgaagaaggggacagcgagcccaaggagtgcagccggatgggtggtaggcgaagtggagggacccggggccgctcgatccaaaaccggcggaagagtgagcgttttgctaccaatctgcgtaatgaaattcagaggaggaaggcccagctccagaaaagcaagggtcccttgtcacagctgtgtgacactaaggagccagtggaagagacccaggagcccccagaaagtcctccactcactgcctctaacacatctcttctatcttcatgtaaaaaacctcccagccccagagacaagctcttcaacaaaagcatgatgctcagagctaggtcttccgagtgcctcagccaagcccctgagagccatgaatctaggacaggcttagagggacgaataagccctggccagaggcctggccagtcctctttgggcctgaacacctggtggaaagcacctgacccatcctcctcagaccctgagaaagcacatgctcactgtggagtccgtggaggtcattggagatggtctccagagcataattcacagccacttgtggcagcagccatggaaggcccttccaacccaggtgacaacaaggaattgaaggcttctactgctcaagctggggaggatgccatcctcttgccttttgcagacagaagaaagttctttgaagagagtagcaaatccttatctacatctcatttgccaggtttaaccactcatagcaacaagacttttacccagagaccaaaacctatagaccaaaacttccagccaatgagctccagctgtagggaattgaggcgccatcccatggaccaatcatatcattccgcagaccaaccatatcatgccacagaccaatcatatcattccatgtcaccccttcagtcagaaactcccacttactcagaatgttttgcaagcaaaggtctagaaaattccatgtgttgtaagccactacactgtggtgattttgattaccacaggacctgctcttactcctgcagtgttcaaggagctctagtccatgatccttgcatttattgttctggggaaatctgccctgccttgctaaagagaaatatgatgccaaattgctacaactgccggtgccaccaccaccaatgcattcggtgttcagtttgctatcataatcctcagcacagtgccctcgaggacagcagcttggcacctggcaacacttggaaacccaggaagctgacagtgcagtggggcgggggaagtgaggagatgacggctgcagcggtgtcagcccaggaccagcagctctataagagatggaggtacgatttgcaggttgcagcaattggcagcagtaatgcatgcgggtgaggctgtgcct

SEQ ID NO: 479023 - DNA, 1227 bp, Homo sapiens
ataggaaaggcagaattttaagaaacctaacaaatcctatactcatctgatgttttgcagggaaatggctcattccaagactagcttttcatgggcaacccctttccatccttgccttgagaacccagcactggacttgtcaagctaccgagcaatttcttctcttgacctccttggagacttcaaacatgctttgaaaaaatcagaggaaacttcagtttatgaggaggggagctcccttgcctccatgccccacccactgcgcagccgtgccttctcagagagtcacatcagcttggcgccccaaagcacccgggcctgggggcagcataggagggagctctttagcaaaggtgatgagacccagtcggatcttctcggagccaggaagaaggcctttcctcctcctcgccctcctcctcccaactgggagaagtacaggctctttcgtgcagcccagcagcagaagcagcaacagcagcagcagaagcaacaggaggaggaggaggaggaggaagaagaagaagaagaggaagaggaagaggaggaggaggaggcagaggaggaggaagaggagctgccaccccagtatttcagttcagaaacctctggttcctgtgctctcaatcctgaggaggtcctagagcagccacaacccctcagctttggccacctggagggctcgagacagggttcacaaagtgtcccagcagagcaagaatcctttgcactccattccagtgatttcttgcctccaataaggggtcacttgggatctcaacctgagcaggctcagcccccttgctactatggcattggtgggctttggaggacatcgggacaggaagccactgaatccgccaagtaagtacatatgaaagatactaggtctctgaagaggcaggcagcacaagtttgaattttacctccactatttactaactggatgacctcaggctggccagttaaactgctcccagcctcagttttcttacctggaaaatgggtataatgatacttgcttcacatgattgttatgaatattaagataatctacataaaggatatagctccatgcttagcacatagtacatgctcagtaaatatcatgttcttatccctaaatatctttattaaagtactatacttttccttagtgtgtcttcatggtatccatcaatttctggcccctgatcccaaaggcattgaacacttgttgcctatact

SEQ ID NO: 479024 - DNA, 630 bp, Homo sapiens
ttaagacctgaaggagttttaacccctgctcctctggccaccctccggatggatccctgtggtgccaggcaggaatgggctgcttggggacccagcgagctcccggggcctttctgctgcttcctctacccctgtatgtcactcggttctccaagctgactcagctccagagggtctgtgggtcctttcggcattgctggtttgttcttgcagtcgatctggagaaggcctcctctgaccactctgcaggtgaaggatggtgccgccttattacttccaaggagtctgggactccttgttacttctgggtggagagctggagaggatgtgatctcaactttcactggccactgattctaccaggaataggtcttccaccttggaaatcttggcaagattggagctaccacttgactgtgaacacaatgaagctgctttcccataacacagagatgtgcgggaaaagtcgactattcttttcaccagctaccctgtctgaatcctccctacagagtgggaattggggatggaaaacaggcggttccgggctgcttccacaactctatataggctttacatagaacagaactgtggaaaacgggatatgatgatgtttgccaactgccaaac

SEQ ID NO: 479025 - DNA, 613 bp, Homo sapiens
cagctccagggagtgtgcagccccagctgcgcagctggcgtgatggcggcagccactgccatcagtagttatacacgtacttgtgatattcaagttcaaagtttcagaaatggagcagttccaattaccagcaaagtccgggatgtggttacagttgaagcagaaaagagaaggtcgtcccaattaaacaaagccagaaactactgtgaatgcgacaaaaccagggactgtgtcttggttacagttgtatccccagtatcttgtacaatgccagacacagagcaggatctctccacttccggattcctggatatggggatgggagattgcatttggcttgggtgtctctttgtcccaattctcctcagtcctggacccacacagatggcaccagcaaacaattgtttggggatgagcaaatcctctgagctaactgtcctttaccacttccattgggagtaggtgcaaccacattgatttaattaaagatacaataaagtcaaactgcagaaaacacttagaatgatacttctctgccttgatacaaaccactgtctgtattgacttgcaaactggaaaattttggagggatcatgtgtatgcttcatttctt

SEQ ID NO: 479026 - DNA, 555 bp, Homo sapiens
acacagcacagctgctctgccaaaatgcagccagaatgcttaagttggtgcctgatcttgttcctcctgactgggagagaccaccaaacgggtctccagtcacctcctacagacatgttcaggctggcaaaagtgcccctgttcctccaaatgaccacaacacttctccagcaagggctcagaactgggctgaggctgacatagctgaaatgacagaagtaggcttcagaaggtgggtaataatgaaatttgctgagctaaaggagcatgttgtaacccaatgccaagaagctaagaatcatgataaaacaatacaggagctgacagccaaaatagccagtttagagaggaaaataactgacatgttagacctgaaaaatatacaagaacttcacaacagaatcacaagtattaatggcaaagtagaccaaacaaaggaaagaatgtcacagctggaagactatctttctgaaataagccaggcagacaacaatacagataaaagaatgaaaaggaatgaacaaaacctctgagaaatatggaattatgtaaagc

SEQ ID NO: 479027 - DNA, 1243 bp, Homo sapiens
acccgatcgtagacgacccttacatgatgggcaggatagcatgtgccaatgtcctcagtgacctctatgcaatgggggtcacagaatgtgacaatatgctgatgctccttggagtcagtaataaaatgaccgacagggaaagggataaagtgatgcctctgattatccaaagttttaaagatgcagctgaggaagcaggaatgtctgtaatggtcagccaaacagtactaaatccctggattgtcctgggaggagtcactaccactgtcttccagcccaatgaatttatcatgccagacaatgcagtgccaggggacaaatggaataagattaagctagtggtcaccgaagatgtagagctggccaaccaggaggcgatgatgaacatggtgaggctcaacaggacagctgcaggactcatgcacacgttcaatgcccacatggccactgacatcacgggcttcgggattttgggccacgtgcagaacctagccaagcagcagaggaacgaggtgtcgtttgtaattcacaacctcctggtgctggccaagatggctgcggtgagcaaggcctgcggaaacatgttcagcctcatgcatgggacctgcccggagacctcaggcggccttctgatctgtttaccatgtcagcaagcagctcggttctgtgcagagataaagtcccccaaatatagtgaaggccaccaagcatggattattgggattgtagagaagggcaaccacacagccagaatcatagacaaaccccagatcatcaaggttgcaccacaagtggccactcaaaatgtgaatctcacacccggggccacatcttaatctagacagaaatagctgtttggttttgtttttaaatagatctatttcccttatcacttcaactaaagactataaacaacaaaaatctcattgtgtctacacatcggggtgaccttaggtcagtttgtaagtggatacaattaataaaataaaatccactgcctttttttcctgttacattaactgaagatgcacctaatcttgaggcagcttctgaattgagaattatattgttatccaatgctgttgattcattttgaatctttagacacttatctcttgccgcataggctctttttaaaggtgctttcacatagcacagacattaccagtagtcatgtcaaatcgcagttggtgtcttcattttatgtatatttatcaagtaagtctgatttttttattaagca

SEQ ID NO: 479028 - DNA, 1203 bp, Homo sapiens
cctgcctccagtagcacaaatggatgtgtctactgaatctgctatgggactgaatttagcagacctgcttctaaggggtccatatccaggaccaaggttagcaggcctattacctaaaacatggtgtaggcatgactcctcttgggtttcttggcatatggattgggtggcagatccaagactaaacaggactgtagctgagtccacagggggcaacaatgtttctaggtctgtagccaggactgtggtgcccatagtgggagaaggtgagaccagccacagtaatagtgacactgataatgtgaaggtcaccatttgcagcataaagaaatgtttctctgtgttcatgcgtgtgaccttaaatttacttaagaaagccaggggacatccaaaaagaaggaaaacagtacaaaaggaatttgagttacctgtttgttacctgtgcttgaaatgttacccttggtatcagatggaaagaaacataggaaggcaatgataactgtcatagtgataactgtcatcactatagactggttgtgatattctgtggctgctttgtggggtttttttgttttgatattttattttattccaatcttttcacagagatatttttgagtgttgtcttgtttaggattttattattgctgctcttgtcattctgtgcattttttgttgaaaatttcagagtttatagggattgggaaggcctggaagaataagatctagctatgttaatagagattctttacagatgcaaatttttccccacaaagaacagctttgcaaggccatttcaagatatggcaaagaagcatgttttggagtaaaatattttaattttcttccttgtcttgtaatgttatgccagagtcagattggaaaatcataagttccatttgataaggtacaatgtctgttggtttattagccagtgcctaacactaccatttaatatgtattcaatgaatatttgttaaatgtattgattgaatttaaagtgactactcagcctacttctgccccttggagcttggattgtttcttcaaaggtattgatccttttgactattttaattatgaattcactaaagacatctggaaggcttattgtgtcaagcagtgccaaatccatggcttgatgaacctagatccatccccttcccctttccatatcacagatgacaacttgatggttggcct

SEQ ID NO: 479029 - DNA, 663 bp, Homo sapiens
catccgtgggaagagaccaccaaacaggctttgtcaaagggagatagggatggggcagttttataggatttgggtaggtagtggaaaattacaatcaaagggagttgttctctggcaggcaggggtagtggtcacaaggtgctcagtgggggagcttctgagccaggagaaggaatttcacaaggtaatgtcatcagttaaggcaggaatcggccattttcacttcttttgtgattcttcagttgcttcaggccatctggatgtatatgtgcaggcttgggctcagaggcctgacactcagcagctactaccaccattggcaccactggcaccactgccaccaccccactgcaccccagttgcttcactctccatcacagaagccttttcagcaacagccaacatttgtaccctcaccaagccctctgattttcccaatcacaaggccttcactacaatattttcttcattcacaagtgtcacctattctccatccccaaggtgccaataacatcttattctcagttgtgacaataaaaacattttccagacatttctagatgtcccataggaggtaaaattgccctgaggtgagaataactggtatagactttgcattccatatgctatctgtcacaactactcagcagtgccattatagca

SEQ ID NO: 479030 - DNA, 607 bp, Homo sapiens
agcttcattctcctgtgttctccatggttcctattgtttctctggtgaatttcagcatgctctcttacatgatccactcgaaattaaacatgaaaaatgctgaggcccacatctacttgagtgggtacccacttgtaaaggatacccagtcccatatcctagatgacattgtcttggcccaaaatctcacctatggagatgacatagcttcagaggatattgccccaactcaaaactttactgctggctctggcctccactgctgccagtcccagaccctagctgtttgtcacatatacatagctgaggaccccaacagccctcataatctttgcgaaactcccacagctcttgacacaaaggaccatgcagttgccaatgttgtaggcatgcctgagctgactagactcggcccctatctgccgccacaccaccagacccagagccacactatgcccctgcatttggtttcctatggtctagacccagtgccacagtgcacctagtatgtctccctttttcctccttaggaaccaaatagccattctatgaaatgtctttctttcctttttctctcttgctcaccaattgactcgtaagcacttcc

SEQ ID NO: 479031 - DNA, 690 bp, Homo sapiens
ctctctcgccatttgatgctggctccctttcactatttgccatgattgtaagcttcctgaggccctcagcaggagcaaatgatgacactatgctttatgtacagcctgcagaactgacagctaaacaaacctcttttctttataaattacccagcttcagagctggcaggcaggaacgtttaagtctgctgaagctgctgccacagctgctccttcccacaggtgctctgtcccagggagatgggagttttatctataagccgctgactgaggctgctgtctttctttcagagatgccctgcccagagaggaggcatctagagaggcagtctggctatagtggctttgctgagctgtggtgggctccgcccagtttgaacttcctggtggctttgtttacaccgggtgtgaacggttctgtctcgctggcattccagatgccactggggtatgaaaaaaacctcctgaagctagctcggtgtcttctgaaacggccacccagttttgtgcttgaaacccaggaccctggtggcataggcaccggagggaatctcctggtctctgggttgtgaagaccgtgggaaaagcatagtatctgggccagaatgcaatgttcctcacagcacagtccctgaaggcttttcttggctaggagagggagttcctcaaccccttgcacttcccagctgt

SEQ ID NO: 479032 - DNA, 2207 bp, Homo sapiens
ggcactttgggaggccaaggcaggcggctgggaggtggaggctgcccgccggacccgcgctagcagcgtggcagcagcgtggcagcagcgcggcagcggcggcggcggcggcgggcggtccagcgggtgtttctctcgggtcgcagggtctcccagcagcgtggtggactacctgatcagcggtggtaccggctacatgcccgaggacgggctcatcgcgcagcagctcttcgccagcgcctaaggcctcacctaggacgccttcctgattctcccaggactcatagacttcatagctgaggtggaccttacctcagccctgacccggaagatcacgctgaagacaccgctgatctcctcccccatggacactgtgacagaggctgacgtggccatcgcgatggctctgatgggagatactggtttcattcaccacaactgcaccccagagctccaggccaaggagctacggaaggtcaagaagtttgaacagggcttcatcacggaccccacggtgctgagcccctcccacactgtaggtgatgtgctggaggccaagatgcggcatggcttctctggcatccccatcactgagacgggcaccatgggcagcaagctggtgggcatcgtcacctcccgagacatcaactttcttgctgagaaggaccacaccaccctcctcagtgaggtgatgacgccaaggctcgagctggtggtagctccagcatgtgtgacgttgaaagaggcaaatgagatcctgcagcgtagcaagaaagggaagctgcctatcatcaatgatcgcaatgagctggtggccattatcaccggcagcgacctgaagaagaaccaagactaccctctggcctccaaggattcccaacaagcagctgctgtgggcgtcgacatcatagtcttggactcgtcccaagggaacttggtgtatcagatcgccatggtgcattacatcaaacagaagtacccccacctccaggtgattggcaggaacgtggtgacagcagcccaggccaagaacctgattgacgctggtgtggacgggctgtgtgtgggcatgggctgcggctccatctgcgtcacccgggaagtgatggcttgtggtcagccccagggcactgctgtgtacaaggaggccaagtatgcccggcgctttggtgtgcccatcatagccaatggcagcatccagaccatggggcacatagtcaaggccctggcccttggagtctccacagtgatgatgggctccctgctggccatcaccatggaggcccctggtgagtacttctcagacgaggtgcggctcaagaagtactggggcatgggctcactggatgccatggagaagagcagcagcagccagaaacgatacttcagcaagggggataaggtgaagatcgtgcagggtgtcttgggctccatccaggacaaagggtccattcagaagttcgtgccctacctcatagtgggcatccagcacggctgctaggatatcggggcccacagcctgtctgtccctcggtccatgatgtactcaggagagctcaagtttgagaagcggatcatgtcggcccagatcgagggtggcgtccatggtctgcacttttatgaaaagcggctgtactgaggacagcagtagaggccaaggtgatggagggggcacagcctccccccataactgagtggtccacagatttgcattacgggttccccagctcctttccagggagagaggaggggaggccctgaagggtctccgggccctcgctgggcatcccctgcagagtcagggctgctccctgggccaggctgccctgggagccccccgagcccagccagccaggttctcaggccctgcacctgcctcaggtctttcttgctgcagcctgctccagcccagcccccatcccaggggcaggcagcccctcctggtttctcctgtagggcacctccctgcccccagcccccccaggaaatggtgctctcctggccctgcctctggcccttcaacaaagagaaggttggaagttttgtaaaaaggaagtgttatgtattgctcttcaagaaagttcactggcactagtaaggttttggagagctggcaagttttgattggttgtgaagatgaagtaaaggaactttgagaaagagactgcagcagtgcccagtgtgcccctcttggcactgacagccca

SEQ ID NO: 479033 - DNA, 2315 bp, Homo sapiens
gttcatccgcaggtgaggaatgcaaagccagactgacacagagagcatggcttgccctgagaaacctgtaccccaggtgatcagtagatggcaagcgcaaggcaattacgtttgtcgaccccagctgctgggggctaaccctacccttccccaacctggcctaactgctgatgtcagctctgtccaggctgttcgcagctctggagccaagcctggcccagccccctgctttagtgggaaacttgagatgctgagagggggcagcagcatcagggccagggtttcttgggacccaggcttgcatcactcagtgccaccctccccaggggaacaggctccaagctgtgcctgctcctctctggtgactcacaacacgactgatctccaagatctaaacctgattgtgcctggaagtgaagaaggaggacaaactgtggtctgctttgacgtcagctatgcagatgtgctgaggctgttcggcatgttggttccaggcctgggatgcagccggcagcaccagaggcggggagggaggggacactaggggcagcctctcgctgaaggatgcccagaggcaccccagtgtgtgaaaaaaaaaaagagtaaatggaactagatgtgtggagcaaacttcgcaacctttgggggaaggtctacacttaggggttaagcttctttccagattccctgcttggagaagctgccttcatagagggcagtggttcttaaactttccttttggttacttacttgagaattgactaattgttgtgaatcctcttcctagaaaaattcacttacaaatgtgagggaataaaacaaagttgcttggtatttcctttatgtttggtattctgaaatttgatcatagttaatctgggtgtaagtcttttttgttttgttttgtttattcttcttggtctacagtgggtcatttcaatgtgaaagcttttgtgttttttcacctccagaaaatattccattatttatttctttatttttcctcctccatttcctctgtttccttatgctggaattcctgttaaatatggggatagttgctacctggggcattcactggtttggtgcggagaaaatctccactgcagctggctgattagtacaagtgtcagaagtaaggggacagttggcacaaatactctagatacagttgctcaattaagcaccccaaggagtagcccaaggccctcttttctttgtatcaaacaactctgacattagggtagagttctttcttaactctatttctatttttgcacttttgaaatagtcttctggtgcaggactttttttgcactactatcaatcttttccttcttacctgccttggtgttaaacttaaaatgatctgtattctccctcctttccaaaattataaatttcctattttcttattttactatttttatgatttcatgttttacattcaaatctttaagccatctggaatttattctagtgtcagccatgacttggggccctaacttaattttttctaatgaaacactgttttagatgtatctcttgcacatgacactaattgcattttattttgtgactccaggagttgtttctaaaaagtaagattactgggtcaaaaataaagaaagcttttgtagctcttaaccctcatgaccaaataaattgtttttcacaggttggaccactttagcttgtcaccagccatttagaagcaagccatttccccacccctgccagcacgactattatagtcctgcttaaatttttaataggttaaaatgggacctcactgttcttttatttgctttccttggcttcatcaaattttactttaacgtattttaactgggcccttgattgccacagctgcaagctctggcctcccaattccaggacctgtgctgatggagtcaggaaacatttgaatagcctcggtacagcttattctaccgccctccccaaccctcctgcccattctctcccatttcatcccacacaaacacacaaatctcaagagctcaacactaatccctcccagacctgggatctgggatgctacccactggactctcttgaatcacctctgctgcagttcatacccaggacactgggctcaggaaaccactcaggctcctgagctgtatgggggacctgcttttcctgtccctagggcttggggctcaccacacacatctgtgatgtccctaaattattagaggggctctagatctactggccaatttgctaaggtgctttgcctctgtctctctgggttcccggtcccaccctaggcacctcctccaccttcctgc

SEQ ID NO: 479034 - DNA, 3376 bp, Homo sapiens
ctcggaccaatgccagttttaggagagaaacagcgagctgcagagttcctgtcagaaactggactccatggccatccccaagtctcagcagggagcatgtgtggttgaagcctgggtccagggacccagggacggcgctgcagcgaagccaccctgctcaccctggctgtacggcacgcagaaaattgtacaagctggagataaggaccttgatgggcagctagactttgaagaatttgtccattatctccaagatcatgagaagaagctgaggctggtgtttaagagtttggacaaaaagaatgatggacgcattgacgcgcaggagatcatgcagtccctgcgggacttgggagtcaagatatctgaacagcaggcagaaaaaattctcaagagaatacgaacgggccatttctggggccctgtcacctacatggataaaaacggcacgatgaccattgactggaacgagtggagagactaccacctcctccaccccgtggaaaacatccccgagatcatcctctactggaagcattccacgatctttgatgtgggtgagaatctaacggtcccggatgagttcacagtggaggagaggcagacggggatgtggtggagacacctggtggcaggaggtggggcaggggccgtatccagaacctgcacggcccccctggacaggctcaaggtgctcatgcaggtccatgcctcccgcagcaacaacatgggcatcgttggtggcttcactcagatgattcgagaaggaggggccaggtcactctggcggggcaatggcatcaacgtcctcaaaattgcccccgaatcagccatcaaattcatggcctatgagcagatcaagcgccttgttggtagtgaccaggagactctgaggattcacgagaggcttgtggcagggtccttggcaggggccatcgcccagagcagcatctacccaatggaggtcctgaagacccggatggcgctgcggaagacaggccagtactcaggaatgctggactgcgccaggaggatcctggccagagagggggtggccgccttctacaaaggctatgtccccaacatgctgggcatcatcccctatgccggcatcgaccttgcagtctacgagacgctcaagaatgcctggctgcagcactatgcagtgaacagcgcggaccccggcgtgtttgtgctcctggcctgtggcaccatgtccagtacctgtggccagctggccagctaccccctggccctagtcaggacccggatgcaggcgcaagcctctattgagggcgctccggaggtgaccatgagcagcctcttcaaacatatcctgcggaccgagggggccttcgggctgtacagggggctggcccccaacttcatgaaggtcatcccagctgtgagcatcagctacgtggtctacgagaacctgaagatcaccctgggcgtgcagtcgcggtgacggggggagggccgcccggcagtggactcgctgatcctgggccgcagcctggggtgtgcagccatctcattctgtgaatgtgccaacactaagctgtctcgagccaagctgtgaaaaccctagacgcacccgcagggagggtggggagagctggcaggcccagggcttgtcctgctgaccccagcagaccctcctgttggttccagcgaagaccacaggcattccttagggtccagggtcagcaggctccgggctcacatgtgtaaggacaggacattttctgcagtgcctgccaatagcgagcttggagcctggaggccggcttagttcttccatttcacccttgcagccagctgttggccacggcccctgccctctggtctgccgtgcatctccctgtgccctcttgctgcctgcctgtctgctgaggtaaggtgggaggagggctacagcccacatcccaccccctcgtccaatcccataatccatgatgaaaggtgaggtcacgtggcctcccaggcctgacttcccaacctacagcattgacgccaacttggctgtgaaggaagaggaaaggatctggccttgtggtcactggcatctgagccctgctgatggctggggctctcgggcatgcttgggagtgcagggggctcgggctgcctggcctggctgcacagaaggcaagtgctggggctcatggtgctctgagctggcctggaccctgtcaggatgggccccacctcagaaccaaactcactgtccccactgtggcatgagggcagtggagcaccatgtttgagggcgaagggcagagcgtttgtgtgttctggggagggaaggaaaaggtgttggaggccttaattatggactgttgggaaaagggttttgtccagaaggacaagccggacaaatgagcgacttctgtgcttccagaggaagacgagggagcaggagcttggctgactgctcagagtctgttctgacgccctgggggttcctgtccaaccccagcaggggcgcagcgggaccagccccacattccacttgtgtcactgcttggaacctatttattttgtatttatttgaacagagttatgtcctaactatttttatagatttgtttaattaatagcttgtcattttcaagttcattttttattcatatttatgttcatggttgattgtaccttcccaagcccgcccagtgggatgggaggaggaggagaaggggggccttgggccgctgcagtcacatctgtccagagaaattccttttgggactggaggcagaaaagcggccagaaggcagcagccctggctcctttcctttggcaggttggggaagggcttgcccccagccttaggatttcagggtttgactgggggcgtggagagagagggaggaacctcaataaccttgaaggtggaatccagttatttcctgcgctgcgagggtttctttatttcactcttttctgaatgtcaaggcagtgaggtgcctctcactgtgaatttgtggtgggcgggggctggaggagagggtgggggactggctccgtccctcccagccttctgctgcccttgcttaacaatgccggccaactggcgacctcacggttgcacttccattccaccagaatgacctgatgaggaaatcttcaataggatgcaaagatcaatgcaaaaattgttatatatgaacatataactggagtcgtcaaaaagcaaattaagaaagaattggacgttagaagttgtcatttaaagcagccttctaataaagttgtttcaaagctgatcatggagccagtatttttctgacgggggcctgggtggtctgggggtgctgacatgttagaaaatgcgccctgttttcccctctggagcctggtggtgccccctttc

SEQ ID NO: 479035 - DNA, 424 bp, Homo sapiens
ctactgtcttatggaaactgcctgggacttgcacctgacttcctccagttgtgttaatttaatctctcaccaagctccagacacaatctggcaccatgaagggcaaatagaaggcttctgtagctgtagctgtacgtcagtgtttcaggcttttgtccgccttgcagctcttcccactttgaccatgatttcatggctgtttagtatctggtcttcaactcattcctctctggatgcttctgtattcctgaaaagcaggctctcagagactgagctgtttgacatcagctgccagatgtttgaatgtggagaaaagggccagagggatgtgacagagttgaaaaaggaagttccaaggtgcagcctgcatgtcgatgtttggtatgacaaggacatgtgagtgggatctgactgaaggtgagtt

SEQ ID NO: 479036 - DNA, 676 bp, Homo sapiens
gggcactggctccgagagctgatagatgtgggtgagttttctgcaacgtgtctgcttcctcttcgccttctgccatgattgtaagtttcctgaggcttccctagtcatgcttcctgtacagccctcagaactggctggagaacatatggaaaacttcctgaatgaacagtgcatcaaaggatgggaaggattttggagcaaggccctgccatcttctgcagataactactgtccttttgagagatacctcttggcctgttactgggctttggtggaaactgaacgtttgactatgggcactacccgaaagtggatagctgcagcaccacagcccctttctaggaaattcctgaaggacggtggtgaaaaggaatctttccagtgggcagaacttcaagaagtgcacctggttgtgcactttgcatggaaagagaaatggacagatgtgcgattatatactgactcatgggctgtagccaataaccatcaataaccattggctggatggtcagggacttggaagaagcatgattggaaaattggtgacaaagaaatgtgaggaggagggacctactacttcagaaattcgtatcaaattatgcacaaaacagtatgaactgaatattgagttaatgctcttgagtgtctattaagtatacctgagtgcagatgtatc

SEQ ID NO: 479037 - DNA, 704 bp, Homo sapiens
tcggatataagaagtaaaataaaaatgatatgtcaagaaaagcagagaaaagtttcaaaaggactgaaggaattgacaatatcaaatccagcaacagcatttccccaaagatgcacagagaaaatgagttacagcttctatttttgtcccgtgctggatacttcctgccctgaaacatcagactccaatttcttcagcttttggactcttggacctgcacaagtggttcgccagggtgtctcaggccttcggccacagactgaaggctgcactgttggcttccctacttatgaggttttgggactcggactggcctccttgctcctctgcttgcagatggcctattgttttgcacgtggatacccacttgttccagcaccatttgttaaaaagacaagtttttcttcattgtattgcctgtggccttttgtgaaataccagttgactatgcaggcatacctcagagatattgttggtttggttctagagcactccaacaaagtgaatactgcaataaactattgtaaaaggggttgagttcttcatttgattctctgcttggtcgctgttggtgtatagaagagctactgatttgtgtacattaattttgtatctggaaacttgtatctggaaactggataattcttttatcagttctaggagctttctggaggaggttttacggttttcaaggtgagacagaa

SEQ ID NO: 479038 - DNA, 879 bp, Homo sapiens
tccctgacacctccagttccagccttgctaaggacatgctgtatcgtaagaaatgaataaccgacactacatcatcacctgcaatggtgggaaaatctatgacatcaattgccaaagtgtttttgtggcaagaaagtttggagtgaatgaaggagaaaggaaaaaaagacacaagggaaataaacacttttttcctgttccatttttgactttgaagttctaccataagaacacaatgagtaattcctcttacacttttgttaggttctgcgaagtcaggtgcaatggtagcaaagacccaggaatggcaagttgccactgtggcttgggccccaggggcaggaagcagcacagtgctgactctactacctggagaggcaagatgtatcagcatctcagactgcacaggactagtccaattccaggtaggtggaatactgtggctgttaggcctggaggacagtccagccaaggctctgatcttctaggacatgaggagttacatctgattgaccccagaaagtgtgcctacacagaaataagctggtttccttctgatccagaaaataaacttcaggtctccttaggaatgtactgtgggaagggaagatcctggtgggataaaagataatttggcatcacatatttaactgtcaccctaaatgaatctgatgtatgtgaatattcaaagacaataatttgagaaatactaaaaacagtgatcaaaaaagcacttccagctctaaaattatagttctgtaatacaaagcagcaacaatgtgactaatatattaatttgtattttatattctttcatcaaggattagcatgctaataagattccaaaaagggcaaagatgttactaaattattttaaaa

SEQ ID NO: 479039 - DNA, 655 bp, Homo sapiens
tccgtttattcccctctagggcctgtacatgggttgattaacatgtgcctttccttaaatcaccgccatggtttgcaggtgaaaggcaaacaccatgaacccattttccaagaaaagaagccaggatctccaggaaggtggatctcccagagagagattcaggtggaagagacagatccctgtggcaccaccctagacaccaagtttcgctcagtggcctgtcccctgaatcttgccagagcgagaggccctagggaattagtcgagaaactacaacaagagccaaatccatttggggcctcgtctctcaattataaggaaaaaacaagcctgtgtttaaagatacagcagctgcagttgaaaattgttgaacttggttgctccaacgagcttcttccagatcttcagtgtaatagacacagccaatctggattgaggactggagtctacaccgccgtgaaccactggagttgtcagatgaaggtggatgatgtggtaatacccttgtgattattactcatccttgattgagtttacaggaaatttgtttatgggaggtctagggtattgcaacaaatttattgctatcctatttattatgcagataatgaatatgtcagtgtgtattgagtctaaactcattgccaagagtttc

SEQ ID NO: 479040 - DNA, 774 bp, Homo sapiens
ccaacttggtacagacaagaacctggtgccgatcagatccatgatgagccatcagcgtcactccggactgatcacgtcacgtcatagaggcacaacctgccaaatgttctcatcttcaaaagtaaatatcatcaccatcatttcattgtgtatgttagaaacccaggcatcattcttaatttttttttcctcttttagcaatctcctgcatccaaaccataatcaatataacagatatatcagatacgtgtcatcacttccaaaatacatcttctttccactcctttccattgtcactgccagtaccttaagtggactgccatcatctcttgctagacttacaatagtcacccctgacagtctagaaaaatttagtcctagaaattctgatttaacccagaagaacttgaagaggcaggacacgcttgacccaaaagcttgtcttcaagaatgtaattggaaaagttacacagtggagagacctccaattaaataacgagccaatgctgtctttcatctttctggctccagtggtggtctaaataaatcatttctaaacaaatatgttttaaaaccttttactctatttaaaatgataggcttgactaaagatttgtaactcagatttccttgagggaggaaacttggcattcaaactagtgagagggagtgatggttattcattagtattacttgctccttattttttaaagtgccttatttccaaacagaattatagaagagcaaacaaaagcctgaagtaagttcagggct

SEQ ID NO: 479041 - DNA, 518 bp, Homo sapiens
gtacatcttcagtccagacctctcccacagacaactcctgagaggttcttggtcttgctaacttcaagaatgaagccgcggacactcgcggcggcgcgtctggagttgttcgttctttccagtggcttcgtggtcttgctggcctcaggagtgaagctgcagaccttcacggaccccttcagccgccgctgcactgtaggggcccctctctgggctggccgaggccagatctggctccctctgcttgcagggaggtgtggagggagaggcgcgggcaggaactggggctgcacgcagcaattgcggccagcgcgagttccaggtgggcgagggctcagcgggccccgcactcagagcctctggccagtgccaccggccccaggcagtgaggggcttagcacccggccagcagctgcggagggtgcgccaggtcccccagcactgctggcctgcccacaccccactcgaattctcactgggcctcagccacctccccgcggggcagggctctgaacatg

SEQ ID NO: 479042 - DNA, 1103 bp, Homo sapiens
ttgagttccgtttcttgaggttacatcattcgaatccaccaccttcttgtggagatccagaagtgccctttcaaatacctggagctgggcagcgggagtggcagtcatgttggtgcaatgtggccttgccccagtgtcatctgattggaccggaaagagacatctgactcaggctggccaattagatcatctatcccaagaatttttcactggagagaaaggatgcaaatctcatgatagctcactatcacaagaacagccccgaggggatagtgctaaagcattcagaggtcgcattcccaatggtgcagatacaagatggtgtaacccatatcaacctgtttccatgaatgtctgtgtggagcccaatgcccattcacccacactggcaatgataaggaaactaaactggattaagtgctatcatcttggaggtgcaaaggcaaacaaggagaaagaagtgattgaagagcacttcagaaagcttggtacattcaaatcagcagggcttgattactcgcatcccaggacacttaaggaattggcaaatataattgcaagaccaccagcctttattttagaaaatgaaggttggacagaagaaggtcctgacaagtaaaatcagcagatggagtacctgttttttaaaagagggaaaaggacagctgtagtaattatagactattcagtttatcttggatacctgggaagatacaagagcaaatcatcaaacaatcaatttgcaaccacctagaagagtacaagctactgggtcgtaatcaacgtgattttgtgaagtgcaaattatgccacaccaatttaattttatctatgatagagtgatgagcctggcagaagaggggaaagcaatatctacaactggacttcaataaggtttttaattttcatttttttatttaaaatattccatttcctggctttttcagcatcaatcttctgagaggatgctacttgaacagcagttggccttgttattccaacttatgtaaaatatgagcatatcataaaagagcagtatttattttaaaagttttgggtgagagagcctctttacaactagaaaactaaaagcagaaatgttt

SEQ ID NO: 479043 - DNA, 552 bp, Homo sapiens
aaaatatcccaaagatgtcagctgacaaatttagtacatcttttacccgacattagggctaagtagtattctatgtgggtacatgtgctgctttgttacatgggtatattacttgatgctgaggtgtggggtataaatgatcccgtcacccagagagtgaacatagtaaccaacaggaagtttttcagccctttccccatcccttccaccctccttgtggagtccccagtgtctattgctcccatcttgatgtccatgagtacccagtgttcagctccctcttacagggaaatgatgtatgaactcttgaagaagaaacagaagtgcaatgggctgaatagtgagagaaggcagtgtatgcagaaaatgcaacgtggaaacgtaaaaaggtttgaagagcatgatatagggtggaatagcaaatcacttggtgccactatgactcagtgtgtagaatgggtatgacttgaaatggaatggaaattgttgacagaggtgaaatgatgaggacacgataaatttgaggctagaaattcagcatcaaggtgtcag

SEQ ID NO: 479044 - DNA, 587 bp, Homo sapiens
gtttttttcttgctgattcgagttccctgtagattctgcataatgtctgttttgctattggaagattttcaggaacaagcaagtaaaaaagccatattatttacagatgtgtgttaccaaaaagaaaacaagaaagcagagtactcaaaccagaaagacatttgtctttataccaaaaagcacttctcagaaaaggcaaaagactttaatgatctaaggagaaatgtaaagtcttttattaaggaggtgcttataaccaaaccaaatcctaaatcccaaattacaaccctactgaataccaacaaaaagtatctaccaaaaagagaaaggcttagcctgagagaagactcaccagggcaaaaaaatgagccatggaaacagagaggtcaaagcgttcaagtgtttactgcataccagttccaagtgttgggagcaggccccccaaaatctagccataaactggccataaacaaaatctctgcagcactgtgacatgttcatgatggccatgatgcccacgctggaaggttgtgggtttactctctaaaaggaaatgattttaattccagaacaggacattgcaatcc

SEQ ID NO: 479045 - DNA, 1244 bp, Homo sapiens
gaagagctcctcaagcacggccagagtgggcgctgaggccgaggaggcaccgagagcgagcgagggctgtgagggctccactccagccatgcccaaaaggggccaacatacagctctggctgtggcttcagagactgggagccccataccatggcaccttccacgaggtgttgagcatgggggtatacagaagtcaagaattgaagtttgggaacctccacctagatttcaaaagacgtatgaaaatacctggatgcccagacaaaagtttgctgcagtgatggggccgtcatggagaacctctgctaaggcagtgagtaagggaaatgtggggtcggagccctcacacagagtccctactggggaaccacctagtggaactatgagaagaggcccatggtccttcagaccccagaatggtagacccactgacagcttgcaccatgtgcctggaaaagctgcagacactcaatgtcagcccatgaaagcagccaggagggaggctgtacactgcaaagctgcaacagcagagctgcccaagaccatgggaaaccacctcttgcatcagcatatcctggatgtgagacatggagtcaaaggagattattttggagctttaaagtttgactgccccactggatttcagacttgcatgggccctgtagacgatactccttgttcatatccatcctgtttttaacctctctgtgaaatttcttgagatgacaccttactattttcagtgcaaactaaatggacctctctatgattgcaccctataatcaggttaaactttaagggagaaaaaaaaaaaggaagccactctctagtacaaatattctctgcctcttgtttgaaacatttattttataacatgaaaaaacaaatgacaaagaaaagttataagaagtttactttgtataaacataggatggtctctagtgggaaatccatttctactttaagaatgtaaatgaggaaaatgtcattcgtcgagaatacttacagggaaaaaaaatacggactgtaaaagtacactgatgtttaaatcctgcatctattcaatgctagctggatgatcacagggttaaaataatcttacctaatcatgtctgtactcaatttccatatctttaaaaaatacaaatgtactctattttatatgcatacttaatggaataactaaaatagcattattagcaattaatttccaaaacagaccttcatgaaatgcttattatgtt

SEQ ID NO: 479046 - DNA, 674 bp, Homo sapiens
ttggttcatgggcaggcctggaaaaagcaccatttgatcggctgaaagacatcaaggaagttctcactctgggtggtggattctacctggaactggcagccgggttttcaggcttcaagctgtctttggcttgaaggggagcttcacacctctggcacctctgacacctctagcactttcacacctccggcaccttcacacctctggcacctctccacctctggcacctctccatgcacctcacatctttgctgctgtgtctaaccccttctggtgcttcaaattctgaattcttcctcctcagctcagcacaaatgctctgctctcctcagatttcaactttcggtgccatcattgaaaaatttctattcttccacaataaaagtgacaaagaaaaaaaagatgcaaatatacatggagaaacaattgttcataattctagagttggatttattattattaactctcccaagcaaactgtgaaagtgcatttttgtgatccagagaactgttatatgataaaaacagtgaaacagaaggagaattctgatatccttgtgatggcattactcggaaagttggacatagcttcggtgactccaattacaggctgtattatgaaggctggcacaacgccatgcgagaaaaggctcaaagaagaaagataagtcatc

SEQ ID NO: 479047 - DNA, 620 bp, Homo sapiens
gctgcaggggtggagccctcatgaagaacttctactagggcaatgcagagaagaaatgtggtgttggaggccccacacagaatccccactggggcatggccaagtggagctgtgaggagagggccactatgttgcagaccctgcaatagcagatccattgacagtttgcactgtgcacttggaaaagttgcaggcattcaatgccaccacatcaaagcagctgcaggagctgtaccctgtagagccatagggttggagctgactaaggccttgggggtccacatcttgcatcagtgtgctctggatcaagctgcttcctttgcagtagatcagatatttctgctagaggctctagaaggagcagcaaagccacagatttctatcatgccctcattgatattacctaatacctcattttactatttaggaatctgggaagatcgactgacttggctgtaaaacccttagttccagggaagactggggctttaaaaaccatttcctcttatgcttttaaaatacatttccctttctggaatagtcatgatgagatggtatgctttcatttcaacacattatttcttttttcttgctttaaatgcagcatggatagcagtata

SEQ ID NO: 479048 - DNA, 677 bp, Homo sapiens
ggcatccaggaaaaatgtcgcacaaactaattgaaggatgataaatgcaggggatcttgttgccaatgaaagtggctctgagcaggatggggagctgtaaagggaatggggcagtacgtgcatacttggctgacaaccatgacataagagctgctcaaagtaaggcaatcccaaagggaaatgtggagttggagtccctacacaaagtccccatttgtgcactgcctcgtggagctatgggaaggcagctgccaccctacagacaccagaagggtagattcagcagtagtttgttccctgcatctgataaagctgcaggcactcaactcaaacttgtgacagcagccatgggagctgtaccctgcaaatccacagaagcagagctgctgaagatcttgggagcccaccccttgcaccagtgtgccttggatgagggacataatgagtattttggagctttcatatttaattaattttctgctggacttcagacttgcctggggtctgttatccctttcttttgaccaagttcttccttgtgggatgataatatttaaccaatgcctatataggcattgtgtcttagaagtaaataactcagttctttaactcacaggtggaagaaactcatctccagttaaaactttggatgttagacttgaggctggaaaaagtta

SEQ ID NO: 479049 - DNA, 1339 bp, Homo sapiens
caggacagtgggtgcagcgcaccgagcaccagccgaagcagggcgaggcatcgcctgaccagggaagcacaaggggtcagggaattccctttcctagtcaaagaaaggggtgacagacggcacctggaaaatcgggtcactcccaccctaatactgcacttttccaatggtcagcaaatggcacaccaggagattatatcctgcgcctggctcagtgggtcctacgcccatggagccttgctcattgctagcacagcagtctgagatcatactgcaaggtggcagccaggctaggggagggggcgcctgccattgccaaggcttgagtaggtaaacgaagcggacaggaagctcgaactgggtggagcccaccgcagctcaaggaggcctgcctgcctctgtagattccacctctgggacaacaaggcatagccaaacaaaaggcagcaaaatctctgcagacttaaatgtccctgtctgacagctttgaagagagtagtggttctcccagcacacagctggagctctgagaacagagagactgcctccttaagtgggtccctgacccccgagtagcctaactgggaggcacaccccagtaggggcagactgacacctcacatgcccaggtactcctctgagacaaaacttccagaggaacgatcaggcagcaacatttgctgttcaccaatatccgctgttctgcagcctctgctgctgatacccaggcaaacagggtctggagtggacctccagcaaactccgacagacctgcagctgagggtcctgactgttagaaggaaaactaacaaagagaaaggacatccacaccaaaaccccatctacgaatggctaactagaataaccaatgcagagaagtccttcaaggacctgatggagctgaaaaccatggcacgaggactacgtgacgaatgcacaagcctcagtagccagaaaaaaaaaaggaaactcatggcagttcaacctctaaggattgccatgacttcaggaatatttattagaggcttctttggataattaaaaatcgagtctttttgtttatgagtcatcagaaatgagaaattattaggctgtctatgccataaaagatctttagtttgaccttgaaatataacttcttttacttagggagggcaggaggcaaataagcagaacttactgaccttaggagagcctgccaacttgccagactgttaatgtttacactgagattaggtccccactgatgagcgacacttgcgaaaaggcaaggctttctaacctcagcagcaacacctgaacaacaggtcaagaaaatgccaagtgccttaatgttgct

SEQ ID NO: 479050 - DNA, 2857 bp, Homo sapiens
gactatagtactcctattgtgctatcaaataagtctctctctctctctctctctctgttctgagccacctaaactgggggcagagtgacacaagcacccctgtggccaccaccactataactgtgctgggacagcactgagttcagtgcctcataattgctgtgctctccctctgccagcagccagacatgctctctacaacaggccacctctgcagggggtggacatactgctcatctgcaagtttctctccttcctacagggctgcctgcttctcagctgtgagaagataaacgatatgatggtcatagacaggaaaggaggaatttactataggaaagttggagatcctgttgctgacacccactggggtgctggtagagatgagaagtggccggatgtcagggagagacaagacttcagaagagagaggaagagaggcagcttgacttcaggggagagtgaccttcccttttcatcccctttccagctcccctatccactgagagaaactttcatcaccaataaaattctatgcattcaccatccttcaattcatccatgtgacctcattcctcttgggcaccagacaagaattcaggatgcacaatgtacaagtaaccaaaaaggctgtcaccctggccctttgcccttgctggtggaagttgtagaagatttacatttccgaggtgtagggaaaatattttcaactgaaagtcatcgaaagtaaatgcactgagaaaagagagttcagaggcttatagctagaaagaagcctatctaatgtttagtcagggtgagggaagtgttaaggttgtcttggattaatcacatgtatttacttatgaaggtgagaatttcaaatatagtcctgaatcacattctgaaatgcattgtggtatgcaaagggaaaagacaaacacataactattacatattcttaaaaacaaagggaagaaagagcaacagaaaacatattaatgtgattttatagccgagatttttaaaacaagcatgatggaatgtaaagttatagtcctcataggaatcataactgggctgtaaggcaaatatatattaaggcataaatattagagtctatataataatagaaaatactacaaccagatatgccaagagactaaattataattggcatgggaaccatagatttggaacttcttactgcttagaatttaaattgctctgaaacactgaagtcatatgaagccgtccaggtatactaatagtactaatttgaggcaaatggtaatgatcaaattaattggtttgtgtcactctatcaatataggtatggccagtacttattgatccttttcaataatgtctctttctaagactctgttaaggtattttatgggaatgattaaaacaaaaggcaaaaaattaagtattattcaagaaagaatgtattaaataaaataatgctactattgagttctcatgtaaaataacattcctttaatatttcaaagtcaccagaagtcaagtcaaatcaatgcatgagtgaagagagaaaatggtaaggttagggcaatatttttgccaaactttgttctggaagttcttattaaaataaaaaaatgacctaaattatctttctatgtattctatttaaacatttgttttcctttgaattgggagggaaactgcaagtcaaattagggagaagtgctgtcatgctgatggagacaataccaaagatttatctacttagacaaatgaaatcagagtctgtagatctgaaatgttttgatgcctctgcagaaatacaaaaagttgtaaacaaatgctattttactgtagtcaaatttggtgccgttttctagaggctcctgattgtcaaaagttagctttatcaaatcagttccacggatttcaagagactgaaaaataaggttattacagaaagtgtagattgcacagttaagactgacttttagatgacaatgaataatttttagtataaatatatcctgaatattctttctatatatgtgtatgtgtattttacatatattccttcttttatctatgtatcaactaagtattatctatctattctatcaacaaaataaccaataacagcttctggatattatttttctttaatatattgtttgacctaatgggccaaactgattttcattttgagtatttatattttcaaatagttcattcataaatagtcattttaaggctatatctacagaaaaaataaagagatatacttcatacagatatctggaggctgttaaaatactgaatgaaagcaataggctaggcaataaaatcgtgaaattatccaaggagtcttagccacaacaactaaacaaggacataggcatatctttatggagctgtttgaaaatggaagattggcttattctatttcaaagatgtttgcaaatgagttactttgcaaatagaaatatctggaggatgattcaatagagccactaaagcaagtaacttctagttttgttagtaagttttgaaaatattactggcttgtgtcatgcccttatatactacattctgtccttcttctgattttaagattggatttgagcatcggaaaatatttacccccacatgtacatttttaaatctcatttcatatttcattttcctcatttctacaatgttgaccataacacttatatgacagagttcttatgcacactaacagtataaaataaattcaagtctttataaattggtaagaatacattaacatgaactgttactattttctccttggtaaggatttaaacaaatggaagctttcatgaccaatctgccaagtattcaaaaaaaatgtaaatgtcaataa

SEQ ID NO: 479051 - DNA, 605 bp, Homo sapiens
ccgagcttcaggtaaatcttatgatggaaggccaagatattttaactaaattatccacctccctgactattcctggaatgcagccacatctcatagctactcctctatccaattccaatcctcccttgcaacctcccctttcatctccccacctcaaccctaaagtatgggatactttcactccttcacttgcaactgaccattcaccccttatcatcccattaaaacataaccacccctatcctgctcaacgccaatacccaatcccacaacaggctttaaggggcctaaagcctgttattacccatctagtacagcatggcctcttagtttctaccaactccctttacaactctcccatcctacctgtccaaaaaccagataagtcctacaggctagtccaagaccttcatcttattaatcagattgtcctccccatccatcctgttgtgccaagtccttgtactctcctatcctcaatactcccttccacaactcactattctgttattgacctcaaagatgccttctttaccatccccttacatccctcccaaacaacttctttacttcctagaaaaattcagcaaaaactcccctgatat

SEQ ID NO: 479052 - DNA, 868 bp, Homo sapiens
gacttttatgcaagagttgctcaggccaggacctccagtaccatactgaattgaaatgggtgagtgcagtttgaagtccctgctagtgccaaggagaaagaggaagagggtgggaatgttgaaagctgtcaatagccaaacatcaaaaatgaattcaggctatttattacatttactaggacaactggggatgagtcatttctgtgtgcttggagccattaggaacagcttggctggctgtcggctgcacacctccatagagcaccattttcacagggcaccattttcacagttgcaacatggaggtcctgtgtgtgcttctcccacttttcctatgtgcaactataataaatgtcttattttaaaaatctgggtctgtggacttcatttccaaaactttgccaatgtttatgaatttaaaccatttagataggaagactttattattgatccaaactagtgtattttattatgattgtggtacattttcagagatggtaaaacagatcactaacatttatcagacttttacttgcaaagtagatttcagttcacaaaataaaattaaatgtatgcacatatttgtcactcccttctgtcacctcatttacaaatgagggaaatgaacctcaggaaggtgaagaggctagctcatgatcacataaccaagttgctccgagtcagacttaggactagaaggatatcaagtcaatgttgaaataatatttatattaatcatgatgactagaagccccatgtggcagaaagctcttagggaggtgagttatctttgataagtaaagtgggaaaataaatttatcatttctttaatttgtataattactgaatgtaatacatgaaggacaga

SEQ ID NO: 479053 - DNA, 754 bp, Homo sapiens
tatgataaggtgattctaaaacctggatgcacattagagtcacctggggagttggaaaaaaactccatggccaggttgcaccaattaaatcagaatctcaacagctgatttttaaagctctccaggtgattacaatatggtttgagaccctcagaggtagagagcccttgagagacagcaaggatataatggtggatgggagagggaaagtaggaaaggaccagctcatggagggatatcgtcataatcaaaggtccttcgacttgtccatgagtgaaatttctggcttttggcagagcttcagtctcgtgggcatgggtatcttgaagccctttcactactggctctttcctctacctcacaagagcctggggagcattaggcagccatatgtgtctctggatgattctctggctgacaataacttcatgagtttcaggctcaagaacagaagttttggtgatcagggaatatttgattcaacaagaaagtccctgaagtgttccctagaagcaggtcccataacaggattccttgcaaatgacttattaaggaaagaatcatgggagactgggcttcagcagcattaacacctatgaaaagctgacatcaaaaaaccaaaatactccaaattctataggctttaaaaaagaacttcattataatttacatatcataaaattcactcatttttactgtacaagcaatgatttataatacctaggagtgtaattgctgaatcttacaggaagtc

SEQ ID NO: 479054 - DNA, 1281 bp, Homo sapiens
ctactcagcaatgggcggatggtcaagttctgggaaatgccagtgcaaagtgggtgtcattggctctatatgtgaccgatgccaagatggatattatggctttagtaagaatggctgcttgccctgccaatgcaataatcggtctgccagttgcgatgccctcacaggtgcttgtttaaactgccaggaaaatagcaaaggaaatcactgtgaagaatgtaaagaaggattttatcagagtcctgatgccactaaagaatgtcttcgctgcccttgttcagcagtgacatctacaggcagctgctctataaaatcgagtgaattggaacctgaatgtgaccagtgtaaagatggttacataggcccgaactgcaataaatgtgaaaatggctattacaattttgacagcatctgtagaaagtgccaatgtcacggccatgtggacccagttaaaactccaaagatttgtaagcccgagagtggtgagtgcatcaactgcctccataacaccactgggttttggtgtgagaactgcctagaaggttatgttcacgacctcgagggaaattgcatcaagaaagaagttattcttccaacacctgaaggttctaccattttggtttccaatgcctctttgaccacatcagtgcccacccctgttataaatagtacttttacccctacaaccctgcagactatcttttcagtaagcacttctgaaaacagcacttcagctttagctgatgtatcatggacccaatttaacatcatcattttgacagtcatcatcattgttgtggtgctgctaatgggatttgtgggggctgtatatatgtaccgcgagtaccaaaaccggaaactcaatgcccccttttggaccatcgagctgaaagaagacaatatcagtttcagcagctaccatgacagcattcccaatgcagatgtttcgggattgttggaagatgatggcaatgaagtggctcccaatgggcagctgaccctgacgacgcccatacataactacaaagcctaaggagctagaactgttctgaattgttaaaccacagtgcttgctaagacagagtcagcccctgggccagacaaagcctggctagagtttgctgagaaagcaaaggcaaatagtgcatctgaaattttcaggtacaaatttgtaatgcgcttagcctatctattgctcttagttttcccatgaagatctgaagcgttcactgtcattaggacttgaagtaaagtatatttttgtaccaaaccacatgggag

SEQ ID NO: 479055 - DNA, 689 bp, Homo sapiens
aatcagaatctcagctctcctatgaatcacctggatgaccatgggagcaaaagtatgagaagaggaggaagaggaagaggaagagggggaggaggagggggaggaggaggaggaggaggagaagaagaaggagaagaaggagaagaaggagaagaaggaggaggagaagaagaaagaagaaagaagaaggagaagaagaagaagaagaagaagaagaagaagaagaagaagaagcagaagaagaagcagaagcagcagaagaagcagcagaagaagaagcagcagaagaagcagcagaagaagcagcagcagaagaagcagcagcagaagaagaaggaagaagaaggaagaagaaggaagaagaaagaagagaagaagaagaagaagcagaagcagaagcagcagaagaagcagcagaagcagcagaagaagcagcagaagcagcagcagcagaagaagcagcagcagaagaaggaagaagacggaagaagaaggaagaagaaagaagaggagaagaaggagaaggagaagagaaggaggaggaggaggaggagaaggagaaggagaaggagaaggagaaggagaaggagaagaagaagaagaagaagaatttccttggtaggtagtccctggtggtggggcaggcagttagcatcagattgccaatgtggcaatccagactgaagact

SEQ ID NO: 479056 - DNA, 988 bp, Homo sapiens
tcaccactctattttctgtctgtatgaatctgaagactacatatacctcatgtcgctcttctgtagggctgctgtggtttgctgggagttcacttcaggccctattcatctgttttgctcccaggcctggagatgtcactcaaggaggctggagaacagcaaagatgagtgcctgctccttcttttgggatctttgacctcgaggggcaccaactttatgctagtaggatcagtcctatctagggcatcttacaaccctgttggagggtctcacccagtttggtggcaggggaacaggacctgtttaataaagcactttgactgtctctttgtggagggggtgtgcttcactcagggggaacccactagtctgggctgcctggctttctcagaactaccaggagaaaaggctaagtctgctagtcagcagagactgtggccacccctgcccctaggggatcaggcccagggagatcagggtcctgtccctgagcctctggctggagttgttggagttcctgcagggaggccctgcctagcagttatgtgttccagtgctggctgctgctcctcccgcaaggagctcaaatggcttagacagcaggcagagtctgttgagaatctgcgtggctccagggttgggaacctaggccctggtggcatggaagctgacttctcatgggcatccgggacaaggagcatttgcctattattaatgcttgtgactaaaagtactgctatcagagtccacagacatttcgggaacaaaaggtctccttccaggagtgatcaggacacttttgagatgtccttgagttgtgccttggaaaaccagaggcagcaaccacaaatctatttgtctgttttgcgatgttgaatttgtgacttgactgttttgtttttaactgctttgtctttaaaatcaatcaggaaaactcattttatgctgccccaagtggtgggagaaattttagatcacatatgtatt

SEQ ID NO: 479057 - DNA, 563 bp, Homo sapiens
ctgaatatctccttaggattaattcctagaagtagatttattatgtcaaaaacgatgacagttctaaagaccttttacacatattgccaaataactttccaggaatactgcctatttatatctggaatatttgacccacctataactggccgaatttctgcattaggaacttgctattattggagcatccattcttttcccactgatttgaaatgtcacttttatcgccttgtgtttataactctaagatcaggctgctgccattcatacaccacaaacctctttaccacggttttctataaggttgtgagtgaactggaacagtggcctttaacacatggacaagttaaggagagggcagataactgcagggggggttggcatggtgcaagtggcatccccatgacagctagggaagtgaactgctcagactgcacttccaaagaaacaaaaaagcaaaacttagctgtgagaagcacaattaactggcagctctttcagggcagcccctagctactgagcatggtgacaacaccagaatctggcagttttgtccactgact

SEQ ID NO: 479058 - DNA, 621 bp, Homo sapiens
aggaaaaccagagacctttgttcacttgtttatctgctgaccttccctccactattattatgatggaggcagaaaccaaagtgctgcagctgcaagccacagaacgccaaggatcgttggaaaagcaccagaagctagaaagagatgaggaagaattctcccaaatctcagagggaatacagccctatcaacaccttgattttgaatttcaagccaccagaaatgtgaaaatggggcaaagtgaggagcagttaccagaatcacctggggaaaagccacccttcagaagcaatgaccctgtatcaagtgcactgccaaactcaaagaggaataaattccctaacttcactctcctccctcaaacctatctcctgcagagatgccccaggaagccaattgcggtagtcctacagatcagccttcttggggctaatttctgggtgaagaaggagacaaaaataatactggggtaacagttgtagcaggaaacttttaatattacaactgtacagcatattttaaaatattttcacattttcttacaactgttgtaaattataactaaaatgaccttaccatgctttcaaacaacatgtatagagtatccacattgtgctagct

SEQ ID NO: 479059 - DNA, 617 bp, Homo sapiens
acatacctaggtgtggaatggctggaccccatgatattggcccagtgaccctcacggcggaccccacagtgtttcagagggagctgagagaactctacgtgcagggaggtggtgactgcccggagatgagtgtgggggccattaaggctgccgtggaggttgccaaccccggatccttcatctacgtcttttcggatgcccgcgccaaagactatcacaagaaggaagagctgctgcggctcctgcagctcaagcaatcacagggtttggaagacctgtcggatcccttgcttctggcttttgcagtggtctttgtgctgacgggggactgtggcgaccgcacccatcctggctacctggcttatgaggagatcgctgccaccagctctgggcaggtgttccacctggacaagcagcaagtgacagagaacatcctagaacaagcttgtaacagcagttacgacacagtagcgggtgtcactcctctgggtaattgtcgactggtgctttgctcagtgatgcttccctcctgacccctgacaaggcctggcccgggggaaggggacggtggtaacggacctgcttctttgctgttggaggagttgcctcacatgttc

SEQ ID NO: 479060 - DNA, 678 bp, Homo sapiens
gccggtcagaggcacaggacaagggtctggggaatgagttctgagtgtctacagcttcatgggtggttgacagcttgcaactggggcttttatgagcaaatgcacgtcaaatgcttagaacaaaacttggtgcttagtaaacatcaaaacaatggtaacatcactattaccaccatcatcatcaccaccaccaccatcatcatcaccaccaccaccaccatcatcatcaccaccaccaccatcatcatcatcaccaccaccatcatcatcaccaccaccatcatcatcaccaccaccaccatcatcatcatcaccaccaccatcatcatcatcaccaccaccaccaccatcatcatcatcaccaccaccatcatcatcaccaccaccatcatcatcaccaccaccaccatcatcatcatcaccaccaccatcatcatcatcaccaccaccaccaccatcatcatcaccaccaccacgatcatcaccaccaccaccatcatcatcaccaccaccacgatcatcaccaccaccatcatcattaccaccaccaccaccaccatcatcatcatcaccaccaccactatcatcattgcagtatagtcagtggcaaagggaacaggcattggaatgaaacgtttgtggatctggacattgtacaaggttgaaaagtgttcttcc

SEQ ID NO: 479061 - DNA, 960 bp, Homo sapiens
cacaggggcttctggggcaaatctctccatctttgctgtttaatacagaggaaatggtgctaatggtggaaatgacccgcctcgggcgcccagcaggcggacccgccgcgcgcccctatccctcgcgcactggccgcggcccgacggagcaaggcactgcctgcagccgccgtgtgcaccggggcggccggctagctccgacctgcgcctccaccgcagcacccgcagccagagccgcgctcggcatgatgcccggggcgccgctcctgcggctgctgaccgcggtctctgcggcagtggcagtggcagtggccggggcgcccgggacggtaatgccccccaccacgggggacgccaccctggccttcgtcttcgacgtcaccggctccatgtgggacgaactgatgcaggtgatcgatggcgcctcgcgcattctggaacgcagtctgagccgccgcagccaggccatcgccaactacgcgctggtgcccttccacgacccaggtagcgcccccgcacccccgcccgccgggcgcccccttcgaggctcatcttaggtatttcctgcctcagtccttgaattcgctatttctccaaggagccctgcttcctgtgattggaaaccaggatatccgtgctaagtgtgtttgttggtactgaggtgctgttacttctaaaacctcccttagctgacagggcaaggagttgtatgttgtatatataacctgtgtttgtacttgtatctatacatagttttatatgtaatcatccgtgtctatattaagctaaacatgagttcatgctgatatcttcaactctaatttatattcgatattggattagatgtattaggtatatggagagtcaaacctcttcctgttccttatctagaacctccacgtctaacagtcagaaatctgtctcctgccacccaccatccctttactttactgtttagtt

SEQ ID NO: 479062 - DNA, 625 bp, Homo sapiens
tggtctgtagcgtgctggatagaaatggttttgttacattctcctggaatgagggatcctatggggcacatgccctgtgtggctgaaaaacagtggagcccattgaaggagagggatatgaagactgtccagactgggggatgcgaggatgccctccagtcggcctcccggagtctccggagccgtccgagcgctggggccgctggcgcggacttcaaagcccgccgcccccagccagatccgccgggcgcagacctcggggaggcccggcgcgtccccgctgggcaagtccctgcagggcagcgaccgggaacggagggctggggacgccacgaggccgcgccgcagggcgggggaggcctgaacccagactgggggcttcggacccgcctgcgctgggaggtgagtccaggctgggaatttggaaagcagacactgacataacgtggggtgcaggcgcaggagtagtatcacccccgctttacagacccagaaacggacaccgagaggttgcgaagccagacaaggggcagagctgggtattgacgcagatttttggggccccagagacttgaggtttagccactgcctctggggtgagaggggcagggcacttactgtgtgt

SEQ ID NO: 479063 - DNA, 1164 bp, Homo sapiens
gggtgcgtatgtaatggctgcctgcagggctggtaggggcgggagcctgccgcagcctcgagcaggctgagatctcctggggcccttgccaagggagcctctcaagcgcctctgaggttactgagccgtgctgcgctcctgtgtccactgcgtgcgctcgtcgcagctgcgcctgggcctcttttctaaagccccgcggagggaatcggagcaagcgcagcggcgccagtggggagagggccgggccagggccgcccaggagggccgagcgccgccagtgccgagatgcccgggccgccgtccagctccgatcgcctgccgcgttcctggcaaccgcgcgcggcttcccggcggaggcggggcccgcggagaggttacatctgcaccaagtgcctgggcgcagccggcccggagggcagtgatgtggggttcgggtgggggaagatagggggccctggagggggcgcgagggcggccggcgagccgggcggggagagggaggaaaggctgcggcggcggcgcggtccgggccccggaaacattcctccgaggggcgcccccgcccgagcttctgggaacgagcccgcctggagcggtcgcgtgggctctgacacgggcaggagggctgccacttgcgcccaccccctccttccctcgcggtccgccgggtccgcccagctctcgtgggattgggctggtgtcttctgcacccaatcaggtggtgtgggcaccgcactgcgtcactcccctgctcccggaccatctgcggctccctattaccacctctacattctggtttacagccttgagtagggcccagcaccgcggacacttgacactgaatgagtgtcattttgcaaactgtacaaatgatcattcaatacatatccctgctccaggctttcttgcctagatacatttccttcttgatttaattatattatttcatgtcaaaaatttcattaggattatatagtttttacagacaatggttgtggcagagttgctggttgtcccccaatatccactcttcctgtcttgcaaagtaataaaattttttatctggacatgtggtagacccgataagaactatatttcccagcctcctttggagctagctatggattatgggatgtaagaggagtgatacagtgtgtgtgactt

SEQ ID NO: 479064 - DNA, 931 bp, Homo sapiens
ccggagcaaggaaacgggcgctgggtctgtgacagccgcagttgccccaggatggctgggcagggtcggctcctgcctggatggctgacgtctccttccagttctttgttcagtttccagggggaccggggatggggaaaggcaggcagcacagcccgcggacctgcagggccacagcagagaggcgctgcttcacgtccccctgggcctccgtggccctggccctgcacacagcacggctgcctcctccctccgacttatttccggtcacctggctgcaaagcacaggatacccagatggcttgggccaggttgaaggcacagccatagccagcaaccagccacccgagccctgctgccttcggccccagctggcccagccagcgcgggtccctgctgcctggtgcccaccccacccacccggcagctccgattttcagcttggggctttctatgccctgtcactgaagggctgaagcgctctcactgtttaaagcctccatgttttcccttccaaccctcagaaggacaggagcgattattcttattctgttgtcaagggccacacagcaggttggaagcagatgtggaggctgcccagttccagaccagcttgtcctgctagtgcctggtcccaggactggctcaggtgcccatggcatgctcccctgtgccctgataatcgatgtccttttgcagggtggtgaggctctgagagtgagctagtggcttgttctttttccacatttttgaggcctctatcttggggctgaaatacccaggtggagaagtgagtgactccggaaaggaaggaaagaaaagaacccagagtctaattcccacccaagtggaggtggggcactcactacctacacagctgccctgactattggatagttcatcttgaggcaaaacctacctcccttggtag

SEQ ID NO: 479065 - DNA, 638 bp, Homo sapiens
ccaggcacccagcaggcacttaggatctccctggggcagagcaggctgtggctgggcccacctgaaacccacccctccggaggaatgacaaccttcaccattaatgagcagacaaaatgtgccatgggacaggctcaggcagagccagtctccctggcagcgtccttcctgcacatcccctcactctccacccccacctcccagagggagggggatttccaggctggggataaggtgcagggcgctcagcttgccctggtcaggctctctggagaggaggaaacacacaacacaggcccgtccccactcttctggccgcctcctcacagcagcctgggagcattccctccacagcagacagggaggcggctgagagccgtgggggtcattagctggtacaagggcacgcaactcgccaggagccagacactggctctccccctctgcccagcagacccccaaggttggttaaggttcactgaaacactgctgagcaccacatacgcaggcaagggcatcccccaggggcttgggcatctggacaaacatcaggccctgggtgccaagagtcagcatgtagagccactatcctgtggccggaggtcatgtgtttgtcccctctagcactgggcaaagac

SEQ ID NO: 479066 - DNA, 617 bp, Homo sapiens
agcaggaatgttttgaaaattgttagtgatgcttaaaaccatggacatagacaagatcaccaaggaagaatatacagagttagaatggaaaagtaaagagccttatttagatgccctggagatgcccatttacagatttagaggccaagttgtgaaagcaaagagaaagtccttgaaggaaattcaaagtgttactctagggaacacagaaatgataagaaagcaaaacagccttaatgctgatatggagaaattttcagtggtctggggagaagatcaaaccagccacaacattccctcaggctcaaacctaatcaagaacaaagtcttaactctcttcaattctgtgaaggctgagaaagtacaaggtgaagcaacaaattctgatgtagaagctgcagcaaattatccagaagatctagttaagatcattgctaaagaatgtagagaagtgaaaagtacttaacattcactcttaattgtttgaatggtcaatagggaatttaattttatagaaggtatttttaaaaatcattcaacctgacaaaatcatagtcaaaggatggaaggagggatggagatacagaaatatattatttaagttatatttataaaga

SEQ ID NO: 479067 - DNA, 722 bp, Homo sapiens
gctgatacaccaccacagagctgcctcgccatgccatatgtatgcctgctggcacgccagtctggacagctggcctagtggtgtccctgccactatatacctgccctggtcaccccaggacaaggtactggacaactaaggacaacccctatgttccagagttcactaagattattcaaattaaccaacccatgaagaacctgcaaaacctagccagtcctaccccacttgccatacataagtggctcattacagtttcagcttgctgtttccctgcactgaggtgcaacactgcacaactctgcctgacatatttctctggcttggagctgaaggtaacaaaaaattctacctttaatacgtctgagtgtgactgtattgtgtcccaccatcaaaatacctttaaatcttataaaataatagatgatatccttatccccagttgtcacacaactttggtcaatcaggtgcatctttatgcattctaacaagttttattacccatagcaaccgtatttctttatgaattctctattaaaaatacttggcacattttttagagagagctttctgtttcttgaattataactattcaaagggaattgtctgctgaatgtttgtgggtggcttagtttgtagcacgagtagccacataggtattgctcatttctccagtaaaacatatgtcattttatggctttggttattacctcttccttaga

SEQ ID NO: 479068 - DNA, 595 bp, Homo sapiens
agactggagtacagtgaaaagccaaaaacagggaaagatgagctacccagatataattcatctgcaggaagctgctgtttgtactcctaaaactggaggtagagaaggagaaggaaatgattataccagagtccagaagccaggctcaccagggggaacgaaaaccccagtgaaggagattcccaggagaccaccagatgagccacatagaagagaccaccaggagttgtgtgggacccagagtaaactccacctctggaacagtgtcatcacatggactccaagcagtttcctataccagtttcagaaaacacaagggctgaggggtcctcccatggctataattgcaggagtccatggctacaagccccatgtaagtccgaaacccaacagggcactcattacatctcaaagctttaaagtaatctcttttgactccatgtcccacatccaggccacactgatgcaaggggtgggcttccaaggccttgggcaggtctgtccctgagctttgcagggtaaaatcactataattgcttttgtgggctaatgttgagtgcctgcagcttttctaggcacatggtgcaagccgtca

SEQ ID NO: 479069 - DNA, 2382 bp, Homo sapiens
cacagctgatgagtcgtctgagagcttggagcccccacccacaaggccacccctgagcccagccatcccctccctcgggaacaaagggagtctcgggccatggccgacagggctgagaaacagctgcatgctgcccagctgtggatgaagaagcggcgttttcctgtatgtaatgtgctgtatgtaaataaaacactggaaagggctctttctttgcacgcgacacagacagcagcctgcaacgggcccagctgggctctgctgagaaagcagaggcggctccacgctcaccgtgacagccgggagaggacctcacgccgtttgtcccttcatccctcgctgggcctggagcccaggaagggctctcaggatgggggtcttctctcacaggcctggctgcccgtggacaacagtggggccctccccagcacttgcctggcctgggggagagtggccagcggggcgggcctcgaggggggactgggaggtgtccttgggctgaaaggcaggactcttgtcaggaggagccctgcttccattgacataacagctggggaagtgtcaccaaactcacaaacaagccaacaccaaaaaggttaagccatgtgggggagggcgaacagagggcgaggagtggcacctcagagccgctcagcccctcggcttctctctcgttctagccagatgccttcaaaggtcgttggctaagtaagcattgggactcccatttcctcctgcacggcagcaacagagattccaggactgctccggagaagggccggctccctcctttcctgcagactggctcccagcctctcccccagggcctcccacagccctctgcgggaattacctgcaggtaaagcagcctctatgtgtcctctcctccctgagaatctcgggcctttgccatggccctggtaacacacaactactacgtacgctggggccctattatcctattggccaattatcctatcggccacattagattggccacctgtaactgagttactttccctgacaacggaggaatggggagccccgggtaggctgtcccaaggaggcgcaggctttcagctcctatacccttcaggtcaggagaactggagggagaatgaaggaatgaaggcagccattcccaatgtctgtggatggctttgggccgtctcatcattcccatttcgctgatgagaaaacggaggctgagagcgcccagataacctccttgatgggactgaatgcatccggcccggggactcctaacctcagctgctctggagaatgcccccagcccaacccaggctgctcctggaccacatatatcagtatcctggggtgcagcctgggcaccagcattttgtaatgctcccaggtgaggggcatcctgggccactgacgacccctcatcctcaccctcctcaggccaggggcactccctgtaccatctgaaaagaaaatcatagctgagagataactcacctcacacacaattttgcaagagtcaatataacgccctgttatatggaggaggaattaaagggaaattgtatgataaaatcatatgtttttcaatatgtaaaggcctggctctgtctccaaggggagcccagaagcccccccgaggcatgcctgtgtcatcttatccccgtgccagcccccatggctgatgcggacgggccaggcctggcgttccagactccagcagctgagcatgtacctgtgatgtgactttcccaggtggtcaagttccaaacgcagcaacgtgtcctcccttcaatggacacaggagatgctttcctggaaaagccagcgaggattaactgtgcagcaaagatccccaggatatattttctaaggttctagctcaggtaattataagcagcctctttgcttacctgaacgtctggcaagaccagggacagagttacctgcagggctggcctgtgtatttactgaaggtcattgtgacaactcaaaacagcccttcctgaagttccaaaatgccccttgggaggggagccacctagtgttcagccattttgatgtgtcctggtgacaacagacactctggggacaggaggagcttgcaggagggttacttgctgcagggcctggtgggccacccatgtaaagcttgcagccatcagtgtctggagggctggagaggggtcagggtggcagggacatcccacagagaggccagggtgggaccagtgtgaggagagaggcagaaatgatgttttaatgcaatgttttaaataaagttaatgcaaaatgaatgcaagatatctatgaggaaggaaatattgaagttttggaggaaaagggtcggtggtcctgacgttcccttttgccccaggctctggggccaggcagggc

SEQ ID NO: 479070 - DNA, 563 bp, Homo sapiens
ctcatccagaatgatgtttgaccaaatgcctgggcacaccgtaacccattcaggttgtcaccctggaccccctgttgcggagccccttctggaccagtgcgcctgggaaatgctgagccagttccagcctagcacacagagcacagatgggcccctgtgctcctcagactctggaagggagttgcttgagcctggtacacctggaggcccaggaggaaggccatgggtgcaaggggcaatgcctgggccaccagtctccgggggagacagggaaatcaatgccgagggtgaggaggtctctcccagagaggatttctctcagttttacagggaagaaatggaggcgagggagcgaggacacttccccaggctgtacggccaggaaggggccaagaggggctcccactgggggcagggtgtggggggtcttccttaactctactcttatttcacaagccccaggggctctttcaggccacggggtacatttgtttgcacggcagcagccagcctcacccaggtgcggcaaggagaggcagggcaggggtgaaggaggggcccag

SEQ ID NO: 479071 - DNA, 2033 bp, Homo sapiens
tgccttgccccgcagagtcccaaggaaagactctgacagaggctccagagaggtggtgacagagggtgaccgcatggaccataaacgaagaacggctttaggggagatggcgggaagtgaaggcacagggttggtgccccacagtgagggtgattgccatgagggtgatgatgatggtgatgatgaccatggtggcgatgatggtggtgatgatggtgctggtaaggaagatggtggtaatgatgttgatggtggtgatcaccatgttggtggtgatgatgatgttgatggtgatgatagtggtgatgatgttgatggtagtgatgatggtgatgatggtggtaatgatgttgatggtggtggtgatgatggtggtaatgatgtttatggtggtgatgatggtggtaatgatgttgatggtggtgatggtgatggtggtggtaatgatgttgatggtggtggtgatgatggtggtggtaatgatgttgatggtggtgatggtggtgatggtgatggtgatgatgatagatgtgatgatggtggtaatgatgttgatgctggtggtggtgatggtgatgatgttgatggtagtgatgatggtgatgatggtgatgatgttaatggtggtggtgatgatgatggtgatgatggtgatgatgttaatggtggtggtgatgatgatgttaatggtagtggtgatgatgatgttgatggtgatgatgttaatggtggtggtgatgatgatggtgatgatggtgatgatgttaatggtggtggtgatgatgatgttaatggtagtggtgatgatgatgttgatggtgatgatgttaatggtggtgatgatgatgatgatgttgatggtgatgatgatggtgcacctgcaccacggatggctgcaccacggcacctgcaccacagggacacatgccacaggagcagacaccacaagagcagacaccacaggagcagacaccatgggaacccacaccatgggagcagataccgtgggaacccacatcatgggaacagacaccacgggagcccacaccatggaacagacaccactggagccaatgccatgggagcagacaccactggagcccacaccatggaacagacaccatgggagccaatgccacgggagcagacaccacaggagcccacaccatgggagcagacaccacgggagcccacaccatggaacagacaccactggaaccaatgccacgggagcagacaccacgggagcccacaccatgggagcagacaccacgggagcccacaccatggaacagacaccatgggagccaatgccacgggagaagacaccacgggagcccacaccatgggagcagacaccacaggagccaatgccacgggagcagacaccatcgtgggaacccacaccatgggagcagacaccatgggagcagagaccaagggagcagacaccaccggagcagacaccatgggaacccacaccatgggagcagacaccaccggagcagacaccatgggaacccacaccatgggagcagacaccatgggagcagacaccacgggagcagacaccaagggagcagacaccaccggagcagacacaatgggagcagagaccatgagcgcccacaccagtggtgtccaatgtggctccccactcccaatcttgggagctgctgctcactgagccattgatctccctctatgatacatcaaagccgaacagggtgataataccattgtatagtcttatgaccagtgtagaagagttccagttgctctatatcctccctaccatgtggaatagtcagcctttgattttagccatttcagtgggtgggtggtgatatcccatggtggttttaatttccatttccataatgagtaataacgttgagtgttttctgtgtgcttatcggccgttcatatatcttcctctgtgaaatgtatgttcaaatctcttgactgtttaaaaattggttggtcttcctacaattgtgctttaaaagttctttatatattctagataaaag

SEQ ID NO: 479072 - DNA, 1142 bp, Homo sapiens
gcctttctcaactttctcaaagtgtccatgtggccactctgtgacagcaggaatccataccccacccagccagctcacagcaggaatccatacccccccaccccagccagctcacagcaggaatccataccgccccctccagccagctcacagcaggaatccatactcccccaccccagccagctcacagcaggaatccataaccccccaccccagccagctcacagcaggaatccatacccccccaacccagccagctcacagcaggaatctataccccccacccagccagctcacagcaggaatccataccccccacccagccagctcacagcaggaatccataccccccccagccagctcacagcaggaatccatacccccccaccccagccagctcacagaaggaatccacacccccccgcagccagctcacagcaggaatccatacccccgccagccagctcagaacagccctgggtccctgttgggatggacttctctaaaacggccctggacccacccagaagatcagggacaagtctatcagtaccaggacagtctggaagtttttggccatgcttaaattagttaaggctggggcctggccacgggcaagcttgcctttcgcacaactgctggactccctgctgagcatgaccacgggccatggggctgagatggcaggtggaacctgggggatgctggcttcctttcctgagcgtgtacagccctcagctgttcctacagccctgagcttcagcatcgcagggcagagacatggggctggggccctggggttacttccagggttgggtggtctctgtcactcccgggcaggaggagacagtgatgacgggaaggagagttctggaagtaagaccccagctgatgacggaggcagcggctggccttcggaggacctcacctttctcttcccctgcactgctttgggtttggggtgtgcagggccagccagctgactgctaccagggcagacgctgtcagtggtgactgccctgcaggcctgcaaacattttgccagagggccagacccaggagcagaggggtcctcttctcttcctcctcctcccctcctgtcctctcctctcccctccctcctatcctttctcttcctctcc

SEQ ID NO: 479073 - DNA, 1058 bp, Homo sapiens
tccctcatggcttggtgctgtatttgtgataaggggagcccactaccctgaaaaatgagtcttaggcccaagaagcatccaccacaagttgacttaggagagccttcggccttaaaggaacctctgtggtcgtctggcagtattcctcataaccgagggtggcagcagctacagaacatagcaccacctgaggttggttcagcagaattgagactcatggcaaattctgatagggctgaccacagagatagcactacttccagcagctggtggaataagtcttggtatcctgacgtgggatctgagagaagtagcactgtattcatattcactacaaacactgtggccgttggcgaagatgggccaagacatcacaccttctcttggagacaaagactaaattacaaattcttccacctggactttcagttgtgggagcttcaagtttcagaagtaacttccaagacccacgagagggagctcatgcacttcttaggcactactggttagctttttaatatcttattcaaaacaggcagtagtttgggaggaatgaccaagaacagcttggaagtcagaagcaagatggaatcaagtatgtcaaatttcccttactgtcgtaattctgcaaagacaatttcagtagtagttcttgtgtgtgtatgtgacttttctaaattgattatataaagtctgtattctttgtcatgtgtaaacctgaagtctctgctttgttagcttagttttttttctattattaatatattgttttagtgtgatacatttgtcacagttgataaccaataatgacatattaactaaagttcataatttacaatagagttaactttttgtgttttgtatatctatgggttttgactaatgtatattattttttgaattgctgattcagtgttctctcataccccccaatacttatttgaatatatttaattcagtttgaagtgttgtattacacatctcttcttcagcattttggggggaagagtgaggagaaacttttatcaactaactttgtttaattctcattttctgtt

SEQ ID NO: 479074 - DNA, 1532 bp, Homo sapiens
gaagaaagggacaaattccccactggtcagcaagccgtccccagtatggatccccactgggaccttgactcagatcatggggactggagtcgtaaacatctgttgacctgtgttctagaagaactaaggagaattaggaaaaagtccatgaattattcaatgatgagaaagctccaaaagcaagccctgggccctgaacaaaatttggaggcattattaaacctggcaaccttggtgttctataatacggacgaagaggaacaggcccaaaaggaaaagcaagatcagagaaaggccgcagctttactcatggccctcagacaaacaaaccttggtagttcagagaggacagaaaatggagcaggccaatcacccggcagggcttgttatcagtgtggtttacaaggacactttaaaaaagattgtccaatgagaaacaagctgccccctcgttcatggcaagtgccaggtcatgtcatcaccctcactgagccccaggtacgtttaaccattgagggccaggaaattgacttcctcctggacactggtgtggccttctcagtgttaatctcctgtcctggacgactgtcctcaaggtctgttaccatccgagaaatcctgggacagcctgtaaccaggtgtttctcccacctcctcagttgtaattgtgagactttgctcttttcacgtgcctttcttgttatgcctgaaagtcccacacccttattagggagagatgtattagccaagactggagctattatctacatgaatatggggaacaagttacccatttgttgtcccctacttgaagagggaatcaaccctgaagtctgggcattggaaggacaatttggaagggcaaaaaatgcctgcccagtccaaatcaggctaaaagaccccactacttttccttatcaaaggcaatatctcttaaggcctgaagctcataaaggattacaggatattgttaaacatttaaaagttcaaggcttagtaaggaaatgcagcagtccctgcaacaccccaattctagaggtacaaaaactgaatggtcattggagtctagtgcaagatcttagactcatcaatgaggcaataattcctctatatccagttgtacccaacccctataccttgctctctcaactaccagaggaagcagaatggttcactcttctggacctcaaggatgcctccttctgtattcccctgcactctgactcccagtttctctttgcctttgaggatcccagagaccacacctcccaacttacgtggatggtcttgccccaagcatttagggatagccctcacctgtttggtcaggcactggcccgagatctaggccacttctcatgtccaggcactctggtccttcagtatgtggatgatttacttttggctaccagtttggaagcctcgtaccagccggctacactagatctcttgagctttctagctaatcaaaggtacaaggtgtctaggtggaaggcccagctttgcctatagcaggtcaaatatctaggcct

SEQ ID NO: 479075 - DNA, 1006 bp, Homo sapiens
ttttttttttatatttctgtgggggtctgcaagcaaaggagttatggtgttggctgttgggtggtgccttggttgtgtatctgaagctgtgctgcaagtggatgtggccagacaggaaccttgggagaaatcagcagacaggggggatgctcagatcggactggtaccacctcacaggcaagatagctttgttctacctgggtacaactgccaacaaaggccaaagctacctagaggagtgttaacttggaaatgtagaacaagaaacaaaaatcaacagaaaaaaggaaaaggcgagtgtaggaatccatgctttcttattgtggagaatagctttagcaatcaagatctgggaagcagcatctgcagagttggtcctggaggcttgggtgagggaaaccacagctgtgaagctttgctcctgctcctagcacagatgccaaagcagatggaagggcagggatcatctgcagaaagacttcagatctccaacatgagtaaagagtgaaaagcatagcgggcattgctgaaatggctagattgataggctctacactcccaggagcagcagaggcaacaaactctccccactctgtgcctcagacagaaacatgatgaatggtgtgtgtgtagtcatcttcaatccttttacagcttgtgcttctttattccaacaggccctcatttggtgctttgcctggaaattgttctgatgctgtttatgtttcaaatgcttagaaaaacagttctattaaggttgtatgccaaaacacaggctagtctgaataacaggaaggatggagtaaatttgggtctgctaatctgcaaaagaaaatattaaatatgctctctctggagaacagtaacaaacactttgcatgtggctgtgctaaatttactgcaggaactataagtgttaaaatgccagccgtgtaaatgggccatggggtggtaaaaggttgacaggatgattatgcttgaggggccactgttacgtatgtccttc

SEQ ID NO: 479076 - DNA, 779 bp, Homo sapiens
ttgctctgtctcatctgagattagtgcccttataaaaagagatatgagagggcttgcttcttttggctttcctccatgtgggaatataagggaaaagcagccatctgcaaaccaggaagccagccttcaccagacactagatctactgacaccttcatcttggacttcccagcctccagaactgtgtggtcacataagctacccaatgtatggtgtatctgttttagctgctcaatctaacacacatggaggaaagcggacaggacacaagccctctcatatctctttttataagggcatgaatctcattcctagggttccaccctcatgtcctaattacctcccaaaggctccacctataaataccatcattttaatgattaaacttcaacatactaacttgatttggggagttttgctgacttgtgaaaacaatgaaaaatttgagaaagccaggttggatggaatttatgggaaagaatatgaagtgatacagaagtaaagagagaaagaagagcaaactacggcagaggcgaacctgtgagtcactgctgaacactgaactgagccaacatattagaaaactacatgtaaagaagatttaagagaaattacttcaaagaggatttataaggaccccagtcttacattgtacttcatcttccatctctctgcaactgctagtgctaatgtgaacttgtgttagggaatttggctttttcaaatttgcaagctctaaatcaacagcctctcttggtcaaagtggatttcaggctgcc

SEQ ID NO: 479077 - DNA, 824 bp, Homo sapiens
acagcttcacacaaagaacaacgcctgcctagtcaaaagtaggcttttaaaaaatatttgctgaaaaatggtccacatttgtttaaatatgagagggcttgcttcttttggctttcctccatgtgggaatataagggaaaagcagccatctgcaaaccaggaagccagccttcaccagacactagatctactgacaccttcatcttggacttcccagcctccagaactgtgtggtcacataagctacccaatgtatggtgtatctgttttagctgctcaatctaacacacatggaggaaagcggacaggacacaagccctctcatatctctttttataagggcatgaatctcattcctagggttccaccctcatgtcctaattacctcccaaaggctccacctataaataccatcattttaatgattaaacttcaacatactaacttgatttggggagttttgctgacttgtgaaaacaatgaaaaatttgagaaagccaggttggatggaatttatgggaaagaatatgaagtgatacagaagtaaagagagaaagaagagcaaactacggcagaggcgaacctgtgagtcactgctgaacactgaactgagccaacatattagaaaactacatgtaaagaagatttaagagaaattacttcaaagaggatttataaggaccccagtcttacattgtacttcatcttccatctctctgcaactgctagtgctaatgtgaacttgtgttagggaatttggctttttcaaatttgcaagctctaaatcaacagcctctcttggtcaaagtggatttcaggctgcc

SEQ ID NO: 479078 - DNA, 1749 bp, Homo sapiens
gccatcagttaaggcaggaaccggccattttcacttcttttgtcattcttcagttgcttcaggccatctggatgcaggcttaggctcagaggcctgacacttcagagaggactcagaagaagacaagaagatgtggaaaagtttgggacttcctggagacttgttgaatggtctttgaccaaaatgatgatagtgatatgggcaatacaatcaatgctgagatggtctcagatggagatgagaacttggtgtcctgcgtcccagcctctccagccatagctaaaaagggaccaaggtacagctcctgccatggcttcaggggtgtaagccccaagcctttgcagcttccatgtgatatcgagacttctggtgcactgaagtcaagaattgaggtttgggaacctctgcctagatttcagaggctttatggaaatccctggatatctaagcagaagtttgctgcaggggtgggaccctcatggagaacttctgctagggcagtgaagaaggaaaatgtggggttggagcccacacacagagtccccaatgaggcactgcctagtggagctgtgagaagagggccattctcctccagaccccagaacggtagatccaccaacagcttatactgtgcacctaaaaaagctgcagacaatcagtgccagctcatgaaagcaaccagaagaggggggctgtaccctgcaaagacacaggggcagagctgcctgtggccatgggagctcacctctggcatcagtgaaatagaggatacaaactaagttaataatattttctcattttctccatgaaattaaaactttgtgatttgcaaatattgagatttttattttaaaaaatcaagattattgagatgttccaagatgcttatcacaccgtttacaattccaaaatctggataacctaacaagaataccatgtacaattgcggtaaacatgccaaaaagtaatataaaagcaaatatcaataatttcctcaaataagacatcacttttctttctaatttaccacacagcaatggattttagacattgcattcccagcataagaagttaatagcagctagaagttgtagatagctgaagacatgattgatagtctgtagaaaaattgaatgtgaatatttagagctcttacataaaaatatatcaaggtaatttttaaaatgtaatgatttaatgccaatagttatgcaataattttgtgtactaacaattacagacatgctatatgctatatcttacatttattcaaatacctctttagacctagaatctattagttagagctttggcctttgctttctaaaacatttacaactattcttcttactgattctctcaagtactttctccttaaatttcccaagctgtgtagcttgttaggaacactgaatatgaagcaaacaatgataaaaatatcagctaaagagctaaatacagacattcattcaagagattagtgtgaccacttagagagctgactttatttattcacttgtttatttactttttgtaaacattagtttatattctatgcatgatagaaacttaatgcacataaacaggatgttgttagttaataactaaatagatcaaccccacactaaaactttgattattaacctgtatttaactataataatgggttcttcacgcatcaggacctcttaatatatgaaaatcttcttgttgagccaagctaaattatgtactacttcttacgttttt

SEQ ID NO: 479079 - DNA, 530 bp, Homo sapiens
tatggatgcatggtgttggactggaagtcagttccacctgcggcccccgtttgtaaacacaccaatcagcaccctgtgtctagctcaaggtttgtaaatgcaccaatcagcactctgtatctagctaatccggtggggacttggagaacttttgtgtctagctcagggattgtaaacacaccaatcagcaccctgtcaaaacggaccaatcagctctctgtaaaacagaccaatcagctctctgtaaaatggaccaatcagcaggatgtgggagacattccagcagaaggcattattataatagaaggtgagagctccatgcatggttttgcacctgaagagcttctagtgggacaagatgtggacgtggaagacagtgatactgatgatcctgaccctttgactgtcacttttagcagaagtctccatggtgtgaggaagccccagcagcaggtatagaggtccacatggagaggatcacaaccaagctgagtggactttcagcatcactaagtcatgattgacttggc

SEQ ID NO: 479080 - DNA, 2019 bp, Homo sapiens
gtccctctcctgctgcagctcgtatccttgaagcagctgctccagatgggccatcgctgccgtatatctcctaatgctatccctccccctccccccaccccacgacgggccctggtgtgtgatgttccccttcctgtgtccaaatgttctcattcttcaattcccacctatgagaccctcagctgcaggtctgttggagtttgctggaggtccactccagaccctgtttgcctgggtatcagcagcagaggctgcagaacagcgaatattactgaacagcaaatgttgctgcctgatcgttcctctggaagcttcgtctcagagcagtacccggccatgtggagcttccaatctccaaatatacccgaagaaatctagtatttcctcacactggcccatgaatcagtctaccactagctcatttcttgccatttatcagaagtacaggaactctctggaatctgatacaagtaaatctaaatctacttactctccctctctgaactcaattgcctacggaaaatgaacatatttcatttatattcattttttcattaaaaacaattattccaaaattactaagaaattctgagtttgacagtgcatgcttacacatgggctaattgggttaaaacattaccaaaatagaatatgtaataaagggtaaatagacactgaggaaatccaaaagttaccattttagtaaacaatttacttccaatttcccatgtaggtatatagctatgaccattatgatatatttttacttaatgtttcaaggtattgatatttatagcagatcttgcatgatggcttctaggtttacttttctatatgaaattatgtgaagaaaaaaattaacatatagtgcaggcctttatgatccttttagttgtatctatgtctgtcctgctgaattcttgccttgactgagcccaaatggaagaatttattgcaaatagtggagatctttttggtttctgtcatcgattgtttttactgatagttttctctaagctttttcgtggaacctaccttcacaatttccttcaaagtttaatgaatttgctagatgttccagtaaaaagtatatagaacgagtagtattccctactcctttataggtatggccacccaactgaaaatgggtagggagcagtatagtaaggaaaataaatgcaggatgtcagagcattgagaagctctcggatattttagaatgttaaatatacaccatatattatatgaaatgagaatatatgaatcttttttgtttaaggaaagctagtttggaggaaacttgggaattcatttgaagctgagtcttccaccaagtactttagaactctaagggcactgcaggtttgcagtcagagctagtacttctttaagaatatatttgacagaaattgcaggaggatgagttgaaaacacagaactctgtcagttatttattttacatttagaaatcaaccttccaagcagaccagcttttgaaaatatttgtatcataaattatctcaagtgtcctatagttccttctagtagtgatgctttcaaagtcatttgttattcagaaatttcactgctgcattctattagcaataatttacatttgccagtgaaacctgaagggacaacttgacaccttgacatttaatgctgtggtgaggtgaagtaaattggtggtttcatactgcctgtgcactacaataatttatgcagcttttgcacatattgaacaataacattgaatccataaacaaaactaagaaacaatagtttggaggaactcagtcaataacatgtatcttattgagttattaccctgcaactaaaaatatattatattgccagatctatttctgtagtttcttccagactctggataatctgtgagtaatttcagcgtggatgtaaaagggctggtttgaccatcttaatgagtattttcaatgtatttaattgtagagtcctattttgcaaaggctttgcatctaaattgcatacaaaggttaa

SEQ ID NO: 479081 - DNA, 721 bp, Homo sapiens
taagattatatctgactgtggtttttattttcatttccctgaagattggggatgttcggcatgttttatataccttttggccacttatttcagatgtatggaaaggcatggatgcccaggcagaaacctgctgtaggggtgaagccctctcagaaaacctctattaaggcagtgcagagggaaaatctagggttggaggccccacgcagagtccccactggggtattgcctagtggagtcctgagaagagggccaccattctccagaccccagaatggtagagctaccagcagcttgcaccctgaatctgcaaaagctgcaagcactcaacacaagcccacaagagcagttacaggggttgaactttgcaaagccacaggggcggagctgccggagccaatcgcttgcacccacgtgccctggatgggagacatggattcgagtgagattattttggagcgttgagatttaatgactgccctgctgagtttcagacttatgaaggtaggaaataagaaaatgtgaatagataaaaataattttacaaaagggaaaattagcaaatatagtaaattatggtaatagaacagacttgtaaataatttagttagaaaaaatcataaatttgtttaactcttttctatataatttttgattatatcattagatatgtggaacacaagatgattggtcatatgaaaataaataaaatacaaaatga

SEQ ID NO: 479082 - DNA, 658 bp, Homo sapiens
ttctacacttcagctgttttggatgccttttatttatttttcttacctgtttgctctggctagaatttccaatgctttgccaaacagaagtaccaagaacaggcattctttcttaagctttaggtctttcaccattgaaaattatgttaattatggggttttcatatatggcttttattatgttgaagtggtttcttctattcctagtttgttgagtattttttatttgaaagaatgtcgaattttgttaaaagctgtttctgcatcaattgaacagatcatgtggctttttcctttcattttgttaatatatctgtttaaagttatgaatcacaaggaacaaaatatcaaatctgatacacttcgaagtctctgtcctgtttttacacaatcaatcaatagggtggtcatatctgcaaaagtaaaagccaattaggtgaagtggaaaaagaggagtctggttgttcattcaataacaggatttccaaaataatgtttggataatggaattgttttattctgtcatcatttctaacaagtagttttaacattaccaagcatacctgtgctttgccttatgttaacaaattaggctgatcagcagccagttgttggtcccacaatattcactggggtttggcaaagggacagccacctt

SEQ ID NO: 479083 - DNA, 454 bp, Homo sapiens
ggggcaccagttacaagacctgtgagctcctctacaaaaggttaatgtcattcttcactacaaagcattgtgaatggtccccagggctgtctttggtaaaggaagagaaggtcttgttaagtattaatgatcacagtggcaagttcacaatatcacctcctccctgggaaggaaaacatcacttcattgatatttatcaagggacttccactggggacaaagaggacggccatcattacgctcgctatgggcacagtagaaaagtagcaacggaaggcacttgtaaagctcaagctgccctgcagaggttccttcccagagtccaaatcctcactaacatcctccttaagcagcttagcataaagccggctctgagagtgttcctcccacccctagcctttctactcagcagtgcctgcctccccttcatctcagatctggaattacattagaa

SEQ ID NO: 479084 - DNA, 563 bp, Homo sapiens
taactggaaacaagattgtcatttctggtgtaacctgtaaatcaaatagtgtgcagtaattatggaagatggagcttgccagtgaaagaactctcatggtggctgttggcaagcaccttggctggtcagctgagcctgtgctgcaagtgggtgggaccaggcagggactggagatgggctggcagacaggagggtactcacatcagactggctgcatcccacaggccaagatggccctgttctgtccaggattccagagggtcacggtgagagtgagccactttacccgtttcatttataccttcgttagggctgcatggggccagaaatgtgccctggttctgggcaaccccatgcttccttccttggcaaccccatgcttccttccctttcagtcaagtttctgcaccctccctctgtccattctcaatgacttctttccaaaagatatgttcataatgtgccaatttacttaatggcctggcctctctcagtggaagaagctcttcttggctgcatctagttggctatcttggttcaagtcaccttttttgtctttctta

SEQ ID NO: 479085 - DNA, 629 bp, Homo sapiens
actgtttcatagaattcactgggatgggaaagccatctggaagttgttttattcgtgggaaggttttctttaatatctactcagactatgaaacaactttagtcccttcgtatcctggcttacaattggaatctcaggctcaactcctttcccttgttagtctaaggcttagctttctttctgcagtgtcctgcactcagggcactcataaatttgtggtggccccaatgctgggggcagcagggttgctaccagtggttggcacatcagccctggtgctggcagccagcagtggcaaaggcttttacaactgctccttgcagctttctccctatcaaaaagaagaaactccaattttcagcaaatatattcatgtggactggtatcttgtagtaattgttaatcacaacaggaggtgttatatcatgctcagagtgaccaaggcaagagacttagaaagagtctagtatttgtaattctagctttgtatccaagagagtgcccagctgtggataagatactctaatttgtatgcacaaaggtgtccataatagtctctgaagatcttttgtgtttctgtggaattggttgtagtttcatttttgtcatttctgattgtgcttatttgg

SEQ ID NO: 479086 - DNA, 578 bp, Homo sapiens
ttgtgcttctcaggcgaggtgatgccccaccctgctttgcctcacccccccgtgggcttcacccactctccaaccagtcccaatgagataaaccaggtggctgccatcggattctgggatgagagaaatcttgtaagcaaccagagctacaaagaaaggcagttaatggccagagatcagctgcagacaagaacaaagctttcaatggaaattttcaacaagtgggatcaagatcctgaagtatttcttcaaggaattgtaacaggagatgaaacatggctttaccagtacaatcctgaaggcaaagcacaatcaaatactccctctgccctaacgtgtgttttgttcttcaccccatttcctcaacctccatattcagtgccactgaaaccaaagaacccttctgaaaaaatgatgattctaactgaaggacagggatagggaagatacagagaagccatagcaggcatataccatttatagtacgctgtttctgtaagatcttcttctccatgactcgcgtgggtggataactttcctgcccagtaggtttactattttgaaagacaactgtgctt

SEQ ID NO: 479087 - DNA, 1073 bp, Homo sapiens
tttcatcagcggctgcagccatgccaatggtacgaggacaaggtgaccacacattaattgagtggctgatagcagccatacggactgtttggaatgatgccaaaaagataccagaaacagtgagtaaacggcaatcatatactgatttggtgcagatactccaggagatgggtatgtggcaggctatgtttgatctgaatacccggaggccaaatgatgaacgctttacctcccacatgagggatcttgtgctgggctcagtgccccagagagcttttggttctctagctgctgttctcaccccgtatgtgaggcgccatatacatgaagtgactaatgctatggcagccctcggggagacagaaaggcattggcaggacctgggaacccatgccataaagaaagggaaggtgccccctctgtgggtaaccaccccacaagatgagaaggaaccccagcagcggagggtaccagacaactggaggctctacgtggagctggcaatccactggtcccccactaatgtacagcaggtcctagcactggtagatactggtgcagactgcagtatagtttatggaaacccggataagtttctgggcaaagctgcatttattgacggttatgggggccagtcagtgaaggtgaaacctgtgtctctgcatcttggcgttggccacttggctccctgcctgtacactgtgtatgtttctcctatacctgaatatattctgggggtggacattttgcatagtctggacttacacactgcggttggagaattcagactaagaattcatgtattaaaactggtactgtgtggacattcgcatcaccagtcccaagttctgccacaaccctgatgggttacctccactcatcaataccatttgccagagataactgagactattaagaggttagaggaggtgcaaatagtgtgtggcacccatattccctacaattccccagtatggccagtcagaaagcctgatgggacttggcagatgacagtggattattgggaactgaaataagtaacaccccctccacgtgcagctggaccttccatc

SEQ ID NO: 479088 - DNA, 736 bp, Homo sapiens
aaactatcctttgacccatcctattggctcctaactggtggagtaattcttgttctctcagtggtgggcaggcttcctggaggaacccatacccaaaatgagtctcaagaatatgtatcctacatacatgactgcccacccctatagccctacccaaacacagatatgttgggcaaagtgtaggctgtggcctcagactcgtggttttgctgttgtctacatgactggtccctgtggaatcaaactggcaaagatcatagcattcttttgcaaggcctggtgccaccaggagacctctcctaaaagctttggctggtggaacagttctactgaggcccacgaagatatgctttggaagaggttatatggtgctttacaagaaagtgttttcccctctgtgaaaaaattttctattgtccatatccactgccctaccacctttctcattgtctgtgatttctcaaagatgacaaacagtggtcccacaatcacattagacaattcctttactccctacagaggataaccttgcttttccaaactttccaggtcattcctctgaaattaccttcccctattttttttttaaataagattcctccttttcaagagccagctggaaagcaaactctaaagttctatgtgtactgacatgcaaagatctccaacatatactgttaagtgcaaatagcatgtgcagaaaagtatgtataatgtactacatttttagtaaaaa

SEQ ID NO: 479089 - DNA, 638 bp, Homo sapiens
ttaatgtttgcgctttaaaatgagaggcgatggtttttcctcatcttcctggatttatctacctttggtctttgatgttggtgaccttcagatggggttcccgtgtggatgtcctttttgttgatgttgatgctattcctttctgtttgttagttttccttctaacagtcaggcccctctgctacagagctggcaggcaggaacatttaagtctactgaagctgcacccacagctgccccttcccccagatgctctgtcccagggagatggcagttttatctataagctcctgactggggctgctgcctttctttcagtgatgccctgcccagagaggaggaatttagagatgcagtctggctacagcagctttgccgagctgcgtgaagcaggaggttggtatggaaagaagtatgtagtaggaagatctgtggtggttcttgagccgaagaataacgtgaccaatatgggaagagataacagtagcacagtattcaatgtaaaggatggaaaggtgacccctgaagatttttcagtgactcatgtatgagatgatggaaacaggcctgggaggatggcagtgggagtgaagagggaaaccacaactgttgagactaaggatggaatactgtcatga

SEQ ID NO: 479090 - DNA, 514 bp, Homo sapiens
ggagaactgtgcttcttttggtgacataaacaaggagaaagggtataataagattgacttgctgccagtgccattatgatgtgtgaagtcaccaccctgacacataaaacctggaataattttgtgaaagcaggaacccttataagcaaatcctttctctccagtgctcagagcatgaaagtttcctgctgtctttggaaacttgtctgcaaacagctccaaggagacgcggtccaagggcccgccatccacggcgatgtcgaagaacacggcgggatgccttttatttatttaacttgccttatggctgtggctaggacttccagtactctgttgaacgtaaaaggtgtcaaaattattccaagcacatttttggaccacagtgcaatacaaatagaaatcaataccgagatctctcaaaattacacaactgcaaggaaattaaacaacttatccctgaataactcttgggttaacatcaaagttaaggaataaattttaaaattctgaaaat

SEQ ID NO: 479091 - DNA, 681 bp, Homo sapiens
ctattactaatgatgggtttttactttgcccgtggagagaaaatactggccaggagacaggtgaggcaactaaaattcagcgagagatccagacccattgggaaatcctctgagcagcctttgggttctcacactcctgccttgagctgtggctgttcctccattgaatgtggaggacttcttttccacagggactcacagatgcaggaaggtggaaggccaccaatagctctgccccaccctggtgaccagcagagcagggctgccactcaaagaagcccttgtgtttcagatgcagatgaaaggccggtgaccagagagagaaagcactggaaggggataaggtcttgtccacaactccttccctacctggtcctcctgttgtgctccagtgatggagcccactgctccatgaagtgcaaggatcaaaagaagtcatctgtatgaaagcactgtgaaaatgacagggttctgaacacctgcgaggcattagcattgttatggttgtaagcaaggatgataaactcggagaggaacactgtgttcttcagagggtcagcctccctacaaggctatcagtaaaattgcagatcatctttcagaagatccctagaatcagagcttgcagtgtttctgggatagacgtcaagactgggaaaaataggactctccatttcagga

SEQ ID NO: 479092 - DNA, 870 bp, Homo sapiens
tctccccagaagataacagcttccctgcctctttgtttacactgtgagcacagaactgcctactcaagcctcagcaatggtggacgcccctcctcctgccaagctccagcatccaaggtctttctcagactgctgctctagcagcgagcaaggctccgtgggtatgggacctgctgagccaggcaccagagggaatctcctggtctgcccattgcaaagaccatgggaaaagagcaacatttgggcagcagtgtactgctcctccaggaattcagagccagtgaatcaggctcagagaccccacagccaagaagtaaacccagatgctggatcactcacaggtattttgcttctgttgctcctgaaagcccagttacttcctgccattctctctggaaaggtggatgctgaatgtgaccttcttcgtcatggggcccatctcactggtggaaactggatcacatgtctggccttagtgttcaggctggcttggaacctgggtacaaaggtgcaaatctcaaagagaaaaaatcaccaaaatataagctgggagcccaaaagacgtagggtgtccatgattatgacaaatgaccactgcacatcagctgactgacctggagatcggctgactctgtcacactatcagaaagttgttcaacatgaagttagagaatgggaagctatgtatgacagtttttgttgttgttgttttttggttttttttgtagcattaagctctagtaacctgttgaattcactgccacaattcattcattgtacattatgtacaattcattgtacattgtacattacattgtacattgtacaattgtacattatgtacattcattgtacattatatacctaatc

SEQ ID NO: 479093 - DNA, 610 bp, Homo sapiens
ctagctcaggatgacttctgcaagaagcacacagtcagggtaccagacaaaacttttggtaacagttatttgtttttgcctctatttccttcctgcgcattttctcctaaactcacttcgattgtgtttttcttcctactattccatccaaactactcttgtgaagtcatcaatgccaaacttggatcaacatagcccattagatggaaccaattttgtccacattttattgtcctccagcccttcttcagagtgtgagacaagaggggctaaatttaaacagactgggcatccgcaaacattgcctgtgtataaagagctggatagtaaaccttttaggctttgtagacctacagtctctgtccaagctgttcagttgtgtcatttttgcacaaaagcagccatagacagtacattcacctattgctaaccttttatgctttttgctttatcatttgtgctcattcttttcttacatatgtatataaaatatttatattttatttcatatttattacatgtaatgtttttaatcctttaaagctaagttacatacctcaaagcctgtatttataaatacttcatgtatatgtacaggttttttaacaat

SEQ ID NO: 479094 - DNA, 1261 bp, Homo sapiens
aatactctcatgacaatggctgtgcagtggggagagggggaagcggggtgcactcactctggcagcactggcatggtaggaggcatgtgcatgtgtgtgctggtggagaagggaaggctaggacctctagtacacacatacactggcaaagtgatggggggagagggaatggttgtgggcaagtacctgcgggcaaggcagatggcggaggctgcagtgaggggagggcccaagtgggctgctgtgtgtttatgggcagctttgctggagcactctgctagtcaggactggtctgccagtgcagaagctacaatccagacctcaagaggtacctggggtctgccctgcaagcaggcacagccaggctggagccccaggagaggccagcagagcaagagctgcccaggtccaactgacctcatctcatgggtaagaccaccattcagagttcaggtctaacagttcacctagggctaaagtgtcctatgggagatcctagcaagaaacagaaagtatatttagagagcgttactgaagaaagtgtactgaagggattatttacagagatataggcagggttatgagaacacaataagggacagaatctggcaacaataatatacttttaccacctataggcctaaaggagctatgggagagaatgagcctggaaagagcgtgtagcctgaaagagggtcctcttataagaaagcattgcatccccaatgctccagctcagtgcctgacatatggtaggtactcaatgaatatttgctgaataaatcaatgaagtgaaaggcttagagagatagcagttttatatttaaaaacttgaaaatatcagcaattataacatcatatttacgtaactattttaagttaaaacacaagctgcttaaggttgtagtcccagatgtcaggaatatctttgtcctcagctattttttgcagaagatctgggtggggtgaagaagttgagatattattctaaatcaataagttcacaatgaaaagaattaaggaatttgtttttagttttatctagcttaatatttaatctttcaagatgcagccataaaaagcacaaaccctaaaaatttttaattgataacctgaacttcctgaaaattaaaatttattgattttcaaaagacacagttatggaaaaaaggacaacaatatttgaaaacatatatctgataaaaacttgtgttcagaatatataaagaacccttaaaatgcaatactaagaggacaaaaa

SEQ ID NO: 479095 - DNA, 607 bp, Homo sapiens
gaagagctagtcctgagcatagaggactcccagaagctgtacaagaagcatggtgtcagcatccatctgcttggcttctgttgagggcctcatgttgcctccattcctgatggaaggtggagggcaagatgggcttgaaaactgtcccaatgctatccaccttccagctgagaaagaaaagggctttagttcttcccctgtctgtgaagtctgcacgctggattcatgccctcccctgagttctggccaggaggcttctcaccccattcaaattgttataaaagcaaccagacaaaacccatcctctttgcctggagtttgttctctggcatgggaaacaaagtctctcatttggttccctctctgtgtttatatcactctggctgcttatctgttggacatctcaccaaaaaatacttcaagggatgggtggatatgggaagtaaaaaccaaattatttggttacatactttttaaaaaataagcttttctttttagaatagttttagatttacataaaagttgcaaaaacccaacctgaagccaaagggtgagggaacctgtttgatgtaatctctaaagattagccttctagggcatggaatac

SEQ ID NO: 479096 - DNA, 675 bp, Homo sapiens
agagacctgcagctgagggtcctgactgttaggaggaaaactaacaaacagaaaggacatccacaccaaaaccctatctgtacgtcaccatcatcaaagaccaaaggtagataaaaccacaaagatggggagaaaccagagcagaaaagctgaaaattctaaaaatcagagtgcctcttctcttccaaaggaacgcagctccttgccaggaatggaacaaagctggatagagaatgactttgacgagttgagagaagaaggcttcagaagatcggtaataacaaacttctctgagctaaaggaggatgttcgaacccatcgcaaagaagctaaaaaccttgaaaaaagattagatgaatggctaactagaataaacagcatagagaacaccttaaatgacctggtggagctgaaaaccatggcacgagaactatgtgacacatgcacaagcttcagtagccgatttgatcaactggaagaaagggtatcagtgattgaagaccaaatgaatgaaatgaagcaagaagagaagtttagagaaaaaagaaatttcatatcctgccaaactaagcttcataagtgaaggagaaataaaatcctttacagacaagcaaatgctgagagattttgtcaccacaagccttgccttacaagagttcctgaggaagcactaaa

SEQ ID NO: 479097 - DNA, 632 bp, Homo sapiens
ctgccaacacgactgtcattgcaagatggctgctgcagttctagctccagtcatcacttcaaagcaagaagaaggaaaaatagtttctgatgagaaatctgatgatattctaattgaggatctcttggagtacgtgtcttccggccagctctcttcctgcttctgctatcccgctcacgcacactgctggtgcaagtggccttgcgccttggcactgagcctgaggaggaaggagttattcatttccttaagctttcaggtcccagggagaatttttcactgggaacttagactcctaaattgtgatgagtcttttttgccaatgaaagaggcctcctcacccccagaagacgtggcctctccaactccagtagtatctgcctttccaccaatttttccacctccatctaagggcattaacccagcatttcctgagaaaatagtaatggcctgtcctgaggcagttgccatgcaagacaacactgtttctcctcagaatccaccccatcatccctctttgcttctagaactgtaattagactcaagtctcagcaggcccctaagggtgaagtagaaagtgtgacccatgaggagttgtactacactccaaaaaaaaaaaaaaggtattaata

SEQ ID NO: 479098 - DNA, 451 bp, Homo sapiens
tttgtgccagagtactgatgtaggtagactcagcatgccccttacccaaattatgtttcagaaaaatttgaaaccaccatattacacaacagttggagaatttggtcacatcagtcatgttgggcccagactggaaatatcagcagtacagcccacagagaaatgctgggaggactcagagttgacatggatgattcaagcacagggtgtagaaatttataaaaaaacagagagttcaaaagttcctgggcacaacagtaacatcttgggtgttcccctacacaagctctctcttccctgccttcatgtaagatgtgacttgctcctccttgttttcccccatgattgtgaggccttcgcaacatgtagaactgtgagtcaattaaatctcttttctaaaattaattacctcatcttggatatgtctttattagcaccatgagtacagact

SEQ ID NO: 479099 - DNA, 558 bp, Homo sapiens
ggtagttgataaaggagacaagagatgatggggaacatggtaggattagtgacttccatgagcatgagaccactgctgcacttctttagccaaaaagtgagtgccttggtcagaggcaatgctatgtggaataccatgatggtggataaggcattccatgagtccacggatggtagtctcagcagaagcattgcatgcaagataggaaatcctatatccagatttttgaccactcaaagaggtccatccacatacctcttccccagatgtcttcgtcaccaattttccaatcatgctgcttccaagtccctgaccatccagccaaaccattggctatggtccatgaatcagtatataatcacatacctggccatttcttcttccatgcaaagtgcaaaaccaggtgcactgctggaaattctgcccactgggaagatttcccttcactgctgtccttcagagatgtcctagaaaggggctgtaatgctgcagctgtccacttttgggtggtgcctgcatattgtgcagaaccatgtgtgaaccaggccctagtcttct

SEQ ID NO: 479100 - DNA, 809 bp, Homo sapiens
gcttcagtacgtagatgatcttcttatatctggtaaagatataaaggaagggatccaaacttaaaaagagagcacgcatgtttagatctgattgattaccatacaaaagttcgaccagacttaggagaaactcccttcaagagaggggggcacttattcatagatggctcctcctgcaacccgattgccatggactaaatgtcttcctattgctttgttaagaatccagactgccccttggagagatattggcctttccccttatgaaatgctctacggattgccctacttacactctgctgctgacatccctacatttgaaactaaagatcatttcctcaaaatctatacactttgtctatcctctatcttctcctgccttaagactaaaggtctcctagcacaggcgccacccctggagtttccagcacatcaacatcagcctggagactatgtcctcatcaaagggtggaaggaagggaaactcgaaccagcttgggaaggaccctacctagtgctcctaattactgagactacagtccggacagcggaaagaggatggacttatcacacccaagtcaaaaagacgctgccaccttcagaatcatgcactgtcactcctgggctcacccccaccaaactaactctaaaaagagattactaatcacttacttattttcttttcaacagaaggtcatcttgtcatcaatggtaactcaggctagccaacctttaacccttctgtttgacgtctgttcagtcatcccgtgcggagatgagcaagctcaaaggaaggtatcccatggtga

SEQ ID NO: 479101 - DNA, 1472 bp, Homo sapiens
tgaaggaggggcaggaaaagattttccgtctctcttcttacagcacccatctgctcttgcacgttgtttacttacttttatgcgagctcttagcatattcttcatagttgttttaaattcctggcctcacaatgttctaaattcctggcctgataatgttcctggtcctttaccagagggtcatgtgaccagcagtaactgtgaggcccggttttctgccacgatattccctccagactggctggtggcttttggtaccaaacaagtaactttcctttcccgtgaacttgtctgcagtcccaaacgacttaggtcagccacagtgacacgctggcaaaactgcaaagtgagtgatgcccacctcccctatcctctagctgctcaaggtcggcctttggggtcactgctgtataattctacttcttcccaaccatgcaaggatggcagaggcctccccctgcctcctagacctactaagacaaggcaatggctgtgggcttccccaccctcttggccccatcttctgaagaagaaataagaaagtactgttttcctggcctgcctacatcctggtaaggaaggtgccagaattcttgcggatctggaaaagctggcttcttccacctgccccaaacatctctaccaccccctgaggaaagcctgtcattttgacagctttgttcccttcacttgaggcttttagaagggtcaaatacccgctcgcccccctccccacgggggtgaggttaaatagcctgggaaggatagctcaacaaaagtgctattaattacttctactctagtataaatgagctttcagttcttccttgacagtgggttttgcagggtgagtgggggtactggaatctcatctgggaggatgggttcttggtgaggagtcttgcctgcttaatgatgtttctccaggttggccctttcccttactgagtaaacagtggcttgcactgatagggagactagaggaacagaacactcctcacccagagatcctatttccttttgaaaatggcctcaagcaacaagtctatgaggaaaatgttcaacttcattgatcaatgaaatgtaaattaaaaccacattcagctaccaatttccaacagtcaaattgacatgctacttcatgactagtgaaaatgtgcaattctggagggcagtttggccatatctatcataagcttttttaaaatgggcatagacaacagaaatgtattttacaaggatgtccagtatggtgatgtttatagaagtaaaaaattggaaatgatctaaatacctaataaaagatttcaaataaagtacagtagatctatactactgaactattattcagtcactaaaaatgatataggtaaatatttattgacaccagaaaatgcccatactgtattattatgtgaaagaagccagttataaaatagaatgttcccatttttgttaattataataataaa

SEQ ID NO: 479102 - DNA, 638 bp, Homo sapiens
cacccgagcccacacatcatcacccggcatcccaggctctgggcggctctgcccccatggctctgcagaatacagcccctgaggctgctttcatgggctggtgttgggtgcctgcagcttttccaggcctatggtgcaaactgttgatggatctaccattctggcatctggagaaaggtggtcctcttctcacagctgcactagacagtgtcctagtggggattctgtgtggaggcttcaaccctacgtcccagtaccagcttctcctggatattgaagatcctccattaagttttcctgcggaagacctcaaggccactcacaattgtggagctgcacctccttcctatgtctttggcacagcagtgattgctccattccttgctgggcgcttctctggaggcctgaggactgccccacaaacccctttgggaccagtgcttatgcctgcctctagggggcctgagtgtggacttacctggcccacctcaacaagctttgccctccctacctcagaagcagagtgcagaccactgagagttccacagcccattccatcccccaggacacccacatgcttctcctagttaacaaaggtcaagtgtaaaccctactgctgccacagcagctggctttca

SEQ ID NO: 479103 - DNA, 481 bp, Homo sapiens
catcactttaggcttgtataacaatgtttgaagtttacaaggaactttcttcaaagccaaatgttgtgcaatggtctctcacaagatataagacaaagaaaggaggtgaaaagggcaccaagagcctctcagattatatttggcaggaaaaacccttcacctgtccgtccatccagagattctgggcaggccacctgatgaagtccatgggcatgcttctagcaggagtctgcatgtgggctgacttgatacttggagattattttattacaattattccgtttgagctttatcttgaatcctggggtcttagcaccaaagcatcaaagctctcagggcccatagtgctcaacggttcctactgcaacacactgagggctggtctgcacggtcctctcatttgcggcttgtctctcctcctggttgcaggggaattttgccaaaagttgccatctattctctagggtactatacatctcct

SEQ ID NO: 479104 - DNA, 2444 bp, Homo sapiens
agccttatgtagacaacagttgcagggtggtatgccctccaagcatttccacaaaacacagtgccccatcttggagcacctcactaactccatgaagatgcatggccacaataatggcaagaaacccatgaccatgcacattgtcaagcatgcctttgagatcatccacctgctcatgaatgagaacactcttcgagtcctagtgaatgccatcatcaacagtggtccctgggaggactccacatgcattggaggcacttgtgaggcttccttccagaacatcaagaccattgctgagtgcctggaagatgagctcatcaatgccaccaggggctcctccaactcctatgtcatcaagaaggatgagctagagcatgtggccaagacacttccacaggcagaagccctagatagagcttatcagatcgacacagtgattaacctgaatgtgccctttgaggtcattaaacaacgccttactgctcgctggattcatcccgccagtggccgagtctataacattgaattcaaccctcccaaaactgtgggcattgatgacctgactggggagcctctcattcagcgtgaggatgataaaccagagacggttatcaagagactaaaggcttatgaagaccaaacaaagccagtcctggaatattaccacagcccctcagctttccagtttacctcctaccagccagaaaccccagcagcaaagagcctcttttgccagcaaaagtcttggggtcggcaccgattagctctgatcatgtccatccttgaagatggggagtggggacagtctctcctgaacctcgtcgactgagtttggtggagaggttatttcccaaagtgtgtatgtgtggaggcgaatgtgtggaggtgtatatgtggaggtgtgtgtatgtggaggcgtatgtgtggaggtgtgtgtatgtggaggtgtgtatatgtgtaggtgtgtatatgtggaggtgtgtatatgtgtaggtgtgtatatgtgtaggtgtgtatatgtgtaggtgtatatgtgtagatgtatatgtgtagctgtatatgtgtaggtgtatatgtgtaggcgtatatgtgtaggtgtgtaaatgtggaggtgtgtatatgtgtaggcgtgtatatgtggaggtgtgtatatgtggaggtgtatatgtgtaggcgtatatgtgtaggcatatatgtgtaggcgtatatgtgtaggcgtatgtgtggaggtgtgtgtatgtggaggtgtgtatatgtgtaggtgtatatgtgtaggcgtatatgtggaggtgtgtatatgtggaggtgtgtatatgtgtaggcgtatatgtggaggtgtgtgtatgtggaggtgtgtatatgtggaggtgtgtatatgtgtaggcgtatatgtgtaggtgtgtatatgtgtaggtgtgtatatgtggaggtgtgtatgtggaggtgtgtatgtgtaggtgtgtatatgtgtaggtgtattatgtggaggtgtgtatatgtggaggtgtgtatatgtgtaggcatatatgtggaggtgtgtatatgtggaggtgtgtatatgtggaggtgtgtatatgtgtaggcatatatgtgtaggcatatatgtgtaggcatatatgtgtaggtgtgtatatgtggaggtgtgtatatgtggaggtgtgtgtatgtgtaggcgtatatgtggaggtgtgtatatgtgtaggcgtatatgtgtaggtgtgtatatgtgtaggtgtgtatatgtgtaggtgtgtatatgtgtaggtgtgtatatgtggaggtgtgtatatgtgtaggcgtatatgtgtaggcgtatatgtggaggtgtgtatatgtggaggtgtgtatatgtggaggtgtgtatatgtgtaggcgtatatgtgtaggcgtatatgtgtaggcatatatgtggaggtgtgtatatgtgtaggtgtgtatatgtgtaggtgtgtatatgtggaggtgtatatgtgtaggcgtatatgtgtaggcgtatatgtgtaggcatatatgtgtaggcgtatgtgtaggtgtgtatatgtggaggtgtgtgtatgtgaaggtgtatatgtgtaggtgtgcatatgtgtaggtgtatatgtgtaggtgtgtatgtgtaggtgtatatgtggaggtgtgtatatgtgtaggtgtatatgtgtaggtgtgtatatgtgtaggtgtgtatatgtgtaggtgtatatgtgtaggtgtatatgtggaggtgtgtatctccccccgtgtgtatatgtggaggtgtgtataatgtggaggtgtatacgtgtaggtgtatacgtgtaggcgtatatgtgtaggcgtgtatgtgtaggcgtgtatatgtgtaggcgtgtatatgtgtaggtgtatatgtgtaggcgtgtatatgtgcccccgccccatcatgtggagcgcgtgtatatgtggaggtgtgtatgtgcaggtgt

SEQ ID NO: 479105 - DNA, 1401 bp, Homo sapiens
cttctgatgtgggttgagagtgcagtcttaaagaatgagtaatattctgacaaatagtgatgggcaaagaggtgtcctaggagtaggaaattgcctgagcagagacagagggcagaagaaggcaccactgcatgtttgggaaactgaaaataaacagttcaacgtggctgaatgtgagataaaggaggaaagaagagttgggaaataccaccgctgtgcatcagtggaggcctgcttggtgttcacctttgccctgggattgcaggctaccctgctgggcagtcccgagcaggtggtactagaagccagaaaggctgaggcaaagtatgaccttgtgcacaactctgaacatttactggctggcaaaccaaatgtcaaatgcgtggtaatgagcatttggaaaaataatgttgaggttcctgatgtatttaccctgccaggactgagatagtgagagaatgaagggtcccaagtggatgaggctgagaacttaaccactaatccaggatgggcaaccaggactttgtctgagggagtcaatggggtggatcctttctttatccttgacctttgagtgtttgattaataaatgctttgaagtagtcttctttgggttaaatctgcttggtgttctattaaccttctcatacttgaatgttgatatctttctctaggtttgggaagttctctgttattatccctttgaataaattttctacccctatttctagctccatctcttctttaaggccaataactctcatatttgtgagactattttctagatcttctaggcatgcttccttgtttttttatctttctttccccttctgtgtgttttcaaatagcctgtcttcaagctcaataagtctttcttctgcttaatcaattctactattaagagactctaatgcatttttcagcatgtcaattgcattttccaactctagaattgctgcttgcttctttttaattgtttcaatctttttgttaaatttatctgatagaattctgaattccttctctgtgttatgttaaatttcttcaagtttcctcaaaataggtgttttgaattctctgctaggtcacatatctccatttctccaggattgttccctattgccttatttagttcatttggtgaggtcatgttttcctggatggtgttgatgcttgtagatgttcatcacagtctggacattgaagagtttggtacttattgtaatcttcatagtctggacctgtttatgcctgttcttcttgggaaggctttccaggtattcgaaggacttgggcctcaagcccagtaatgctgtggtttttgcatatttgtagaggtaccaccttggtggtcttggatgagatttggaagaattttctggagacttgttcttttccctt

SEQ ID NO: 479106 - DNA, 558 bp, Homo sapiens
tggcgttcaggaacggctctggaaggagagagaaagtggggagatgaatacagagtcttctgagagtcaccagctggccacagaaatcaacttttgcccctctgttaaaagatgtcaagctaaggataagggaacacctggaggcaaggcaaggagcgtgaaaaagagagtttacagcaaagggcctaacattagagatccaggcaggaaaacatgcattctcccaaattattttggcagcttttgtggaaagtccattgaaagcagaggagagaggaaggtggtttgcgtgtttccttcccataatagctatgaatttcagagtgaaacagcagcaggcagacaccctgttaagtttagcacatgggtctttgcctactttagtgggctgtgcttccaagggcagtggttttcaaagcctttactatttttggttggctcagtttattggatgctgctggggcttccactggtccctgctggtactgcccgagggggcaaaagggcttcacagtcaggccgccagatgactttcagtggaggaggcctgtggtgaga

SEQ ID NO: 479107 - DNA, 536 bp, Homo sapiens
tcactacacccattccaccacctctggcatctgtgcagtcccttcaggaacctgaagatgggcccacccaacctgacaccaacaccactgccagcacccacccacatgcactacctaggagcctggggactgtcctgcccagcccatcgagccatcaccaatacaaatatacacttctcaggacccagagggtcatctgccactactaactgccatcacacacaccatactttcttcccagggactgaagaacctgcccacatgcccaacccactgccgccaatactagcatctgaacaagccaccctggaggcccaagaatcagcctgcctggacctgctgacactggtgacagtggacaccatcctgggagagactacactacagtatgcacccaaaataaaagccaaagggccatacctgaccaacaccattaatgcatcgtcagaaaaatttctctcctgtgaaagcaaatacaaaaaattggaagaagtgacaataatagcaaatatgaaggtatcaatgtaagaacacag

SEQ ID NO: 479108 - DNA, 1649 bp, Homo sapiens
ccgctcctatttccttcagcagtggttttgttatcaggatgatgctggcctcacaaaatgattttccttctaacagtcaggctcctgttccgcaggtctgcaagagtttgctagaggtccactccagaccctgtttgcctggctattaccagcagaggttgcagaacagcaaaagttgctgcctgctccttcctctggaagtttcatcacagagggacacctgccagatgccagctggaactctcctgtatgaggtcagagctcgagagctgtgttgggacatccgctgctctcttcagagccaacaggcaggaacatttaagtttgctgaagctgcgcctacagctgccccttcgcctaggtgctctgtccagggagatggttttatctataagcccctgactgcggctgctgcctctctttcagagatgccctgcttacttcccttggctgggggagagaggtccctggacgcttgcagtcccccgctgaggggacaccccaccctgcttctgctcgccctccatgggctgcatgcactatctaaccactcctaatgagataaaccagagctgtttgagctgcttttatatcctggttattaattatttgtcagatgggtagtttgcaatgttttctcgattctgtgggttgtctgttcacttggttgactttgtgtattcttaacctttgaactcttttttatattcctattaggtataaatattacaatattttatttgcataatgattcagtgctagctaagaaatgaaattttgctagaagtatgaggaatataagaataaattcttagtatgttgtttcatttcaatattaaaaatatcaaatatatataaactgcattaccagatatcataattatactagccaggatggaattatacttgtgtatttaaacaacgctgcttcaaactataggtttttaaagtgagcatcagcaactacctcttacattttttcttttaacagtatgtcaaatggcatagcctaatttggaaacacatcttttaaaatacttgagaaattaggatttttaaaaataaataataatcttaagcacttaagcctttttttttctatccgtataattatgtatagaaaacaaaatactatagttaatactgtgctttgagaactatcttcaagtgccaaataagacttggaagattcagtcattggacccaatgctacttctgcttaactttttcgcaagatagcgaagcattaagcccaagtaagagaatctactacaaaatatgtattattttcaagtaaatctgctattaattgcatgttggctctaacgtcagttctcctcattacaatagaaaataaactctttattaattcatcatatgtgtaagatattcaaaattcaaattgaaatgatgctacagaaaacttaaaaaacttttatatatattatttcaataaattctagctacataattattaaataaattagggttgcattttatttatgttcaaaataaaacaatgtatcccagttggggaatttaataaatatactgataaatctgttttgatgtaaaattttggcttattctgaattagagtggagatgttaaatacatattataacttctctaatttaccacacctttcc

SEQ ID NO: 479109 - DNA, 947 bp, Homo sapiens
cgccgtcgttggaggttcctgggagagggtggccgttaggacgccgtcgtctggcacaggggcggaaagccggggaccctgagaagcgcgaggggattgggcctcctacgttgttaccctttaccagcacctgggtcgcaggggagctgtggttttgtggaggaatggtttaccatcttcagacgtccttggcactgccaatatttagcattttcgataaaatggtggaaatcctgggccggtcgaagtcccagggtgcgaagcaaattgatgagatgcaccaaaaactgcaatgcctgcagctggcattggtcaacagaaagggcctaattcttctccataccagtgctcaaccacaccttgcacaaccaacacttcaaaaggtgaatgaattgggctacaaagttttgcttcattcgacatattcacctgacctctctccaactgactaccacttttttaagcatctcgacaactttttgcagggaaaatgcttccacaacgagcagaatgcagaaaatgctttccaagagtgcaatgttctaagctcaactatgaatgtggcctccaacagccatggttgcactttataagatcaaactctcaagtcaaagttgaataaacctgtgcacaaaacgattttctgtactggttaaaggaagcctgtgtgcgtgtgtaggcattcacgatgtatatgaaaaaccatggagagctggtctaaacaaagaaagtaaggctgatacaaaagcagaagcagagataagatgttattaattttttgaatatctaattagtttctttacagattacctcattataaattattctgcacttctatgtgaaaatctaaggttatgtttttatttttcatatgctgccaataactgtatgccttatgttatgattacttgtatacatatatgagcccattgcctaagataatgaag

SEQ ID NO: 479110 - DNA, 463 bp, Homo sapiens
tattgtttaggtagttcatgacggacagaatggagacttctaagtgtcctcacatggcagaaggggtgaacaccctccctgaaaactcttttataaaggtggctggacatcgagaggagcacatcagtggaggaacacacgggttgctggacatggagaggaatgcaccaacaggcaccggcagcggggaggccactgaccggcagaacaacgcagagtttggctggggcaattggaggagagcctggaacactgagtggcccaactccaggggaaaaccagtctcccttctggcttcctcatctactgagagctacttctactcaataaaaccttgcactcattctccaagcccacgtgtgatccgattcttccagtacaccaaggcgagaaccccaggatacagaaagccccctgtccttgtgataagtcaggggtctaattgagctgactaacacaagcc

SEQ ID NO: 479111 - DNA, 635 bp, Homo sapiens
gaagatctgcagcttcactcctgagcccagcgagaccatgagcccaccggcaggaacgaacaactccagacacgctgccttaagagctgtaacactcaccgcgaaggtctgcagcttcactcctgagccagcgagaccacgaacccaccagaaggaagaaactccgaacacatctgaacatcagaagggacagactccagacctgttacaactggaaggtgcttctggcatctactgcatagaggccagggacgctgctaaacatcctacgatgtacaggatagcccatgacaataatgatctggccgagaacatctgcagtcagcaagctagagatccaggagaattggtggcatgtcctagtctgacagccagcaggctcaagacccaggaagtactgatggttcagttcgagtctaaaggcatgggaaaaatgatgtcctagctctaaggtagtcaggcaggagaagttcccacttattcagcctgttattctattcaggccttcaactgattggatgatgcctacccacactaaggagggcaatctgcttcactcagtctaccaattaaaatgttaatatcatccagaaacaccctcacaaacatagtgaaaataatatttttctaaatat

SEQ ID NO: 479112 - DNA, 582 bp, Homo sapiens
acactcccaataaatccattgtcatgctgatgcaagaggtgggttcccatggtcttgtgcagctccacccttgtgacttttcagggtacagcccccctcctggctgctttcatgggctagtattgtctgtggcttttccaggtgcacagtgcaagctgtcgatggatctaccactctgggttctggaggatggtggccctcttctcacagctccactaggtagtgccccagtggggagtctgtgtgggggctccaaccccacatttcgcttctgcactcccctagcagaggttctccatgagggctctacccccgcagcaaactttagcctagacatccagaacattgacagaggacatgcaaaacctttaagacagcctgatcaagaagatgcagatagtgcaacatctgcatgcagtcaagtagcagcagtcaggttctctccatttctcaaaatacccttcctggtccagttgaatcaaatcatgtaggctaatgtttaaaatgcatattcctgtgcttcttcccagctctatttaatggtactgtctcatgggcagatctcagggacttgaatttgtt

SEQ ID NO: 479113 - DNA, 1293 bp, Homo sapiens
tcaggaggacagcttcaaccccctaagatttcatcattgccttaatcaatcggcagcaagcacctgttacctgctaccccgaccccttcccttaaactgtctttgaaaagcccctaacctacaagctttggatgagatgattttgttacaagaaaggggtcccaatccagaccccaagagaggggttttggacttcacacaagaaagaattccagaagctacacatatcttgctcatttatgggctatgcatgatacctgttatcatctccccctcactgggtggtgtggaggtcaagatggtgaaaatgacatcactacttctttcaatcttcatttccagatagattgtgataagataagggccaaacctggtctacacaaattgagtgtggcttcagtggaatgtgtaactacaattccactgatggattcttcctacaggagaaggaaaaggagaagaagaggaagaagaaggaggaggaggagaggaggaggaggaggaggagaggggaaggggaaggagaaggagaaggagaagaagaagaagagaaagaaagagagaaaaaagaaaagagaaagaaagaagaaagagaaagaaagaaagagagaaagaaaaaagaaagaaagaaaagagagaaagagaaaagaagaaataagaaatgaagaaaacaggacttatgggtaattccaatcctttaaacaactctacagggaaataaatcattttgacccaaactaggtcagcattgaagcagaattctatttgtcagtgcccacaaattcaagattctctttgaagaatgtgtcagaaaccatgctttattggatcacagagaaatatagtttagaactcatagaaactgctgcttgagtcataagaaaataccttttcaaaataaaaatggtgccaaattatatcacatgattaaatgatcattttgttcaattgatgaacaatttccaatatatccattagcagaacaattactgtttgcaaaactacttataatgcgcatttatatagtggtttttctattataatgagtgttcgccgactttaaaatcatttaatttttattcaatcccactgccttccaaattctttcaaatgtagtcgcataaatatgaaaataggaagctatctttatcagcatttgggggaaaatgtaataacattacgagcagtatcacattaggaatgtctacacaatgtggtgcagagaggaatccattgaaataagtactgatcaggccaagattcatggcaatggaaatttaaagaaagatattc

SEQ ID NO: 479114 - DNA, 746 bp, Homo sapiens
ttctgctcgagtggccaattgagtggctgtgtcctgcagcagccaaagaagctccactcttactcatgaacatcacagttcatgtgagcaataacatccacaggctgaagttttctcctaaccctgcagggatcttcatttatttgtcattcactaagaactgtgagtgcttattctgtctcaggcattgttctagaagctctggatactataagacagttgtccccaacctttttggcaccagggaccagtttcatggaagacggtttttccatggaccagggaatattgtaaatgagtgtggctgtgtgttccttcacacacatgcatatacagaaatggatgaaaagaagactggccattctaatattgaaaattcctgtggaaagactttttgtttcaggtataaaatccatatgagtgattttggggcttgtaaaaatggtctgatcattgacatgttttaatcgtttgcattagcaaatagcatcaacatattgaacctgagcttctaccaccaccatttaagagctcttggaaatgttaattcttcataatcaaaaatatttaagcacatagataatatatgtacttataacattagaggttttctaggtatattttatgctgtaatttgaaatattgtgcaatttggtatgggaattgaaatttctgtattgattgacactcatatattttaatttagcttctgcatgttatgtaaagatgacactggttttactcac

SEQ ID NO: 479115 - DNA, 589 bp, Homo sapiens
gacagcttgacggtggaactttggagaggagttcagctggtgatgggcgaactccaggggaagattatcttcctgcttaattacccttccagctccttttcccgtgtgggtgcaagaggctgtcacgctgactctccactgagctatttaacacttaagccatcaacggacagcaaagctaagggagcgcactgcaacacatgctctctggggctccaggggtcacggagaacccctagatgctgccacggggccgcgaatgcttcctgcaatcaattattcaatcaatcaatcgatcaatcaatcatcagtcagtcttatgatgctaatatcggaaatcctatctataggagctttgtggatgcagatggatttgacgttttcagcgatcaagaattactatatttagtaaatggaaataccattactacaaacgaatgctaaaaatagaatgatgtcttttgtttccaaagttgatacactagagcaatgcaaaaaaaaaaaaaataataaaagcaagatacttcatagcaaagttatctcagggtaaatgctgcaagcaccgccaggtacatgtgcacaacgtgca

SEQ ID NO: 479116 - DNA, 882 bp, Homo sapiens
cttgctcacacctcacagccagtccagtggacaattctgccatctgcatcatcaaaatgtatccacaatgctcccagagactgaccggcttaaggctcgaggcgtgccagggcccccggagtcaccctgcatcagctcttgccgcctgctgcctgggcacgggagaccacactggtggaggggatgagacagggcaggcccagccttgggacacccctgtccccacagctccagtgactgggtgcttcccccagccctgcagagcagcctgccccactgcagacagtgctggtccagggaggtcctcacaggacaaccagagttgtgatgcgggtgatgatcagaagctgtctgaaatctgcaaggcaggcaggctggagattcagaaggagtggggctctgctaatactgatcagcccagtgatactgattttggactcctagcctccagaacagtgtgagaataaatgtgttgttttaagctcaccagtttaccgtacttggctgtagcagcccttgcaaactgacacagaggggctgatcaactgaggctaagattatttcttagaattgaaagagaatcagtatctcttgagcaaaaaccattgtgttttcctgattgaaagtctcttaataactattgttactgggctctaacgtgatgactgtactgtgaccagtctggtttgaatgtgttggattaagcaaaggtctgtgcccttggtttgagcatgtccttggtttagacccccaaagctcaaaatctgggtatagtaaagtgacagaaaacactctctgagaccccagaggtctaggatgtgtaccctagaaggccccagacaccttttatgtgaccaccttggcttgaatgtgttgcattaa

SEQ ID NO: 479117 - DNA, 2093 bp, Homo sapiens
cagcttctgagaaccgcgtctgccctgttccgcatccctagagcccgaaagagtggcgggaggggtagggatggttagtgagggggccccaatacctatggtcagggactctacctctttggtggaggtccatcctgccaattggcttctcgggcctgtggcagtgagggaggtccttgctactgcccctccaaagacgcctgcagtgacaccacagtcagatatggtggcatcagagtgggggtggggggggacagcaagaacgtggcctgtggcagaagaatctcttatcgttaggaagtcctcctgggaaaatgttctccgctggtcctacttctgcatgttagagccacacaaagtctgtactttctgccccatgaaagcccctcagagagttaaaggagaggccgtttgctttcataatcatctctactttaagcatttcccctttccggtcaaccccattgtcacccagaggatccctttgttgattttttccacatagattatttttgactgttttggcactttatataaatggaatcatatagtaaatatatacatgtatatatgtatatatacactatatatgtatatatatagtgtatatatatacatgtatatatgtatatttacatatatactgtatatatgtatatttacatatatactgtatatatgtatatatacacgtatatactgtatatatacagtatatactgtatatatatactgtatatatgtgtatatatatatacagtatatatacagtatacatatatatacatgtatatatacacagtatatatacatgtatatatacacagtatatatacatgtatatatacacagtatatatacatgtatatatacacagtatatatacactgtatatatgtatatatatactgtgtatatatatacagtatatatacagtatatatatacatgtatatgtatatatatactgtatatatgtgtatatatacgtatatatactgtatatatatatagacacttttgtgtctggcttcttgctctcatcataaagcacttgaaatccatccatgttgtagctggtatcagtagctagtttcttttcattgctgagaagtatcactttttattgatgagtagttttacattgtatgaacatgcccgagtttgtttatgcattctactaatagacacctgggctgtttgcagtttttggctattacaaagaaaatttctatatttttttccaacttttattttaggttcagcgggtacatgggcaggtttgttacatcggtaaattgcatgtcactggggtttggtgtacagattatttcaccacccaggtgttgaacatccctcactgatgtgagatgctgcctttttcacagtctcaatccccatgtgcatttctatttattttccttccactttattcacatctttttcagtatccacaaccatattgttttaaatagcttcatgatatgttttaatatttgaaatttcctggctattcttgttttgtagtcttccagataaataattttgaatcactttgtcatgttccagaaaataatactgccagaatttttattgtgatcacagaagttttacagattcatctgggggaaaaaaacccatcttcccagaatacagaaagggtgagggaaagacaaacatcaaggacaagtctcaggttctggacttggagaccaagaggatttggggcatccgggagcagggcagggaggtgtgatggctgcctttcactgagtaggaggatgcccagacttgggggaactatggaaagtttggttcagactttctgagttggagatgtctatgcgcagtccacagggcgaagccctggagaccttaacttgttactgttttatttgttgatgtgtttacatcatttgtccccctgtgatggttagttttatgtgtcaacttggctaggctgtaggggctgttcctctggcccctggactgcggaggtctgcttccacccccattggtcgatcgttgtcccttgtcacagccattgagaattttggcagggagcatgttcttagagcatttttaggctctgc

SEQ ID NO: 479118 - DNA, 731 bp, Homo sapiens
tcaagtgttgctgggacatctgcttctagaggctgcgcggtccttggctcctggccccttgctccatcttcaaagccagcatggccagtcgtctttctctcatggcatggctatgactctgaagtctcttccacctccagcttccacttttaaagagccttgtaatgacattgggttcacctcaataatccagatgatctcctcatataaggttgctgaggaagaggagtcctttctgttgtgcaaagcaaatccccctctgtgtccttgggctcttccccactctgaggccttgttcaatcagagacttgaagatgttctgctgctggctttggagatggaggaagaggccatggcatcaaggaatgcaggtggccacgagaagctggaaaaagcaaggagaagaattcttcccttgagctaccagaaggaacacagccttgccaacatcttgattttaaccgaaatagggccacaagtcagtgctggtgccgatgagaaccctggtttccacacatcccatccaggattctaatatagctttgtgatacagagttcataaaatgtaagcaacttttataatttgcatggaagccactgtgaaacaatttcagaaccactgtaaatgaataagcagcgctctcaaaagccggagaaacaaactgctaaggcttaatggtcgtgtctaagcattgaaccactttatgtgtttaaaatatgttatcaccttc

SEQ ID NO: 479119 - DNA, 742 bp, Homo sapiens
gagccaggaaccgtggacaaaaaccaatatatatcataacaccacgagagcatttaaaaatgaggtagatctgcaaaacggggcgatgatgcagacctcaccaagatgttgagaggattccctgctagtttatgaagcatccacacaccagatgctcaatgcctgtcggctgtatgggactcaaccattgccaggaccaggccttcgaatgccaagacctttgccctcctttccatccacaatgaaaataccagttgacaccaccaggggtccatcctccagggttccagctctcctcagcaggaaatgggcactgaaacagacaaagaggcaggtggtgcaggtgacctgcagcacccaaatagctttggttgaagtggtgaacgctgaggagttgctcgacttagctctccctcccccagaaggccccctagctgcctcttcctggcccttgccagtatccagcccgcaggcagataagtctttgctgtgggacccgtttaccaccagacatggatctcagccaagtgatggaaaaaagaataagggacttgtgcctagaatacacaaggggctcttacaactcaataataaaataacaaataacccagttcaaaaacaggcaaagaatctgaatggacagttctccaaatgagatgcaagaatggtgaataagcacatgaaaacatgctcagacatcatgagtcatcaaggatgctgcaaatcaaaatcacaaagacgt

SEQ ID NO: 479120 - DNA, 652 bp, Homo sapiens
ggaggcccagacttgcaactgggactcgtcttcgccaggagcctcgggtttgatggggcaggtgtcgaccagcgcccccaggcagaccagcagagccagaagtgctatggccacagcaggccacggcctgcacaccgacaccatagggatagctagtgaagcagatgagcaggaggtggaaggcgagggaacccccaagggctggactgccacaggatacccagttggtgtgcagaaagttgaagaattggttggtgtggggaaaattcccacatattcagcatcagaagtgttattaatatccagctctgatctgggcactcattcccaaaggatttatgatctaaattcttgtagcattgtgtcaggaagagagcgaaaggaaacagtgaccgaactagaaacaaaactgaggcaagcagtgatcaactttgaagttacagacttgctgccttctcagtatattctcacatggcagaaagaagattacagtcaagatgtcaatggcatttgccatcctctgaaggcatgtctggagctgaaggatatattaccaaggtagctccctcatatagctggcaaattggtgctgcacattggcaggaggcctcagttcctcataacatggacctctccacaggcttgcttaagc

SEQ ID NO: 479121 - DNA, 575 bp, Homo sapiens
agcacatagattctgtagaacagagatgccagtcagcacttttggtcacttaaacccaagacttataaatccaatcgctgtggagaagctatatttagtcaaggtcatggaaaagcagagaaatcaggatcatgaagagactggagtggatatggatagacaaaagaacacacagactgagagggacagaactgccttgattcctgatgaagaaactgaggacccccagaagtcagccatacaacagaatatggtttccaatgaggtatgcctcatggaggctgtgcaacattgggcaacttccagaacatcatcggacctatgtctgaaaatgcctgaaccagacatctgcattcctgcttcccttgccaacaggttacaagcatatgacttagagcctactgaacccaatagagatttggaagagaattcaatttggaagagcatgccatgaaagaggcactgctcagagtccactgtggaggatgtggaggagagacagccagctttcacaggcagtggtgctaaattgtgttgcagtgatgcatcaggcctgcattggtgttgaagctaca

SEQ ID NO: 479122 - DNA, 516 bp, Homo sapiens
ctgcagaaaagatggcctgtcacagcttctgcctgcactcctcaggcaggctccttggaggggacatttcacagcctcagaaacatttctggaattggcacccacttggcccccagctctgtagtggctgggggaagcctgcatggaagaggggaagaataagggaggaagatcagagctgtaaaaggggatacaaagcctgtactctacgaccattgtgtcaggcacaagaatacaccagagctgagggccagccctacctgagaaccatcaacaaacttaccccacatcccattatacctcctcactccctgcagcctgtcagcttccccaatctcccacactcactgtcacctggggctctggtgcaccagatgacactacttgctccctggtacacagggatgataaacagggaggggtgaggactgtatctttactaattatcatcatttgaatatttttgccatgaacatgtgttacttttataatgtaaaagcacttaaaatcaaaaga

SEQ ID NO: 479123 - DNA, 582 bp, Homo sapiens
tttgcggttggctttttgcaaatgtgcagagtgtgggcttccatgtatgcctggtccattcctggcctgacccctcgagaggcaaactgtcccaacacatcctcctcagggtacctgtaccctcttcagtttcctctgtcactgaggctgatgaggagacaaggccaccacatcagcatcccaggaacatggatgaagctggaagccgtcatcctcagcagactaacacgggaacagaaaatcaaacaccgcatgttctcacttaatgttaggtctctgaactctggggaatctcagttaatgtttgagtccaaagtatctggggatatgtgttcagagtgtgaagcttctgaactctttgaaggtgtgtcccaagggagtgagatctctgaagtctttgagggtctgtttcccacagctcgagtctattgtttttaggaccagtatagagagatgtaaggatgctgaactgtttagggctttgtgttcagggtgtgaggtctgtgatttgtgcagaggtctctgaggtgtctgtgaatttgtgtttagtgtgagaggttgctgagttcttttggtgtcttc

SEQ ID NO: 479124 - DNA, 615 bp, Homo sapiens
gctctggctaacacttccagtactatgttgaagaagaatgatgagagtgggcatccttatcttgttccagttctcagggaacaactttcaacttttctctcttcttcaccccttcagtaccagccccctcatggagcctcactttaccacctccttcaggaagtctgccctgattggagcctgagagagcaaacactctgcacaaaggaaaggcctgagaaacacttgaataaatacatgaatttattcattattgagcacccacaatgtgcaggcataataccaggagctgaagacactaagatgaataaggcaagacctcacctgttgaggaatcgagtatggtaccaggggagcctgaaacacatcttcatgacagtagtattgctgtgggactgcaaaggaggagctgatcagcagtttcctggaaaagttcttaagggccacagtaggagagagaaatctgaaatcctggggtcacctgaacaagagtctcttctcttctgcactagatcacatgggttgacctagagtgagaaaaggacaatgctttctgttttcgaatgtgaatatgccttagagtatgtgggaatgtttcattttcataatcccctt

SEQ ID NO: 479125 - DNA, 590 bp, Homo sapiens
cagctatgtggaactgtgaaggagggacatagtgatggcagcagcagcccatctggagtggctgctgcaaagttacgggctgcagtggggaggcacccctcagcatgaacagcctgggcaccatgaacagcagcagaaggcagacaggttccaggggggaaaggcgcgggtccccagtgaagccccaacttcaagccgtactgggggctgggatgccagtcctgtggaccagagtgggatattatggtgctttttctgtgcccacccatggccacctatggaccaatcagcatgcacttcctcccctctgaagcccaaaaagccgtgtgctcagcaagactcaaggagacaacagggtgaccagctttggggagtagcggcccactccagggtttcctctctgctgagagctgaacactcaactagaccacctgcccacggagaggagctacccagcccatggtcttccctctgctgagagctgaaaagaagacaagatgaccagctacagagaggagctacccaccccagggtgctttctgtgttgagagctgaacatttgatggatgaccagctgtggagaggaatta

SEQ ID NO: 479126 - DNA, 689 bp, Homo sapiens
ttcagagctgagtacagaccctgaatatctttgttaatgttctgtcttgatgatctgtctaacattgacagtgtggtgttaaaggacccacttacagaagcagtctggctgcttttggcagagaaggtgtgctgcactgggggggacccttccttgtccagggctcccatactctccagagccagcaggctggaagagctgagtccactaaccacagtgacggcagctgctcctccccctgggtgttctatccctggaagaggtcagagttctgtccatataggcatggctggagtcactaaaggccttctgtccaaagaggaggaatggaaagaggtcctgcttaaagaacaggctcagtctgttgctgttggctggctggaatttcaagccagtaggtcttgtgaggtgctgtggaagtgggacgcacagaatgatgctttttggccctccctgaattcagcccccttcttcggggaatctatggatggatctgccaccttgctgggaatcctggggccagaaaataaaacattttccaaacaagcaatcactaagggaatttgttattagtagactagccttacaaggtatccttaagggagttctaagcatggaaacaaaaaaacaatacctgctaccacaaaaacaccctgaagtacatagcccactgaccatataaagcaaat

SEQ ID NO: 479127 - DNA, 1345 bp, Homo sapiens
gccgcaataaacatacatttcccataacccccacgtgtcatgggagagaccaggtgggtgttaattgaatcaggggggcagttacctttatgcgtttctcctgttaatgaaagagaggaaaatgtgggaaggtttggaacttctagagacttggaaggctcagatgacagaaagatgtgggaatctttggaacttcctagaaacttgttgaatggctttgaccagaatgctaatagtgacatgcacaatggagtccaggttgaagtggtctcagatggagatgaggaacttcttggaaactggaggacagaatcctcatggagaaattctgttagagcagtgtggaagggaaatgtgaggttggaacccccacatagagtcccccccactggaacactacctagtggagctgtgagaagagggccaccgtcctccagaccccagaatggtagatctaccaactgcttgcactatgtgcctggaaaaaccacagacactcaatgccagcctgtgaaagcagccaggagtggagctgtaccctgcaaagccacaggagcagagctgcccaaggccatgggagcccaccatttttatcagcatgccctggatggctgcgaaactaatggcaaataggtatcatacatttctcaaactgcatggaatgtacaacagaaagagtcaatcctaatgtaaactatggacttacttaataaaaatgtataaatacatgctcatcaaccataacaaatgtaccatactaatcaaggtgttaataatatgagaaactgcttgtggggtcggggtaatgacatgggcaaaatctatttgaaatcaagtagtcataaggaatttattattgacaattgaaaaaagttcttaaaaagcttcaattcattctcccacacaaacatataaacccaccaaaataaactttcttgcagctcaatgttttgttgtgaattcatgtctaaaagtgaattctattaagcttttgtgttttattgcatcatggggtttgctatgaccatcatctggagctctatctccttggttccttttattggagagtattgagtggcattacaagccaagatatgggctatggataaggtcattgctctcaggattactctttggataaaattatatatatatatatatatatatatattattatattatatttaaaactatgagtatcaccaatacttctcattctaaaacctaactacagtgtttattcctagtctcactcttgtcatattttcatatattataactcccttctctgacactgagaaatctgagtactgttatcttctatataggtacatattgttctagt

SEQ ID NO: 479128 - DNA, 3043 bp, Homo sapiens
cgccttgccgccgccgctcgcccgccgcccaccatggcccagcagcaaacaggtagcaggaaacggaaagcgcccgcggtcgaggcggacgccgagagctcgccgtcgcagggcttggcggcagcggacggtgaggggccgctgctactcaagaggcagaggcggccggcgacgtatcgctcgatggcgcactatctgaaggttcgggaggtaggcgggtggggccccgccaggctccagggcttcgatggcgagctgcggggctacgcggtacagaggctgcccgagctgctgacggagcgccaactggagctgggcacggtcaacaaggtgttcgcgtcacagtggctgaactccaggcaggtggtgtgcggcaccaagtgtaacacgcttttcgtggtggacgtggagtcaggccacatcgcgcgcattcccctcttgcgggacagtgaggccaggctggcccaggaccaacagggctgcggcatccatgccatcgagctgaatccctccaagacgcttctggccaccggcggcgaaaaccccaacagcctggccatctaccagctgccctccctggatcccctgtgcctgggcgaccgccatggccacaaggactggatcttcgccgtcgcctggctgagtgacaccgtagccgtgagcggctcccgcgacggcactgtggcgctgtggcggatggacccggacaagttcgatgacactgttgcctggcatagcgaggtgggtctccccgtatatgcccacatccgtccgagggatgtggaggccatccccagggccatcatcaaccccagtaaccgcaaggtgcgggccctggcctgcggcggcaagaaccaggaactgggagcggtgtccttggacggctacttccacctgtggaaagccgggagcgcactatccaggctgctgtccatcaggctgccctacttccgggataatgtgtgcctgacctactgtgatgatatgtctgtgtacgccgtgggctcccattcccacgtctctttcctggatctgcgccaggaccagcagaacatccggcccctgtgttctcgagagggtggcacaggcgtgcggtcgctgagcttctaccgccacatcatcactgtgggcaccggtcagggctccctgctcttctatgacgtccgggcccagaaattcctggaggaaagagcctccgccaccctggagtcctcttcgggacctgcaaggaggaagctcaggcttgcctgtggcagaggctggctcaaccacaatgatttctgggtgaattactttggtggcatggaagtgtttcccaatgcgctctacacccactgctacaactggcctgagatgaagctctttgtggctggggggcctctccctgcaggcctccatgggaactatgcaggcctctggagctaaggatgaccgccttgtactccaggtacacagatttacctttcagttccgcccgactgcccttcatgctgcatttttttgcttttaactctgtgcgtcttttgttttccaggtggaaccagcccagcttaatttgtactcctccaagcagagagaggtgttattgaaggaccttagcctaatatctccaacagttcttttaattactcaggaaggatgatttatataaacagatatgaaggtactgaacctgattttctttgtcagcttaagcaatcattacattatgtatacatagtgtatttttttaatttgagggcatgctttgaacatgtatgttgttattttgggttatgtctttgtaatttatataaatggcataaatagtaattgtaggtattactgacatagtactttctataagccagacactgttctaaacacctttttatgtactgacttatttaatctttgcaataacctaatgatatgggttttagcaactttttgccttaactctcaccaatgtttccaagtctattgtgagtacacgagcatctgtgagtctggacagagaaggagatcaggatgagtgtagcaaaaagggtggtaaaaaataatctacaggttgccactttcaacttcactctcctactattccaccttcccaatcttctttgctgacctctttttctccaaccgttacatgctaatgtttcccaaaattcttatgtttggccatctctttttgttctctgtgtttttccaagtaaattaaaccatgcaaatgattttatatacaatctatgcagagataacttcgcaatctgtgtctttcagcttgatctgtattttatacatatacttacacaaatttactagaagtattcatgaggtacttcaagcatagcataccttaaattaagcacattatatttactcttaaatcaaaatccatttttactcctgcattctgcatcttgttgaattacatctatttcttcccctctcgagctcctagagttaacattgactcttcactacccttcaatatccacatctagtacctcatctagataaattatgcctccaaaatatcttttaaatatttttatcctgtccattcctacttttagtatcttaccatttctccactgaactatttatgaaaataccctcattattggttctcttacaaatatatggtattttctttaactttttcccaattattgccacagttatatttttaaatacaattggggttatgggacttgcctacttagggtacacgtatgtaaagcactgagacaacacttcaaatctggggtccaatccttcaacatgtctaattacacttgccatataataaataaatatatatgtatgttatgtatatatcatacatattatgatatataataaatatacgtagataataaataggttatattatatagagatatatatatacatatttagtcattttcactagttcttaccacagaattcctcaaaatattggaatatcctgagtgatacaaatgtcttttgttatttaccacaaacacctttttaccatacctgagtttatgcaaaagaagtgactcctagtggtcct

SEQ ID NO: 479129 - DNA, 671 bp, Homo sapiens
ccaagccttgacagcttacacatggttttgcacttgtgggtgcagagaagtcaagaattgaggtttggaaacattcgcctagatttcagaggatgtatggaaatgcctggatgtccaggcagaagtttgctgcaggggcagagccctcaggcagaacctctgctagggcagtgtggaaggaaaatgtggagttggagcccccacacagattttccactgcctagtggagctgtgagaagagggccaccatcctccagaccacagaatggtagatccactgacagcttgcaccatgcatctggaacagccacagacactcaatgtcagcccgtgaaagcagccagaaggagggatgtaccctgcaaagccacagaggtagagttaaccaaggctgtgggaacccatctcttgcatcagcatgccctggacatgaggaaaataatatgactaattattttgcactgattataattcaatcaaacagatatgccttgattccttgtcatcttttgctctcaccaaaatgtaagccccttcaaccacctacactttttgctgtttcttctcccctcaccctaatgcccactgattctctccattccgaaatatttcacactgtcttgtggtgcctcatttcttggttaaaaatgcaaataatcattaactaatca

SEQ ID NO: 479130 - DNA, 4288 bp, Homo sapiens
aagttaatcttaaatacattggtgccgtctgtcacccctttccatggctaggaaagggaattccctgaccccttgtgcttctcagaatggtagatccacaaacagcttgcaccatttgcctggaaaagctgcaggcagtcaacatcagtccgtgaaagcatctcggagggagtctgtaccctgcaaagccacaggggcagggccgcccaagaccatgggaacccgtctcttgcatcagcatgacctggatgtgagacctggaatcaaaggagatcattttgcagctttaaaatttgactgccccgccatattttggacttgcatgggccctgtaacctttttgttttggccaatgtctctcatttggaatggctgtatttacccgatacctggacccccaatgtatctaggaatgtttttcagttctccatgtagacctgtctcaactctgtagttaaatgtattcctaggtatttatgtatgcatgtgcgtggctactgtaaacgggactgagattttgacttggttctcagtttgaacgttattggtatacagaaatgccactaatttttgtttactaagtgacagacattaaggagatgttcctaataatacaagattttgacaataaacattattgatttatttttaaaaaacatatatgatatacttatatataattatatgtttatataattatatataagtatatatataattttatacataagtatatatttatataattttatatataagtatatatttatataattttatatatcagtatatatttatataattttatatatcagtatatatttatataattttatatacaagtatatatttatataattttatatacaagtatatatttatataattttatatataagtatatatttatataattttataagtatatatttatataattttatatataagtatatatttatataattttatatgcaagtatatatttatataattttatatacaagtatatatttatataattttatatataagtatatatttatataattttataagtatatattaatataattttatatataagtatatatttatataattttataagtatatatttatataattttataagtatatatttatataattttatatataagtatatatttatataattttatatataagtatatatttatatagttttatatataagtatatatttatataattttatatataagtgtatagtatatatttatttatgtattattcctaattttaaatagttataaagatcagacttagcaatcaaggttgtggctacattaattataataccacatgacaaaacaatttgtcaaatgttttatatatatatatatataaataacataaaataataaaccataggctgaaatactttcaatttttttaaagtatcaacacaataccaacagcattttacaaaatacctgcataataatacttagaaaatataataaatttaactgtttcttcaaaatcaatttcccctctggacatatttatttcaatgtactgatctttctatttgtcctcaggcttaaatattcaaataattcttgattcttttctttctggagaaacttaaaatagactttatgaaattcattaccccactcatcacaaatggttattctcccctctctctttcccaacccatcaatcaccacgtgtagtgcattttttctgttgtaatagccatccctttcattgttcctgttacaagctttgttcaaaccctcatcactgtttcctcaggtggttgccaaggtctcttaacgagtttccttgccttaatttactctttccccatttgctgatcaacacatcttcataaaatttcattttgtagacattatcatctgctgaaatccatcagtagaccctaatcacctaccaaacaaacctgtaattcctccatttcaaatttaatgttctctacaatctggttaaaatcgcaattatatttttctgctttgcaggaattctcttctctgttctctttgcttatttaacctgtatcctacaacccccactgaaatcacaatgacactgtgaagacttatctgctttcacccctacatagtgttcttgtccaagtaacctttttagcagctgtaggttagtctttcaaatcatactataaaattacattttcctacctggcacatttgtgaaactttgtatgatacttaatacatcatttcacttcaagtacttactaatgaaacataaaatagtttagagactgtatctatcaattatgactatcatactgttgattattttgacctctaaagccctgatcagtgaatgccctttgattcaaggaaacatactgaagtttagaagtgtttctcatggcactgtgtcaaatgcaaatgcctttcatggcagtgtatcaaatgtatcttttttttctgtttcgttatccatcttttctactgccaggttggaaagctaaaatattattttatagatttctacctagcaagaagtgtcataaccttctttctttatggcttgtgctgcatcgttcttgcaggcaaaattagcatggatttcgatgctcatcaatagtatcagtatggtctaaccaaagttattcttcctctaatgtacagtggtctttatagcaacccagctctgcaacagtcttataaatagtagtgattgtgttttattacaatttctccagtctagattgattatataatatccaaaatccacaatgaaagcgaatcatttaaaagtaagctgactgttcaatgcacgttcaccattttctttaaatatagtttggtgtaaaatttttcatgaactgtcaaatatacaatactgcagtgaaaaaaaatcatttctttctgctgttaagatattgtttcctcaaactagaacactagaaggccgattttttttcttattttgcttcataaaacagtgagaagaaaaacacgataaagcccatagcaacaagatatttattttaacatctgtgtgatttatgtcaaatttaaactgcttgtattttagaaaggaatctgttttctgtcttcaaaaggatgctatccaacatctctcagctgctaatttttagcacttagaggttccctcgggctgctgtcaactacgacttattgcataggtacttttcactaaactcattataaagtgattagcctccagcaagatagtgcaatgctgcagactgcttgcattatatgtagctttgcaactgaattttgtactgtcaaatcttatcagacagtgagtatagaatgactcctgggattcaatacatatagaatgttgagagggattttgtcacttctcttttaaaccatacctttcaaaaaaccatatgtatgcacatacacaaaaacatacacatgcatgtgtgcatacagaacaaacataaaatatatactagtttaaaatagatggcatagtttgctatcatcaaatacattttcaaaatctatgaattattcttcagcttatgctttgaattcaaaagctaattaaatatctctaaatgtatgactggttatcattaatatatgtaatggtgccacttttattagcatatttaatttacaatgctttttaccttaaagaaccagtaataatcaatatcttggcatctaataagccaataaaactaaaattagaccatatgtgttaaaatacagattattaggagtagaatgttaatttggctatttatttgcaagctttcctaaaaagttatgcattatcccagttcacatattaaccagagcatgacagtagcactatactgcaatagtgaacagtctatactggaagctacattagttacattgtacttcttcattagtctttacttattgtaagactcttgcattatccagtgcatattactcaactgttatgcagtggttaagttcatgacacatcttgtagaagttttaaaatatagaagagtaacttgcatgctccctggaaaaaaaaagacagaactgcacattctgaacttgttcatgttatgacaacttcaactcaagtatgaaggttaactcaaaacaaatgatctactaggaggataaaagtctaaaagaagttattttattatttgcaattattactatcatttaagctgaactggtatttattctttagatagaactgatagtttttgaatgcttgcattatttacatatttgtttccttttacagattattcctgggcaacttttca

SEQ ID NO: 479131 - DNA, 1063 bp, Homo sapiens
ccgcataagttatgtttgaatttctcctcagataatgggtttttcttttttatcgtattgcccaccagaagctattttccttcagctggcaaagccgcagtatacctttactgtcctacttcagggttatatccactatccggctttatgtcataatcgtattcaaagagaccttgatcgcttttcgcttctgcaagatataacactggcccattacattgattatattacactgcttagatctagcgagcaaaaagtagcaaacacactggacttattgttaatatgtttctgtgccagaggttgggaaataaatctgactaaaattcagggaccttctacctcagtaaaatttgtaggagtccagtggtgtcagacctgtcaagatattccttctatggtgaaggaaaagttgctgcatttagcccttcctacaatcaagaaagaggcaccatgcttagtgggcctatttggattttggaggcaacacattactcatttgggtgtgttactctggcccattgattgagtgacccaaaaagctgccactttcatgtgtggtccatatttctaaagtgagttgactcagacgttatgtgcaaaacaacctacattacaatatgtgtcattgtgttgttcttttctttgcaatagggacatattaacagctgtttaacatttaacctaaaacttctaaaatattgaacaacatatcccctttcacaaaaaaatgtgatttcaagcatccaactgtggttgcttctttgatttatttatttttcacaaaacctatactaagcctatctccaaatatattatatgctatttgttacatccatactttgctttaataccaatttttctgtacttattagtgttgtatttagtggccaaaagtgcttcaggcattcaactatttgatgctttctgatattactcagtatcagctggaaagaatcacactgaacacataggaagttttactaataacagtgtgctttgtgggtgaacacttttcacacatgcaactaatttgtgtgtatttaataagtatgtgtccctt

SEQ ID NO: 479132 - DNA, 1525 bp, Homo sapiens
actcctgtgtatattatgtcactgggcaaagggactttacagatggaattaaggaaacaaggacctcactcctacattcacaagaaactgagttctaccaattatttgagtgaacagggaaatggattcttccttagagtctccagaaaggtatatggccctgagaacccacttgaatttagtctgaaggaatggtaccagttcctccttgtacctctggtagaattcggctgtgaatccatctggtcctggactctttttggttgctcgtcaaagtcgttctccgtccagctttgttccgttgctgcgagactccgtgggcgtaggaccctccgagccaggaaagggaactccctgaccccttgcgcttcccgagtgaggcaatgcctcaccctgcttccacacggtgcgcgcacccactgacctgcgcccactgtctggcactccctagtgagatgaacccagtacctcagatggaaatgcagaaatcacctgtcttctgcgtggctcacgctgggagctgtagacctgagctgttcctattcggccatcttggctcctccccaccctagtctgaaacagaggtcaacccacaccttgatttcaacttggcaaaaccttaagcagaggactcagcgaacatgtgcttggacttctgaactacagaactgtgagataataaattggtgtaattataagttgctaaatttgtagtcatatattatctgaaatagaaaacaagtgcaatcatttagcacattaataagtatttacttttattcaggaattatgtaactttatttagtatttgcttagtaataattattgtgagtttttgagcatgggaactatgtcttattatcttttttatgctcaatccctatcagaagttgtgtattaaataaatatttgtcaaacaaataaacaaatggtgcctagtttcctcttgttgcttagggtcccataatagaactaactacataagtccaatttccccaggtaatgtcccaagtcctgaatctctccatcctgctttttaacctatccaaatttacctgctggctgattttggttattagataccaattttgtgcgtttcatattaatatctgctgttctttcttaattagaaactggaaagagaattaaacactaatgccctaagacatctctttcatgtaataaaacaacttatattctgtgcatctataatggttctagttccttaccaactttgaaaagattgagaaaaaatccactcaaattctttttagtcttctgtgttttagatgaggataggatcatcctaaacgcgaatggcttcatgtgccatatttttcagtaccaggtgatatggttaggctttatgtccccacccaaacctcatcttgaattgtaattcccataatccgtacttgtctagggagatacctggtgggaggtgattggatcatgggggctgttttccccatgctgttctcatgataggttccaaggtttcatactgatttcttgattgtaggta

SEQ ID NO: 479133 - DNA, 557 bp, Homo sapiens
aaaatcttatcattttcaacaacatggatggaattggaggtcattatgcagtgcagaagggaaatgtggggtcagagcccctgcacagagtccctactagggcaccaactagtggagctgtgagaagaaggccaccgccctccagaccccagaatggtagctccaccaacagcttgcacagtgagcctggaaaagccacagacactcaatgccagcccatgaaagcacccaggagaggggctatatcctgcaaagccacaggggcagagctgcccaagaccatgggaacctacctcttgcatcagcgtgacctggatcaaaagaagtatctcctcatggtcaccacagccgagaatgcactgagtcacaccaaagccagcacagtactaggtcttgcccaaggctggcagcaagtttctttcaggcataggtcctttctagaaatactgtccaagatctggagcctggaatcgtagactttaggaattagctttattttttaaaaacttttactgtgacttggttcccaatttcaaagaaagccttttctattcccc

SEQ ID NO: 479134 - DNA, 721 bp, Homo sapiens
tctgcagagcacacatgaattttcatgactaattaagaggcaaatgttaatagccaagaaaattgagaaactgtttccagggcatgtcagagaccttcatggcagcttccatcacaggcccagagggctaggaggaaaaaatggttttgtggtttgtgggccagggccccactcccttgtgcagcctcaggactttgtgcccactccagccatggctaaaatgggacaaggtacagctcaagccattgtttcagagcgtgtaagccccaagccttggcagcttccgtgtggtgttgggcctgcaggtacacagaagtcaaaaattgagaaatcttgttgtgaagcagagcagagagaagaggaattggctagatgcgtggtcaaaggaaagctcattttgggatgtgagattccaggacatgcagacatgaagagattagtgatgcatgacagaaatgataactaaagtagcaaactccttgagaagatcacaaactaagttcattagaaattatttttctggtttcttctcatttggatagactatttcttctaattatttcataatttatttttgatttgactgtttttttcccccttgagaatgtgacataaatgttttattgtaacctagtttcagctctgggtactttcagcagtgaagactctgtatgagttccttggttatagagtatttttgtgtgttggctttctcagatgc

SEQ ID NO: 479135 - DNA, 720 bp, Homo sapiens
attactactactagtgctagtagtatggagcatgagggcagtagttgtttcaatgcctcacaattgttatgctctcctccccagagcacaggaatgcccactgtggcatgccactgctgccagaggatggggaggagtggcgtcctattcaagagtgtctcttctattctttacagagcctttttcagtgataagaagttaaatccagccatggctaaaatgggacaaggtacagctcaagccattgtttcagagcgtgtaagccccaagccttggcagcttccgtgtggtgttgggcctgcaggtacacagaagtcaaaaattgagaaatcttgttgtgaagcagagcagagagaagaggaattggctagatgcgtggtcaaaggaaagctcattttgggatgtgagattccaggacatgcagacatgaagagattagtgatgcatgacagaaatgataactaaagtagcaaactccttgagaagatcacaaactaagttcattagaaattatttttctggtttcttctcatttggatagactatttcttctaattatttcataatttatttttgatttgactgtttttttcccccttgagaatgtgacataaatgttttattgtaacctagtttcagctctgggtactttcagcagtgaagactctgtatgagttccttggttatagagtatttttgtgtgttggctttctcagatgc

SEQ ID NO: 479136 - DNA, 551 bp, Homo sapiens
aggcattgcctttttctgcttcaccagacttcaagcagtttgaaagcatagatttgataatcagaaatgtcttccctgaaaacaaaacactggagcagagacctgaatgaggagcaagcaatgcaaagacctgagagaaatgtgtttgaagcagaaatgtggaccccttcccagctggctgtctcactagctgctgcagggaaacccagaaccccaaggaagtgtgagctctcaggggtaatctccatagagattaaatacagagctgcagcaggcactgagctggggacctttcagcacgagtcagctccagcggatcctggtcatcagtgcctaccctctagggctgcccatctccctctgagaggctctgcacccagctacctgctgaggagaaagcagggcctgcttctgccacaggactggagcacatatgtcctgcaagtctgtctgcctgccagcccttcccaggacccctgcttggtcacctcatattacctcataggattaagtatacagtgaagccctggatgccaggcctggctgcgttg

SEQ ID NO: 479137 - DNA, 704 bp, Homo sapiens
agcaaacaaccagcgtcattatgttccttggttctccacatacggtcaaaggtattatgtatagagtcactaaactccttgcctctcataagtggttaaccaggatatatctatatatctatatctatatctttatctatctgtctatctatctatctatctatctatctatctatctatctatctatatctggcactggagaaatgaccacaggatgagtccagggacccactgggccccgtgtaagtcagacctgagggcagtgcactcctctctgtctcagggaaggtctagaaatgacatccaagagccaagccctggcttaggggaccccaggaccctgcttaattctctacctcagtgtggcccagctggtacccaagctgcaagacaaagtcccgttactttcccctctgttttcctcaagcagaaggagtctctgtactccttctgtaccaagtcttctgtatcaagttcagaatatgttgggttgcacctgaagccagcatagctcttagtctcacccaaggctcatgtaaatctattttaaaccactacccaaccacaagctgaagggaaaaagacttcaaatatcaaacacaataagaatgcagtatttaaaatatagttttaaaagttattaaagaaagaactacaagtgacaccgagcgacaacaaacactaaggagggggaagtttcaaa

SEQ ID NO: 479138 - DNA, 571 bp, Homo sapiens
gtaactttgcagcagccactccagatgggctgctgctgccatcactatgtccctcctcttgggatttaatttgatcctctgccttgatggtgcttgcattctataccgtattttacttattgcatgttttcttatgtattttttgcatactaatctgcaacttcttgaaggactgaaagaggaggaagctgggaaccctgcacgtggttgccaagcaccaagacttgttcctggtcccaaccaactcttggggaagggacccaaaatagcagatggagagctattgcaggcaggctcctgccagtgtgcacctgcccagaccccctcccccaccagagttcacttgcctacagcctccccttactgcttcactggcaaatgcacatgtgtgggaccgtccactgccctgctgctgccctgccaaagtgttaatgctggcaccccctatcaagagtattgttgcaagcagaccaaaaacaccttggcccctccagggcagcaggtgcttaacctcaaacagtcacaggaaaaagccatgggcctggtcccatgcccttaaagttagtgaata

SEQ ID NO: 479139 - DNA, 671 bp, Homo sapiens
gtgagggtccgcggcttcattcttgaagtcaagacaaagagaagaaaaaatggtaagagctgctaatgaggaaaaacctagtatccagttgcacaccagcagacccaaggtccaggcccactctacagaccctggcactgaatcatcccccatgaacccaggatctaggcctaccccaacggactgcagcaccaagctggcacctatggacccaggatccagatccaggcttcaggataaggttgatctaggaagtggaaaattgtggaatcttggtaatttcaataagcaagtgttaggaacctgctgcactggatggcctgaggtgttcctggtccactggccacaacacttcaatggaggattctggccaaatttattctttggtgagcagctcactgccagctccggtgtccatgaggttcgtggagtctactgctgctcagattctgaagatacgtgaaaattctaaatcattgccttaattttctgattaaattaggctaagatttctctgtgcaaggctatccacgtataccactcacacatttttctatcattcataaaaattacattggaagaaataacatacacagcagctatcttttattaaactcttgttagtgttcctacatgaaactaggcatttttcatcaattgtgtaattttat

SEQ ID NO: 479140 - DNA, 827 bp, Homo sapiens
ctttaggctcctcctacctctaagacgacagtctaagcagggagttatggtgttggctggggcaattgacccagactgctttagacctgtaaggaaggtgtccataagtaaaaacgagatgtggctaaagcagaagggctacctccaggtgcacctgtgctcagctctcatgggagaagccccagctgggtctgtagtggtggatgaggggcagaggaaatctctctccaagagccttcacaagctccaagactgcctgactgctgaggtgatgcttcatacttaccttactgagcacagctttgcacctgtgcctctgctgaaaaaaatttctcagaagaagaaatttgggggactcaaggcctgccatctaaattttttggcccatgggaaacgttatttttccagtacttttgtagtgattgacaccgtcagtgaattatttttaaatctatgctctataaaagaagattcctacatataatacacagaaagttaccaaaatccatgttaaaatgctaattcaaaactaaaacttgaacagtattgaaaaataactgaagtggaaagctgcatttgaaataaatttgctttctgatatttaattagcttagtttatatttactgattttgaatgtttattttctaatggccaaatcggtaaaacagaagtacgtattctatccttttagtggttaaacatttaatgttcattgtaataataaaacttatgctacttttaaattacttgtctttcatggtgccatttgattgttctagaataaggagggttcttttttctattgatagtttttgggttagactct

SEQ ID NO: 479141 - DNA, 564 bp, Homo sapiens
aaaaggagtttatgctggagatttaagatttcataactgttctgctggataccggacttgcatcgggcctatagtccctttgttttgagcaatttctcctttttcaaatggaaacatttacacaatgcctgtttcccccgtttcagggccctcttctgcaggtctgctgaagtttgctggaggtccactccagccactgttcacctggatattaccagtggaggctgaagaacagcaaagattgctgcctgcctgttcctctggaagcttcatcccagaggggcaccgagatgccctgcccagtgatgaggaatctagagaagcagtctggccacagatgctttgccacgctgtggtgaattctgcgcagtccaaaccttccagcctccttagcacggtcaggggaaaactgcctactaatgtctcagtaatgggggatgcccctccccccaccaagctcaatcatttcagatcaacttcagactgctgtgctggcagtgaaaatttaaagcctgtggttcttagcttgctgggctctgtgggagtgggacctgctgaatgaga

SEQ ID NO: 479142 - DNA, 575 bp, Homo sapiens
actgttagagccctttctaactccccaagctgcaacattcaatacagaatttctacttgcattgtcatgcttggaaactgcctctatggagactattatcattccattagacagaagtggaaaggccaataccactatgagtggggacagtgctactactgggagattgaaaggctacttccaccggcaaaacaacaaaacaaaacaaaacaacaacaaaaaaacacttcattaaaatttaaaagctcaatgtctcttgcctcggagcagtttgatcttctgaagccttcttctctcaactcgtcaaagtcattcaccatccagccttgttccgttgctgtcaggacccttagctgcaagtcttttgaattttgctggaggtccaacccagaccctgtttgcctgggtatcagcagtggtggctgcagaacagtggatattggtgaactgcaaatctttcctctgaaagttttgtctccgaggagtacctggtcgtgtgaggtgtcagtccacccctactggggggtgcctcccagtttggctactcggggtcagggacccacttgaagaggcag

SEQ ID NO: 479143 - DNA, 950 bp, Homo sapiens
agctagcaaacccatatcagcatggttccaacagttgcccagttcatagatgctatgcccacagaaatggaatttaaaggggcagttggccttgctgagctgtgttgggctccacccagttcaaatttcctggcagctgcccgcctgttggagtttgctggaggtctgctccagacactatttgcctggctatcaccagcggagcctgcagaacagcaaatattgcagaacagcaaatactgctgtctgatccttcctgtggaagctttgtcccagaatggcactcgcatgtatggggtagctgaaataccatgctgggagaaccactgctctcttcagagctgtcagacaggaatgtttaagtctgcagaagtttctgctgccctttgttcagctatgccctaccccccagaggtggagtctacagaagcagcagacctagctgagctgtgtagagctgtgagaatatcaccatcctctggaacacagaataagagatttaacaacagcttgcaccatgcagcaggaaaagccatggatgcttatcgccagttcatcaatgcaactgcaaaagctataccctgcagagccagaaaggcagagctgtccaaggctttgggagcccacttcttgcatcagtgtggcgtggatgagcagaagtctgcacagctggcagaattgtgagtcaattaaatttattttctttatagattacccagtctcagagagccagtattcacgttctcagagttttttttcagcttggtctgttctgctgttaatagttgtggttgcattgtgaaattcttgtagtgtgtttttcagctctatcaggtcagttagattcttttttataatggctattttgtctgtcatgtccattatcatttttattgtgattcttagttttcttggattgggtttttaaattctcctgaatctcaataatc

SEQ ID NO: 479144 - DNA, 740 bp, Homo sapiens
ttgtggccactattatgtacagcagctgcactgttctggagaaccccaaaatggcggtgtgcccttcttctggtaactccatcccagggaaatacaagagctgctgctggtccaaaaacactggcagatatggtggctggagaccaactttgggaggtcccacccagcgaggagaaacaggatcaggaactcatgcacaaaaactggccgtttttcctagagaagctgcagcaacagccaacggcaaagacagtggcccacccctccctctgggagctccatctcggggaaggctgctattggaggctggctggagtcacaggccagagaatcttatcctgcgaggtgctgtgtatgtggggcctgtagactgtcattgctcagctctttggattcagcccctttcctgggtgcatgtatgggagcataaccatcccctttgccagagatgcagctgctattgctgggatgcctgggaatccaaggctcccaggacttgtgtgtgcctgagcagcaactctgccaagaccatgtagctttctgtgtcagattcaaggccctgatggagtaggtttttttgtgaggtataaagttaggttatttgacatcttttttaatgtaggtgtttacactgtaaatgtttattgcatttgctgaatcctgtaagttttgggaagttatgcttttactcttttccatctcaagatattttaaaattattttttaaatttcctctttca

SEQ ID NO: 479145 - DNA, 630 bp, Homo sapiens
acagcacagtgttcgagctctgctaagggtcagactgcctcctcaagttggtccctgacccccatgtatcctgactcggagacacctcccagtagaggccaacagatatgtcatacagaagagatctggctggcatctagcaggtgaccctctgggatgaagcttcaagaagaaagaacgggcagcaatctttgctgttctgcacttctgttggtgatacccaggaaaacagggtcgggagtggacctccagcaaactccagcagacctgcagcagaggggcaagactgttagaaggaaaactaacacacagaaaggaatagcacgtccactcaaagaccccatccaaaggtcaccaacatcaaagactaaagcaaaggaacaaaactggatggagaatgagtttgacgaattgacagaagtaagattcagaaggtgggtaataacaaactcctctgagctgaaggagaatgttctaacccaatggaaggaagctaaaaaccttgaaaaaaggttagatgaattgctaactagaataaccagtttagagaaaaacttaaatgacctgatggagctgaaaaacacagcacaagaacttcatgaagtatacacaagtatcaatagctgaatt

SEQ ID NO: 479146 - DNA, 871 bp, Homo sapiens
gagaactcaggcagggctggggtgatgataaacaagctcctgtggaattgtgggtagacactggacttgtaaacgaaaagcttcataagtccctctttgcttagtacttttctcgtcctttccccagggtgcacgtaaccctcaagcactaggaccgtgcggaatccaggctgcgatggcaccttcatttaccgcccgcattcagttgttcctcttgcgggcgctaggctttctcataggcttagtaggccgagcagctttagtcttagggggtccaaagtttgcctcaaagacccctcggccggtgactgaaccattgcttctgctttcggggatgcagctggccaagctgatccgacagagaaaggtgaaatgtatagatgttgttcaggcttatatcaacagaatcaaggacgtgaacccaatgatcaatggaattgtcaagtacagggggtcagttgttgcagagcttgtttttgtgtatgaggacatagataaagacctgagagaaaatcaaaattttgaccttgttgaaaataatgagtttgggctactactaggagactggagagggtgcttgtgggtaaatggggggagcatggcagggcagtgactgtcaggggattggagatttgaagagagagaaaacaggactgtttctaagacagagaccttaggtaaaataaaaagatgctcagaaataattttatgaagttcatgcatgctatgtgtgacatctgtgcttttttcctccctcctgtaaagggcccccaaatgggcttactgtcctgataacagtgtttttattttactagaaatttaaaacactggcattaagatgaaaaatatgtgtaaagcacctagtatagaa

SEQ ID NO: 479147 - DNA, 623 bp, Homo sapiens
aaaggacatgcattcatccgggatgctgaaagtagacccccaatatcttctcattgttaaggtttctgctgagagatctactgcttgcctgatggagtactctctgaatgggaagacttggggattggtgcctatggctactctcagctggagctgcccagagcaccaaaagcttccaggctccaagccctctgaaggcccatctctgcctgctctccatcagatcttcctgccagctcatacacccacgggcgacaagggttcccctatagctaggatcccaaagattcctggtgaaggaccttcagctgcaggtctgttggagtttgctggaggtcccctgcagaccctgtttgcctgggtatcagcagcagaggctgcaaaacagcgaatattggtgaacagcaaatgttgctgcctgatcgttcctccggaagttttgtctcagaggagtacctggccgtgttgattgtgttttttttctatactgactattttgtctttcagctcctgtatgtttttattgtgaattctagcttccttagattgggttttaatattttccaggatctcaatgatctttctttctatctatattctgaattctatttatctcatttcag

SEQ ID NO: 479148 - DNA, 624 bp, Homo sapiens
agctcgaacgccatgctgagaggacccctgctctcttcagagctgtcagacaaggacgtgtggggaaaggtgacagaagccccactttggtcaccattgctggaaatgcactgggtaagccctgaaaccagcaaaacactgagtttcaaccaatgtccacagcgactactgcctggttaccacctatggttcactccagccccccaaaactctacaacgagcatgtggcaaatccagctagactgtgtcattcctcctagccctggatggggccatagatgctgtcagggtccaggtcctagatttggaaaccttagaaatctacctggtgctttcagaagtgcctttctccatgggcaccagtgccccagacctgtggtggttattgcctgtgaccaccatcaacatttactcaagtcccaggagctccttagtcagcttgtagcaaatgctgccagtcatgagtcttcttcagggcagtggactcccctctggcccatgaatgtagtttatgataactaatatgccgtgtaaacttgaaaatatgttttctgctgtttttgcataaagcattttatgaatgttgtagtataatttaaaaatatattttaggtctttgtcttt

SEQ ID NO: 479149 - DNA, 726 bp, Homo sapiens
taggcttaaatcaatcactgacggaatgaatgtttgtgagtctttctcgcctttcctcttggcaaggatcagccaactatcaactcaatatgcatcacaaaaccagaagactttaagaatgtcagcaaagggctttagccctttagccacagggcagacaatattgcaaatcagaggagggtttaattacaaaggcggcagaacaataaagaagagtaaatgtccaaccttgacaagtttccagagtcagggccctgagaaggaaaatggaagcatttggctgaatctcaagccaaagaattttgtactggcagatttccctgaaccctccaggctaggcgaaatagcccacctcttgctaggaaagacccgctgtctctcttttccaggagagcaagcaaagatctcacctgagttacatgtcttgcaagactatgcctgtcaccttcaaattcttctcacttcctttattgcctccagactagtaactaaatttggctctaattatagctggagctaggaaagcggtttcttcttggagggattagctagacacagcaaaacgatgtcaagaccctgaatataattggcaagaattggtaaaagacataggatagaaatatggacacggacctggagatatccagactccttttcactctaacagtctgtaattctaccgagagggagggaaaggatggatgacctctgaaagtctttctgaac

SEQ ID NO: 479150 - DNA, 856 bp, Homo sapiens
ctctctactcctatacccccaactactcaagccagaagtttgagattaattcattcattctatgcatcactattttcctcaaccctcacttccaccattttcaggatggagcccctgagagctgaactgcagtgactcctatttctcttctggatctagccacccagcagagctagcaggtgctggactgatactggggagtgtctgcaaagagtcctgcaatgtgatccatcttcaggtctctcagccatgaataccagcacctactctggtgaagaagagatgactccagataggaagttcatggagaaagtatgcaattataagtgtggtctaaggagactcagccataaaaaggaacaaaataatgaccttcacaacaacctggatgaaattgcagaccattattttgagttaagtaactcaggaatggaaaatcaaacgttatatgttctcactcataactccctttttggtgctaccccttcctacaaattccatctacctcagcagtcttacaccctgttcattccatctcacatcattaggtctttaaaacccaaacatgcacttctgaaatttcatcaaagacaaaaaagtacatcttatgaactgaatgtttgtatccacctcaaagttcacatgttgaaagttctacccctcaaggtgatggttttaggaggtacaacctttgagaggtgattaggtcactaaagtagagccttcaggaatgggatttgttttctcatagaagagaccctaaaagcgtattgactgttctaccatgtgaggacatggcaagaaggcactagaaagtggaccttcaccagacactgaatctgctgaaaacttgatc

SEQ ID NO: 479151 - DNA, 898 bp, Homo sapiens
cttctgattgtgctctcctatctgaaactggaatccaagatttattataattagtacagatagtgtttaggagcctaggatgggctttgctgggtattctcctccaggtattcaggcttctcctgatctgttggagatcagaagaagcctagcattgaaaagacaatttgttacttacagttcccaagaggtaggagcatgccacaccatgcaaaaaggtcacatggagaagtatcagagttggggaaggaagcaggaggaatatgaaaagaatgagggcccagtggggccagccaagaagactgggcttttaggcttttaccccagcttcaatcaaagcaccaatacctgtttccacttcacatgctggaaccaaggatttctgagtgaagtcattctgggactctggatagaagaagaaaagataaccagagctggagcagatggccagagtaaaggagacttggccgtgactctaagttcctttgtctacaacagctgttctccatggagtcagagatcattaatagttgattttgaccatatacatactagcagcagtcaagatacaattcttcagtcttccctggaactgcagatggccacagaacctaatgatgatgataattatctgagtgatgatagtgtcaacgatgacaatgatgacaccgttgctgatggtgattatgatgatgattctaaaacctgccaactttaggtcctgagtagtaatggaccagtagaagtctgagaagtccagattatatccacagaaaacatagatgacggattgttcagttagtgtagaaagaaggaatgtgtaggtactaagaatccagacagtgcaaaccaggtcagagcttgtgtaatctaatggactctggagtaaaggatgctt

SEQ ID NO: 479152 - DNA, 689 bp, Homo sapiens
ttttctgcctcatgcccctcagtccaattccttcttctgaggaggcaggaattgagattgctgtaggattgttgcagatctgtacggattggacgccggtaactccgggaaaagaggggcgaggggaagaaggaatgtctgccaacgggtatgaagtttcttttaaaagtgatgaaaaccatctgaaattacatattactgatgtttgcacaaccattgaccatggacccacagatgttgctaaacatcttataatgcacaagacagtccctatagccaagagttatcaggcgctgaacatcaatactgccatggctgagaggcactgcctcagtttaggatacagagagaacatttctggcagaggaaaaaccttatatagagagctgacactattggagaaccccaagcaaatcattgaaactgaagtgtggaccataggagtaaaacaaagctttgagaacacttcctctctcctcactcctcctctctgacttaactcagacgaaacctttgcaattattttaatttctccctctcttcttgacggccatttcctaggtagcactaagaacgtttaaaattattataggctaataagagtatttatttttaatatgggctttctagttaaaagtatatttatttagcatttatattactttcaagtaatccatgcatcacacaga

SEQ ID NO: 479153 - DNA, 576 bp, Homo sapiens
gacttcaaagaagatactgaagaaaggaaagttttcatggatgaaatggaataccctacacaaccactatctgcttatggcagaacgcttaagtcaaatccagctccaagtccaggatccctttccatcctatgttggtgtagcttttgagagtctaagaacctatgggctacaaggtggggaaaaagtgacgatattagtaaaagacattaataaaaccttcagtgataaaatgagtaattactggaaacctactgtacagcatgaagataaaagggaggttcacaaaagtcagtgtgatacaactcaagcaaagtgtgaaatgttgaccaaaatgatcaaagaatccgaactaggattggaactgttaggacataacagtgagacgaaatcaataaacaccatcttactatctgagaatgagattccttttgtgaaggagactatttttgttgaggaaataactggaaatactacttcaagtaggtcagattcatttttggaatatgtcatggcattaaaagagagggaaaaacgtacctattgaagactaaggcagtattttctttggaattt

SEQ ID NO: 479154 - DNA, 1112 bp, Homo sapiens
ttaggaaattcgctaaataagattgagaaatcgtcactcagagacagctctgtggcctgtaagatgaagaaagagactcaggagctgaagaagaatctcaaggagagattgaaaaagaaagaacaagttaaaagccaatggtgccaagttccagacacaaggagaattaatggaatagcatcagtaaagggctttagactcctcacaggaagttccccagcctcattaaaggatttttccagtgaagccagtgataatggtccttttacttctctggtcatgtggcttttagaactattaacctatagccactggcagctttgtggcctaccctgtggggaaattaaagcagaaggagaacaaaagaaaatagtggtcagaagcaagcatagagagaatcttgctgacatgcatggtcctaaatccagtcgccttcaaggcagtgtaggagttttgaacatggatcctggagataggaagattttggccctacagaaacgggatgtggaagacttatatggacagaaatgtgtgtgcatttcacatattaaacaggaagtggatagatctttaggaagacatttagaggtggaagaagagtatatataggccaagaacagagatctgaattctcactcttcccatgctcttttttaaagataatttagcctataatcagggttgacatcttacattcttggatgtgagacactgaccagttgcagtcttggatctgggacaatggttgtaattaatttgtaaggcagtcagatgatattatgagtgtgaccaggtcttgcattgtagtgaacattaacctgtcaagcaaatattacagttgcctaaaccctatgagtcaattgaaggaaaaactaaaatgaatctattatattactgagttcacttattgaaaaataaggacataagactaaaagagattgtaggagaatctcatgctggagatgagagtgtaaaaatattaggcaaaattgtattccagttaccatgtgtttaagcaacatatgaagagtaacacttctaattatttagggaagttgcctgtaataaagccaatgtttagagcctgagtcttccactgaattctgagcttt

SEQ ID NO: 479155 - DNA, 1025 bp, Homo sapiens
gacggtggaagccctagtgtgtagctctagcatggaaaaaccacagacatctgactccaacccacaagaactgatgtgttggctgagcccaggaaagccatgggagtggcacttttctaggctttggggacccaacccccacaccagtgtgcccaaaataactactctgctgtttgacagttcttcagcttatctgagctccttccccattttctctgacacgcactacccctgtaaacatgctcaagtgaccaaaaggagacctgtgtggctggagtataatgggaatggggaaaagattagatcagatgaaagtagttctaagaagctaagaagctccagcatctttattcctgtgcaggtaggggcaaagacaattcaagaggctgagcaggaaagaaagaacacacaaggtgagcgtattgcctcagctagtctgtgtttacatgtgagtcacctttttgaagacttattttgagaatgaggttttaatactaataccacttcggtgatatttataaattccatgacttcaaggctacactacaaactaatgtatatgagaagtgagaaataaatagagggagaaaaagagagagagagaaggaagaagaagggagggaaggagggagacagagagggagggagggggagagagagagacagagagacagagagaacaacacaaaaactataaggatttcaacagtaagaaattaaagagcgataatagcaaacacccagcatttattaagatttagtaaatgtcaggcactattttaagttttcctaattcttcactgcaaactggttatgattaataatagctctcaataatgaaatattatcacaattttgtgaaagaggcattattatcattcctcttttatgatgacactgaggctggagaaaggttcagccatttcatcaaatgtactcatttaggaaaagatagaaccgagcctcagaactggccttcacagtccaagtgctctgtgcctcaccttctccatgtttcctcctct

SEQ ID NO: 479156 - DNA, 1164 bp, Homo sapiens
ctactgtataatcaaggattttcacttctgattagatatccaaagtaccaatatgggtagggctcaaggaacaattcattctgagatttttttctcaagctgtaagcctgggaaatcaaattatgtacttccaaaattcgatggtggtacagggataacattggcattcctgttccaaaagggagaaataggaaagaaagaaggaacttctctaattactcttcttcagagagagtctgtgtcctgcatccctccacagccagccactggctgcgcttcatttcctgcagaagctcagttacttgggtacttctcaggagcagctgttaggcaatctggagggcaaggcagtgatgctttgccttgggggagggctgcttatggagggagaaagcagcggcagtggaggcattcagaggtcttggatggagggtcttctgaggagtatcagggaggaaagaggcatgatcagaagtctccctcactggtgcctccaccccttgaggtttctaaggtaaaagcacttgtgatctgcccaggtctagaggccccagagtcagtgagggtcactgatgagaaagtagaaacaccaggtcattgggatcacccttgtgaaagctgcctgcctcaggaagagatgagccacgacctgacagcctggcccacattcgtactcctcaaatatatccctcttctcacaccaagaatgattcttcgttccagaggtgagataaaagtaaaagaatttaaagctgtcaaacaatctgtgtggaagtgaagtatgagaaacagtacagttgtttttaaaaaactgtgtcctgggagttggaagacctgccttctgggcctgaaaccttggtcaaaccttggcataaccttagagaagtaaagcaatctctcctggtctttgtttctacatcctgttgaattggtgaaatgttgttggcaatgaaagttaaagaaaaagagagaagccctgggttctctctcaattagttgaccgtaaactcagtatcgatctgtgacatgatgtaactctgatgaaattaaggcgatattagactgcttaaggagggagatgtctgttctattttgttctgtactgatcagattgtctgaaatacaaagactagttcttaattatgcttttagaggacatattaa

SEQ ID NO: 479157 - DNA, 3451 bp, Homo sapiens
cggccagagtgggcgctaaggccgaggaggccccgagagcgagcgagggctggttcgtcttctcatgccaggaaaatttaggacacagacacacacgaggagtttaggagcggaggtttaatagggaagagaaagaaaggaaaacaactctctctctagtgagagagaggcgacttctgagaggaaaggctggcaggtggcagacctgctggattttatagtcagggaaaaaactctttcaaacaatgtttctcctctactctaacaccataacaatcaacacagatttctctgtgaccaaatatgcagagaaattttccccacgctccaagcagcagacaccagactacctcttcccgaccagttgcaagtcagaacctatgaatggaattagtgcccttgcaaatcaggctccagagagctgccttgcccttttttcatgcaaaaccagtgagaaggtgtcatctatgagccagaaaatggaccctcatcagataccaaatctgccaatgacttggtgtttaacttcccagcctcagaataataaaaaagtatctaaaatatattctgtactggaatgcaatgacttgaagaaagccctcaattttgcagcaaccagatttagcaaagtattaaaaaaagatatataaagcaataactgacaagttttgtcttctgaaatacttgtcagtaaaattctctgaatagaaggaaaaagacaatagctatgaaaatatttggactgaaatatttatacattttaacatcaaaaatataagaatatactccatttttaagaatttgcccttggcttagagttatttcacatccacagagagaatatgttctcaactgaaattataaaacagagcatgtggtccatagatgatgtcagaaactttaaatatgttaactataacatgaaactttgaaaaagattacaaactttatttatgagaaaaacaataagaccatattgaagagtgtattcttcagagaaaaacaatagcagtgacacagtgagagaaatacgtatgtttaagaaactgattaaagtacacgaatatgtgccaagaataattattatggttattccaatttaatgctcagctaatcaaatagaaaaaatgtttaaaacatttttaaatttaaatacatgaatgcatgccatttttatttttaaaagtgttttatgctttcaaaaagttttaaatatatttatacacaaatacaacagaacttgtctgtcaataaatatatattttaaaatgctattttttttaattaataaaatttatttttagagaaggtttggttcacagaaaattaagcagaaagtacagatagttcccgtttacctcctgtttccatacatgtacagcctaccccactatcaatatcctgtaccagagtggtacatttgttacaattgatgaacttacatctcactttattatcaaccaaagtccatagtttacattaaagtttattcactattggtgttgtgcattccatgggttttgacaagtgtgtaagtatataacatgtattcactattaagcatattaaagaatagtttacacagccccaaaccctctatgctctgcctattcatccctcccttccctcatcccttggcaaccactaatctttttactgtctccatagttttgtttttccagaatatcatatagttaaatagtattaagcctttttaagattggtttctttcacgtgataataaacacttaagtttcctctgtgccttttcatagcttgatagctcatctatttttagtgctgcataatatattatctggatatactatagtttatttatgtgctcacctattaaaggatgtcttgttgcttccaagttttggcaattatgaataaagtagatatctgtgtggacaaaagttttcgactcctgtgggtaaatactaaggaatataattgctgattcatatgttaagagaaggtttagttttgtaaaaaactgtcaaactatcttccaaagtggctgtactattttgcatttccaccagaaatgaatgagagttcctgttgctccatttcctcaccaacatctgatgtcaatattttggatttcaactattctaatagatgtgtagtgctttctcattgttttttaatgggcagttccctaatgacacacagtgttgaacatgtcttcagatgctgaattactttccatatattttctttggtgaggtgtctgtttaggtcttttgcccattttttaattggggtgtttattttctcattgttgcattttaaaatttatttgtatattttaaataccagccctttatcagatgtgtcttttgcaagtatgttctcctagtctgtggctcatctatcttcttattctcttggaattgtcttcagaatcattgtgaagcagaaatgtttaattttaatgaagtcttgctattaataatttctttcctggattatgccttgggtgttgtatttttaaaaagtcagtgccatagccaaggtcatctagatttttttctgttatcttctaggtgttttatagttttgtaatttaggtctatggtccaatttaagttattttttctgaaggatatgaggaagttctatatctaaatttgatttattttgcttgtggatatccaggtgttccaagaccatttgctgaagattatttttgctccattgcattgctttgctcctttgtcaagtcaggggactgcatttatgtggttctatttggagctttcaaattctattccattaatctactggaatagttttgccaataccacaccctcttgattactgtagctatatagtatgtcttaaagtaggatagtgtcaattcaccaactttgttcttctccagtagtgagttggatattctgttttctgggttttttgttttgctttgtttttatttttctacttttccatgtataaatgttagaatcaatttgtcaatatctaacttgctggaatgggattgtattgaatcttagatcatattggaaagactatcatattgacaatgttgtcttcctattcatgaacgtgggatatctttagtatagtcctttttcatattttgcagttttccttatatatacctttatatattttgctagatttatgcctaaatatttatttcatttttaggagtactaatgtaaatttttttgtgttttttaaatgtcaagttccacctgtttattgttggtatatagaaaagttattttcttttgtatattcaccttgtatcctaaaactggtataattgctcgttagttccatttttttaaatatactttcagattttccacacagatgattattttatctgtgaacaaagacagcttatttatttcttcccaatctgtagcccttctattttatgttcttgtcctactgcattagctaagatttc

SEQ ID NO: 479158 - DNA, 1395 bp, Homo sapiens
cttaagtagacttcagtgtctgttttcccttctttagaagaatcaaggttttgcagccatctttaatgtgccctaccagtgctttccgattgggttccaaattaagagatgttgcatggaaaaggatttggtggtcagttgaaaatcaatgcatctggttcacctggaatcttgagctgcatatttttagcatcagaaaagcctgtattgccagcattactggagaaaaagcagataaccccacaacgtcctccagccaaggaggagggcagagggctcagaggagcagaaggttgaaatttatattttgcatacaaattatccttgcgtttgatcacctcaacagccctgaagatggagccaataatattcttccaatcaccaacccttctgctactattactgccatcactgcaacttccaggatcttcttttatatgtggactctaaacaaatcaaacttatggaaacagtgagtagaacattggttgccagggcttgggagtggagaaaatgtgattttggttaaagtctgaaaactttaagttacaagatgagtctttgaggaatcaccacaatgtctttaattaattgtgtgtatatattgtgtgtataatttaattaattgtgtgtatatattaattgtgtgtatatacatatatatggataggcatctatctatctatccatatatacttggtacctgtataagcttggctttgcctagttcctatttatctatctatccatataaatctggtaaatagagagcatataggcaatattaacattatctatacctcatacttcaaaatagcatattggagattccttgatgtttttctcacttccactttcttcattctaataatcaccaatttccattcattctacaccctaaatttctctcaaactcacatttcccttagctcccataataactgccttattacaagtcttcactgatgcatggaccattgcaatgacatcttaagctgtgaacaccctgaagtcaggcattatgctttgcctacttctatcactaaaacaccagtacagtgcctttcacattgtgatgagaggaaacatgtgaaaaggttttataagagtagtgacattagagatagtccttgagaaatgaatacgattttcacatttacgtattaattcattcacttctctagttctttgtttatttagtacataattgttgaaactatatgttgtacccacactatgctagccattgaggataggatggtgagcataatggaacttgcagtctaggtgaggacatagacactaatccaatgatcacatacatgtgtcattaccaatgattgtaactattacataataagaaatgtttaatatttgtggaaagcagtgtggcaa

SEQ ID NO: 479159 - DNA, 644 bp, Homo sapiens
cactgttcgtggggcagcaggatgtggaaagtcagtatgcagtgtatcgagaagccaggatcaggtctacttgataccaaaattttccctcttagctgttatcgatactgcctgcatttcgctgaaacccagggaagatccaaaatttggaaacccactaatgaatgttgctggtcgagaaggggttgggtgagagtgaaagctgaaggacatgatgctggagatggggtcatattggatctctatgcaaagcaatattgtgcatacagcagttactggtgtatgctttacttgacacaccagataaaaacatattactgtgcttcatctttcagattcagtgaaaaggtgccgtctatgaagaacagactctcaccagacactgaatctatggataccctgatcttggacttctcagtctctgaactcaagcaggaaaatgggcatacgcttgcatgcaagttgtattcctttattgcatctgacaaggagcaaactctggaagaagttaaacctgtaattgatcgagctttacccttgactgtgcccatgtctcccaaggaatgttccacttctctgaaggcttactagggtaattaaaaaggggagtcaaggtgcttatttgtgggaccaggagacaagtc

SEQ ID NO: 479160 - DNA, 559 bp, Homo sapiens
gttcagctcccacatatacaccatggaataccatgcagccattaaaaggaacaagaccatgtccttttcagggacatggatggagccggaagtgattatcctcagcaaactaacacaggaacagaaaaccaaacaccacatgttctcacttataaatgggagccagcctttagaagggaagatacagtggagagagagccatgagtcagatatacagggtccaaagtgccatgctgagggttcagagtttatccagtggacaaagaggaatggagaggttttgagcaagacaggaacagattgtgccttgagtgttagagagcattacgctggctactggcagtgctatagagaactggttggaaggactgtgactgaggcaagaagaccatggagggagactagtgtagtgagcagggagatagaaaccacagccactgattctgaagatcatcttgttttggaaaccagcgggctagaataaccaggtggatcagccagtggttgaattatcagggttacttacctgggtaagatgcagaagcttgctgtctgtatt

SEQ ID NO: 479161 - DNA, 520 bp, Homo sapiens
tctgaatacatcatgctccttcatgggtttgtgctctggctcagacagtttcctgtgcccagaacgccctttctctctctcttttacaacgtgtctctactgccctgatctctatccaattccttattcatggttgatggtttggttttctagaacagtggttctcagccactcttacttttgcccccaccccaggggactttggcaatgtctggagacatttttggttgtcacaactaaagtaatggtgctattggcatttaataggtggaggctacagatgctgctaaacatattacaatgcgtaggacaatctcgacaacaaagagtgatctgggttaaaatgtcaatagtgcagaagtcgagaaatcctgctctgcccttgctcctccttgtgtgttctgcagaccagcaacatctgcatcatctgtttgtcaaagatcagatagttgtagatatatgtaactaacctgcacaatgtgcacatgtaccctaaaacttaaagtataataaaaaaaaa

SEQ ID NO: 479162 - DNA, 939 bp, Homo sapiens
ctgccagcacgctgtcacctctcaccaacatggagatgagcactggaaacagcccagggtatagcagtgcaggtgggaagaactggatggatccaggatatatttgggacctagggttcacaggagactttgtggattcgataaaatccaacacatccaaatgggctgccacatcctttgaggagcttctcctaggctttctagctctctcccacatccagcaagttttagcagatccaaccaacattcatgagcaccaaccctgtgctgggctcaaggtgggcactagaggtatgggggctgtccttcatggagactgccatccagggagcaggggtgggaatgcaggaaggaaaggagacatattgcatgcatgtccccagaacacaagctggagtaagtgctgtgataacagcaccaccaaggctaatagaaaacttaagggagctattgaattcctgcgaagaatagagacagatctgggaagacttccaggaggaggtggcatttgagtaggaccttgccaagtggaaataggagagagggaaactctggggaaaaggaccagcctgggcaaaggcatgatgccaagtggatatacaatatatatcatgggagaatgacttgaagcctctgatgtcacagatgtattgagaagcagaggtttctagtcctctcctaaaagagagagaactggggatttctaaggtatctctatctaccctcttactcacctctccccacaagaggaataatggatttgattggaagaggtggtgttgaagctgaagcttgaactctagggtgtatatggaaatgcagacataaaaggcgggtcttcttcatggagaagtgtctcaagcaagaacaagggagtaacaaatatgaggaggaacaggaagtcatgaggaccactagctcatataaagaagcattctg

SEQ ID NO: 479163 - DNA, 602 bp, Homo sapiens
gtgcaaagggcttggcagcacatcccagagccgagcacagggcccgtacaaaatgaggtttgtgggaacatgctgtgagcagaggagccgcagagggctcagggccctggagctcttccatctgcaaaacggtgcagaagcagcaggagattgtcctggagggagggatcctgcccttgggaccctgccccatgatgctgggaacatctgtgagagagtgcagcgtagttggccagcagcggccagcatatctgagacttattctaaagcccaagctcctccgctggacttcacaaagaagagtgggcgttggcgatctgtgggttcccagatgcagagtcgtcagtactcaaaatacaccgtcagatgttctgcttttgtgtctggactatgtgaaattgtgaggagaagcagcatttctgccaagtgccaacacgttttaaacactgaagcaagataggctctaatttgccttaagactcagtattttttattcagcaggtaagtttttagattcttagactaatgacaaagaacacatcccaattcttagccttctttttaccactggctacactaatacgattttaagcacattttaa

SEQ ID NO: 479164 - DNA, 787 bp, Homo sapiens
accatttcccagccgcagagcatctgtctcctcccaggtggccgctgtatcacagccatcatggccgtacattctctggcatcacagggacaagaaacaaacttgcagaattggtgtcaacatgtgggaaaagattctggagacaatggcagggtactcttcttaccctgaggaaccaaatggctatgaggagggggtaggggaagaaggggtggcaaatcagaaatgttttagcaagattccagagcaggaacaaaaattatgggtatcttgtacagagctccttgtgaatagaatttctgaatcacaaataatacacatctttgacttaatagacattctcaaatcattctacaatgtgtcaaatttgcaatctgattattcctgtatgagaggtcctgatttcaagggcctcttcgttgaacttccatcctcctctctcctcttcattgaacttccatcctcctctctagttccctctaactcactcctttatatagcccaagtgaccactaaaatacacagcagatcaaatcacatcttagctttaaatctttccatggatttccactgtgatttccaacaagaccgcaatgactcactgggccctgaatttgctccagagcctcaactcttgctgtcactacatctgaccagacccaccctcaacattacaaccaatgcttcagaatcctcttagctccttttccataagagtcctttctctcaccctctgtatacaccattttctctccttggaatgctctttctattaaaacctctcctg

SEQ ID NO: 479165 - DNA, 1596 bp, Homo sapiens
gaagagctgcttttctccctggaagggtcaagtcacagaacactgttcatcaaaatggtctaaataccagcatgacctggcagctagctgtcaggggagagtggttgcagcagaggagaaaaatggggtggttttcatctgaggagaagctcaacctgaagaatgttcagaggaatctgatcctcctacatccacagctgcttctccttgtagaccaaatacacctgggagaggagagtcccctggagacagcagcgagcttcttccacaatgtggatgttccttttgaggagactgtggtagatggtgtccatggggctttcatcagggtcactatagatgttcagagcttcaccatccacagagactctcagcaactggatgtgttcatagccaccagagaacatgcctacgcaatgtacctgtggacaggtgaggccgcaggacagtctgcctttgcacaggtcattgctgatcatcacaaaattctgtttgaccagaattcagccatcaagagcagcattgtccctgaggtgaaggactatgctgctattgtggaacagaacctgcagcattttaagccagtgaagactgctgaccggctgctgagattttcagataagagacaggctgaagaggccatcgacaggatttttgccgtaacacagcaacagcagcagcaaagcaagtcaaagaaaaaccgaagggcaggcgaatgctataaatctgtggatgctgtccctgatatttttgcacagattgaggtcaatgagaaaaagattagacagaaagctcagattcaggcacagaaagaactacccataaatgaagatgaagaaatgaaaaacctcttagattttgcagatataacatatgagaaacataaaaatggggcttgaggaaaggccgggttggacaggcatggatggtgacaactactcgtagcagggcctcatcactatctgcttcctataccagattgttcctcatcctgaacattgctattttctttgtcatgttggcaatacaactgactttttccagagggcccacaacctttttccagagggccaaagatgtctttatgcagttcttctaacagatagctgtattttattgtggttgtactcttcttgttcccaatcacagtgttagcactgaagctataagttgcctggtcattttgtgatcataaaagtccatgaaaaaaaaatttattaccccagtttatcagattttttccctcagattcattttaacaaattaagggaagatattttgacacaagaaagcaggaacatggagaaattggagcaggaaaggaatttatcaaggcaataggaatagcttggtggtcctatggtgtttccagaagtatttggcattgcaattgagcagtccaagtagtactacttttagaagaaacaaaaagtctgttttttaaagtaatgttttttcttatgagaaaaaggtttagatagaattgggttttattcatattaatttaatgctattagcaatttccatatactatattatggaaaagactgaagaacacaattctgagaaatattttaaaaattttaatggtatagt

SEQ ID NO: 479166 - DNA, 764 bp, Homo sapiens
ccgcgagggttggcggcttcattcttgaagtcacggtctcagcttatcaaagtcactcagggacgctagttctggaggttctaacaacatgtgcatccatgctcaatgctgcagggaaaaggaaacacggcaagtcacttaatcatcgtcaaagtttctgcctgaaagtaacacaggccactcctttccatgtccaattgcctaaaccctgtgacatgggcacacataactttaaaggcagtggtagtatttccatgagggaattccttcctggcagttttctggatctgaatgtcatattatttgaatacaacccagtaatgttgactggtgtttttcagtttttgaatattccctctaggctacagttctttgtaaatattttaactgaagaaatgcaaggagcagatgatatgaatgttgtggaagactccgacaggaaatcagagactgtacaaaaacctgaattagcaaaagcaatatcaatttcaatggcaaaatcaaaaccagaactagcagacaagaaaagcaaatatttttattttcattattaaaaaaacaaataacttacatgaagtaataggtgttctaaaactcagcttgaagatgcttttgtatgcaatcctcacaattgaacaaatgtccatgcaaggcaggaaattggctaggcaaataattctttgtgggttctacattttcattttaataatgataacttatagaagtatttgtggtaatatatttcattttagtaataattttta

SEQ ID NO: 479167 - DNA, 717 bp, Homo sapiens
aatttgtggttttggtttaggcctgggccaagcatggcatgcttttcagacctcatcttcctggcttttctgccagttgttaaccacttcctgctgttgagccctcagtgctccgctgctgtccactaccatatctccttctccttcttggctttccgagtacaggaacctttgtatcctcacccccacccagcacaatacaaggtgaatatggtggatgaggcaaaacttcttagtccaattcactcaacttttgaagcgttggttgtgggacatgcagtcacgtgttgtcgtgaagaattgggccctttctgtagaccaatgcgggctgcaggcattgcagtttttggtcacgaagatgtgtcttcttttcaatgtagtgagacagatcagcaaattaaaaaaagaaaacctgactgtgggaatatggaagactatgggactgtgggagaatgtcatgatccatgcgagcccactgctggtcctgaggtggaaccccagtcattgcattagggtatatcctaatccagcatggcttcattttaacttgataatatttgcaaataccttttttctaaataaggtacccagggttaggactttaacatatcttttttggggatagaattcaatccacaacattgacagagcagaaagaaaaatgtggccagttctattccccatgctgccaagtgaccataggtgaaccccctggaa

SEQ ID NO: 479168 - DNA, 1284 bp, Homo sapiens
tggaacaggctccaggagctcactactgacagtgaagaactttgtccaggatgtgggcttttcacaggggtgaggagcaatttccagatcagtacaaagcaaggaagttcactcacgctacctttattcaatgtagtactagaagtcctaccagagaaatcagatcaaaaaaaaaggaagaagaagaagaagaagaagaagaagaagaagaagaagaagaagaagaagaagaagaagaagaagaagaagaagaagaagaagaagaagaagagaaagaggaagaggaagaggaagaagaagacgaagacgaagacgaagaagaagaagaagaagaagaagaagaagaagaagaagaagaagaagaggaagaagaagaagaagaagaagaaataaaaggcatccaaaggggaaaggaagaagttatctctaattgtagatgacatgattctgtatgtagaaaacgccaaggactccaccaaaacggttagaactaagaaataaatttggttaagttgtaggagacaaaatcaatgtaatgaaaatcacttgcatttatatacacaaataacttagctgaaaaaattcaagaaaataatctaatttataatagcattaaaaatacttaggaataaattttaccaaagaggagatagacctatacactaaaaactataaaacattaatgcaagaaattgaagaatacacaaatcaatggaaagtaatcctgtgttcacacattgaaagaactgaggtttttaaagtggccatactacacatatgttgtatatttacagattcaacataatccctatcaaaatctcagtgatgttcttcacaaaaataggaaaaataatcctaaaatttgtatggaacaacagaagacctcgaatagccaaagcaattctcttaaaatatcctgtaaaagttgtattcataaatatattgcagtccatgcatataataagatcataagcaacaataaaaatcaagaactacaactgtttacacagagatgagcctcacaaacataatgttaatggttacatgagtatttgcataattattccttaaaatttactcttatgttttatgcacttttgtgtatgattgttatatttcacaataaaagaaagttaataaacaaaaacataaactggcaggtatattgtacttaacttcttagtggataatcctgaaaaatataaaccacaagagtataatgttttcccatatttctcggttttctaaattataatttaaaaagacaattggaaaataggcaaa

SEQ ID NO: 479169 - DNA, 649 bp, Homo sapiens
ctcccccttcacagaactggcacagcaacatgcagtaaaatccttaactttctaatagaaggaaaatgacttgtctgattcaaaggttataaagatgggcatgggctcgaggaaaagtcatcattcctggtctaggggttggctttcagatttgattattctaggcttcagagttaagaaggacataaccaagtcacaagagtttatatacagaaaggagtatgaaggccctcctgttacccacgctgtgggcctgaggcagatcacagcccagaggcagatggacttgcagctgagcaccatcatagccatcagtaaactaaagggcaagtccattggggatgtttcagatgctactgggctggctgagagaccatcaggaagtattcacttagctcagagatttcttctactgttttctcctgatttcaataggtcttcaagtctttctgctggtgctgatatgcagggaggaatttccaccaagtgtctcattcaaagcagcaacggcatcctctgcactgaagagattaaagatttgctacagcacctcaaggagtaaagcagtggcctcagccttctgtaactggctccatccagttcctttgtactgcccccaggaagtacaaagtcatatctgttcattaga

SEQ ID NO: 479170 - DNA, 1017 bp, Homo sapiens
agaagagcccaaggttcagggtcactcaatctcaacagcccagaagcatctgcaacctccccaatggccttgccctttgttttactgatggccctggtggtgctcaactgcaagtcaatctgttctctgggctgtgatctgcctcagacccacagcctgagtaacaggaggactttgatgataatggcacaaatgggaagaatctctcctttctcctgcctgaaggacagacatgactttggatttcctcaggaggagtttgatggcaaccagttccagaaggctcaagccatctctgtcctccatgagatgatccagcagaccttcaatctcttcagcacaaaggactcatctgctacttgggatgagacacttctagacaaattctacactgaactttaccagcagctgaatgacctggaagcctgtatgatgcaggaggttggagtggaagacactcctctgatgaatgtggactctatcctgactgtgagaaaatactttcaaagaatcaccctctatctgacagagaagaaatacagcccttgtgcatgggaggttgtcagagcagaaatcatgagatccttctctttatcagcaaacttgcaagaaagattaaggaggaaggaatgaaaactggttcaacatcgaaatgattctcattgactagtacaccatttcacacttcttgagttctgccgtttcaaatattaatttctgctatatccatgacttgagttgaatcaaaattttcaaacgtttcacacgtgttaagcaacacttctttagctccacagggacaaaatctttacagatgatcatgccaatctatctattctatctatttatctatctgtctgtcttctatctaatctatttaaatatttatttatttataagatttaaattattttaaattatgtttgttcaggtgcctttagcattttttctttcatttagaccttggagaatctgatgactacgtgtgctagggaaagtctttttctgtagcatttc

SEQ ID NO: 479171 - DNA, 1458 bp, Homo sapiens
taggttcctgccacccttgaccctgaaatggaataagtgcattggaaaatgaataaatgaatgaatgaacctacacataaagcaaggtcttcagagaacctagagctgaaggttcagagtcacccatctcaacaagtccaacagcatctgcaacatctacaatggctttgccttttgctttactgatggccctggtggtgctcagctgcaagtcaagctgctctctggactgtgatctgcctcagacccacagcctgggtcacaggaggaccatgatgctcctggcacaaatgaggagaatctctcttttctcctgtctgaaggacagacatgacttcagatttccccaggaggagtttgatggcaaccagttccagaaggctgaagccatctctgtcctccatgaggtgattcagcagaccttcaatctcttcagcacaaaggactcatctgttgcttgggatgagaggcttctagacaaactctatactgaactttaccagcagctgaatgacctggaagcctgtgtgatgcaggaggtgtgggtgggagggactcccctgatgaatgaggactccatcctggctgtgagaaaatacttccaaagaatcactctctacctgacagagaaaaagtacagcccttgtgcctgggaggttgtcagagcagaaatcatgagatccttctcttcatcaagaaacttgcaagaaaggttaaggaggaaggaataagacctgatccaacacagaaacgactcccattgacgactacaccagcttgcactttcatgatctgccattttaaagactcttgtttctgctataaccataccatgagttgaatcaaacgcgtcaagtattttcaagtgtgttaagcaacatcgtgttcagttgcacaggaactagtcccttacagatgactaagctgatggatctatttatctatttattaaatgtatatttatttgacaataatatttaattttttgcccatataagtgcataaaatgtatacctttatattgttgataacataacaaaatatattttctatgtttagtcgatgtattattttgtttagtttattaaatatttactatagaaaacttcttggatttgtttattctctaaggagaaacaccaagccgattctccaacatgatttaaaaatgtatggttcaattcattgattcattgttattatactcaagttataagtacagtacaaatttacattctataagccagcttggcaggctgctagtaaggatgagaaagtaaagactagtactagggagactccttttatgggaatcttccatgattatccataaggaggtgggaagaggcgttactagtaagcatgttcttggttgtcctctgggtgcacatgtgcagtaactgcatatgcttgttgtaacaccgtatgtctcattagcatcttaaatcttctacccac

SEQ ID NO: 479172 - DNA, 1053 bp, Homo sapiens
agccttctgccatgattgcttctgcaggaagcaaagccttcagagaacctagagcccaaggttcagagtcacccatctcagcaagcccagaagcatctgcaatatctatgatggcctcgccctttgctttactgatggccctggtggtgctcagctgcaagtcaagctgctctctgggctgtgatctccctgagacccacagcctggataacaggaggaccttgatgctcctggcacaaatgagcagaatctctccttcctcctgtctgatggacagacatgactttggatttccccaggaggagtttgatggcaaccagttccagaaggctccagccatctctgtcctccatgagctgatccagcagatcttcaacctctttaccacaaaagattcatctgctgcttgggatgaggacctcctagacaaattctgcaccgaactctaccagcagctgaatgacttggaagcctgtgtgatgcaggaggagagggtgggagaaactcccctgatgaatgcggactccatcttggctgtgaagaaatacttccgaagaatcactctctatctgacagagaagaaatacagcccttgtgcctgggaggttgtcagagcagaaatcatgagatccctctctttatcaacaaacttgcaagaaagattaaggaggaaggaataacacctggtccaacatgaaacaattcttattgactcatataccaggtcacgctttcatgaattctgccatttcaaagactctcacttctgctataactatgaccatgctgataaactgatttatctatttaaatatttatttagctattcataagatttaaattatttttgttcatataacatcatgtgcatctttacactgtggggttttaaagtaattttaagagctctgtattcaattattagcttaatttaaagtgggtatcaaggctaccattttttaagggtctttctgattttctccttgggatcttgtttatcccatggaaacattttttctgtaaacttaagcctttttaaattatatatttgaa

SEQ ID NO: 479173 - DNA, 1203 bp, Homo sapiens
tgccaagaccagacttttttttttttttttgctaggcacaaagcaaggtcttcagagaacctggagcctaaggtttaggctcacccatttcaaccagtctagcagcatctgcaacatctacaatggccttgacctttgctttactggtggccctcctggtgctcagctgcaagtcaagctgctctgtgggctgtgatctgcctcaaacccacagcctgggtagcaggaggaccttgatgctcctggcacagatgaggagaatctctcttttctcctgcttgaaggacagacatgactttggatttccccaggaggagtttggcaaccagttccaaaaggctgaaaccatccctgtcctccatgagatgatccagcagatcttcaatctcttcagcacaaaggactcatctgctgcttgggatgagaccctcctagacaaattctacactgaactctaccagcagctgaatgacctggaagcctgtgtgatacagggggtgggggtgacagagactcccctgatgaaggaggactccattctggctgtgaggaaatacttccaaagaatcactctctatctgaaagagaagaaatacagcccttgtgcctgggaggttgtcagagcagaaatcatgagatctttttctttgtcaacaaacttgcaagaaagtttaagaagtaaggaatgaaaactggttcaacatggaaatgattttcattgattcgtatgccagctcacctttttatgatctgccatttcaaagactcatgtttctgctatgaccatgacacgatttaaatcttttcaaatgtttttaggagtattaatcaacattgtattcagctcttaaggcactagtcccttacagaggaccatgctgactgatccattatctatttaaatatttttaaaatattatttatttaactatttataaaacaacttatttttgttcatattatgtcatgtgcacctttgcacagtggttaatgtaataaaatatgttctttgtatttggtaaatttattttgtgttgttcattgaacttttgctatggaaacttttgtacttgtttattctttaaaatgaaattccaagcctaattgtgcaacctgattacagaataactggtacacttcatttatccatcaatattatattcaagatataagtaaaaataaactttctgtaaaccaggttgt

SEQ ID NO: 479174 - DNA, 1032 bp, Homo sapiens
gagggctgccagcacgctgtcacctctcaccccaaaagttacctctctcctactgggtccggaatttattcctgctgagtttcttcctgctggtgggttcgtgacatcgcctacttcagcagcgaagccacagaccctcacagtgagtgttacagctcttaaagttggcgcgtctggagttgtttgttcctcccagcagcatttcctatgttaatgctttgtccactgagggacatatggactaatcagccatatcgtctcatgccctctgactcttatgtcactgaagactttggggaagtcacaatcacttcgttacacagcatttatctgcacccctgccggcaaacaggcctgaccatttttttggcactctgtctacttgacacatattatcaacagaatgtgtgcaagctacaccctgaattatcccatgatgaccttgcaaatgtaacacatgcccttgtgaccacaaggcccgacaactgtaatttcctctgcttttcatcagagctcttctgctgcctgcagcaggcacagcatgctagggtacagctgctccctgacgcccaagacacctgccctccatcctttactacgaatgacatcattggcccttaccctgactctccaaatgactctctggaagtctctccttgtgccttcatcctttcagagctaatgggtatccccttcaaggaacgttgtgtggcctcatcagcaaaaaggcgacatacctgtggtttggtacagggtgaactgagccaggaatctggggagcaatcctttattcccatcattgccactcgtgaccttggttccacaatggcccatgctctactttcctgttttcctccatgcttctctgctgcctacagcagcaagaaaaccaaacccctccctgaatcagggtacctgctccatatcttctggaccagttctccaaactggctgggcattgggaacagtggggaagttgttgaaacactcagatacgtgcagattctgattcactaggttaccaccaaatat

SEQ ID NO: 479175 - DNA, 1099 bp, Homo sapiens
tttgtttagcatgttttcaaggctccttcctattgtagcatgtttcagtgcctcgtcccttttcatgagaattttcctggacaatgaagggaaaggtgttcttgccaagtacgcacaaattctaatgataattccaaatcctgctgaatatgacgccttggcgcctcctcagcctcggcgtgtggccacacttgaggagccctacagcccgctgctgcactgtgggagcccctctctgggctggctgaggccagagatggctccgtttgtggggaggtgtggagggagaggcacaggcgggaaccggggctgcgcgctgtactcgcgggccagcgtgagctctgggtgggtgcgggctccacaggccctgtgcccggcgctgctggctctgggcagtgaggggcttagcacctgggccagcagctgcagagggtatgctggatcccccagcactggggacccgcccacaccacgcttgaattctcaccgggcctcagccgcctccccaacagggcagggctcgggacatgcagcctgccatgcccaaacacccactacccccccgcacccccactgtgggatctcatgcggctggagtctccctgccgcccactactcagcacgcctgggtcccatcgaccacccaagggctggggagtgcagacgcgcagcacaggactggcgggcagctctgcccacagcccggtgcgggatccactaggcgaagcctgctaggcttctgagtcgggtgcagacttggagaacttttaagtctagctaaaggtttgtaaatgcaccaatcagcactttgtgcctagctcaaggtttgtaaacgcatcaatcagtaccctgtgtcttcctcaaggtttgtaaatgcaccaatcagtgctctgtgtctagctaatctagtggggacttggagaacttttgtgtcaagctaaaggagtgtaaatgcaccaatcagcactctgtgtctagctcaaggttcataaatgcaccagtcagcacactgtcaaaatggaccaatcagctctctgtaaaatgggccaatcagctctctgtaaaatgggccaagcaactctctgtaagatggaccaat

SEQ ID NO: 479176 - DNA, 449 bp, Homo sapiens
gtacacacagcagccacacacaatgatgttccttgctgctcaaagtgtggtccacagaccagtagcattggcagcatctggatgcttgttggaaaagcttgtcttagatcccactccaggcctattgtatcagaagctgcatttcagcaaggtccccagacacggcaaccatccgatttctcaatcttttccccacctttcccgcctttctattccacaaaaccgccactgtcatcatagccggttctcaatgagctgttgggcacacctcccagacggggtggtggccgggcagaggggctcctcacatcccagtaggggcggccgggcagaggcgcccctcacctcccggacggggcggctggccgggcggggggctgacccccccacctccctctcggacggggcggctggccgggcagaggggctcctcacttcccagtaggggc

SEQ ID NO: 479177 - DNA, 579 bp, Homo sapiens
gctgcaacacaatacgaggggctggaagtgaacatgggcgaggggattggaatggtatataaatccaggacaagacttggtatttgtgtcggggcctttttcacacacactgatgaaaactacactcaccttaatgccaaaaaacccttgagaatttcctgtgccattgggcacattctccttcttctgaagtgtttcattcagctcatccactttgaccataatactaccctaaaagatttccaattgccagatttggaagatggaatgggaggaatgtggccaaataaagaagaattaccagttattgtctttgaaggaatggttaacaggaggattgatgatgtattctggtctctgccttatgcctctctggccctaactctgttcaggatccctcgagctgactctttctggatgtcaaaactgtgtgtgcttagcagcataaactcaaatttaggactggaggaactggagctgatctgatgtccctgtatttctggattccctttgctttccccacttcttttctcttctctaggcttgatcataaacctctattgcagcgtgtgaggggtt

SEQ ID NO: 479178 - DNA, 660 bp, Homo sapiens
aggagccagacaaaggctaatgcatcatccaaaatgagaagaattaatttcccaaactttaaactggttggcttaggattgggctcaggggaagggaacccagaagcccaacataccagcaaaagggcaacttctcgtgtaatcataagaggatcaacttcgataattgctctcaactggttgttgtcaacttccaatggcagccactacactcctcatcttcaaggctctcgtcttccttgggcttcccacttcgctcagcactcattcgctttcctgccatcctgtgaagaggagacttttgccataattgtaagttccctgaggcctcttcagccacgaagaacttttcactcaattgtaataccttgcaaaactgtggtacaatatcacaacctagatattgaccttgatacagtcaagacacagaacatttcaatcaacatgtaattcttctctgctgcttttttgtctcaggagtttttacactgactgatacatgaaatgattagttattttcgggtgtttatcaaatcaaatgctggtacattctaacatatagtaatactttcacttagaattatcaacaaggagagatggtgtatttttaactaataggtttgcattctcttgttcaagtctataattatagaagatata

SEQ ID NO: 479179 - DNA, 1034 bp, Homo sapiens
tgcctgagttgacagctgcagcagtgaggctgcagctgagctagcaggctcccactgactccatggaggatgcagcgctggccactcttcccccagtgcagccggcatcttcacagtggatatgccagatgggccgccactgccataaagaggacatataatattaccaaagcaccagccttatattcacaaaatttaggaagcacaatcatagacttgttaaatggttttggccaaaatgctgatagtgatatggacagtgaaatccaggttgaggtgttctcagttggagataaggaacttgtttggaactggagcaaaggtgacccttccactccagctgcagctaaaagggaccaaggtgcagctcaggctgtggcttccatgggtgccatcctcaagcattgtcagcttccacacggtgttggcctttttgccttttctggaatgtcacataattggcatcatggagagagagatttttcagacttgcttctttcacttcgcaatatgcgttgagattctttcatgcctttttacgtcttgataactcgtttctttttatcactgatattgcattggatattcttggtcttttcctttccattaacattttagagtcagtttcttaattcataaaaattaatttctgggatttttattgaaatgtcactaaatctgtacatcaaaactgatatattaaaatattgagttttctaatccatgaacatggactatttcttcatttatttggatattatttcatattactatcattttctatttgttttcacattcccacatagagatcatgtacaatattttaaaaatatttatatctaagtgtgtattaggagaggtactattataaatgctgttgtctaaaatttcaaatttttttcacacattgctattaaataggaaagcaattgacttgaatttaactttatatcatgtgactttgctacatccatttattagttccaggagattattattattattacttttaaaatttggggaatttttaatgt

SEQ ID NO: 479180 - DNA, 607 bp, Homo sapiens
gctattctccccagcctctggtggacttactcccgtggctttgctggtcacggcccacatgtcagctctcatggtgactccacccaaccttgaggcccagcctgcaaccctgtctaactgtagaactcaaaaagcagtaccacatggcctggaaatatactctgtggcctggcctgaacagaggcaatcacagtgcccagccagcagcttggccagattgcagaacacatccagtattctcatcagacagtggaagccagcaaacaatgccatccaaactcagagccaaggcagtggcccagtaatccagagaatcagaaagcaaactctgcttgcctgggattggtaccagctggtccatctagaaccacaagctagactatgtaagcgaaggtctaatcctgcccaagaacaggaaaaggtggaaaaggtggctgtctgctcaaatgtgtggagagcaacaaaaagacataaggattatgaagaatcagggaataatgacacctctaaaagaaactaataaagcttcaataatgaatcctaaagaaatggagatatatgaaaagactgacaaataatttgtaataattctcctaaagaagttcaa

SEQ ID NO: 479181 - DNA, 752 bp, Homo sapiens
cccacaacccccaacaggccccagtgtataatgttcccctccctgtgtccgcgtgttctcattgttcgactcatactttgtccacacaaggtggcgaatcctcctgggactcggtccatcccatcagggctctggactcccttcttgcccaggatgggtctagaaacaccatccagaggcaaaaacttggaatcaggttcttccggaatctgcctgctgctttattttactgtagctgaacatgtacccaaattgcaagacaaaatcctctgcacttcgctttttctcacaagcaaaaggagtcttcccctgagatgcactgcttggagggcagaggattcctgtctggcccaggctgttctaaaggctccctccatgggcatcagcagaattgtgagttgtgttgtgtttggctgtgacagcacagcactgagttctaacacaaggtttcatgcttgcttctctcttcctcctccaagcacataaattctgtactgcaaggagttgggaaggggtagtgtaagcaatacagtctgtccttcctatcctcttcagtgcctctttccttgtaatgtaattgctcacctgtttttggttcttatgaaggtgctttcttgtgtggatatttgtttaattatgtgctcctgttgggggatgattgctggaatgttctatgtatccatcttcctctgctgcctctcctgttgaattccatttgctagtaatttgttgaggatttctgcatcaatatt

SEQ ID NO: 479182 - DNA, 530 bp, Homo sapiens
tgtggagaaataggaacactgttgtgatgaagctgatttgatcatggtgaataagctttttgatgtgctgctggatttggtttgccagtgttttattgaagatttccacatcgatgccccttttctgcaggtctgctgcagttcactggaggtccaccccagaccctgtttagcctgggtatcaccagcagaggctgcagaacagcaaagacagctgcctgctccttcccctggaagcttcgtcccagaggtgcactggcctgatgctagccatagatctcctatgaggtgtctagatgctctgcccaatgaagagaaatgtagagaggcagtctggccacagccactttcccgcactttgttgatttccacccagtcccaacttccaggcctttttagcatgaataaatgcattgacactcctgattcaccactcatgagaggcaaggagtttagtgactctacacatagtacctttaaccatatgtgaagaaccaaggaacataatgaagctggttggttgctcctac

SEQ ID NO: 479183 - DNA, 5100 bp, Homo sapiens
ccgcgaggatccgtggtttcattcttgaagtcaatccttgaggaatcgccacactgtcttccacaatggttgaactagtttacagtcctacgaacagtgtgcctgcccagagattctgggcagactgtctggaagaatctgtaggcagacttgctgctgaagtccttgggcagtgtggactagtgcctgagtacacaaggatggatgtgcaccctggatctgctaaagctgggggacgtgggaactaccttggaggccggggctggtgtggcaatgggatgggcttggaacctgggtctgtgagagctagcagaaagccagagtccaagtgtcagcatagttggtgctttagtgcttctgcagacctggaagtttgccacccagcggagctaccaggctttgggctggtactggagagtgtctgcaaagagtcctgtgatgtgatccatcttcagatcttgcagccgtggctaccagcacctgctccagttgagggagcctgctgggatgatccaggtccttcaaaggggctgtggatgattttggcttcctggtatgttcctgtggtagttcttgaagcaaaaattcatgatgacttccagtaccatgctgaacaatgacgggaaaagtaggtatccttgttgtgtcccagaagttagaggtaaggctttcatttttttctcattcagtatgatactagctatgagtctgtttcatatggcttatgttatgttgagactctcacagccaccttcaaagaaatagcgcagttttaatacatactgagcttttcaaagaaatgaattaaaagttgtactattttagataatgttattccaggcttttttgggaattgtacactattgtagaaaatatcatcgatgacagtgttacttgtttattagtatacttgtgaactatttacttgtgcattagagctgccaatttaataccaacaccaatatcagtttgcattcataatttttaagttccaagtgagtctgcttatacatgagcatctgactgctccattgtcttctgaagaatagtaatgttgagcatttatgtattaaaacacaaattgttttattctatctttatttcattttatttctctttttcatcaaagttaaaacattgcattaattttttatgagaccaagaagctgtattgtctatggattttatctcaagatgtaaaatttttaaaaaaggtgtgtgtctctgatcaggctaaaaatcactggtataggagattcaaaaaaggtcatattagcctgttttattttctatactattgtataatcccccaaagatctaatttaccaaatacattgaatttgctgcaagaagttaaacattattcagattataataggtataataaatattgaatgaataacaaatggatgcaatgctcaaggttgcagaaggataaattttgacctgaaattatggaaataaggattggtgaatatgagaccattagaaagtgcatcaaagtttgaaaactccaagaaatcacaatgatgacaaacaaaggaaatgtgagttaagggggcaaataatgagagaagtactgaaagtggaaagaggggtgaattggaatgctaaagatacatatgcttgtgtatgtgttggtgggagtttgcccaagtttaggaaaattaaggtgagttatgtttttatatcaataatactgggataaacaaatgatctaagcaaaagaaaaagaattagaaatatggacttccattacattatataattcatataatgactatgaattcacaactagtgtaatatcatgattttttgtgttgttaagaattccagaaaacagagcttgctctcagcttttaatagtagcagccatttttttttcatctggtttttgtttgatggaagagaacaagaggtaatgatttccttaaatatgtcaatgatatatcagtaaactgtttttaaaaagaaacaatgattttctaggatacaacttttttgcttggagaataaagcggtaagattttttaaaatatatgttagtgatacagaagaaggtgctgaagcaaaactgttatggatattatgctgagttccagataaaataaaagagttcagattccagctaaggcttgattttagaacagaatacttcatgactaatggcctttcatttatcaaagaactgggacgttagatgttagcagaacatatagcagaagcttcagataggctacatgattaaaattattctagtgtatccagacacatgattgatgaaaatggatattttaaagaataaaattgtttgtaagtttcatttccttataaatcaactgctattataggacataatgtgtgatcatttagtttacttatgttaataaactctcattttgttatgaatgaacgttaagagtgggagaaactcaaatgtatacatgcttacatgcaattgtttaatctgctgatctgcaatatggaagcaaataatgtgagaaaatgtacagcttctaagatagccaaacagcagtaaaacctatcattcattcgctaatatctacagtgtagaatgggtttcacgcactacatctcacatatttctaataagttggaactcactcatctatttggatctatatgctatgttgtttattttttgttacaaaccaagttgttatgaaatgtttatacctgaacaaaaactccagagtctttgaatattatatctaagcaattgaaatgatttatggaaagactcaaactgcaaaatgaacacatcaacataagtacttacgtacatatcaatatgtacttataacattccatcatagtcacagaaaagctagtttctgtatacagttgtctcttggtatctgcaggggattggttccaggacccctgtgggtgcaaaagtctgtgatgttcaagtcctttacacaaaatgaaatagtatttgtatataatctattcacatctttctgtatatttcaagttatgtctagggtacttctatgtctaatacaagacaatttgagagaacaaaaatcagcacattttcaacttccagatgtaactattttattatatttatatttattctgtgttttaaaaaaacaaaacaaaaagtcatgagaatattataaagtgcatgtcattttacagcctgcttttgcacttaacaaagaattatgagtatgtttcctatatgtatgtgttttctacaatgtgcttcttggtggctgatttccattttgtggagaaactataacatttcacactgcaggatatttacagagttgccaagttaatgaaatcagctaattagctaaagatattcttgtaaagaaacccttttgggtgcatacttataaggaccaaaacaaagaaattcaatagctttatctatgggcacgcatagtttaaggttttgattcatattccatattaacttctaagaggtttttacctaatttaaaatgagggtatccatttatccccagtgcctgcaaaaccggttttttaactttccatttcatctttgttgataggttatggtaaaatttattcaatgtaatttcaaatgtttgatcatttgtgaggatgaaaaattttatgtttatgtgcaacttgtatttgttttcagaattacctaagtatccctttgctattttccttattggttggtaagaattttttttcgtatgttgagaatattaatacttttttctcatatgctatacattattttcaatttattacttacacattatttctatttatggtgtttttatttacactattttaatatacataattcatcaaagtggtaacaagtcaagtaattggataaaatctaatgattaaacaagattttgattctgatttttaccaccctagcactacataaacttaatttatttatcaggtttagatgataactaatgttgtcccactatgctttgtggcagtttagatcatatattttctcttttcttctgcccttctcttcttaatgattattatattactatttttgtttcctccattgttgacctttgttccttcaaataatcacctttctacttctgtttatgtttccgtccacttttattcactatctaaactcccctccaggtcaaatgagaatattaggaatcttatgctttattccatttattactgcccttttatctcctaccttctgacaactacattcttactttcacaaatttatcaagaacgttggcctacacatgtgttgtttaatcttgtattttacaatcacaattgtgtcttccatgcttccatggaaaccaataagcagcatctgtattattttacctatggataggcataattgaaaacctacaatgcccagccaaacattgtgctaagaacatttccatcatcctggatacttctgggtatagaaggtttgcagtatcaaggtcatgattttactggctgaaaactatgctacttaaaaaaaaaattgtttgtttaaatttgtattgtaactttttatatagactttgtgtttcctggcatttctattgtttttcaagttaaataaagaattagatgtttttgcaatatctgatgtgttatttctgtcttatcagtcataacatatgctatgttgaataagttcttccttaatgacttctctggaatagctttccattattggctgcaattcaaactaattgttctttagacttaccatagtgctgctgttaggagtattcccttcattgctttttcaaactgtgtcaactttttcctaaatcatgtatctttctcatttaaaaatatatatattaagatatatatatatacatcttattctgtcatttattttaaattgacttccattattgccacattagttgaaaatatatactctgaaagaaggctataccacacttactagctatatgaccatagacaattttctctctcttttttctttttggtatataaaagggggtttctagtttttagcaataccatttcatatggttgtaatgagaattaagtatgctaatacatatacttaaaggaatagatttgtctttaattgttctatatgta

SEQ ID NO: 479184 - DNA, 703 bp, Homo sapiens
tctgagacttgctggcttcaggtaccagcatggccacagtggggtagagcaaaatgcgggcttttgggggaccctcagctgcaggtctgttggattttgctggaggtccactccagatcgtgtttgcctgggtatcagcagcggaggctgcagaacagcgaatattgctgaacagcaaatgttgctgcctgatcgtcatgccaatgcaagaagtggactcccacagccttgggcagctgcacccctgtgactttgcagggtatagccccctcacagctgttttcatgggctggtgtttagtgtttgcagcttttccaggtgcacaatgcaagctatcagtggaccttgaattctgggttctggaggatggtggccttcttctcacagctccactgggcagttccccagtggggactctgtgtgggggctccaaccccacatttcccttccacactgccctagcagaagaagttccaaactttcccacatcttcctgtcttcctcgccctccaagtctctatgggaaactccaaattttctcacattttcctgtcttctgggctctccaaattgttccaacttctgccagtcacccagttccaaagttgcttccacattttcagaattcggctgtgaatccatctggtcctggactctttttggttggttcttgacataaagatataactgtgtctgtgtgtgc

SEQ ID NO: 479185 - DNA, 619 bp, Homo sapiens
tcctgcttttcttcgttctccatgagtctagttgtttccctgatcagtcccaatgccagtacctggatatttcaattgaaggtgctctatggtgggctcccccttgttcgagtttcccagcccctttgtttacctactcaagcctcagtaatggcagttgcccctctcccagccaggctgctgtctcacatatcgatctcagactgctgtgctagcagtgtgcaaggctccatgggcatgggagccactaagccaggcacaggagagaatcaccttgtttactggttcataagaccttgggaaaagcacagtatttgggcagcagtgcccgtttttccaggtagtctgtcactgtttcccttggctaggaaagggaaatccccgaccccttgcacttccaagctacccccgacacccaaacagaaatatgaagtctgtgttttaggagaacacgtacgttatcaaacatgctgaaattttcagtttgatattcagcttagcctgacactgcaaatttagccttgatttcatctcttacattctcaagaagagaccattggaagttcccaaagcaaaatgtataatatgaaaaaaaaaaaaaaaaaaagaaaccaacaaa

SEQ ID NO: 479186 - DNA, 591 bp, Homo sapiens
ctccatataccttcctggagccgtcccagtgatggccttttgttgagtttcctgtgggcagctctcgggtagcttcctgttatggagattattctggattatccagttggaaccaatctaatcctattcatctttaagagtagagagcctttccaggctgtgatcagagaggggaccactgaagaagggtcagggagatggagattgctggctttaaagacaaaggaaagggaggtgaacaatagggccaaagattatacagatcctctagaagtagaaaaaggaggaaatgaatttacttttagagcctacagaaaggaatgcagatctgctgacatcttgattttagctcaacataatataaaggtgaaagataataggaacaatgaagtagaaatttcaatgaagtcacagtttaagagtgaaagtgacaggatggacaaagcaccaaaagattcaaagaaattcaaataattattaaagccttttcttcagtcagcatttccattttattttgccataaatcgtagtactgaaaaatcagatgataatgaccaattgaaaagcctgaaacatattaatcttctgcta

SEQ ID NO: 479187 - DNA, 778 bp, Homo sapiens
aagaaagtctgcagagtacttaacaagaaagacttgtgagggggtgactcacttactcagcccacagctctcaaaccccttgagggggaggaagcatgtaggcgagcaggtgcaggagggggacgaaatgaatcctatattggcaccccagcagcagcttctaggtgttgccattgacccctagagccccagagggcgatgggggttgtgatgtaccagggtggttttggaaaaggtaatatttgtgcaggaaaacaggaatgcatgttctcccttagggccatgggtccaggaataaataaaatcttaaaggataaagatattggtctggagcttgtccagcaacatgatgaaagtatggattcgtcagtggataaggtaggtgtgattatgccctccttagtgacccagggtctaggcctgattcagcagacccagaggccagccccaccccagtccattacagtggatccaagcactaggcccatcttagtacctgtccagtcccagaagactcatgctcaaggctcaccccagagccaggccagcctctgtgaaccaggttccaagccagccaccagagatacaggctctgggtctgttcacctgctgacccagggcctactcaaagatattagcagtaagcattcccttggatggtgccagatggcctgctgaacatctctggacagcctgattggtgaagggtgttccagaaaaagccagtttgtgaagactggaataagtctctacttctttcaaaggcacagacataagc

SEQ ID NO: 479188 - DNA, 568 bp, Homo sapiens
cggccagagtgggcaccgaggccgagagggcgccaagagcaagcgagggctgccagcatgctaaatgtatgttattctatgtttgttccaccattgtattttctgagcaggtgagttgtttcatttcacaagtccccaaagcctcactcacacctaacttagacgatatagataatgagttttggaactgttgtcttgatgaccttgttttacaccaagttgatgcagtaataggtggagaatttcaggaaccacgggttgagattgactgcaagaacaaactaccaattctgagaggacccacaggccctctgaaggaagcggactgctcctgcaggacccaggagacacctcaaatacctggagaagctgaaagtgtccgtttgcaggagacgttcccgactttacctggagctgagtcaagatggagagccgagctgagcaaaatacaaggggtggaggaggcagcaggcaggccctggaagctcgctgaatccccaggcagcccattcctgcctggaaccacaggaatccatcaggagggaggccagaggagcataaggtaaaa

SEQ ID NO: 479189 - DNA, 763 bp, Homo sapiens
ccgctcccgtcggtgttgagcacggagagcagtctcaggcctttagtgatgatgattaaaggtgttggctgtggccttgaaaacagtcatgtgaaaactcatcaccttaaggtgttaagtgcccagtcccaaggctcaaggccatttgcatcagcagcaaaagccagcaagatagcagaagcaggaagagagccagcaggaaaacacataccctggcttgaagacatacccctgaagttcgagaaagaggcagtccgggtacgacatagtagtcacgtcagactgcaacacttcctgtttacagaggactataaaacccctgtcccatcctcagttggggctgatgccattttaggcttcagccggcctgcacccaggcgctcattaaaacggcatgttgctccacactgccttgtgttgtctcttggcgtgctcccagggttcaaactcataaaagaacctttcacttcttacatgtattgctttatgtatcagcgtgtaacttctttctctctaaaatgtataaaatcaagctgtaacccaaccacctcaggcacatgttctcaaagcctctggagattgtgtttctggccttggtaactcatatttggctcagaataaattgttcaaatactttaccgtttgactcttttgttgactattttttctgcttgtaatttgttaaggagtttcaatctgttatcaattctggaaaatgtttaccagttaccacattaaaaaaaatgcttcttcactgtttttt

SEQ ID NO: 479190 - DNA, 569 bp, Homo sapiens
atcatcctttcttttgtggctgtaatgattcctatctcttttttatatacactgttaaggttccaggaccaacttaatcacacttccatctcagatccaattcacatctctcccttcccccctcccccagagcaggcctggtgtgagataggtaggcagggatgggaagggaggctgggtctgattttgttgttgatgttatctctgcgttcttcctcatctaccattctttggtgggttctagcctatcaagcatcatcctatgttggaaaaccagaaggaggatctgataatgcaatttctatgagcctggctattgctcaggccaagcaggtggtccaacagataggccacaacgtgggggtaaggaaagatagtgccaaaaccaaaaccaaaaccaaaaccacccaaccccctgaaaacatagtttataaggcaatatatagacaatcgacaataaatagacaaatagataatagatagacaaatagacaatagatagacaaaaactaatttaggagcatcaagacagcctcttcatcatttttattgacttctaggtgatgtct

SEQ ID NO: 479191 - DNA, 781 bp, Homo sapiens
aagcattgtgaagcagagtttgacactgtatctgagatgcagagcaagtatgatgaaagcttttaaaaaaaaatccaaccagacagatcagattgacagcagagagaacattgctttcagtgatacagaagaatttaagaaattcaactgccaagtgattggtgcttctgtggattctcacttctgtcagctggcatggatccacacccctaagaaacaaggaggactgggacccaggaacattcctttggcctcagacccgaagtgcaccattgctcaggattatgggatcttaaaggctgaagaaggcatctcattcaggggcctctttatcgttgatgatatgggtattcttcggcagatcactgtaaatgacctccctgttgactgctctgtggatgagactttgagactagttcaggccttccagttcactgacaaacatagggaagtgtgcccagctggctggaaacctggcagtgatactatcaagactgatgtccaaaagagcaaagaatatttatccaagcaggaccaaaatagctgcttggggcatgtggtaacatcccaagtctacatcaattcctaccagatgtaaaatggagaatcaaattcaataaatcacttcacattttgttgtaatttcttctatgtaaatacttttaaatttggggaaatatctaggtcattttatattggcttatgacaaagatctgaaaacaaaccaagtactaacaaatctaaaggagaaatcttgaagtacatgtgcacagtatacatt

SEQ ID NO: 479192 - DNA, 716 bp, Homo sapiens
tttgtttgagttcattctcagagtagtttgatcgtctgaagccttcttctctcaactgtcaaagtcattctctgtccaactttgttccatcgctggtgaggagctgcgttcctcagttggaaatgcagaaatcagccgtcctctgcgtcactcacgctgggagctctagactggagctgttcctattcggccatcttggctccacccccatccgtattgctccaattataaccacaaaaattatttatggaagaatccagtcaatccaaggtaaaattcctaaagagattgctattagatgttcccccaaaccaaaaccaaaaccaacaaaaaaagaagaaaaagtgattgcagaagctggtgaaataagttcttcagttctgaagggggagctggatagcacctgccagatcaccccacatgtgaatcccacacttgtccatgtgcataagtttcctattggctatttagtgtctgtatcaggcaggaaaggttatgctgctgtgaaaaatgcaatgttctggctcagtcagtttcagtttgagactaaggcttcttggcaatagcctctatatggaacgttgctggctttttgcatgtaggaagagcacatgttataccatgtactgattcttaaagcgtttgctcaaacgtgacaggtatcacttctgttaacatttcattggttaaagcatgtcacatggctaagcctaagg

SEQ ID NO: 479193 - DNA, 1077 bp, Homo sapiens
cactcagagggagtctgatcctgcgctgtctgagataagccttcttgaaaaaatgagatgttatcaaaagattgaagaaagtggaagaattagccatactagggaaagaacattccagaagtggaagaaggaacagtttgagcaaaggctcgaagacagaatagtgccaaaggttcctcctgttaggctctgtccacaggagacagtagagggggacagcaagaatgaaggcgagagaagggacttgttccttcctgtttgcttcttgtgggcttcagctgccatcaagctgcattctctgcctctccctgctgcagtctgtatccaggactggcttgctgacctgtacctcagagaaaggaaggaaagagaagggaaaatagaaacagaaggctaccaagggcaggaattttacacaggtctgaataattggccccctcatggatttcatctagcaaacacttgtagtgtggctttgatgccaactactgggccatatggttcaatccagtggcccaagaagtctctgtacagatcagcaacagaagatggaggctttgagatggcttcagagtggctgagtgataacttttccagcactgatcagtgagggagagtggaaagtgtcagctccctaaatcatcatctatgtgttgtttgaagaattccggaaatacctggcagaggagcaggcttaagcactaaagttcctgaaactgggacttaagagtcctgtgaatattatttgttgctgtattgtggcattatttttatatcaatgcagagtgtgtgttgggcagtgtgggaacctacaatgtaaagcataggtctagaccgttgttaatttaggaatagacaagtcagatttagaaggactggtttaagagcatgggctttggaggatgtcagataagggtcacaaatccatgcttactaaatatgtgatcttaaggaatttgtttaatatctctgttactcagagtcctcatctataaaatgggaatcaaaataccgacttccagaaatgttataagaaataaataaaatatgaatgccaagcacttaaatttagagacc

SEQ ID NO: 479194 - DNA, 921 bp, Homo sapiens
gggcacagcagaaaataagattaaaacaggaagaaccttctaatctagtgaggatcaactatggacaatgaggaaattgggcaccatggaggaccatttgatgccttgtccaaggacctgggtgcagaagcagatgctcctggcttcggaaggaaagctgctctaatcggagttcagccgtctagcagacaatccacagctttggagagagacaaacaaaaaagagtctcttattcctctgcccctgcacctgctttcatttttggcttcttggcactgatgttcacagagacatcagctggcagtggcaaaccgctaaaagctcccctgcaatgcagctctgcaaatgccagccatttatccactggtgcatgccagcttaacccatgttacattgaagaaacccaggaagctagagctggagctagagctgggggtaactgttacaagcatttcacaagtaatgcgaagtcttccaagtaatgtggaagacttttggtaatactgctgactttcacagttgtttgcttatttcacaaagccaaagagctatattaccctgtattcctcactgtagctctgatgtgtttccaatactagaagaaggagtataataggcgatgggccatagcatagcatatcagaacttccacacctaaaatgtccttcaaatgatttttcaaagtcctttagcctctctgaaacttgggtttctcatctgcaaaatgggaatgaaattatattgactcttgccaattcacaggcttgttgtaaggaacaaattaatctttattaactttagatcactatacaaatgttcattattataactattatttgtgttactgctttgtaaaccacacaaggctatatgattgccagttataataattattatttacattagaattgtgttggcaa

SEQ ID NO: 479195 - DNA, 601 bp, Homo sapiens
gaaggcacactcagaaactttgaatgatatcatgtgctttcttgactgactcggcagagctgtctgcagggagtgagtcgctgagctattattactccaatgggtttcagctccggggatgacagagactggtttgcgacctgtgttcacagtttccttcaaggcatcctgatgaggaaggtgaaagcgtcctgtttggaagctgcaaatttccaaaggagtctgagaagtcttgagtctgagaagtcatctctgaccattcccttcaaattcttcattacgttcacagccatgataccggtccttattgcagggcctaaatacctgctgctagttagtgggatgcacatttggcgacagatctcctctcagatagttttcattaaactttacggcaagaaccctggaatggagatttcagactgtgtacctttaactcaaaatgggactaaatttaatattggattaacaggtcatttgttgtttaacgatgtaaaagttccagtaaaaataatggctcatgaaaccttaaaatatacttaatacaacattttgaaaggtagaaatcttattttccttcatgggcacttagaattatagt

SEQ ID NO: 479196 - DNA, 723 bp, Homo sapiens
agaaagttgctgttcaatagattttcaaggattattgacgcagttgatgatattttcctacaacctacgttaacagcacccattgttcagaatatagactctcacaggattgaggtgcccttccacgtggaagggcatttcactcaaagcatgactggcagctcaagtagagcaacaagatgagtgtgggcagccctgtgtcttgccaggtcagtgctggcggctgtgagagaggcgatgacccatgcaggcgctgcagcagcaatacagaggctatgcaggaaatggggagtgggagaattgctgcagcagcagaactgccacccactgggaagatatcaactacccagggctcgacctggcaaagggaacattcctgtgattctgcgggctatggaagtcctagatggcattttcttccaatagaaggctgtttcatctacattaaaaacctgcttagtgtaacctccttcatcaataatgttagcaagatcttctggataacttgctgtagcttctacaccagcacttgctgcttcaccttgtacttttatgttatgaaaatagcttctttccttaaaccagcttctttcgttaaacctcatgaaccaatctgctagcttccaacttttcttctgcagcttccttacctctcttagccttcatagaattgaagaaagttagggtcttgctctcgattggtttgtcttaagagaatgttac

SEQ ID NO: 479197 - DNA, 810 bp, Homo sapiens
taagatcatgtgaggacagctgtgtgcgtatccaatgggtgtggggatggccaaagattccatgtccccacttgttgattgtgttttagatccagagcacatggttttcatttgtcctctagatactaacaagcatagagcaccctatcaggaagacaggcacaattcaagaatcagtagagcagcccccctgaaggaaacagagaggggaagaggagtcatcttttgggaagagaaaattgttaagtgttgtgaccaaaacactgatagaaatgcggacagtgaagtccaggccaatgagatctcggatggaattgaggaagttattgggagctggagcaaaggtcacccgtgttatgccctagcaaagaacttggctacattttgtccacaccctacaactttgtggaaggctgaacttaagaatgatgatctagggtatctggtaggagaaatttctaagcagtaaaacattcaagaggcaaatgctgtgtttcaacttgtttgtcagtaatagttatgctggaattaaattttccttgatggatctttgaaaatactattatactgttttctggtttctattgttgctactcaaaagtctgttttcagtcagttattcctttgtagggtccacttctctacactctgacctaaaacatttctttactgagacaacaagtcttgatgatagtacagctccaactcatctgcatttcatttatttcccaagattcttgtcagcctgcggatgttctcaaattcacagacgaatgtggggaaaagggggaggagggcagcagtgttgac

SEQ ID NO: 479198 - DNA, 723 bp, Homo sapiens
cagcatggctaacaatgtgaaatgaccaagttgcctagagtgatgttaaagtcagaagggccagagaaggtggaaggcaggaaaatgttgccgagagcaagaagcataaagcaatgggaaaatgtatttgcattttattcaatggagacagagaatttggtcactcagcggaaagaaatggtgcgcacaaaggccgaggaattgaaaactgtgagggcaacaggtcctcctctgcctggaaggtttgcttgtcagcctcctgatgtcacctctcttggctatattctccataccatcacccagggtataggagagaaggtgttcttgccaagaccacatgattggcattctctgccttggcccttttatctttccccagtgctggccctccctcaccctgcccttgcactcagcagagcagaagtctgcttgagagccttgctatttttacttctctgtgaggggatctcaggttacaaattatataccgatgaggtcaatatcgtactgcttttataagtgtagctttaaagtaagtcctaaaatcagacaaggcttttttttgttggggtggctccaaacttcagatagaaaccaggttttctccatgtatttcctatctttcttggaccagtggttatattggaggcatgtgcctctcatgtaaaagcaggaacatgtacaggtaagcccagtcatataagcacttttcaagttttgctc

SEQ ID NO: 479199 - DNA, 625 bp, Homo sapiens
aactcaggaatagaaaaccacttataagtgggagctaagctatgagtatgcaaaggcataagaatgatataatggactttggggactctgtggaaaggacgggatggggtcaaaaggcttataaactggaagcaccagataccattggaattatgtatgggagtagcagtaaatttaaaaatatggaagcagtgggaagaagaggcaagaaggacccccggactgaccaaagcccacacgccattgcatccctgcatctggtgctacgtcttagcagcattaccaccatgcccaagagaaagcctgaaggggatgctacaggagataaagccaagctacagagaagatctgcaaggttgtctgctaaacctgctccttcaaagccagagcgcaagcccaaaaagccttctttgcccctgcaaagaagggagaaaaggtgctgaaacagagcagcagtgttagtgtgttgataggtgttggttattgttgaggggcatatttgctggtctcttttggagtatattaataggtatactttttggggtgaaaaacggtttgcggtcgctaatcaaaatgttaaaagccaacaaagcacttatatgggcatattgtaagaagctaagaa

SEQ ID NO: 479200 - DNA, 686 bp, Homo sapiens
tgtgttcttgttgctcagctcccacttatgaagtcgttggggtttcctgcttcaacagtgcttggatggaacccagccctcgtcccctaccccggccagccgcccatagccagccctccgtcacctcttcaccgcgccctgggactgccccaaggcccccgccgcagctccagcgccgcgcagcagccgccgccgccgcctctccttagtcactgccatgacgaccgcgtccacctcgcaggtgcgccagaactaccaccaggactcagaggccgccatcaaccgccagatcaacctggagctctacacctcctacctttacctgtccacgtcttactactttgacctcgatgatgtggctttgaagaactttgccaaatactttcttcaccaatctcatgaggagagggaacatgctgagaaactgttgaagctgcagaaccaacgaggtggccgaatccttcttcaggatatcaagaaaccagactgtgatgactgggagagtgggctgaatgcgatggagtgtgcactacatttggaaaaaaatgtgtatcagtcaccactggaactgcacaaaccggccactgacaaaaatgacccccattggtgtgacttcattgagacacattgcctgaatgagcaggtgaagccatcaaagaatggggtgaccacgtgaccaacttgtg

SEQ ID NO: 479201 - DNA, 784 bp, Homo sapiens
ttaggatgaaaatacagcagtttctacattcgtggattcgaccaatcccaaccctgatggagaaaacagtacctgcattctgcattggtagaatccgcggatgcagaatctggcacctcctcaccgcaccccctccatcccacctccccctgccacaagtgttgctaaagaatgcagcaaaatcatagaatttggcagtcccattgcgggtcccctcggagactcacaggtcggtggcatggttcggagagcccaggttcacagcgcagcttgtggggcatgtccaccttgcaggtggctgttcctccacatctcaagtcggggctcacagatgacagtcatagagaatcctcgaggctctcaggaaatttcactccacttctcctgctctgtggtctctttggtcatcagagtgttcttctgcatctctgtggccttcagcttggccttatccaagctggcaatttcttccaggtctagtttgtgtgccattttcttacccactttcccatttgccctgagaatactctccagcggggcttgtggctgcagccattcctacatgggatgtgaacatcgttctcaaacagttgttgcccgaagattgatttgacaaatccggtttttccgaaatagatgattctgatgattcagcctatttttatgttagttctgtttagaaataacttcaggaacggtttttatattttattttcacatcaaaagtcagtcagatttgcttcagcctcaaagagcctgtttctgtaaaattaaatgagcactg

SEQ ID NO: 479202 - DNA, 1148 bp, Homo sapiens
tcacacgagatggagcttaatcttgcacaagctagaaccatagagggtgtcgaagagaagcagcagcagcttcccgctgcaaaaaggaagcttatctatgaaaaagtgaagcactatcacaaggaatataggcagatgtacagaactgaaattcgaatggtgaggatggcaagaaaagctggcaacgtctatgtgcctgcagaacccaaattggtgtttgtcatcagattcagaggtatcaaaggtgtgagcacaaaggtccgaaaggtgttgcagcttctttgccttcatcaaatcttcaatggaacctttgtgaagctcaacagggcttcaactaacatgctgtggattgtagagccatacattgcatggaggtacccaaatctgaagtcagtaaatgaactaatctaccagcgtggttatggcaaaatcagtaagaagcaaattgctttgatagaaaacgctttgattgctcaatctcttggtaaatatggcaccatctgcctggaggatctgattcatgagacctatactgttggaaaatgcttcaaagaagcaaatagcttcctgtggcccttcaaattatcttctccaagaagtggaatgaagaaactgaccatctattttgtagaaaatgttcagatgtgtccggagtttcttccttctggtgggttcgtggtctcactgacttcaggagtgaagctgcagacctttgcagtgagtgttacagctcttaaaggcagtgcatctggagttgttttttccttcccatgggttcatggtctcgccagcctcagaagtgaagctgcagaccttcgcgggagttgttggttcctcccgtccggagttgttcgtccctcccagtgggttcgtggtctcgctggcttcaagagcaaagctgcagaccttcaccgtaaagtgttacatctcataaaggcggcgtggacccaaagagttagcagcagcaagatttattgcgaaaggccaaagaacaaaccttccacagcgtgggagaagacctgagagtgttgctgctgctggttagggtggcctgcttttattcccttatttggccccacccacatcctgctgattggtccattttacagagagctgattggtccattttacagagagcttatttgtcc

SEQ ID NO: 479203 - DNA, 486 bp, Homo sapiens
gggaagcggaggttgcaacgagggttccgagctcatgccactgcattccagcctaggcgacagagccttcactgaattgggtgaggcccactcacactggggagatcaatcttctttactcaggttacagattcaattgttgatatttatccggaaacactctcacagacacattcagagaaactatgataaatacttggacctgaccaagctagatggtccaggagcgttttcctgggaaagcaatttgtcagttgaaggagtcatcctgacgaaggagcagggcaggagtgtttgggcatcgcacacacaaaggctccaaggtggatggcaggtgatgctgagggaatcaagaaggtgcacatgcagatgcacagagtggggcttagcaggcttaagaggcggagcggggtcacatcaccctggggcttgtaggccacattaaagttgtctttgatgcatttttagttaatttttatgtatgtc

SEQ ID NO: 479204 - DNA, 635 bp, Homo sapiens
aggtgtataattcgtgcttgaactataaactccatgggggtaggatgctatctgtcctcttcaagactgtatccccaacacccagaacagtgtcttgcacatctttcccagcagagagatttatctggaaacacatttaaaagttggaaagtagacaccaggttgatgggcctcacatgtggcctgagagtctctgatctggctcagcagttactgctgggctcagaagagtgtcacttctgtatggatgatctgttttattattttcttagcacttttacaaccatccttgatacagataataaagtccaagcggaagtggtctcagacggagatgaggaactttttgggaaatggagtaaaggtcactcttgctatgcaaagagactggcagcattttgcccctaccctagagatctgtggaactttgaacttgggagagataatttaggatatctggcagaagaaatgtttaagcagcagactccaacaggaagcagagcataaaaatttgaaaaatttgaagcctgacaaggcagtagaaaagaaaaatccattttctggggagaaattcaatccagctgcagaaatttgcataagcaatgaggagccaaatgctaatcaccaagacaatc

SEQ ID NO: 479205 - DNA, 653 bp, Homo sapiens
agggacctgatcataaaagcactatgagaggggaggggggaaaatgtgaaaaaacagttgatgtgaagaaaagtaaattctgtgaagctgatgtctccagtgaccttcgaaaagaagtagaaaatcattatacgctctctttacctgaagatttctatcacttctggaagttctgtgaagaacttgattctgaaaaaccagctggtaaatggatgccctaccctttgcctctcagcccctgtaatgctaagaaccaggtgctgggatctcagctacagctgctgcagaactatcagatgcctctacagcagtgctcactgatggagatcgtggaagcacagcctccacccggtatctcttctgcctctgagatttcaaactattgcagctgcttggaagaagctagatcccatgtggagcctgggctaaagagtagtatgggaaatgcagcaaactttcatggtgtgaggggagtattttgtaaaggagcaaatacttcttagtgttggattcttttggttttctgctatagatttcagaggcatatattttacggatatagatccccttcagtaacacaaacctttggaattgtacttattgaataaaatgaccctgtcaacatgtttctaagtgccagacagaatcaaacc

SEQ ID NO: 479206 - DNA, 1306 bp, Homo sapiens
cccagcatcccaatttgggaagtgcattgtgtgctgacaatgtgtactccccggtttcatttgggctgtcagtgcatactccctggtttcatttgggctgtcagtgtgtactccctggtttcatttgggctgacaatgtgtactccctggtttcattgggccaagagaaggaccctgcataagaagtccagagacatggagataaagaactacagcagcagcacctcaggcttcatcctcctgggcctctcttccaaccctcagctgcagaaacctctctttgccatcttcctcatcatgtacctgctcgctgcggtggggaatgtgctcatcatcccggccatctactctgaccccaggctccacacccctatgtacttttttctcagcaacttgtctttcatggatatctgcttcacaacagtcatagtgcctaagatgctggtgaattttctatcagagacaaaggttatctcctatgtgggctgcctggcccagatgtacttctttatggcatttgggaacactgacagctacctgctggcctctatggccatcgaccggctggtggccatctgcaaccccttacactatgatgtggttatgaaaccacggcattgcctgctcatgctattgggttcttgcagcatctcccacctacattccctgttccgcgtgctacttatgtctcgcttgtctttctgtgcctctcacatcattaagcactttttctgtgacacccagcctgtgctaaagctctcctgctctgacacatcctccagccagatggtggtgatgactgagaccttagctgtcattgtgacccccttcctgtgtatcatcttctcctacctgcgaatcatggtcactgtgctcagaatcccctctgcagccgggaagtggaaggccttctctacctgtggctcccacctcactgcagtagcccttttctatgggagtattatttatgtctattttaggcccctgtccatgtactcagtggttagggaccgggtagccacagttatgtacacagtagtgacacccatgctgaaccctttcatctacagcctgaggaacaaagatatgaagaggggtttgaagaaattacaggacagaatttaccggaatggcatcttgaaggatggactgaattttgaaagaggaagtttcaaaagatgaagaaatgggcaaagcatttcaaatagtgaaaaccacccaagcatgtggagacaataagcactgcaatgtgtttgagggacaatgaaaagctgaggcttcatcagtttgagagaaaggagaatac

SEQ ID NO: 479207 - DNA, 2165 bp, Homo sapiens
accgtggggagagggagagggagagggcggctcggaaaagtttgttattaccaatcgtctgaagccttcttctcttaactcatcaaagtcattctccatccagctttgttccgttgctggcgaggagctgcgttcctttggaggagaagaggcgctctgatttttagaattttcagcttttctgctctgctttttccccatctttgtggttttatctacctttgatctttgatgatggcgatgtacagatggggtcttggtcacagaaaaattgatcagaaagtacaaggggttcccatacctcttgctcccacacacgcagtttcccctactatcaatgcccgccatcagagtgacgcatttgttacaattgatgaacttattttaacacatcattatcatcgtagtttacatcaggatttactcttgaacgtgaacaaggtggccacatggagaaggttgcctgataggagctgtggccttcatcagatggatacaggagtgaaatacagcatcctgaaaaatattggtttctaccctacaaggcagttagaaaatgttcacattttaacaaatttgaacaaactacaagaaacttatttatgggatcatcttgctggtaagaactttctagaaatgtagaataaccatgaacaatgtataaatctagtatctatgtgctccacagccctataacccaataactgatttgaagaactcaatatgtccaacatggatcatttttacatgtcttgattgttaatgaatgtctgctaatgatgtatagtcaacttgcaccttctaggggttcatttaattttttagcaaagaagtgacatcatttagcagcaattagagcaccttcaagaagactttaaaaatacaatatccaattagaaaagccacattttaaacatttgtacaagaataagctgctgaaacttagtgattgaaatatgacatctgtacaacactttacaatagagctagaagggaatttatcgttatcctgcatagaaccggtctgcatttggtacatactgtcacctgttttgatgcacaaggcctggtaacaaaagaaaaatacctgttatcaattctaacgtgttgaaaacactggcaatattacaatttagtgaattcaactgatttcaaaacaagcagctcattttgtcaaaagtgtaaagtatttaggaataatagctctccctttaatataacaagtgaaagaaaatggacatgtgatttcaaggtgcaacttggtaaaagccagaatagacaaatgacaaagcctaactttgtccaaagattctaactgtcgcattctattactataaaacccaactgtcactctcattcagttcttactttggcttcagcagattaactgccaaatgctgaagaatgtatccaggcactgtagtttgtgtgttagaaatatgtctcatatttttccatgtgtttttaaatgatgaaaaactacccttcatattagaactctggtaacaaccaaatgtatttaagtattataaatgttattgacagtgttcccccaaataaaagaccaaaaatgtttttcttccatcttaacatggtattcctgtttctttataatgggcagtcacccttcactgctcaaagttgtagtcagaagtgtgcatttattcattgtccatgatccagtctcatacaaatgacactatgaggaacttcagctcacaaacagtttttaaccatgtcctgtgtaaaaaaaagaaaacaaaaaaacactcaaatgctcttaaactcaagtgtgcatctggaagcaattcaaagatatcatgtcaatcttggaggaaagtcggagcctctctcagctctcagttagtccctcactaggcaaggtgtcctgaaccttctctttacttatttttggtgcttcttgtattttctctggtgaatcctagcattctcttctagatggtctgtttgaaatgtacctactttctattctggttcctctccctggaggaggaacatactaccttcatctagtcagccttcttaatccctttcttgtctaaactgttctattttccattaaattcatactctggatgaagcaactttagttcatcttcttaggatgttcaaatcaggtcttccatcttatcacattaggtatt

SEQ ID NO: 479208 - DNA, 1961 bp, Homo sapiens
gcaaaaagttccaacaggggtctgtggacccttgccagctaggatgataggattacttctaggaaggtcaagtttaaatttaaaaggggtacaagtacaaacgggagtcattgattcagattacaatgcggaaattcaaattgttttatctacttctcttccctggaaagcagagccaggagagcatataggacagctcctgattgtgccatatgtggaaatggggaaaagtgaaattaaacaggaggatttggaagcacaaataaagcaaagcagcttattgggtcaccaacatcaaagaccaaaggtagataaaaccacaaagttggggaaaaagcagagcagaaaagctgaaaattccaaaaaccagagcacctcttctcctccaaaggatcacagctcctcgccagcaagagaacaaaactggatggagaatgagtttgacaagttgacagaagtaagcttcagaagacaagcaaatgctgagagattttattaccaccagccctgccttacaagagctcctcaaggaagcactaaacatggaagtagttaccccatttcacctgacttctataaacttatagaaaataaaagcaccaatattgctctcctagttttcctggcagctaggggatgtgttggtgaccaaattcttgaccagtcagatgcaccaccttattttgaatctagacatagtagtgaaaagaataagaaggggacagttctttctggaagtggtaataaccagtttatagacctccaagaactatgcccagtgactactgctggtagtataggaggaggggatccggaggaccaccaggatgatgcaggcataggaggcagtaatgaaggccagagctccactgattacaacagcaccttctgtgtgaatcataagggtgttgagaaattactgaaagcctatacaggaattgtcggaggtgtccagaaacttctgtgctctggtgtgcaggctcctaagagcagatatttacctttcagctgtactggccctggctctcccaatccgcctcaggcagcatctgtcatcatgtcttgttttgacagcagcgtggagctgaccactcagcgaagacagaggaaatttccaagaatagaagaaagaaaagcatcagggaggggctgtaggggtagagccaccagactcctggtggtgcttctgctcttcaggggcaggaggacctgtctagggaaggtgctggcagctgatgatggccaatgcaatgtaaaagtaggacataaggatgcagacaaagggcgcaatcagcagtgttcctgccacaaggatgagcaccagatcattgacacaagtactggagcaggccagcttcaggagtgggaccagatcacagaagaagaaaagcccaaacaaaagagcctgctgctcctggtgttcagagaagcccatgagaagaaattcatagatgcaggtgctccacataggataggtggtcctcacaggtgctcctcacagatgctcctcactcagaggtgctcctcactcacaggtgcttctccagtcagtttggcttctcctggccccttggatttaaaaacctaaactttagatggtctattccagctcctgaacccttccttgccttattatatttatttatgagatttatatattttacatctaaatagaaggtgagcttcaaaactttagctttcatgtttaggttttactttagaaaaaaatgtatttcaattaaccagtgttcaataaatgttgttgaacctaaataacagtgagagagaggctctttaaaatgaatgatatttatttgggaatgggcattgcaatgagaatacatgtgccatagtaaatgatgtgcatattcaggaaggtaaaagtttttaaaggaaagctgagaaaaatgaggattactcgattgtttgagataattatccttggctacaggaatcaataa

SEQ ID NO: 479209 - DNA, 849 bp, Homo sapiens
tgacagcacctggataccttggttgccgttgcagggttcgcatgctgttttggttgttttctgaattcaactttttaaaaatcccacaaataaccaccactgtcatcgcccaatgggctcatgaacaaaatggccatggcggcagggatggaggttatgtatgggttcagcagcatgtactcccactaaccagggctgacctggccactgccacctttgagtgcccagtctgccagcagcagagaccaacgctgagccccccaatggcaccattcccaagggtgattagccaattacttggtggaaatattcatggggaaaggattagattaaagcagtttttggaaaatgagaaagtggaaaaaataaatctttccaagaaagaggagacacagacaggaaacgattgtgatttaagagatacaggccgaattgttgggtcatcatcaatggatgaagttcatcagcatcttggggacaacgcttgttgtaaagcaaatatcagtgagagacagaaaactcaagaagaaatacataggggtctgaagatgggggttgaagcgaatggccaggatgatgagcaggttccctgttatggtgaccagggttttgctgctctcaaagcatgtggtgtagagggcctccagatcaagctcaatgagtctaaatgagtcagatggtggttatgacttcttaattcatgaaatatttgaaactttcagaaaggaaagagaaagtgccaaactgggttggctagtaccaaatatagtgtttgtttggcatagaaattcaatatgtggttaattaattatttatattgtctatgacctagtctttcactttcaggaa

SEQ ID NO: 479210 - DNA, 1196 bp, Homo sapiens
ccagcagctctctgtttctgagtttattggttcaggattcaaaatgaatatcagcgcctccagagcaacagcagtccctcttcggaattttcctgtgtatgtatcttgtcaccttgactgggaacctgctcatcatcctggccattggctctgacctgcacctccacacccccatgtactttttcttggccaacctgtcttttgttgacatgggtttaacgtcctccacagttaccaagatgctggtgaatatacagactcggcatcacaccatctcctatacgggttgcctcacgcaaatgtatttctttctgatgtttggtgatctagacagcttcttcctggctgccatggcgtatgaccgctatgtggccatttgccaccccctctgctactccacagtcatgaggccccaagtctgtgccctaatgcttgcattgtgctgggtcctcaccaatatcgttgccctgactcacacgttcctcatggctcggttgtccttctgtgtgactggggaaattgctcactttttctgtgacatcactcctgtcctgaagctgtcatgttctgacacccacatcaacgagatgatggtttttgtcttgggaggcaccgtactcatcgtcccctttttatgcattgtcacctcctacatccacattgtgccagctatcctgagggtccgaacccgtggtggggtgggcaaggccttttccacctgcagttcccacctctgcgttgtttgtgtgttctatgggaccctcttcagtgcctacctgtgtcctccctccattgcctctgaagagaaggacattgcagcagctgcaatgtacaccatagtgactcccatgttgaacccctttatctatagcctaaggaacaaggacatgaagggggccctaaagaggctcttcagtcacaggagtattgtttcctcttagatgtggtgacagcaacatttaatgaaaagacataggcttggagtcagacaaacgggcttcattttggggtctaccacacactagccataagattgtagtctggttacttagcctctctgagccttggttttctcatttataaaatggagataacagtttctatctaataatgtaacttggaggattaactgaaataaactatgaaatgcattcagtatagtagtgaataacagtaggtgttcaataagggatagc

SEQ ID NO: 479211 - DNA, 2380 bp, Homo sapiens
gctgactctcttttcggactcagcccgcctgcacccagctccagatgctgcagagtcatggaaaaccaatccagcatttctgaatttttcctccgaggaatatcagcgcctccagagcaacagcagtccctcttcggaattttcctgtgtatgtatcttgtcaccttgactgggaacctgctcatcatcctggccattggctctgacctgcacctccacacccccatgtactttttcttggccaacctgtcttttgttgacatgggtttaacgtcctccacagttaccaagatgctggtgaatatacagactcggcatcacaccatctcctatacgggttgcctcacgcaaatgtatttctttctgatgtttggtgatctagacagcttcttcctggctgccatggcgtatgaccgctatgtggccatttgccaccccctctgctactccacagtcatgaggccccaagtctgtgccctaatgcttgcattgtgctgggtcctcaccaatatcgttgccctgactcacacgttcctcatggctcggttgtccttctgtgtgactggggaaattgctcactttttctgtgacatcactcctgtcctgaagctgtcatgttctgacacccacatcaacgagatgatggtttttgtcttgggaggcaccgtactcatcgtcccctttttatgcattgtcacctcctacatccacattgtgccagctatcctgagggtccgaacccgtggtggggtgggcaaggccttttccacctgcagttcccacctctgcgttgtttgtgtgttctatgggaccctcttcagtgcctacctgtgtcctccctccattgcctctgaagagaaggacattgcagcagctgcaatgtacaccatagtgactcccatgttgaacccctttatctatagcctaaggaacaaggacatgaagggggccctaaagaggctcttcagtcacaggagtattgtttcctcttagatgtggtgacagcaacatttaatgaaaagacataggcttggagtcagacaaacgggcttcattttggggtctaccacacactagccataagattgtagtctggttacttagcctctctgagccttggttttctcatttataaaatggagataacagtttctatctaataatgtaacttggaggattaactgaaataaactatgaaatgcattcagtatagtagtgaataacagtaggtgttcaataagggatagctattattattactattagtattcttcattcctcccccaactcagaagtcaaaaaatcttttctctgagatatatttgttcaataaatatttactatctatggtgtgttggaagttattgtaagtgctagggttatgacactgagcaagacaaagtccctgctttcatgacactttcattctaggttattaatttgtcgatcattaaaattttgggggcacttgttttgtttgtggcattaagtggggagtaagacaaaagaaataaagatggaggctgcattccatgtgctgcagaatagctaaagagatccccatcaaaaggttcaaattcaatgtttaggtttccatgcgggttgcccaccccacggttggctaatgtttcactaggaagggggttaaagctccttgtgctacctctgccccatgctggtcagaaacgtgcaatgccaccatccttttagtgactattagatgagaggaacgtggaaatcctctctccttatttgactgcaggtttgcgtccacatctaaaaggggcaccagcagcttaaattagttgcagagatggaaaaaatgatgtttgaaggtaaatggcattctatctgtctccaagaatcttagaaatattaaaaatattattttaaatataagggctatatagttttgatttcttacatctggtatcaccaggtgtccactggctacctaaactccttcctcatttaagtttgtttctcagacctaacctattctaaaatgttttatgattgctgcactttttcaatgaatacttatggagcatctttcatggaatcaaactgttccaggcttcagctattagtaagtacaaatgtgaatcatttagatgccacatcttagtacgcgaggattccatttatttcatgacctggaactggaagtctgttcttctctctagaactcctttccagatgttccctcagagagtccttgaatgggatgagcagggcatcgtcatgtaaccagagctggagatggttgcaaacttggagttctcctgccctcatctccttagtctacaactctccttccattctgttgacatctatcgctccactgaccaaagaccactgacagtctcctccaagccat

SEQ ID NO: 479212 - DNA, 1570 bp, Homo sapiens
ctgtcttcagaaagttcattcaaacatgatgcgacaagtagacataacagataactgcgattcagtgtggatggagggcaaagccaagtacatcctccctaccgaaacaatatatgttggggaaatgaaggatggcatgtttcacggcgagggaaccctgtacttccccagcggaagccaatacgacgccatttgggaaaacggattggccataaagggcacatatacgttctcagatgggctgcactatgatgagaaaaactggcattactgcgacggctatgatcggaggttttacacagagatcctcaatggcttgaagcctgcaggtatggctcaactcaccaatatggacccacctagaaaaatccccaagggctattacgattgtggagacggcttctataacccagtcacgagggtagtcaaggactataggaaccgctttctaagaaacgcaggtaggtttcttccgacactgcagcacgttttctcttcacccacatatgagtatgtgcatctgtatgtacaaatgtatgcacacacttgatgagaaagaagcttttgctgatagaagatgaaagttgattacctggatgttttattttttggacttctcgtggctggcaaatctgtacatagtcctagagtgaggtaaaagcacattcgtggtctagcagtgacggcacataaatgtcgcactgaaaggattaaggtacttatttttgtatgcattccttcgattttaatgggcacctactatatgctagacactgtgcttggtgttgggggaaaagcagagcaaagctggacacagccccccttccttgtggagcttgcattctaaaagtggcagagaagtactataaacagttaattgtatcatggaacaaacacaatgaagggaaaaacatggtcctgtgggaagggaaagtaggggccccagagaggtgggacggatgctgtgggagcacaaataaggggtatcaaatcccgaagcggttagtcagagaaggtttcaaggaggaaatgacttctaagctgagacctgaagaataactgggagttgaccacaaggcctggggagagggtttcccagcgagaggaaatggcacaggcaacggcctagaggggagtgatcccttgaggtgcaagaaggttggttcatcctttagccaggggagtaggtaccttggaggatccagaacctcagtttggtgagtcaacacaaggctgatcagactgagaagaacccatttacagtgaccaaactcacaggagatcaatacacaaataatagaacattttcctttaatgcagtgattcctaaacttatccttttctgaagtcacactcccactaggaatatcaaaagatacggaccctcttgccagaaaaatgtccaatgcatgcacacacacacacacgtgcacccacacgcgcacatgcatacacacacacattttgcagatagtcttaaggggtgaatggtccctctaaagacctaggtcaagaaaccttgctctataatgagaaagaaactgccaggtagaccagaacatctgtgctg

SEQ ID NO: 479213 - DNA, 1047 bp, Homo sapiens
aggtgtgtgggctttattctgggggacagggatctggagacaggcccagacagggaagcgacttggtcagatgggcatgtgagcaccagctaaggagaagcttaaggagcaccagctaagaagcgacttggtcagatgggcatgtgagcaccagctaaggaggcaggagggccagacgggagggatgtggtggcctggaccaggacaggggcaggagtgaggtggcaagaacgacgcagatcccagagctattaaggagatggactcgccaggctttggtgaggaattggccatggtgggcatggagccggaagatgaagttaccttggggcatatcagtgctgacaaaggggcctgggggagagatgatgagtctgatgtggctctgagagcctgagagcctgagagccaaggggatgtctggagaggatgtctggagaggtatcagcctagagcctgagagccaaggggatgtctggagaggtatccaggaggcagttgaaatcaggcctggagatattcacttgggagttggaaggctccggcttgtgctgtcccttcccgctgtctggattttggcctgtctgtgggaccttgaggagcctggagcctggagctgccagctcgtctgggccctccaggctccaggatctctggaggccatgggtggggctggtgctggccttgttggtgttgctcctgctggagtagtggtgccctctggcatctgtgccttccacggcaggggtgctgcagggatgctgctgaataccctcccgtgcacgggacacccctgcagcacagatgtttctaacccagaatgtcctggtgttgacgttgagaagccctgatctaaggtaacgcaaccaaaaagtgacataatcagggtttgaacccaagctaggggctccaaccttgcactctaccgcccttgtcatctccctccagggtttagttggaaagggggggaacatggaggggttaggagtaggtgtctgaggtcgaggggcctcctgtgccttccaaattgtgcctggatccttccac

SEQ ID NO: 479214 - DNA, 2666 bp, Homo sapiens
tgggtgagacggttgtctgtgaagcttccagacccttctccctgccctccctgccaaacagccatgctctctccttgctctgttgattccaggcacacctccccagccgtcatagctcgctggatcagaagtatttgtaggtgtcttatcccctttccacctgctcccagtggaggccaagtgcctcgtgccagtgcctgattcatgtttggggcccagggcctagcacagggaaagcttattgaataatcaagcaagtgggactcagggtgttctgagcagaggccagggaccggccccaaggtgggaatgcggggagcaggttctgcgaaatgaaggcccgcagggtgacgggagcaggggcgtgggttacagcggcagctggagaggcggggctcgatccctcagagcagggcaagaaagatggtgactcaggaacttgtgttcgtgtcatgatggaatcaggggtgacgttggatgggactggactgagacctctgggccactctgctgtggccagcaggggaaccccagcagccctgctcctgcagcgtaacttgaatcatctgagtgcgctgactcctcctccccgcccaatccccacccccttgaaaccttcaaaagtagagatgaggtttctccatgttggccaggctggtctcgaactactgacctcaagtgatccacgcacctcggcctcccaaagtgctgggattataggcatgagccactgcgcccagccaggagctgggttttaatgggggcatttcattgtggacattttacaaggctttgagctaggtttaaatcttatataactttccccagctctctccgtgtctctgagactcaacttcctcatctgcaaaatagggttaaccgaacttccttcataggtctgtgtgagagatttggtctgcacatggccataaaatgcccagctagtgcctggtgggcacagtgggcactctgtgagtgagttagccctgttaggagtttctggaatggagacggtggtggggagcggggctagctcttgctgacatccttgtggctggaggtgggccttcccagggcagcgtagggcagctgtgtgcaccccctcatccagtctctttgttcacagggatgtgtctgcaggccttcgtagaagctttctttttcctggctcagaggaagttcaagatgctgccacttcatgagcaggtggcctcactgattgacctttgcgagtaccacctgtccctgctggatgaaaaacgcctggaagcaccaactggggcaaatctgttgtatttggggcacaggacacaatcgatcccaaggcccggagctgtggagaggaagccgagtgttaggatctgctgccggggcctccacgcgcccaccgggaaaagcctgagaacatcgtgtttatttcctgccgcccgttccgagagaaggaagtggaaatatcaagtaggcatctgcgaatctcccatcccagtcatgtgctacatgggtgtagtgaacagattaacctcatttagttcattagcttgcctgttgctgcaatatttggtttgttattaattaagaaaaaattaattaagaagtaactaagactcctggagcctcagagctggcaggagcctcagagatcattttgtttgattttgtttgactgtgaccccaaagcaggaatcccatctttagcctccctgaccagatggtctgagtggacccctgcataggtggggtgctggtcatgtggccagcgtgtccacaacaagcactgccaggggtccctgcatgcccagcactgtgctgggagccctgggtgagggaaggaaatcagacatggataagaaccagagcaagaggagtagtgtatgtcagacctggtgccagggtcaggggagctcacactgtcttccatgagaccctttccttgtctccatctgtatccccaggtagcccccctctcggaggaaacgcctcacaggcagcagaaggtggcattttggaaacagccttgggcatgccaaggtccagggcctattgaagacaggcaggcaggacctggcaaagccaagctctccagagtgtggttggatttggggttaatgtggccctttcctggaggatccctttaaaggatgctgaggaacctgggaagagtcagtcatcgtgctccaagcgaggtgcaggaaagtatttgaggcgctagtactgtgcctggtgtggtgcactgtaggactcagaaaatgctcgtagtgcgtggcaagggagggttctgggaggcagaggtgcatcccaaataagctcctgcagctttctcctccttccttccaacatcctgtccctgactcctgacccaaactgataagagcagttgacctggttcataacaggtactcaaaagcatctgtggaaacaagttacttgaatccgccctccccagatatttttaaacccaaaggcaagattgttaatccaagatgtctccaatttggagcgcaatgttcaggtctaaaaccaaccaagcacattgaatattttgaaaaataaaatcaagaggtggaattcgcagccaccttgttgggggtgatatgaaaacacaagctctcatgtctgctggctgagttcctggagagctgggcactccgggggcttggaatgaacgg

SEQ ID NO: 479215 - DNA, 709 bp, Homo sapiens
gtgtcctatttctcctggactgtggttattgtgctgtctacctgcagcgtgagggtttccccatcaggttacttaagattgtacgtccaatgcctgaaccctgaaggctggtaggtgagccgaggccatggtgcccagcggaggagcaggtggccctgagaacccaaacatcctggagaaacttagagatgagggaggtggccactgggtgcggggatcgtggattggtcccttcagatccgccccggtgtccagaggagccctagagaatgccttggccggctcgcagggcctctccaacgccctgctctggctcgtctcacctgcaggagagaggtaccctgcgagtgggcagatacctggcgcccccggtggccgtttgcgcgcatctcaggctctgccagccgctgccgcccgggcgcagttcagaaagagccaggtgtcctccggagcccaggccgaggcctcttccaaaaggtctggggatcacgctggcttcctcccattctctgcagatctgagaagccaggtcgccgaggagcatggggggggaaggcagctcaaaagggctgtagggagattggggaaggtttaatctgtgaaagaaatcttcgtggtgtcaagccgctgaaatttcaaggttgttacaatataacacagcctgtcctgccaagtacatgaagtcaatcttggacactcatgttttgct

SEQ ID NO: 479216 - DNA, 845 bp, Homo sapiens
taagattcttaacccatttccttatcctgtaagccatgtgctctaggggcagcgtgacatgtggctggctgtgaaagtcaccctggcaaggcacatgtggtatcagaaagaggaaaggagagttgctggaaacaaagagaaactccatggactagagccttcccttagtttatcattttgttcagataaggatgtggacaagaatcagaactggagtcagggaaggaggccaggatgcagagacatggacagaggagtgacgagtgagggagtcgaaggcataaatggagatgcttctgccatggttgccatcatttactctgaggaaaacaggggatatggtgaaactccagacctggtgaccctcggtccagctggagctttgccccaagcagcttcaggggcctgggaaagtttctttacctctctggcctctatttccttatctgtaggaagaaaaagttgggctagatgatttctgaagtcttttccagtttaataaggagtctataacttttgctcagattttaaaggaattagaccaagtattactatttggaggtaattttgggcagtgtttagcattgggcatatgaagtaacttttttattccagtttctgtgcctgagtggatggatcctcttatttatctgaaagaaggcaatcaaactcttgagaaaatttttgaagagcagattttatttcccttgctatgacccttaaatactgcacttgttacatctgagtgctaattactagagattaattagtcagcatgaaagtacttctccggcagccccccaattactgaactgtacttgatatgtgctacctgcaggctctcc

SEQ ID NO: 479217 - DNA, 762 bp, Homo sapiens
gaggaggccagaaaccagtggggggttgcacagaagttcagacaaactaagtcttgctctgctgcccaggatggagtacagggcacaatgtcagctcaccacaactcctacgtcccgggttcaattgctgacctagtgaaaccggacattccggaggcagtcgagcatcaagatgtgttgtcaggtctgaatccttctgtgtttttggatggagaatcacaagatgttaagagcataccaggaaaagatgggaagcaacctcaggatggggttgaactaggtcttcaggttcccactgggagtataggcctgaggaaagagggagagaggagaccaaggagaaccacagaggactttgcttgtaaggggtctacagtctctgatatgaaagccttggagtcagatttgtttcaaaacttagtgtttttggatgttataatggtaacacagaaaaacactgatgtatgtattcccttcactttatcatatcaacttgctgaatttcttgaaaagagtgacaataatgacatagttgttttgtatctcactttagagttccacaagcactacattttatcctcacatcagctctgtgaggtctggcttaacagatgatagctggattttcgtatctgcttccactttccatcatctattgttctatgttatttttgttgaagtatatgaagaaaatcaggcctcacacagttatgtagttggaaaagggagaaatattttagcggtattttcatataatttttt

SEQ ID NO: 479218 - DNA, 479 bp, Homo sapiens
acccattaggcttttttttttttttgagacggatgatctggtaggggatgaaaggccctcctctaactcattaccttgataatgttgaaaaagaaaatctgatcaaatgtggccctaggaaaaagttaagtcctggtaagagcagctggttctttgatgtttatcaggagtggactcggagcctagagaagtgtacatgtgctcatcagcaatcagacaggagtttcttatttcttttgggtgctgaaatgcaggatttcttgctgatgataataaatgtggagtgcaccatctcaggcagccagcctctacagcttgcattgctgggctcttcatggtatgatccaaagcttcttgggagaacaggggcctccggccctagtgaagcaacggacttctatgctttaccttggaaaactccttctgtttgtgctgtggtctatagacagtttccagcctattgttggaggtaacatctt

SEQ ID NO: 479219 - DNA, 1399 bp, Homo sapiens
tagctttaggagatatacctaatgctaaatgacgagttaatgggtgcagcacaccagcataacacatccttgcccacacttgctatctttcgtcttatcagtgatagtcattctgacagagagccaaacacgcatggcccaggagtaggagaaattgaagaacaagatcctgcaatagctaacagagcaacatggttagtcagtggcccctgccaacaaagtgaggcagcagatcagcagcagatcagcagcaaattgtgtgagttgcaacagtgcctggtgtaccactctgtgcttctgagcacaagagaatatggctgcctcacttccgctttccaaatttgtaatacaccacaaggaccatttgactgtcccctctggcttctgcatcttgcttccagcatgaacagacagcaggctaccctcacagccaagcaaaaaggtggtttcatggcaatgagtagtttttctggtaccagtgatgcagctgctaagcaagtaggctgtaagggagaggctgctgttggttcccatgctccttccaagcttaggagaatccagagccaagagatggaccagaaagacttgtggtgacaatatttaagcatctgcatccaaaaatacatacagaatcatatctattctgagaaacaataaaatgctccccctaactacaagtcattttgcaatgtggcctctgtcacttacagcagataaagaactgactgatagatccttacactatttgttaaattgctttcattagagatttaaataaaattatttcccatctccattttttaattagggaaagtttcaaacatacagaaaagaggaagaatagcaaaatggattcccatatattctccactcagatttcaactctttctctttcatctttgctgcaccacttgaaagtacggtttagatagtgtgacacgttacttaatatgtacaatatgtataatatgtatatatgcatgtgtatattaatatgtatataatatgtatatatgcatgtgcacattacttaatatgtatataattgacacattacttaatatgtataatatgtatatacgcatatatatatcataaaaatagttgtgcataaacacaatgttatcatacttaagaaaattaacaataatacatttcgaatattcagtccatatttaaagttctccaatttcccaagtgtgccctttatggatttttttttttttttaccagaataaagatcctattaaggtttacccattgactttgattattatatctctttagtctagaactctttcccatcttttttaataaaatgacattgacctttacatttttaaaaaaactattttaaaattcatatttttaattgtcatttaataattgtacatattta

SEQ ID NO: 479220 - DNA, 1234 bp, Homo sapiens
ctctctccttctcccactgtagagctataagcaagacactgtcttctgcaaggtgcgtgggggtgtggccatgcacaagccagcaggggacagccctgcgaccccagcgccgtgctctgaaaatttgcagcgtaatgatgcagtagaaaagaaaaacccattttttgaggagaaattcaagccagctgcagaaatttgtataagtaacaggagccccatgttaatccccaagacaatggggaaaatgtctccagggcatgtcagaggtcttcatggcagcccttcccatcacagacccaaaaacctaggaggagaaaatggttttgcaggcaaggcccaaggtccccatgctgtggtagtacggaagggaaatgtgggattggagccaccacacagagtccctgctagggcaccacctagtggagctgtgagaagagggccaccatcctccagaacccagaatggtagatctgccgacaagcttgcaccgtgtgcctggaaaagccatggacactcaacgccagcctgtgaaagcagttgggaggggggctgtaccctgcaaaaccacagggtggagctgcccaagactatgggaacccacctcttgcatcagtgtgacttggatgtctagcaccaattctttccatattttaacttatatcataacagagattcagcattcaaagtgtttgagtccttactatttgacagggacttcatttttaagtggctaattgggaattcttggagggtcagaatagaacataaggcttgctgtgtgctaaagtcaagttgacagagggggctcttgggaacacaattcgagttggcaaaagactaaacgtttttaacataataactgctgaagatagggagaaagagggatgagggagacttccaataataccatttcctttcattagtactttaatactattgttcatgtgaacaaagtttcggttattggttctagttattggtagggtttaatatttgacaaatagagggatgctgttaaaaatacaggtctcattttattgaaaaatgccaatatttctaactaaatcattctgagtcttaagaaggcactctggctagattagaaactttaaaggttaatgatcatagaaagactgactatatttctttatgccttaatagttttgaataaagcatggtagatgaaatggaaacataaaaaattggaccaggtcaggcagacttggatttaaac

SEQ ID NO: 479221 - DNA, 1562 bp, Homo sapiens
gaaccaggagagctgatagtataattccgcccttcaactgatcggatggtgtccacccatgttgcagaagcgactattgacattcttcatagaactagaaaaagatttttaaattcatatggaatcaaaaaagctaaggcaatcctaagcaaaaagaataaagctggagtcatcaatgcaaagggatttcaaactatattacagggatacagtaatccaaacagcatggtagaggatataggcacaggcaaagatttcatgacaaagacaccaaaaacaattgcaacaaaagcaaacattgacaaatgggatctaattaaactaaagagcttctgcacagcaaaagaaactatcaacagagtaaacagacaacctacagaatgggagaaaacttttgcaaactatgcctctgacaaaagtctaatatccagcattaataaggaacttaaatttacaagaaaagaacaaccctattaaaaagtgggaattgaacaatgagatcacatggacacaggaaggggaatatcacactctggggactgttgtggggtggggggaggtgggagggatagcattgggagatatacctaatgctagatgacgagttagtgggtgcagcgcaccagcatggcacatgtatacatatgtaactaacctgcacaatgtgcacatgtaccctaaaacttaaagtataataataaaaaaaattattttcatgtatactggaaggttttaggaaggcttcttggtattcacttttctttatcattcctatagagaaatggtctttcattttctgggctttctttggtgtcctaaatcttaactggacttagaacaactttgaataagatatatacttcagaagagaagtcagaagctcatagtgtttatccgggggaatgccatatcaggtgtaccaattattagggggactagccagttgctgaaacccccaatcatgattggtattaccataaagacgattataacgaatgcatgggaggttaacagaacaccctttttcaaatcctataagataggcctagtggtaatgaactctcttagctttcatttgcttggtaaagtttttatttatccctcatttctgaaggatagctttgccagctatatccctcccccatgggtttccatgattcccttgtaactttgtggtggattccttttatcttaaggttgaatttttttctgtttccttcagtgaaaaagggctaaatgactactgttacacattagtcgcagagtaagagctagaaaacaggtcacaacaatcagtgcactgccttttaactacaagtcttttacggtttgttgagtaatactttacatagcttatatttttaaaatgtaatgctgagaaaccaaactgttaatttttccatcatgatgattcttaaaattgttcatgtttgcttatctatatgtattatatttagtttacttaaaatttaataaactgtaaaataaaaatagcatacgtatctactacttaaaataaatgttagcatttataatattgcttaaaatttgttcacttattc

SEQ ID NO: 479222 - DNA, 2016 bp, Homo sapiens
catcagctgagtttgttcgggttttgctttctgctaacccaccgtatgtggcggccggcagtcaccacgggaccccggagcctgtgattggctctgacacatccgaccgaaagggctcttattccaagaatgatcttcttttttagatggttacagaaaggtctaatcaattgtcaaactctcttttatcaccgagaaggtgccgctgacctagtggccggcacccttgaacccttacaacagcaacggccttgtcaaagcaatttgcttgccgctctccgtgaccagttatttcagcggcagagctgggacaccccgctggagagggcactccgctcgcctggctggcagggagctgggcggaacagcctcgttatttctgatgactttacttttgaacccagccggagttggagctatgtctgcaagttacccaagcatgaggaccaagttctaggcctgcctcagctgatgttctttgctgactgctgcctgcaagccatagaacttagcttaaaaaatggagagttgaagtcatggactatgaagagcaaaacacctgccaggataataagcaggatttacagtagaagtttgttaaatcataggatggagacatccatgcaagagaaagaaggacagataattgggagatgggagacgtgacatgtcagaaatgctatatgtataaatattactcgtaagtaaattaagtattttttaaaacaggcaaggaaaggttttcccacctgagctgtcctgaaatatgagatatctctgaagtacaagttggtatatttttcccagttgaataggaaaaatatgtttgattggacaaatgtcttcagcaatgataattacatgggtacctgaaacattacctgcctggtcattttctgcagggttaatattagcgtaatacaagttttatttaatgaccttttctctcttttcctggtactagttttccctgtgtgatttctgacttgggtgtcagattgtagaggaaagcagttgagaaagtatgggtgataaaaacagccctaatcaatttttatagggccagtagtggtgatgacttaattgctaccttggtgaaaaggctgtgattcttatgctaaattatttaaaaaatagctttcaatgtaaatgttcagaactttgtccaatctctcagcatttgaaatagtaccaacacaatgcaaatgcagcaatgcttaagaagagcaagttcacagctaatttgaaatacaggatttcaacagctcagtggagctgggcgctggagagggtggagcaggcaaagggaaatgcaggctatgtacataatgagggcaatcaatccaacttggtagccagcaagcaactgttgtgtttaaaatggagtattgtgcctcctgtcatggtgacatattcaattaagcgatatcctattattatttctcaccctgtgtgatttaacaaaaacattattgaaactagaagaaatcattctacacacaagcaaaagaaaattctttgattggaattataatgatgtctttcacaatctctgacaggtaaattatgaacagttgcagtaaaactttgctgtataatattaatttgaaataagttcagactgtctccagggcttttatttttataaataagtgttgagctattgggagggagggaaactactgcttcttctgaaaggtgatgactttagcatttatcttgtaggtagtgataagtaatacaaagtagagaatgtcagattaggacatggtgctgcctggagaaagccctatatgaacagcctttctcagaactctatctcccctaaagctttcaaggtgggggtggatgattttcacttacttaacttactctgtacatcactttccaagcatgacatttccaactgataagattttctaacctattagtcaataattcagcataaagttagagcagttgcttcaaattattactgtaccaaacttgggagattttgaatttcacttgctgggt

SEQ ID NO: 479223 - DNA, 659 bp, Homo sapiens
tcggaggtcgacctggaatcgatgagaaatctgaaggctagcttggggaacagcctgagggaggtggaggcctgctacaccgtgaagatggagcagctcgacggaatcgtgccacacttggagtcagagctggcacagacctgggcagaggaacagtgccaggcccagcagtacgaggccctgatgaacatcaaggtcaagttggaggctgagatcaccacctactgctgcctgctgaaagatggcgaggacgtcaatcttggtgataccctggacagcagcaactccatgcaaaccatccaaaagaccaccacctgccagacagtggatggcaaagtggtgtctgagaccaaagataccaaagttctgaggcattacaccagcagaaattacaactgcatggcccaggaaaggcgcaatggcaaagaaacaggaagtgattcttacagtggggaacccctggaagctgaggatgccaaagccttggctctgaatatctagatttacgtctcttctgtccaaacgtaatgtctaaagttgcctccttcctcttaaacaggtgttaatatcaggccataggaaagaaggcacttaatctctgactgtgcctagtttagcccatggacaacttcttctcagaaaagagaacattcacttga

SEQ ID NO: 479224 - DNA, 625 bp, Homo sapiens
tcaagcaaaatttgcgtgagaagtggccattggatttggcaatatgaacatgcgtagtgaccttgacaacagcaaattcagtaggatactagggatggatgaccaagttgcccaaaggcatataatcaattcccttgttcacagggctgttcatgagacacagtctggccaatgtgttaaaagcagaaataaaaaggagattgtagggaggactccaaccgtaagaattgagtacaaggagttgctcagtgatgtgaagctgaagagggcatctgaggagatgagctgtaaaacatattcacaagagggacgtgtgaagggagtgaccattccgaagaacccagacagctgcccacaggagaaggatgccatcccaaagatggtacccatcaaagctatttattacaccaattacactcataaccccgtaagggagagaagggagagagatatgaagatggctagtgggcaggccagtcagacaagctcagctgttaattcaccctatgccattccaaatccctgatggattagtagttcattctggtgtatggtatgaggtataaattcatttttcttctatttcaataatttctgatgacactttcattaacactaactagaa

SEQ ID NO: 479225 - DNA, 643 bp, Homo sapiens
tccttgttatgaactgaatgttcgtgtattcccaaaaactcctatgttgaaattcttacccctaaggtgatggttttaggagatgtgacccttggacacatgataaccctcagtcaattttccttgccagactggtaccaggaggtcctctgctccccctttgtatctccaactctcacgctttgttcatttcaccctgatgcaccaccatggatgaggtcgcaaatcttaagcaaatattcagatcactgtcgaggagctgtaactcaattggatcagttcctgctctgccaacatcccagtgcatttgcatgggggtttgttgaagctagtcacgaaaagcatgtagggttcatactgttccccatttctgaagatgacaaaagtgaaggaatacccctgataatacttgggttgagaacatttcttgtgtgcctactaggttcccagtgtggatccttatatcaaaatatgaagattgcccataaattgtaagcataaggcaaggaaacagggttcataagctacccagctattgctataattgtaaagaggtggagttggggggttgctctttcaaaaaataactgtcaaacatagaaacttacatgatactcacatagcctcattgttaacagcattt

SEQ ID NO: 479226 - DNA, 609 bp, Homo sapiens
tcaggaaaagtccttctgaggaagaaactacacctcttacaaatgcctggaataaatattaaaattaactacaaagaaattcttattgggcaaaataggagaaatggaaaacaagaagaagaaggcaaaatgagcttgaagacactctgtcaagcacattatcgagatgctgtgactcacaatttgttgtcttatgatcaccctctaacattttcctctgaagatacaactattttgatgattgaggaatataagtcagtcagcagttcagaatttcataaccaattgccagagggcaatattatatcaggaattggagaaggaaagggaagaacagcaactgggattttcttgagtaaatacaatatagataagtggcagttttcataccaaaatggtgccgcattcatagcacatcacctgtctcatgtgacaaaagcatgggaagtacaagccatttctgagtgctctgaattctttggagactctacagattatattatacagtatttatggaagtaagtgctgctttaggcggttggaaaaacacttgctgtataaccctcccctattttcacaagcacaaaagttcccagatgaattttcagg

SEQ ID NO: 479227 - DNA, 629 bp, Homo sapiens
tagcaaaatgtcttttaaagcattgagagcaagggaaaatgatggtaggggctagtggattcgtcactgtgaatcctggagaagacaaaggcaaagagttgtacttcttagtttgcagaggacatgggggtttaatgactctaactgggcagtccagaaaaggattgaagttctggctccaactgaaagaatgcttgggatccagagcacagatgggaaagttagaaaggaggagagacatgcctaagaggttaagaggaaaactgagaacaggaattgatgtgataaaattgaaggaaatacagttccgtgttgatcataggttctcagctcttttcaacacgctctcatatcaagatttcgatagcaagttcagagacgtctggagttgtactgagctcctgaattttctctaggtttgctttcgatattagtaataaggatatctaaagcagtcttgtctcagtcgttacactaaagataaatgttagatttcttagaagctcttttcttctattctcgaagtgaaagaggagatccactgacagtttcatctttacagatgaacaattattaagtctttcatgggcatgtgcaaagcagtaaaaaatttgaggagctgaatgtgc

SEQ ID NO: 479228 - DNA, 639 bp, Homo sapiens
gcctaaggtgttcttgcagccagccacccagtgacagcacaatggcagcagatctcaccagtgtgacattaccatattttgcatttgatttgcctatcaatgtgcagccagaatgcctggcactggagacagtaactgcatcggttgacaattctactctaggcccaggggggataatgagacctggagcccctaaacatggtgaaaacattggggttagcatgtctctgcagttccacatcaagaacaccgaaaactataccaggatggaggggaacaaccagcaccagcctgtacccccatttggtcaggtagcctggggctcacctgctcacaccacattggttgtggctacaaacaccagcaccatccttgcttgttccaccttcatgccaaatacctggcatgcaccactccagaacccaggtgttgcactaggaagaggcaaccacattcccattgttggagctcctcgtggttcctttttccatcagtccatggtcggtccacctggacaaaacacaggtagtgcatctacagtgaattccaccatagctataatgagaggccttcatgtgccgtcacagcagccaagctcccaaggccacctggacaatgattagatggtgtcatggggga

SEQ ID NO: 479229 - DNA, 582 bp, Homo sapiens
gccgataaaactaaaaagcaagcacactgggtatgcccgtgccttgggaagaagcaactggatggggtggaaaggagactgagttacctacagcagatcaaaccagagcttctggctgggatactggtatcttgagtgagtcacagcaggagatacgtgctggagctgaagaggttggagaggcagcagaaaaggttgcagcgtttggtgaagaccttttttgccttttgattggcatctgcatgggcctactggcctgtgttcatcattcccacaatccccttggttttggggagcagaccttccttcagctttgtgaattagaggtcatttttgtggagtctgggtgggagatagaggagaacaacctctggggagccttttcagggtcaagatcatctgcattagtcacccggatgcacttctttgctgtggtgactgcatcaatcaatgtgctgctgattctaaagagaggaaaaataaatttcaaatgactttttttcactgctgttcatgtttgctgccaatgtttgcctccatgcttgaaaacatgagcaaagatttgttatttggaagagctct

SEQ ID NO: 479230 - DNA, 658 bp, Homo sapiens
ttattctgtgtcaccctcaggattgccccatcctccctcccatgctcattggcacccaaagtccagaggaggccaagcagcagggtgctgccatgtcaacactggcccaagtgcatacacatccagccaggttgcaacagtgcctgggattgacttcaactttgctctgcaccagagtgggcctggagcagggagagaccagggagtggaagcacgcacttctaagctcacagaggcagggaggcatcttgggtccccaagagcttggggatgctcaggtcccgagctgtggctgcacagctgaagctgtgcctgggagtgcagagctcctgtcccaccaactcagtagggggtgcagtgctgcctcttcctggtcccaccagttccacagagcccacagcccaggcaacacctcccctgctgcagctggcatatttgcagcagccactccagatgggcagttgctgccatcataatgacctcttttttgtctattcttaaagttttttttttgttgttgtgttttgttttttttactttaagctgactttatctgatatgtctactcctgcttgctttttgtttccatttgcatggataactttttccatcttttcactttaagactttatgttgccttgaacagtgagatgcacat

SEQ ID NO: 479231 - DNA, 2689 bp, Homo sapiens
atcgcaacatgtgggtactatgggaactagaattcaagatgggatttgggtggaaacacagccaaaccatatcagagtatcctttccttaatgcaagacgcaggcctttggaatccaggttctcagaattgtatcagctgcaggcctatgattggaggatgagtggtgggggtgccctctctcagctggagcagcataagtgggtagcagaaaggagtccggtttgcttgtgccttggttccacagaagcccacagcaacagcagtgggatttgtacttacgtctctgacagtaaacagcgatttgaatttggagctccgcatgcagagtgcccaccctcccctccatcttacccccaacacggttccccagacaaagttgctcagttaagtaggcccactaagtaccagaaaatgtgccagggatcccactcacacagacctggggtgggtggacccaaagtggaggcaagtgtttacttgcaataatgatgaggatttaattgtgacggttagaggaacatttggaggaggtgaagagtaaaatcactttaggaagggagaagtgcccatgtaaaggctaggagatgaaacaatcatggtagaattgaggggctgaaagaagaccaggccctagaatgcaaagcatgaggaaggagaggatggagctagataatacagggacatggtcctgggttaagggttatccaaaggttcaagcaggagtaatgtctgattagatccttcttttaccaagaccactctggttactttagagagtggtttggaggagggtgaaaccagggactcctgcaataactctattaaaagataatgggttataaaggatattaatatatagacagttcaatctgtgcaggaactctaattttctgatcatctttacaaatttgacccttgcatctggacattgtctggtcctaaagcaatgtacttcatcaacattaaaaactcagtgacacacccttctttctcaaatgttttccatttatggacatttctggggaatcatatatctcttcctctggaaataatattgtcattgaaataacagaggggaagtggctttggagagaagatagaatattttctctcagtggtaatgatgttttttgactatctgaaagcctcggtatgataactctccttatctcagcccataaattaataaataatttagggatggtgatgtagataagtggtaaatcttttcaatttcaagcagtattataaagtcataatgataagattcttgaaaatcttccctatggaggaaatgaggaaatatttaccagaaaaaactgtaagagatggatagagatgggtaaccagaacgactgtgatcattcagtgaggtcaaagcatatcaagcatttctcttacatagattttctgacagtttgaagcagataatcatataggaaattgtaactgaatagctagatcacagggaatcagagactttaaaatagaaaaaaaaaaatggtcttgagagagctaaagttatccatgccatcaagaaaagcccctaggccccatagccaagaaattgtaactgaataggtagatcacagggaatcagagactttaaaataggaaaaaacaaaaaggtcttaagaaagctaaaggtatccatgccatcaagaaggcccctaggccccaaagacaagaagaccatgtttcgaaaggaaagaaatagacaattaattgtcccctaaactgtatctggcaatctacactcaggccagacttaggttaaaatacactcagaaaccttcaccttatgaactaatctatttatatgagtttgcatatatttctctacatttcccaaagcaattgccacctaatgatgctgattctgtccatttacatggcagtaggcaaggatcatctattactcatctgctgttctgaaaaatatagctatttcactaatcaggggcaaaaacatttatactatatgtttatttagacatatttatactatatatgtctaatactgatatcacatccattggttcatgaaatgaattgagcaattatttctcctaaagacattttatttttgtcaagcaaaaggtttgtatattttaaaggtagtcaatggtctataacaaattgcagcctcttttgctgtcaaaggataatctaatttcccttttggttactgacaaagcttgtgttgaaattcattattttaaaagcctttgacaatggttaatatagattaatatgggcattgtttttattgttattctctaatataacagcccttaactcatgcacaagcacattcatggaaattataaatgaaaatttgcatatgttatattaattaaaacttaacttccttctaacactgaaaatatatacccatgtgttaatagcttttccaaatgacatcagtacataagtggatctgaacgtacttgataaaagctggtcagtgtagattcgagaactattgtttaaccaatatcatgatgattgatattcccctccaaaaaggttactgagctgttccaaacgtcttgatttataaaacctgtggaatttctagtatacattatggccacatctgtgtattttatggatatggacaataatcaaagacttcatttaacttattctttctttgtagcaaggcctttatttatcctgccaaa

SEQ ID NO: 479232 - DNA, 908 bp, Homo sapiens
agccatgacttaaaggggccattatagagctcgggccatggcttctgatggtgcaagccccaagccttggcagcttccacgtggtgttgagcctgggggtacacagaattcaagaactaaggtttgggaacctctctctagatttcagaagatgtatgaaaacacttggatgcccaggcaaaagtttgcttcaggggtggggccctcatggagaacctctgctagggagatgcagaagggaaaagtggggttagagtccctacacagagtccctactggggcatcgcctagtggagctgtgagaagagggccaccatcctccagaccccagaatggtagatccactgacagcttgcactgtgtgtctggaaaagccacagctgctgacatgaaaatattttatgtgaaaaacagaaatatcaaagaacctattcaccctccagcaaacattcattattttatgctggcactgctctggattctggccattccaataaatgtgtagcggtatctcactgttgctttagtttgtttttccttaatgatgtggaatatatttttatacaattatttcacatctgtttatcttcttagaagaaaagataagccatttaagcaaaatgtatttttgtaaaattatcctgatcacatgggaagctatactgttttacagtattaaaggggacacaaaggatgtttgcacactaccttaataaacctccggcaatttttgagtagtctaaaaatgcctctgtcacttaagctttgtatacttgtactgagcccaaagctgtattaatttggctgtcatttaaatatatttttctcttatcattttccatttccatttcatcaatgtgcatttgcaaaagaaaggtttcatagtaaagaatatttatctgttatac

SEQ ID NO: 479233 - DNA, 638 bp, Homo sapiens
ttaaggcaggaacaggccattttcacttcttttgtggtggaatatcatcagttaaggcaggaaccggccatctggatgtatgtttaaggtggctcactcacctggctggcagttgatacgctctgttggctgggagctcagttggggctttgaagtggtttctgagggaatgtggtctctgcttgtggtttgggcttcttgtgacctgactgaaaaggaaaaggatgagttggcttactatgtagataaaccaaaaaattacggctgttccaaatcatccccaaacagggatagctttgaaagacagcaaattggaaagattactgatatgggcaaagtttcaggcagagtgggaagagaagtggccaatggaattcaaaaccagcctcggctgttagaggctgaaagattgggggtcgtgatcaactcagtataccactggaggctatatgagtaaacagcaaactgttctcataaactcaatgttggcaagctgacaaactgcatatgcctctcagaaggaatgctgtgggcagtcacgacccaggcaaaaatgtttcttgtgattaggtacatctgaagcctgttagtaataatatgaacctgtgatcagttcagcagctgactagtggttacct

SEQ ID NO: 479234 - DNA, 589 bp, Homo sapiens
ataaaaatcctctggtcaacctgaagaaaggctctggcttccaagaacaagcatcccaagagtgagtgtcatgaaaaacctaggtgaatgctgcaaggtttcttatgatgtaacctcagaagtcctaagaacatcacttccactgtatttcactagtcaagaaccccacaaaggcttgcacagatttgatgggaagaaaatagactctgggaaggaaatagcctctgctgctcactgggaggtgtatcagtcagtagcaacagaacgaacagtgtatatgaatcttctggctgctgtgctgagaatagaccttcaagggggaagggcagaggtagcacataaggaaggcggcatcagctttggcgtaaaccatggtgaagatggagttgatagcaacaaaactgtagaagactgcactggagtaggtttaggcggcgaaggactaggaattccatttcagacaaccaagtggagaaataaggagatcagctggagctgagtctaggcttcccagaaagagacatgtgttttgcaaatattttctcccagtctgtgacttgtcttttcatttttaaatagtgtttttcat

SEQ ID NO: 479235 - DNA, 1514 bp, Homo sapiens
tgcttcagtgtgccctggatataagactatgaactcagactttggggttaatgctgaaattgaagaactccctttagcatttcttgtaggacaggcagacgagcctctccctgtgggcaccaccactaccgacccatggagggttctgccaggccactgcttatgttcacataaagcccaagggctctttggtcaggttgtggtgaatgctgccaggcctgagactcatcctttagggcagtgggctttcctctggtccagggaaggcccagaaatgctgttcaagtccaagagcctaggcctggacagagggaccccaagagcctgcttggcgctctaccccactgtggctgagttggtacctaaggagcagcagcagaattgtcaggacaaatctgaggaactaaagcaagatacggaaatctgcgaaagaataaagggcaagagagcaaggaggaaaagaaaaagtgcaggacctcctgatgttctagactcacctgcaccatgggtcatggtaggggaaaggagaaacaagagaaggcctttgacagaacatttccctgaaaagatctctcccaaggagaaacaagtagccacttgactatagatgaaggtatgcattggtaaagaaaatatgggggctactgagaaggctaccaagtatatttttagagtaaaccattgtcctaagtactatttttaagaccattagttaatataatttatgctcaaatatcatactaaatactttcatcactgataaagtacagctttcattagttatgaaattcctacactctgaacctgattcttggcacagagaatgataacatatttgtttgctagggctgccatagcaaagtaccacaaactgggtggtttaaacaccagaaatttattttctcacagttctggaatctagaagtctgagatcaagataaagatgttacagtgatctttgtaaagctgagcccatggatagactgtcatttaaaagtacaattacattgccttaaagataggatacttcctgattgttagtagggacattttaatataaaaatatagctataaatataagatcaattacctacatcattcattcagataacaaatatttatcgatcattgtttatgtgccaagcactgctcaggtgttagggatacatcagagaacaaatcaaagattcatgccttcttggatctcacaatttttatgctcagaatatgtttactgtttgaaaatgaaaaaatataattactaagcatcttgttcttgagaaaattttaatctattaagctagccaacaaaacagtaggctgatatttgccatggatataattattgtatatacatacatattgtttgtttaatttatttaattatattgtaaggacttagagtatcaagatctatgtcaactgctatttaagacatagacctgccttaaatggcttacattttaaaatgaaagctgtgttgtcaaagtaatactgctgaatggtacagaata

SEQ ID NO: 479236 - DNA, 850 bp, Homo sapiens
gcatcttgatggtagtgctgacgacagcagcagcccttttgtttttagacctaattccttttccccaggaatgagtcacttctccagcagaacatgtgaaggaaacgccaccaactgccattcttgtgaaggaggccacgtcctgcaccacggagtgtgccaggaaaactgccccgagaggcacgtggctgtgaagggggagcttcccacaggagagcaaggctctgctgagccaccagttgggggccgattatctgagggtggatggcaaagagctgtgggaaccagtctccctaccattcctgaaaggtatgtctctgtgcctgtcatcagagaaactgaggagtgcacgcctgagttcttcctgcacgatgatatgtgccaccagtcctgtccccgtggcttctatgcagactcgcgccactgtgtcccctgccataaagactgtctggagtgcagtggccccaaagccgacgactgcgagctctgtcttgagagttcctgggtcctctatgatggactgtgcttggaggagtgtccagcaggaacctattatgaaaaggagactaaggagtgcagagaaacacaaggactttggatccattccaatcacccagattatcctgtaatagatagtacagacacctctaaaagtcccatacctttcctgaagcactggagcagaagcagcaaggcagttgctaaggtcctgggctcaactcctgatactacttagcgcactatgtattcaaaaataaatgcaaaagggacctttatttgtcaacagacaattaaatacattccaacaattgctgtattcgtgataagctcaaggtactccggagagaca

SEQ ID NO: 479237 - DNA, 652 bp, Homo sapiens
tctctggcttggaaaagtaggcatacacttctctgcaccctatcccaacccactgttattagcaatgaatctaatgagtaaggtaaagaggctaaagtcactcagcttatattacgcagacaactccactggccggtgtgagaggtgcaacaggagctgcaaggggtgccagggcccacggcccacagactgcctgtcttgcgatagatttttctttctgctccgctccaaaggagagtgtcatcgctcctgcccagaccattactatgtagagcaaagcacacagacctgtgagagatgccatccgacttgtgatcaatgcaaagtatctagtatcacaccttttgaagcagccagcaggtcaccccaactctcaatcttgcccccacaccaggtcatctggtatactaatgccagaactgaggcccatgaagagaccccagaagttgctctgcatttgttgaattcatcccatggggttcagtctgaaggagagcagatggtgaactgctctgagttttaaagaaatgacaaaatgcctatcttttaggtcccagagctcctgcagaaccttagaagcaatgatagatgtagggtgttaaactttaaaataatagaaagccttctggaaatcaacaaactgccttttgct

SEQ ID NO: 479238 - DNA, 1009 bp, Homo sapiens
tcccacagtgcagcgacgggctgaagggctcctcaagtgccgccaaagtgggagcccaggcagaggaggcgccaagagcaagcgagcgctgtgaggactgccagcacgctgtcacctctcagtaacaattgttatcactgggtgcctggagcaaaaatgtgtccagaattggtgggttgttggtctcgctgacctcaagaacggagccgtggaccctcgcggtaagtgttgtgtcccgagtttgttccttctgatgttcagatgtgtccagagtttcttccttctggggggttgctggtcttgctgacttcaggagtgaagctgcagaccttcgcagtgagtgggcggcgcatctggagttgttcccagagggaaaagttctccaggtctccacccaacccaaaagcccagctggcttcacctctcaatggcactggccgccaggacttttgggcacctaccccgggcattccggcaacccagagggagctcgtacctggatcaagcccagcaggcgccgagtgtgggacccgctcccagcccgcgcccacctggaacccgtgctggcccactagcgccacagccccagctgccgccctcgcctctgcctccacacctccctgtgagcagagggagccggctcccgcctcggccagccccagagaggggcccccacagcacagctgcgggctgaagggctcctggagtgtggccagagcagatgctgaggccaaggaggcaccgggagtgagcaagggctgctagcacgttgtcacctctcaaaaccacttgagctttaccatccaacataatatcctttcgttatctcctcactatagttctagaactatcatttgcacattttatgttagatatgatggatcaaaattgtttaccagaacttaaatggtaaaaagaggccatattaattacatactgcattgacaatattgatgatgctttgtttcagatatactatatatcgatgttaactgcttttgaaatattt

SEQ ID NO: 479239 - DNA, 549 bp, Homo sapiens
ccaccacgattgtaagttacccgagccctctccagctatgcttcctataccacctgtggaacctgagtgaatgcgcagacctgggcctcctggctgggaggaaaagggttttggagagccatggggtagtatagggtactccatccaccaagcaataatgacaaatttggaggctgaagagaggggactgaagacaaacagcttgcttctgaatgttgccaaaggctgccctgtccagaatggcagtcattggtctcagcaagcacagtggttctctgatgctactggggcagcagtcaacagctcaggctttccttggcacatccacgaccataaaggtgaaataaaccttgagcccataaagagtttgctgataattaaagaagctcaagaaggagccaccaagacacaacaagcgtggcaggaagcggaagctcaggacctcgtcttcatctttggggctgtatgtttcattgtccaccagaaagacctcttccagtccctccgctgaagaaacttttgctcgaataaatatttctatccagtttc

SEQ ID NO: 479240 - DNA, 531 bp, Homo sapiens
agttaagaagcagtaagattcgtatgcagtatatacgaaagaaaaagcagataattgataaaacctgttcattgaaagacagaagagttgattctagtgcacagatggagagattagcaataaacaggaaggatgatgcctcttctctaagagaggttgaggaaatagccacagatgcaaggaatgaggagtcagatgtgaaaaacagtgaagagggctatgaagaaaggagatcatacggctatttgttcctacagcacaccctcatttgtcatcgccgatacacatctttaacccctcaaaagttaaagatcactttaaccctaatgaatgaagtcctaacagaagacgaattccaggaagaatttcttcttctcttcataccgatgagagccatatactatattgaattctgccttagtattccaattacctctgagtaacatttctccctatggtagcatatgacacattgctcttttttccttcgtaagtcacacacaatcactcatgaaggaaaaaattgtgcac

SEQ ID NO: 479241 - DNA, 555 bp, Homo sapiens
tctggagcctgctgactgaggttcagatgtgcccagcagcgtctacaggaatggcgttggggctttaacatatgggcaagaaaggctctcttcctcagctttctgttcaagagaaccagccaccaggcttattaatacatcttccaggactggattccaggaccggactccaggacgtttctctggaagaactgaatggtcccaaagaatacatctataggctcaggcatttaggacccccccaggtttcacccacctgcacagagattccagtcagcatgttagtgcctcactctgaaatatcaatgcacagccacaaaccactagacttaggccactcttccatagggctgctgtggtttgctgggggtccactccagatccgagtcacctcagtccctccctggacgtatcaccagcgaaggctacgaaacagcaaagatggcagcctgctccttcctctgggggctccatcccagggggcaccaacctgatgccagcctgaacgttcctacaggaggtgtctggagacccctgttaggaggtctcacccag

SEQ ID NO: 479242 - DNA, 1792 bp, Homo sapiens
agcgagtcatgtcaagattctgtgtgcctgcaggcttaataccacatggaagctgccaaggcttatggcttgcacattttggagctggagcagaagcttgagctgtacctgggcccctttgagccacagcaggagctggagctagagcagctgggatgtggggagcagtgtcccaaggctgcacaaggcagcagggccctgagcttggcccacaaaaccgttcttccctccttggcatctgggcccatgctgggagggcctgctgtgaagccctcaaacacttccaacctctacccattacccagttccaaagctgcttccaaattttcagcaatgtccaattgctttacagacgagaagctgatgtccagagagactggcttgcccaatatcatggaatatgtctgtctatacattatttctgtggacaataaggaaaagattccaactttggaaaactagaatataatgagtttggaataaaaaagtaaagccctattcacggccattgtgttattatgtatgatataattttcacaatcaaaaaataccatttggatattcatgctatcatggttgtttggtactttgactgctgccgctgtttcagctcagacaagagtgtgatttcatcctgaggtcaaatcccatgcaagcacgatttatcgaagcaaaatttcatctcacaaaagcgtaatgcattctgccaaacctgttcatgccaatgcaggtcatttaatatataattggctgcagctggcactcacacaagctgtgacattttctatcagcaacagggtagtatttggaatgccaaagaaacaattacatgctgcagatgagagcctgaagtggaaaaagaggaaatgcagtattaaagaaaccagcccttttccatttcaaagagctctcctccttacctgttgtgtagcctgactgttcatttatcacttttcttgcttcctaggttatctagattttagtttacattgaacaaaactttgaagcatgaagtacagaaataattgttctgtagacttaattgcctctaataaattgaccctttattgggtccattttccttttcccctcaaagacatttagttattccataattgctgttgacataacaaaaactttcaaaaatatttatattgctactctccaaaagatagtaataaaacaagagttcactttcatgatatgtagaagttcttcctagtaacttttccccatatatatttcattatttgcatctccaagtgattaaaaggatgcagtacattttaaaggatagatttggacaaatgtggacgttattcagaaaataataatataattgtttatcattttgtgcacatcctcaagttattgtacctttacttagaaatataacaaatatttgtagtttttttattaagaacagccattggaatcaagattaaataaataatttttgtttggtaatatatattaaattttatgttttgttactaaggaacagtttaagacttttgccccatttcacatattcagactttcatgatcaccctttcaaaatgataagtcaggtctaaaatggattaaccttcctgtttctcagtgtgagaagtaatgagtgaggcaaatgtaaattacttttattgtttttattggcacaagtcaaagaaaatgcatcaaaaagaacatcaactctgaaggagtaagttggtttcctatttcagccaatacttgctgccatctgctggcctaaacggaaagctgcaaggaatggacagctgtgtagagggag

SEQ ID NO: 479243 - DNA, 642 bp, Homo sapiens
gaagcctaacagccgccttgcgattgtgtccgcactgacaccttggcctgtatcctggacctttgagttcaatgtgttctctaaaatgttttcaatccttcttccccgtcacttctactccccatcccacccattggctctagtttggtagattcagtgggtacatgtgcacgttagttacatgggtatattttgtgatgctgagcaatctaatcaattgcctctcaacatctaatcaattgcctctctacctcacctccccacctcatctagcaattatggacttttcctttaaacagcatcctgaatttattttggaaccactgcatgcagcttttgcactgagcaactctggggatgtaatacacattttagttttgagggttcctcagttgtctcttgctatgtcatatgtggcttctcagggcctagatcaggggaggccacatgatcctaaaattgtaccaccaaactgttcaggaccaattctcaacagcagggaagtttggcagtgggtctcaaacgcccctcaggggatattcggcaacacctggagacatttttggtttttacaactagggaagagagtgctgctggcatttaaggagtagaggccagggttgttgctaaacatcctacaac

SEQ ID NO: 479244 - DNA, 765 bp, Homo sapiens
actaatgtcagggcaaccagtgcagatgccctgcccagagaggaggaatctagagagacagtctggctactgcagctttgccatgctgcggtgggctccgcccagttcgaacttcctgtaggctttgtttacactgtgaggggaaaaccgcctactcaaacctcagtaatggtgaacgctcctccccgcaccaagctcaagcatcccaggttgacttcagactgctgtgctggcagtgataatgttgtgaagaaacaattgtgtatgtcagtgcatatctctgcaaaaggcaatatgctacaagctgcagagtattcaaggatgtttgctgccttgatgaccttcgaatcttgtaatggagaagagataatacaaaaacaaaacacaaagcagagggaggagctcacactctgggatggatcaggtggcagtagtgccatgtcggtgccctgtccatgttccctcaagcttaactcttcagtgcatgcagacccaacttcctactgccagcatcttcatttctttgcctgggaaatttctctggccatgattgtatacagttgtattcctcaaaatattccagtgtacttctcttgaaggtggatgggctctgtgactattttgagcaacggcatatacaacagtgagtccatgtattatttggtcccaggctggaaagcgttagcagcccatatttcccattttggggaacatttgctcttagagtctagccaccatattgtaaaaagcccaagcagtagcatc

SEQ ID NO: 479245 - DNA, 2275 bp, Homo sapiens
tgtggattcctcaagctcagtgggattcacagaccatctgggcagatgctttcgtttcagagactgggaaactgaggccctgtgtggcatttaacttgcccagagaagcagccccttgaaaggaaaggaaaggccagctagaccttgggccctggtgacccgccacactaaagcagccagcagctgcagcctcacatccaagccctcgcccagagccctggccccagaatctccctccccgctcgcactcaggggcagctctcccttcaaggatgctcctgctcagatgctctctggggagaagccaggaggacacgcggcctggaagcattcccagggccccccacagactgcagcggaccacgcccagcctcagtgaacagaaaatgggaactaggaacgctggctgcagtgccaggagggggacagagggccccaggactccaggccagagcaatcagagagatgcttcttgaagctggaaggaagaagccaatgtgccacctaccgctgcgcccactggggctgaccactgagcatgggcatcgccagctactgctgtgcccactggggctgaccactgagcgggggcatcaccacctaccgctgcgcccactgaggctgaccactgagtgggggcatcgccagctactgctgtgcccactggggctgaccactgagcgggggcatcaccacctaccgctgcgcccactggggctgaccactgagcacgggcatcgccagctactgctgtgcccactgaggctgaccactgagtgggggcatcaccacctaccgctgcgcccactgaggctgaccactgagtgggggcatcgccagctactgctgtgcccactggggctgaccactgagcgggggcatcaccacctaccgctgcgcccactgaggctgaccactgagcacgggcatcgccagctactgctgtgcccactgaggctgaccactgagtgggggcatcaccacctaccgctgcgcccactggggctgaccactgagcacgggcatcgccagctaccgctgcgcccactggggctgaccactgagcacgggcatcaccacctaccgctgcgcccactgaggctgaccactgagtgggggcatcaccagctactgctgtgcccactggggctgaccactgagcacgggcatcaccacctaccgctgcgcccactgaggctgaccactgagcacgggcatcgccagctactgctgtgcccactgaggctgaccactgagcacgggcatcgccagctaccgctgcgcccactggggctgaccactgagcacgggcatcaccacctaccgctgcgcccactggggctgaccactgagcacgggcatcaccacctaccgctgcgcccactggggctgaccactgagtgggggcatcaccacctaccgctgcgcccactgaggctgaccactgagtgggggcatcgccagctactgctgtgcccactggggctgaccactgagcgggggcatcaccacctaccgctgcgcccactggggctgaccactgagtgggggcatcaccacctaccgctgcgcccactgaggctgaccactgagcgggggcatcgccagctactgctgtgcccactggggctgaccactgagcgggggcatcaccacctaccgctgcgcccactggggctgaccactgaccacgggcatcaccacctaccgctgcgcccactggggctgaccactgagcacgggcatcaccacctaccgctgcgcccactggggctgaccactgagcacgggcatcaccacctaccgctgcgcccactggggctgaccactgaccacgggcatcgccagctaccgctgcgcccactggggctgaccactgagtgggggcatcaccacctaccgctgcgcccactggggctgaccactgagcacgggcatcgccggcatgcggccaccttcctggacacccagcagtgctgccccctgcagccagcacaggctgacccaagcctcgccttccacaccctgcacaactcctcctgctgggatagtgccccggtcttcagcaaactcctccttgggtgctgaggcccagctgtcacctcttctgaggaggcccggctgtcacctcttctgagaagctttccttgctttctgacccagcactccgccagccccactctgctcccacagccaaccatcttgtgcatgtcactcttctgtgtacaaacctgcctctggaccccaggctgggagccccccagtgcaggcatct

SEQ ID NO: 479246 - DNA, 837 bp, Homo sapiens
tgctggggccgagttatggccgagcgtgaagggtcaggggacaaagggacagactcgttcaggagtgtgtatgtgtacgtgtgtgcatcgtgtgtacatgtacatcgtgtgcatgtgtgcattgtgtgtgcacgtgtgcatcgtgtgtgagtgtgcatgtgtgggtcgcgtgtacatgtacatcgtgtgtgtgtgcgttgtgtgtgcacgtgtgcgtgtggcagatggggcaaaggatcggtcatttctgcactttttggagaaaccgcccttgaagattctgattggcatccctggcatagaagcctccggagtggggcaccaggaagcgcgcaccacccctgacaaggactttggtttcttcttctcgctggtgtatgcatttgccgtcctgagcctgctcactcatcgaattccacgtggtcgtctgggagtgattccgggtgcttcctggtttgaatttcacgggaccctggaggacatgaactcagaaataagaggattttaagtttcttggtcaacatgattttataagcttttagggatagatgaagtagttcaacatttacttaaatatttaatttgctcaatcgtttacatctttaaaaacatgaaaataacatgttcttaacagtgggggaaataaataccccaggagggatgggcccagcccagtgcctacagacctaggtagagtcaccaggccgggccggcaggagcccctcagggcagctccgggcccttgctggagggcaggagaggcccctgcggctcagggccagcctccccatgtgggctctctggcaaggtagttggacttttttatgtggcacccac

SEQ ID NO: 479247 - DNA, 2936 bp, Homo sapiens
tgaatgagagaaaaatatatgtatcgcagtcccgaggccgcagtgtttcgcagtcccgaggccgcagtgtatcgcagtcccgaggccgcagtgtttcgcagtcccgaggccgcagtgtatcgcagtcccgaggccgcagtgtttcgcagtcccgaggccgcagtgtatcgcagtcccgaggccgcagtgtatcgcagtcccgaggccgcagtgtttcacagtcccgaggccgcagtgtttcactgtcccgaggccgcagtgtatcgcagtcccgaggccgcagtgtatcgcagtcccgaggccgcagtgtttcactgtcccgaggccgcagtgtatcacagtcccgaggccgcagtgtatcacagtcccgaggcctcggtgtttcacagtcccggggccgcggtgtttcacagtcccggggccgcggtgtatcacagtcccggggccgcggtgtatcacagtcccggggccgcggtgtatcacagtcccggggccgcggtgtatcacagtcccggggccgcggtgtatcacagtcccggggccgcggtgtttcacagtcccggggccgcggtgtttcacagtcccggggccgcggtgtttcacagtcccggggccgcggtgtttcacagtcccggggccgcggtgtatcacagtcccggggccgcggtgtatcacagtcccggggccgcggtgtttcgcagtcccggggccgcggtgtttcgcagtcccggggccgcggtgtatcgcagtcccgaggccgcggtgtttcgcagtcccgaggccgcagtgtatcgcagtcccgaggccgcagtgtatcgcagtcccgaggccgcagtgtttcactgtcccgaggccgcagtgtatcacagtcccgaggccgcagtgtatcacagtcccgaggcctcggtgtttcacagtcccggggccgcggtgtttcacagtcccggggccgcggtgtatcacagtcccggggccgcggtgtttcacagtcccggggccgcggtgtatcacagtcccggggccgcggtgtatcacagtcccggggccgcggtgtttcacagtcccggggccgcggtgtatcacagtcccggggccgcggtgtttcacagtcccggggccgcggtgtatcacagtcccggggccgcggtgtttcacagtcccggggccgcggtgtatcgcagtcccggggccgcggtgtttcgcagtcccggggccgcggtgtatcgcagtcccggggccgcggtgtttcgcagtcccggggccgcggtgtatcgcagtcccggggccgcggtgtttcgcagtcccggggccgcggtgtatcgcagtcccggggccgcggtgtatcgcagtcccggggccgcggtgtatcgcagtcccggggccgcggtgtatcgcagtcccggggccgcggtgtatcgcagtcccggggccgcggtgtatcgcagtcccggggccgcggtgtatcgcagtcccggggccgcggtgtttcgcagtcccggggccgcggtgtatcgcagtcccggggccgcggtgtttcgcagtcccggggccgcggtgtatcgcagtcccggggccgcggtgtatcgcagtcccggggccgcggtgtatcgcagtcccggggccgcggtgtttcgcagtcccggggccgcggtgtatcgcagtcccggggccgcggtgtatcgcagtcccggggccgcggtgtatcgcagtcccggggccgcggtgtatcgcagtcgcggggccgcggtgtatcgcagtcgcggggccgcggtgtatcgcagtcgcggggccgcggtgtatcgcagtcccggggccgcggtgtatcgcagtcgcgaggccgcggtgtttcgcagtcccgaggccgcggtgtatcgcagtcccgaggccgcggtgtatcgcagccgcggtgtagccgcggtgtatcgcagtcccggggccgcggtgtatcgcagtcccggggccgcggtgtatcgcagtcccggggccgcggtgtatcgcagtcgcggggccgcggtgtatcgcagtcgcggggccgcggtgtatcgcagtcgcggggccgcggtgtatcgcagtcccggggccgcggtgtatcgcagtcgcgaggccgcggtgtttcgcagtcccgaggccgcggtgtatcgcagtcccgaggccgcggtgtatcgcagtcccgaggccgcggtgtttcactgtcccgaggccgcggtgtatcacagtcccgaggccgcggtgtatcacagtcccgaggcctcggtgtttcacagtcccgaggccgcggtgtatcacagtcccgaggccgcggtgtttcacagtcccggggccgcggtgtttcacagtcccggggccgcggtgtttcacagtcccggggccgcggtgtatcgcagtcccggggccgcggtgtatcgcagtcccggggccgcggtgtatcgcagtcccggggccgcggtgtatcgcagtcccggggccgcgtcccggggccgcggtcccggggccgcggtgtttctcagtcccggggccgcggtgtatcgcagtcccggggccgcggtgtatcgcagtcccggggccgcggtgtatcgcagtcccggggccgcggtgtatcgcagtcccggggccgcggtgtatcgcagtcccggggccgcggtgtatcgcagtcccggggccgcggtgtttcgcagtcccggggccgcggtgtttcgcagtcccggggccgcggtgtatcgcagtcccggggccgcggtgtttcgcagtcccggggccgcggtgtatcgcagtcccggggccgcggtgtttcgcagtcccggggccgcggtgtatcgcagtcccggggccgcggtgtttcgcagtcccggggccgcggtgtatcgcagtcccggggccgcgtcactgcaaccatgatcaatctctggttgtcaactcaaacctcagtttctcctgga

SEQ ID NO: 479248 - DNA, 571 bp, Homo sapiens
atgtggtttgtttgtatggggcctgtgtatttagggacagcacagatagaggcaagaaggaatcagaatggaacctacaaacgtggaggggaaggagccacagcccctagagccaccacatgtgcagacccaagttggaatggatctcggagctggcgctctggagtgggccctaatccaatgacggaatccttagaagaaaagggaaatttagacacaggagagcacccatgggaagacagagacacacagggagatccccatttgatgacacagacaaaagttgtcacaatgcagctgcaagccaaggaatgccaagaattgatggccaccaccaggagccaggaattctgttatggcaacaccgaatggatgaaggcagaaacgaatgcaacagccatggcagattatctgggggagcctcttacatccagctctccctcccctcctctccactaccactttgtgctgccctaagtactctggtcacccacatgtaatagacatcctctcccctgcacatggctttgctttggggagaggtatggaagctgatctcaagcttgatagc

SEQ ID NO: 479249 - DNA, 504 bp, Homo sapiens
gtggccaaagtagagcttgggccatgacttcagagggtggaagcctcaggctttggcagcttccacgtggtgttgagcctgtgaatgcgcagaagtcaagaactgaggtttgggaacctccacctagatttcagaagacgtatgaaaatgcttggatgtccaggcagaaatttgctgtagggcagggtccttatggagaacttctgctagggcagtgcagaagggaaatatggggtgggaaccccatacagagttttccaggggaatgtttccagcttttgcccattcagtatgatgttggctataggattgccatagatggctcttattattttgagattctggatatctggatattagatgtttttcagatgtataacttgcaaatatattctcaacttctggacatagatggagctggtggctattattcttagtaaactaacacaggaacagaacaccaaatactgcatgttctcacttagggctgaggctttgtgtagg

SEQ ID NO: 479250 - DNA, 571 bp, Homo sapiens
tgcccaattctgctctggctaaactggtatccaagatgcaagacaaagtccttcccactctttcctcttctcttctggagtgtagagtcggggtctattttggagtcaagagttgtacatcctggagttatgggagagccagccccttctcatccttcaggtctcagtttactgctagttactcagaaaatgtatccctgaccaccagatttaaagaggtatctatggatgaaaaccagctgcagctgaggcacgtgggtacatgcaataacacaatggtggacaaaagccccatttttgacagaagtggctgtgggggcttccagtggaatacactgtgtgatctggatattccaatcagacaggcacctttgtccatctgcagaaatgctaacattctgtgtaaagaggcagtaagactctctacccttcatgcaagcctgagcccagaggacacttctcccatgaagatgcagttacctcaaagtgcccccagaaaggcagtcaacaggtgcaacaatgctgatctcccatggggaagccccagctgtgactgcagtggtaagtgaga

SEQ ID NO: 479251 - DNA, 625 bp, Homo sapiens
cactcgtaagtgggatttgaacaatgagaacacgtggacacagggaagggaacatcacacaccagggcctgttgggggttggggagctaggtggtctgccaaggcttcccttggctaggaaagggaaatgccccggccccttgtgcttccagggtgaaaagatgccccgccctgcttcagctagccctccgtgggctgcacccactgtccaaccagtcccagtgagacgaaccaggtgcctcagttggaaatgcagaaatcacccatcttctgtgtcgatcacactgggagctgcagaccggagctgttcgtattcggccatcttggaagagtctgccccaaggataaactttaaatgccttctcaattggaggtctaaaccttccgttctgccttctaaatccaattctaccaattatgagttcctgtttggggtgaaaagttttggaataaatggtaatgatggtttcacagtgttatgaaggtaattagtgccactgaactgtacattgaaatatggttaaaatggttttatcttcaagatggtttattgggggttttattaatgtgcctcatccacttagagtaaaatagagtgtgaagattcacactgtaaactttcatc

SEQ ID NO: 479252 - DNA, 581 bp, Homo sapiens
ccccagggctgcagtgtgcagctctggactgccaagtcaagatctagagtcagcactcaaaaacactttgctattatgaccccctgtgaagccaagaaagataactcagcaacaaataaggatgctgcacaaagctgtggtcctctgaaaatatcgagaaaagaagtcaatagactgtactcgaattacaccacagtgaaaggaacatcagtccacacagatgagaaaaaacagtgcaataactctggcaacccaaaaagccagagtgtcttgttccttccagataatcgcactacttcctcagcaagggttcttaccaaggctgacatggctgaaatgtcagaaatagaactgagaatatggagaggaatgaagagatcactgacattcaggagaaaaaagaaacaaactgatcagatacagctgaaaaacacactaaaagaatttcataataaaatcacaaatattaacagcagattacaacaagctgagaaaagaattgcagagcttgaagactggttttctgaactaactcagtcagacaaaggtaaagaaaaaagaattaaaaatgattaacaaaa

SEQ ID NO: 479253 - DNA, 745 bp, Homo sapiens
cagggccatttcattaatgagagtatgacagagacctggaagaaggtccacagacaccagatccagaagagccattggtgcagttccagtccaaaggctggcaagcagagaccctggagggttgatgtgcaggtctgctgcagttttctggaagtccgctccagaccctgttcacctggctatcaccagcggaagctgcagaacagcaaagatttctgcctgctccttcctctggaagcttcatcccagaggggcaccggcctgatgccagccggagctctcctgtatgagacattccaaaaaattgaggagaaaggactcttccctaactcattctatgaagccagcatcagcctgatgccaaaatctgagagagatgcaataacgaaaaaagaaaacttcaggccaatatccctgatgaacatagatgcaaattgcaaaaatcttcaacaaaatactagcaaaccaaatacaacagcaaaccaaaaagctaatccaatgtgatcaaatagtctttattcctgggatgcaaagctggttcatcatacacaaatcaagaaatgtgtattcttagcaaactatcgcaaggacagaaaaccaaacaccgtatgttctcactcatagatgggaattgaacagtgagaacacttggacacaggaaggggaacatcacacaccggggtctgtcgtcgggtggggggaggggggagggatagcattaggagatatacctaatgtaaatgac

SEQ ID NO: 479254 - DNA, 1022 bp, Homo sapiens
tgacaggacccgggatgtgatgttccctgccctgtgattgtcttggcaatgcggactctcttttggttctatatgaactttaaagtagttttttccaattctgtgaagaaagtcattgctgcaggtctgttggaatttactggaggtccactccagaccctgtttgcctgggtatcacagcgaaggctgcagaacagcaaatattgctgcctgatccttcctctggaagcttcctatgccctgcccacagatgtggagactacagaggcagctggccttgctctgctgtggtgggctctgcccagttcaagcttccctggtcgctttgtttacctactcaagactcagcattggtggatgcccctgcccctgccaggctgctgcctcgcaggtactgtctgtcatggcttcccttggctaggaaagggaaataccccgactccttgtgcattctgggtgaggcgatgccccaccctgcttcggctcaccctccatgggctgcacccactgcccaaccagtcccaatgagatgaaccaggtctttgaggaattgccacactgtcttccagaatgattgactaatttatccttctaccaatagtgcataagcattcctttttctctgcaatttagccagcatctgttatttatcaactttttaatagctattctaactgcttagtctattctgctgttaatacttataattacattgtaaacttattatcatgtgtttttcagctctatccgatcagttttgttctttcttaaaatggccatattatcttttatctcttgtatcatattttttttttttgatttgttgaattgtgtttcaactttctcttgaatgttgatggtcttctttcctatctatgttctgaattcaatttttgatatttcatccattttaccctagtcaagaactattgctggataactagtgtggtcccttggtggtaatcagacactctggcttttagagttgtcaacattcttgcattggttaattctcatctttg

SEQ ID NO: 479255 - DNA, 976 bp, Homo sapiens
tcctcctgaaacttttctaaaaaattttaaccagcaatgggtccaaaccaagaagaaatccctgatttacctgaaaaagaattcagaaggttcaatattaaactaactggggaggccccagcgaaaggcccctctgctgcaggtctgctggggtttgctggaggtccaatccagaccctgtttgcctgggtatcaccagcagaggctgcagagaagcaaagatggctgcctgttccttcctctggaagcttcgtcccagaggggcactcaccagatgccagccagagctcttctgtggagccacttgaggaggcattctgtttcttagcagaacttgagcactgtactgggagatctgctgctctcttcagagccagcaggcaggaatgtttgagtctgctggagctgtacccacaaccgccccttcccccaggtgctctgtcccagagagatgggagttttatctataagccactgactggggctgctgcgtttctttcagagatgccctgcccagagcagaggaatctagagaggcattctggatacaggggctttgtgaagctgcgctcgccctccgtgggctgcacccactgtctaaccagtcccagtgagatgagccaggtacctcagttggaaatgcagaaatctcctgcctgcattgatctcctggaaactgaacaccaaagctgttcctattcgaatatcttgccagacaccagcagtaaagaatcttaagagctgtgagacaaaagcaccagaaaaataaattatttttatgcttgaccattttacataagcccatattttttgatactttgttcatttcttttgattattttcatatgcattttctgatcgtgttaattcaaaagccctatcttcaagctattgttaaagctttccaatgcattttgtaattctctaaatgtatcttttatttccagaagttctgattagtttttatttaagatat

SEQ ID NO: 479256 - DNA, 658 bp, Homo sapiens
aacagattatgtcatctgcaaatggctaaagtctcctctgggattaagtggaacctaggggtttgggcatgcctggctctgctccactacagatactccctcaccaaacctgtcagctggtttgctgctcctaccactgctctaagcagctgcccttgtcaattcaagtgcttgtggtggtcaagaggtcacctactggaatctcagaggcccatgatttgccacctgtgccctctggaagggcagccaaagtggcccacattgtacctagacacagtggaatcacaccttgaattgctgaggcggtatgctccagaatatgagcagcaaaaacttgaggcagtgccaggcagtgagtgctccggttctgagaacattgaaggttactcttttggtaatagttatgtccctcatttctttatactatttacttgtgatggaagtggaaattccaatgatcttggaaatgacatcagtttcatttttctgttctcttaatgaacggcaccagtcttccatccatccatattaatcttcttgtaaaataatctcttggccaaacttttggtgttctgtcacggacatgcttttttctttattctgtacaacttgagcagactagacattttccaaatgtttaagtgttgacatcttttca

SEQ ID NO: 479257 - DNA, 1147 bp, Homo sapiens
aggagtacagaagcccaacggatagtagagaggaagcagagtggtttacagtcctggacgttaaggatgcctttttctgcatccctgtacatcctgactctcaattcttgtttgcctttgaagatccttcaaacccaacgtctcaactcacctggactgttttaccccaaggggctaaaattatccaaaggcaccacggccctcagtgaggaatgtatccagcctaaactggcttatcctcatcccagaaccctaaagcaactaagagcattccttggcataacaggcttctgccaaatgtggattcccaggtacagcaaaatagccaggccattatatacactaattaaggaaactcagaaagccaatacccatttagtaagatggacacctgaagcagaagcagctttccataccctaaagaaggccctaacccaagccccagtgttaagcttgccaacagggcaagacttttctttatatgtcacagaagaaaaaggaatagctctaggagtccttatacaggtccgagggacgagcttgcaacctgtggcatacctgaataaagaaaatgatgtagtagcaaagggagatcttactctgtggacatctcatgatgtgaacagcatactcactgctaaaggagacttgtggatgtcagacaaccgtttacttaaatatcaggctctattacttgaagggccagtgctgcaactgcgcacttgtgcaactcttaacccagccacatttcttccagacaatgaagaaaagaaagaacataactgtcaacaagtgcatgactacaaaccctacgcagaaactctacaggataggaccctagaaaacaatactgaatctggcactggtaaaaagacaagtagcgaataaaaataaaacaatgacaacacaaaaccattagcaggaaaataaacagatgcaactttaatgtttatagtttattgtaagctaatttggttctgtgtgctttcacgggtaaagactgtatgagttccttggttatatagagtctttgcatggtgacattctcagatgctgtgtgcacttacttatctactttttccccagtggcctgaagtctgaactgtccaacatagtaaataaaacattggggggaaataaataaata

SEQ ID NO: 479258 - DNA, 480 bp, Homo sapiens
ggaaaaagcaaggtgtagaatatcatgtacagtatgctagtatatatcaaaaagagttcaattgctggctgtgatgaaaaggagtggactggtccccagatcaccagcagaaatctcaggatggaacaggcagaacacttaagcagaaggagtctgtgggaagatcacaggggcagaagcagtggtagtgacaactgccaaaagcttgttgctgcctccgggaattggtctctcagaggaactgttctgtggccatcgtgtccaagtgggagtggggcagctgcactgtgggccagaaggtggcaagcccccatttggcagggggcagccgaggtggggagttgtggagcatgcagcctgcccactactattcgatatctcagctgtggcatctgtgctggaggcatgcgaaagtgctcccacctccttgttctctccctggcctggcaacagcaggggataggacagtgacagtggcaa

SEQ ID NO: 479259 - DNA, 539 bp, Homo sapiens
agtcttaaaatggcctataaagccatatatgatctgactattatctatctgattccatctgctcttctactcttcattcactctgcttcagacacattgtactactgtgtaaatgacacatgcttgcataagctccccttttttgctctttttcttcctgctgtgctgaatatccatatgactaggttcttatcttccttcagcagagagaaaaccatttttctttcaggtatttacttagatgtcaccttcacagctattcagaaaggcaataaggaagctgcaagaatacatgctgaaaatgcaatccaccagaaaaatcaagcaattgatttcttaagaatgagtgctagagttggtgctgtggcagtcagaggtcaaaatgcagtaacaatgggcagggtaacaagtccatgtgaggcatagttaagtctgtgggtgcttcattgaggagtagaaccttgaaaaaaaagaattatgttcagacagcatcttttcagtgtaaagaagaaaaatgcctatattaacattcatatggt

SEQ ID NO: 479260 - DNA, 2435 bp, Homo sapiens
cactaggctccttgctacttctgaaaatttctgcagccggcctgaatttcttctcaaaaaacaggcttttcttttccactgcatttgatctactgacttcacaatgtctgaaatcagattcaccaatctcacttgggatcaagttataacactggatcaagtgttagatgaagtaattccaattcatggaaaggggaatttccccacaatggaggtaaaaccaaaagacatcattcatgttgtgaaagatcaactcatagggcaaggaattattgttaaagatgccagattgaatggttccgtagcaagttacatacttgcaagccacaatggaatcagctataaggatctggacgttatttttggtgttgagcttccaggtaacgaagaatttcaggttgttaaagatgcagttctagactgtctacttgactttttaccaaaagatgtaaagaaggaaaagctctccccagatatcatgaaagacgcttacgtacagaaattggtcaaggtttgcaatgggcatgattgttggagtcttatctccctttcaaataacactgggaagaatttagaactaaaatttgtgagttcactcagacggcagtttgaatttagtgtagattcctttcaaattgttttggatcccatgttagacttctacagtgacaaaaatgccaagctaaccaaagaatcctatcctgttgtggtagctgaaagcatgtatggagacttccaggaagcaatgacacatttgcaacacaagctcatatgtaccaggaaacctgaagagattagaggtggtggccttctgaagtactgcagcttgctggttcatggcttcaagccagcctgtatgtcagaaatcaaaaacctagaacgttatatgtgctctagattctttattgattttcctcatatagaagaacagcaaaagaaaattgaatcatacctccacaaccatttcataggtgaaggaatgaccaagtatgactaccttatgaccttgcatggagttgtgaatgaaagcactgtttgcctcatgagttatgaaagaagacagattctccacctgatcaccatgatggctttgaaagtacttggagaactaaatattctacccaatacacaaaaggactcaggctcctgtgcatttgactgtgcatcctagcaccactaccacttcaaccccatcattttattcagctcatacatgtgtatatcctgatgtgattctcttccatgggctgtactgagtaaatccctccatgaaagtattaaaagtgaattctgctaatggctttcttttcttagatcatgtgaaatatccagagtgaagtcagtaaaactggtggagaattaaacgcaatttttaacatagaacacttgatcagtaatgagtataaccttatgtgtcaatactgttgtacaaattggaggtggatggcttagttcagagctaaccaccctaacactgatccatggcaccaaagagtaaactgttttcatatatgttattaacattcttggcagcaggaaattatgaaacgacccctcctttttcatttacattgccaagggaaatatagcaggctgcaggaacccagtacagttgtaaagagggctgtggcctggaatcctgatgccacacacatttcccttgcacatcccaggtcgtcttaagcaccacaagatgatgcccagcaagcccactcactcttgccaattcctgcccaggaatttgatggagatgccgagaatagcacacatgtcctttcttagattgtactcccactccccatcccccattcttagcagaagaaagcataaaacatcttttgacttgaatatttgcccatttcagaaagccacaccgtcaccatataaacttaaaaaaataaatcaaaacattgtgttcactgggttgacacccaatccatttcaagtgttctctaagcatgttttttaaaaccagtgtatcatccttgagagactttcttccaactgaccactgttcatgtaaattattttagcagtgcctttataacagtgttttcaaagcatcttacaagttcctaatttctatgaactttgccaccaaacaagtgaagaatgggaaatgggaaggaaaacttgttgacagctatttggaaatcagtaacagtgggaaagaggaatatgtcacataaaagtttgaaggacctagaatgaaatgagctatctggaaacttaccctggaggggtgaagattcccagaatgttaggcaagataaagattcagcttgtgtaattacacagatttgttctaaagtcttgtaaaggactgaaatatcaagtcttcccatttctactggcaaactagaaaaatgaaaccccctgcatacaggcccctccggatgcttgcctgaaaagaaaaccagctaagaaactctgga

SEQ ID NO: 479261 - DNA, 690 bp, Homo sapiens
cctccatcaaactccagcagacctgcagcagaggggcctaactgttagaaggaaaactaacaaacagaaagggatagcatcaacatcaacaaaaatggcgtccaaagaccacaaccgaaggtcaccaacatcaaagaccaaaggttgataaatccaggatgatggggaaaaaccagtgcaaaaaggctgaaaaatccaaaaaccagaacacctcgtctcctccaaaggatgacaactcctcgccagcaggggaacaaaactggatggagaatgagtttgatgaattgacagaagtaggcttcagaaggtgggtaataacaaactcctccgagctaaaggaattattaaagaagaaaagagagaagaatcaaatagatgcaataaaaaatgataaaagggatatcaccactgatcccacagacatacgaactaccctcagagaatactataaacacctctatgcgagtcatcgcatcaatgttcatcatcaaatgttttggtatcaggatgatgttggcctcatagaaaaccatcaagcttcagatggtgctctaaatggatccaaaaatgaaaccacccttttaccggggacctttaaattaatccgaggaggagcactcgctgctattccccacacaacacccctctccagcagaaagtagccagaggtacatgtgcacaatgtgcagg

SEQ ID NO: 479262 - DNA, 1082 bp, Homo sapiens
agaccaagcccaaaaggaagcccagaagagagaattgaagaagagcaaaaaacagcacaagatggttccagctccaccacaattaaatgagaaagtattaaaagacaagcgtaaaaagctgcgtgaaacctttggtattctacgactctatgaaaaagagaatccaaatatttacaaagaactgagaaagctagaagtagagtataaacagaagagggctcaacttagccaatattttgatgccgtcaagaatgctctgcatgtggaaatggagagtattcctttgtcagatatgccacatattccttccaacattttgatccaagacattccacttcccggtgcccatccaccctccatccttaagaaaacctcagcctatggacgtccaactcgggcagtttctatcctggctcttcttggacatggtgttccacgttcgccccatggcagaaaacctctttgccctctctctggcccacctccttctcaagtcgtgcagatgtacggccgtaaagtgtgtttcgccctagatcttcccccatgtaggcgagatgaagacatattttatagtcctgcacttgcccagagaggtcatgatgatgatgtttctagcaccagtgaagatgatggctatcctgaggacatggatcaagataagcatgatgaaagtactgatgacagtgacaccaacggatcagatggagaaagtgaggaggatgaatttgtgcaccatgatgatggtgagagagacaacaatgaagaaaagaagtcaggtcctagtatacaagcacctcccatgccaggaccaccacctcttggaccaccacctgctctaccattacggcctcctgggccacctacgggccttcctcctggtccacctccaggagctcctccattactgagaccatctgaaatgccaggactccaagggcctttaccccaacttttacctccaggaccaccatgaggcttgaccccctgtccctttcccaggtccaactgcaggtatgcctcctggtccccctccttggggacccccaccaagagtacctccaggtattccctcaccttgtccc

SEQ ID NO: 479263 - DNA, 2498 bp, Homo sapiens
ttttccaactctgcgccgtcgggtcgcggcaggatggttgcctcgcatttgcttgcctacttcttcaaggagctcaaccatgaccaagtgcagaaggttgaccagtatctctaccacatgcacctctctgatgagaccctcttggagatctctaagcggttccgcaaggagatagagaaagggcttggatccaccactcaccccactgcagcagtgaagatgctgcccacctttgtgaggtccacttcagatgggacagaacacggagagttcctggctctggaccttggagggaccaacttccgtatgctttgggtgaaactgtttgaccacattgtcgaatggctggctaacttcatggataagctacaaatcaaagacaagaagctcccattgggttttaccttctcgttcccctgccgccagactaaactagacgagagtttcctggtctcatggaccaagggattcaagtccagtggagtggaaggcagagacgttgtggctctgatccggaaggccatccagaggagaggggactttgatatcgacattgtggctgtggtgaatgacacagttgggaccatgatgacctgtggttatgacgaccacaactgtgagattggtctcattgtgggcactggcagcaacgcctgctacatggaagagatgcgccacatcgagatggtagaaggcgacgaggggcagatgtgtatcaatatggagtggggggccttcggggacgatggctcgctcaatgacattcgcactgagtttgaccaggagattgacatgggctcactgaacctggggaagcaactgtttgagaaggtgatcagtgggatgtacatgggggagctgatgaggtttatcctggtgaagatggccaaggaggagctgctctttagggggaagctcagcccagagcttctcaacaccggtcactttgagaccaaagacatctcagacactgaaggggagaaggatggcatccggaaggcccgtgaggtcctgatgcggttgggcatggacccgactcaggaggactgcgtggccactcaccggatctgtcagatcgtgtccacacactccgccagcctgtgcacagccaccctggcccccgtgctgcagcgcatcaaggagaacaaaggtgaggagcagcttcgctctactattggggtcgacggttccgtctacaagaaacacccccattttgccaagcgtctacataagaccgtgtggcggctggtgcccgactgctatgtctgcttcctccgctccgaggatggcagtggcaaaggtgcagccatggtgacagcagtggcttaccggctggccgatcaacaccgtgcccgccagaagacactagagcctctgcagctgagccatgaccagctgttggaggtcaagaggaggatgaaggtagaaatggagcgaggtctgagcaaggagactcacgccagtgcccccgtcaagatgcttcccacctacgtgtgtgccacccctgacggcacagagaaaggggacttcttggccttggaccttggaggaacaaatttccgggtcctgctggtctgtattcggaatgggaagtggagtggagtggagatgcacaacaagatctatggcatcccgcaggaggtcatgcatggcaccggggacgagctctttgaccacattgtccagtgcatcgaggacttcctggagtacatgggcatgaagggctggacaaaaggcttcaaggaatctggctgcgagggtgaggacgtggtgaccctgctgaaggaagcgatccactggcgagaggagtttgacctggatgtgattgctgtggtgaacgacacagtcagaactatgatgacctgtggctttgaagaccctcactgtgaagttggcctcatcgatgacttccacacagaatttgatgtggctgtggatgagctttcactcaaccccggcaagcagaggttcgagaaaatgatcaatggaatgtacctgggtgagattattgagagtgactgcctggccctgctgcaacacttagggcttgagagcacctgtgacgacagcatcattgttaaggaggtgtgcaccgtggtggcccggcgggcagcccagctctgtggtgcaggcatggctgctgtggtggacaagatacgagaaaaccgtgggctggacgctctcaaagtgacagtgggtgtggatgggaccctctacaagctacatcctcactttgccaaagtcatgcatgagacagtgaaggacctggctccgaaatgtgatgtgtctttcctgcagtcagaggatggcagcgggaagggggtggcgctcatcactgctgtgttctgccgcatccagattttcttggggcaacattccatgggatgttaagcaaaggaaaccaaaggaatcgtttcaaatggactcatggcttagaaatctttattcttagggcagtcagtagtattttaaagctttctgacaagataaaggaagtc

SEQ ID NO: 479264 - DNA, 882 bp, Homo sapiens
agatttcctcctgagagaaatgcagagctgcctccaactgcagtgttcatgtgggggcagggtagttgtgctgaagtctcaggtctaccctcagaaatgaatttcaagttatctggcttaagcaaggggcagggaaggaggatctttctcgctttctgatgtgggcatttagtgctataaatttccctctaaacactgctttagctgtgtcccagagattctggctgtcttctgcaagtctgctggagtttgctggaggtccactccaggtcatatttgcctgggtatcaccagtggaggctgcagaacagcaaagattgctgcttgcatcttcctctggaagcttcatcccagaggggcacctgcatgatgccagccagagttctcctgtattaagtgtctgtcgacctttgctgggacgtgtttcccagtcaggaggcatgggggtcagggacccacttgaggaggaagtctgtcccttagcagagcttgagtgctgtgctgggagatctgctgccctcttcagagctggcaggcaggaatgtttaagtgtgctgaagctgtgcccacagccgccccttcccccaggtgctctgtcccagggagatgggagttttatgtataagcccctgactggggctgctgcctttctttcagagatgccctgaccattgaggagggatctagagaggcagtctggccacagctgactggctgtgctgcagtgaattccacacagtgtgaactttccagcggctcccttaattctgtgacaggaaaaccactttctcaagcctaaataatggtgaacgcccctccccccaccaaactcgattgtcctaagttgacttcagaccgctgtgctggcagcaataatttcaa

SEQ ID NO: 479265 - DNA, 500 bp, Homo sapiens
atcaacccaggtacccatcaatgataacaattacgcacatgctagatctttttacttcagcttatggtgaatgctgccaagcctgggctcccttctggcccagggaagctccagaaatgctgtccaagagccaacacctggaactggggactccaaatgcttgcttggtactctaccccactgtggctgaactggtacctaagctacaagacaaagtccctttttactcatccttgttcatttctcaagcagaaatcatccctgctgccacagccactagagctgggaatgtgctaggtcacatctggagccagcatgtctctgagtctcactcaaagcccacacttgcaactcccactcgaatgcacagagcagcatgtggagattcacatcatgaacttttgcttcaagaactactgcaggaaaataccagaaaagccaagagaatccacagaccctttgaaggaactggatcactgctgcaggctccctgagatgcc

SEQ ID NO: 479266 - DNA, 1129 bp, Homo sapiens
ttagtgagaactgtttagagacttatgcaaaatgaatacctttgctatcctgattcactgcttttgaaagtcaaggagtttagtgactctatacataatacctttgatcatatgtggagaaataaggaatataatgaagttggtttgttgctcctaagttcgctggacaaagtgacaaaagaaaaggatgagctcagggattctaactcctggctctggaagcacatactgagcctcaagtcttctaagattgccctgaaggaaacagcctccccacccccagtggtgtcaacaaccagtcctccacccatgctgccttcagcctttccacctttgtctgaggagattaaccctgcattgcctgaggcaacagtgacgacctcccctgaacacattgccaggaaaaacaatgctgattctcttcaggacctaccctcaacacccctgttgcctcctagacctgtaactagactaaagtcccagcagacccctagaggagacctccaaaagtctgtgtatgctctgagtcagcgtccattatatggtactgtttctcccatagtcaggattcacgggtccaggaatcaaggggtggaagtggaagtggtaccttttacaatcacccctagtgacccactagtgaaatttttgcttccttttcctgcgacattaagttctgctggcctagggatcttagttccagaaagaggaatgctgccaccagaagacacaacaatgattccattaaactggaagttaagattgccacctggtaactttggggtcctcctacctctaagtcaacaggctaagaagggagttacagtgtttgttggggtgactgactgggactatcaagatgaaatcagtctactactccacaatagaggtaaggacggtatgtgtggaatacaggatcccttagggcatctcttagtattaccatgccctgtgattaaggtcaatgggaaactacaactcaatccagttagagccatgggcatcaggattgcaataaagcagagtcatgacagatgtgacaatgactaattgtagctgttgctggcaatgtggcaaagggattttctcattaaagacatgcatctttcctttctgccatgattgcaag

SEQ ID NO: 479267 - DNA, 1505 bp, Homo sapiens
tgaaatattcctatagaaggagaatctacacctcagccaaaagtgtgctttaaaggatgtggcttacgagctattaaactgttggaaaaatgggatattacatttgcttgtgccttcaaggttatctaagtgaccgtgatcagaatactgacagaaatatggacactaaagtcccttttgatgaggacttacatggaagggagaaatatcttattagaaactggaaggaaggccatacttgttacaaggtggcaaagaacttggctgaagtatccaccccaactgtggccaaagtgggcccatgtacagctcagtctgttgctctaaaaggcacaagccataaaccatggcagctcccatgtgttgctaaatctgaaggtgcacagagctgtggagacatggctactccacctgaatttcaaaggatgcctccaagagccttggggctcaggcagagaaatgctgcaaaagtcggaccatcacagagaatcttcagtggggcaatgcctagtggactcacagcttaggaaccatccccaagatctatagaactgtagatccactgattggtttttggtgctagcccttttgaatgctgcatgtatgctttcaagaaataacatgttctttagctatgtttctacttagaagaacaatgaaaacaaagacaaaaatacgcattctggttgatatttttcacaaataatatgtttacgttaggttgagccatgaaattttcccttcaatttctatttgtactcaatgaggaccaacttacaagcccatctatactatatttattttaattgattttctatgtcatctttttaaagacacaggtacttgaactttcaaaatcatattcaaaacttgcctgagtaggatgttatgaatgattatcctgttttacagctgaagagcctgagattcagagaaaataggtggttctttccaaattgctattcttgtgggcattagagctaaatgtgcgcttaatgttctgggtcaatttatttcaaactttaatatacataaggatcacctacaagtctgattaccatgcagatttggattcattagttctgaaatggggtctaaagctgtatttccgacatgctccctattggcaattatgctgctcgtctgaaagctgattaaaacctatcacttcaaattttcttcaggaacggttcatttaaaaggttagttttttaaggtcatacttttgctccaagaaaatgaggcagtaatggaatgcatcattttctttcttcatagagaaactgtgcagatgctcccttttaagcaggtcataattttatttggaaaataattgatctgttcagtaataaaaacagacttatggtatttcatgataaacaattactcagctacctcagcagcaacactctcagcccttcagttggactttctacatgaaaaaactattagctacttctggatgaagccaggtccattatagtgtcaaatactgtgttctaatt

SEQ ID NO: 479268 - DNA, 607 bp, Homo sapiens
ctgcatgtacagtggactgctagcacttgggagctgctagcatggctagaacaaagcaggcagaagatgagataaccttgcttgccgagttttttggcttccttctttttcctgtgctggatgctcctcctgcccttggatataagactccaggttctttggcctttggactctgggaattgcaccagtggctttccagggcttcttgggcctttggccacagactgaaggatgcactgtcagcttccctggttttgccacagaataaaagcggcactatgggcctccctcgttttgagggcttcagactcagactgagccactaccggcttctttcttccccagattgtgggactttgctggctaatcatagaaactgccaatatgacagcagtatccccatgagaacaggaaaaaacatccatttgcttcatgaccaatattatagtgatcctgtgggaactcctttttgaagttttaacaataatagctaattttatttgcactttcattttactaagcactttacatacattatttaatatttaaatagccttaggatgccatgtaaatcatccttcactggtctttttatttcttattttat

SEQ ID NO: 479269 - DNA, 595 bp, Homo sapiens
ggagtttgagctcacttcaaacagggaagtttcaagagtcatgggcagattcttcttcggtctaaagttctgctttcctgtactgcattacctgacctttttgactctgggggtaccagagaaacagcccaagatggacgacttcgatgattgtgtgacggatgaggagacagtaggcatggctgctaaattcaccactcatgcacccccagaagaatttaatgaagcattcaatgataaagaagcaagtgacccccagccagaagaagtagatggaggtctgaagtcttggagagaatcctgtcactgtgctttaagagcctatgtgaaagactattattccaacagcttctcccaaactgccaaggagtttattaaaatcatagagaatgcagaaaatgagtatcagacagcaattagtgaaaactatcaaacactgtcagataccacgttcaaggccttgtgccggcagcttccagttacctgcaccaaaatcgactggaacaagatagtcagctacaagattggcaaagatatgcagaatgcttaaaggctgaatgtaggattcttcagacatgagacttcacaacctgct

SEQ ID NO: 479270 - DNA, 704 bp, Homo sapiens
ctcctcacgtggctttttttctgattagtttaatcttgaagtaaaagatgggacagaagacaaagtatagaggaagaaaagtgggcccagaggaccggcgcttagcatacggaggacccgcaccggcaccagtctctgagttccctcagttatgggtggggccacaaagctcccaacactttctgtcttttgtgttaaattaccggggtaagtggagaggcagagtcagatccgggctgagtcaggtaggtcagtgctctggctctccacatgcggagccatcttcagcccctgtagggtatgaggggtggttctcaggctactggggtaatattccagagggcactgtaaatgcctatgctgcacagaagagtttgcacagggagtgtggattagcaggaggcagtaagcctcacctagatcccatgcacctggcaaggcagatctcactcccgcagtgcttcgctagcagcagcaagctaagttccagttccatttgatctagagtgttatttaagtctgctgtttccttattgatcatatgtctccatattatgtctttttgaaaatgggatattgatgtcttctgctattattctattgctgcattttaaagtaacttccatcttgcttgaaattcttgctttgttcatacatggttctcttgatccaagtaaacatacttatgaaagttatttttaaat

SEQ ID NO: 479271 - DNA, 1949 bp, Homo sapiens
ggacacagtactacaattggtatgaagtttcagttatgcaagatgagggctgccccactggagctctttactggtcagccacaatccaccaatgtagaagctatggtgcagacaaccagggcaactgcaactaccctgcatgcaggcatggccaggtctgacagttcccctagagctaaagtctcctatggcagcaagttgagcctagggggatggctgtatctggccatgctctgctatcgatgttccagcaccaaaccctctgggctccacatcagctggcttgctgcccctaccacttctctaagcagctctccttgccaacctgtatgtctgtggtggtcaaggagtcatcccttgattgggctccagatgcctgtggcaacggcaatttgctccctgccagatcaactcacccattccccaggagctgttgagggccaggaatgattcctggtgtctggtagacccatgcagggttctcagctttctctactttcagccaagcttctgtgtctttcctctgtccaatctcagtgccttccctttgaagatttgttaggagcataccagtggtctctgtctcttggcttaaagtctgtgttgatgttaaatgctggttgacttttcctgaattccaaaagggaggagggcataatgaggcatgtccaaccctcacttccagtcatggcctgaaccagttttttaggttaactctgaaatgccacttgactgaaaagaaggactgaaccaatggttatcttacgtatgctgatcaatgtctcatgtctccctaaaatgtataaaaccaagctgtgctgggaccaccctgcgcacatgtcatcaggatctcttgaggctatgtcatgcgcacacatccttaactttggcaaaataaaatttctaaatttactgagacctgtttcagatattcagggttcacaaacctaaatagagttgtaaacagactgtagcctactcttgtgccaatcactgacttttgggcagtcaaagatgtgttcatgctgactccaggcatacaaaatgctttcttggctctgtcccttattggactccacctatttccctgaattcagtaattttagctaagaagtactaactaagttaaaaagaacaccctattgaactaaaatacacctttctaaaatttaattggctatctttaaactcttttgtaaaagaaatttatatctataatagaaatttccatttttaaggatgtctgcctatatatagtaaaattcttaccattattttaaatttatataaaatttaaaatgttagagatattaagttaaattaagtaatgaataatcgtaaaatgtctaagtcatctgtaagttaaaataccaaaatattaattattaaacatgggtttaagactgtgtaccttgacatggtagttttatacggtaaagaaaagctaaatatatttaaatatgttaataaataataatttgaaaaagtatccttccaaaaattataaaattatatttatttacaaatactgatataaaagagtccaaaattacttctagggttttcactagaagttagggttactaaaagtttaaaaaaaaaaaaacactagatatgggagaaacaattctgtatacagagtttttaagcaaaagcaaaacatgcatctgatgaggaaagttataaaggcataaaaatgtatgttaaatatatttttttctaggttgaagttacataaagatttcaaattgaaggagaaaaaatagataaaacaagatgaatgtaaaagttggggaaaatcatgtctttaaggacattcatgaaaggatgaaaagaaccctaagaagcactcttgaataaagctttctgataactttagaatcatatcatttggactgggtaaggattcccagaactttaataaatagactggtttataaaactgctag

SEQ ID NO: 479272 - DNA, 1424 bp, Homo sapiens
gttggctttgtttacactgtgaggggaaaactgcctactcaagcctcagtaatggcggatgcccctcccccccaccaagcttgagcatcccaggttgacttcagactgctgtgctggcagcgagaatttcaagccagtggatcttagcttgctgtgctccataggggtgggattcactgaactagatcacttggttctttggcttcagccccctttccagggtagtgaacagactgtctcgctggaattccaggcaccactgaggtatgaaaaaaaactcctgctgctagctgggtgcctgcccaaatggctgcccagttttgtgcttgaaacccagggcgctggtggtgtaggcacccaagggaatctcctggatgttttctacaaccaagtcagagtgatcatattttattttttaactatagctaaaacaccacaatcagacataacttgttataagccttagtttggaagtggtttatttcacctttgctcatgttgctttgccaacatgtggggagtatgaggattacacttagagatgagatttgggtggaggcacagatccaaaccatgtaaacctttttactcaattttacacatcatttgctgtaattacactgattccttcattaaattgatattttccaatatcaccagacagtctgaaggactcaaaattattttatgttaactgagtttttcaaactaagtcatgggtgaattttatagtgtaaactgctgctattttaacctgcttaataaatgttatgtctgttaaaattttgatttttttgaaactggagctttcattatcactttgattaaaaagtttaaaactgttttttctcccaaaacctctctagtaaaaaacaatcaaaaagtcaaaccctaaatcaagaaaggtaaattttcacaggtgaatgataggggcactttataaatggaaatattaataagaatgtcctcagcattctagaattgtgtcaaaaggcaacatactgataatacctttatgttattgcaagcttcatcttttaatattagttgtaaatttaaattttcctgaatatattgttataaatactcattgagatatttcttctatgcaatctacccaatattggttaaaaacaaaaattttaattgcaaaatcactgaaaaccaatatcagtaatataagtaacttgtacatagagataaatgctatatttatcttgcttttcaaaatccatcaactgttttctctttattataattgcatttgtttatctgtcttttagtaaagtactatctgcatttagtaagttgtaacttgtaaagtatttttagtgttttacaagataatcttagtttagattgttggtgagctggttctagaaaaaataaatccagaaagcaacttatattacaaatgaaatgtc

SEQ ID NO: 479273 - DNA, 1135 bp, Homo sapiens
aagatattttctgaaataagggactgctcactaagggaggggtccatagggggttgttctagattcccgtcgtaacttaaagggaaactttcacaatgtccggagcccttgatgtcctgcaaatgaaggaggaggatgtccttaagttccttgcagcaggaacccacttaggtggcaccaatcttgacttccagatggaacagtacatctataaaaggaaaagtgatggcatctatatcataaatctgaagaggacctgggagaagcttctgctgacagctcgtgctattgttgccattgaaaaccctgctgatgtcagtgttatatcctccaggaatactggccagagggctgtgctgaagtttgctgctgccactggagccactccaattgctggccgcttcactcctggaaccttcactaaccagatccaggcagccttccgggagccacggcttcttgtggttagtgaccccagggctgaccaccagcctctcacggaggcatcttatgttaacctacctaccattgctctgtgtaacacagattctcctctgcactatgtggacattgccatcccatgcaacaacaagggaactcactcagtgggtttgatgtggtggatgctggctcgggaagttctgcgcatgcgtggcaccatttcccgtgaacacccatgggaggtcatgcctgatctctacttctacagagatcctgaagagattgaaaaagaagagcaggctgctgctgaaaaggcaatgaccagggaggaacttcagggtgaatggactgctccagctcctgagttcactgctactcagcctgaggttgcagactggtctgaaggtgtacaggtgccctctgtgcctattcagcagttccctactgaagactggagcactcagcgtgccacggaagactggtctgcagctcccactgctcaggccactgaatgggtaggagcaaccactgactggtcttaagctgttcttgcataggctcttaagcagcatggaaaaatggttgatggaaaataaacatcagtttctaaaataaaataaaataaaattacttcttggtttatacatattaattgccatcatttagcattgttttccttttctgtttacttcac

SEQ ID NO: 479274 - DNA, 644 bp, Homo sapiens
tgtgtacccctgaatttaaaaaaaaatcatttgaccatgtagatgcaccttacatgtttctcttgtctaattgttatagctgtgacttccagtactatgtggaataacagtggtgacagtgggtatcccttttatgtgccagatcttagaggaaaggctttcattttttctctatttagtatgatactagctgtgggtctgtcctatatggctgatatgatttggctgtgtccctacccaaatctcatcttgaattttaatccccataattcccctattccccacgtgtcattgggaggaacccagtgggaagtgactggatcacgggggccatttcccgcatgctcttctcgtgatagtgagcgagttcttatgagatctgatggttttataagcctctggcatttcccctgctcacatttactctctcttctgccaccttgtaaagaagctgcctgcttctgcttcgccttctgccattattgtaagtttccagaggcctctccggccatacagaactatgtaggcacttacagctataaaattccttcttagtagttctttggctgtattgcataggttttgttctgtgaagatcattggtagcttgatggggatggcattgaatctataaattaccctgg

SEQ ID NO: 479275 - DNA, 1120 bp, Homo sapiens
agatcaattattaatttgtgcagggtctgttggtaaaagagctataatgatagctgcaggtaagttcctcaacttagcagctgaggctgtgctgcaagcaggtgcagccaggcagggaccctgtgatagagctacagactggggagtactcagatcaggcagtccccatcgcatggaggtccatggcaagagtgggctgctccatgcctatttactcaccccttccccaggagctgctcagggccaagaatgggtcctggggcttggcagctccatgaagggtttccagcttcctccttttttagcccaggatctgtgtcctccctccatccactatcaacgccttctctttgatgatctgtttggagtggaccaggtgcacctgaattccagtaatgctgtggtccttgcagactcggaacaataccaccttgatgatcttggacagtatttgagtaaagtgtttgtgatggttaatattgagtgtcaacttgacaggattgaaggatgcaaagtattgttcctggcttttggacccttggacttacactggtggttttccaaaggctctcatgtcttcagccacagactgaaggctgcaccagatagagctgaaattgtgaaaaatcagacacaaactcctatgatgcaagtggctgacctgcaaggaaatgtgtatgcacagccttgcccgttgtctactgttaaagtaagggcattgattggaaaagaatgggaccctgcaacttggaatggggacatgtggaaggaccctgatgagactgggggcattgagctcctaaattctgatgagccctttttgccagaggaaatagccaccccacttccagaggtggcagcttcccctcccccacccatgctgccatcagcctttccacctttgtctgaggaggttagccattcactgcctgaggcaacagtggtggcctcccctgagtcagtggccaggcaagacaatgctgattctcctcgggactcaccctcaatacctcgtttgcttctagacctataacaagactcaagtcccagcaggaccctacaggtgaggttcagagtgtgacccatgaggagatcttacagtgggaaccacaatcactca

SEQ ID NO: 479276 - DNA, 616 bp, Homo sapiens
tgcccaggattgcaaaggatgggcagctcacctgtgttgctcctctctgctctccacgagtcatgttgcttccttgatgaatcccagtgtatcctcctggatgacccagatgaagagctagtatttacttgccactctatctcctctgtgaacaccaaatttaacaactatctacaccaaaaaaggcaccttcgtaagaaccaaaaaccaggcccagtcccaaggcgcaaggccacttgcaccggcagcgtgcatcagcaagataacagaagcaagaagagagctggccggaagacacctaccctggccggaagacacataccccggaagatggagaaagaggctgtttgggattcaaaccaatataagaaccttacagatggcatctctgaactgaccctgggacaaaggagatctcacttccctgagggatcacaacacttaagtccctttgaatacctggaaaacattcccaacaaggatgtatctaaacaagcccacactgacaagactacaataagtacctaactcttcagtgcccagacactgaggaacatccacaagcatcaagaccatccaggaaaacacgacctcaccaaatgaaataaataataca

SEQ ID NO: 479277 - DNA, 571 bp, Homo sapiens
tgcccaggattgcaaaggatgggcagctcacctgtgttgctcctctctgctctccacgagtcatgttgcttccttgatgaatcccagtgtatcctcctggatgacccagatgaagagctagtatttacttgccactctatctcctctgtgaacaccaaatttaacaactatctacaccaaaaaaggcaccttcgtaagaaccaaaaaccaggcccagtcccaaggcgcaaggccacttgcaccggcagcgtgcatcagcaagataacagaagcaagaagagagctggccggaagacacctaccctggccggaagacacataccccggaagatggagaaagaggctgtttgggattcaaaccaatataagaaccttacagatggcatctctgaactgaccctgggacaaaggagatctcacttccctgaggggtttccaactacagaacctgagtccttaacaacatatctagatctgcctgagaaacagggtaactaaccaccctgaagacaaggacataagactggctgactttgccaccttctgattgtagaggcttagggccttgagc

SEQ ID NO: 479278 - DNA, 1239 bp, Homo sapiens
acagtgttcgtgggggtgactgacttggactatcaagatgaaatcaatctactacttcacaacagagtcatgtttcttccaagtccctgaccacccagccaaaccattggctaccgcctatgaatcagtatataatctcaaatcctgcaatttttccttcaatgtaaagtgcagtactcgcagttcttcccactgggaagatttctcttcactgctgtctttcagggatgtcctagaaagcggctatagtgctgcagctgtccactttcgggtgatgcctgaatatcacagtggtggaaaggctgatggcagcgtgggtcgtggaggggatgtcgccactaatggagatggggaaattgtttcttctggcacaaaaaggttcatcagagtttacaaactcagtgtccccagcttcatcaaggtctttccacatgtccccattccaagttgcagggtccagtttttttccaatcaatgccctcactttaacagtagacacctggtgaggctgtgcttgcacctttcattgcagtgatagtttcaggatacatacatatggcaaaatttattaaagtttatgcttcaaatatgtgcagttttctattatgcctgaagaaagctgtttaaaattttaataataaaaataacactttaaattaaatcaaaatattgcctgaaaaaatgatcttagtctatgaaccattagtttcttctaaatgtttttcaggctatgtaaaggaatagatatatgatatataatgttttgttactgagtatacaggtatcttcaagagaaacattgtttagagcggacatatcactttcatattttatttatttatttttcttttattattatactttaagttttagggtacatgtgcacaatgtgcacgttagttacatatgtatacatgtgccatgctggtgtgctgcaccaattaactcgtcatttagcattaggtatatctcctaatgctatccctccccctcccccaccccacaacagtccacagagtgtgatgttccccttcctgtgtccatgtgttctcattgttcaattcccatctatgaattatttgcctttttattcttgtaatattttgaaagacaatcataacatattaaaattctattggagtttaataaaaaatattcccaaacactttgaaattatatttagattattaatatagataatggcagtatagcaacttatgagtttatttttccttttag

SEQ ID NO: 479279 - DNA, 797 bp, Homo sapiens
tttctcaaagttggaaattataatggaaacagagtgtaaaagtttggaaaatttgcagcctggcattgtgatagagaaacaaagagcattttcagtagaggaattaaaatgggcagtggagcaaccacttgctagagatatttgcatgactaaaagggatccaagtgctaatattcaagacaatagtataaagacctcaaagacatctcagagatctttgaggcagaccctcctgtcaaaggcccaaaggaccaaggacaaaagaatggttttgtgggcaaggttcaaagccccactgccctgtgccgacttggagcactgctccatgcatccctgctgctccagttccagccatggctcagagggcctaggtataactcaagccgctgccttgcagagctcaagccataagccttggcagcttccatgtggtatttatcctgcaggtgcacagaatgaaaaagtgaaggaggcttggcaccttcaacctagatttcagagaacatgtaggaaagcctcagggccaggcagaaacctgtcatagaggcaaagcctcaacagagagaatttactagagcagtgccaaagggaaatgtggggttgaaatccttacacagatttccttgtggttttgtcatacaatcttaaggatttcttttctatgtctgtgaaaaatgctatagtaattttgatagaaattatgttgacattgtagattacttaggttgttttgctttgaatgtgtcctcaaagttcaggtgtttgaaatttaatccccaatgcaacagtgttgagag

SEQ ID NO: 479280 - DNA, 577 bp, Homo sapiens
tttaaaccattttgagtagatttttatatatgatcccagaatgattgatccaccgacagcttgcactgtgtgcctggaaaagacacagacactcaacaccacctgtaaaagcagctgggaggggactgtaccctgcaaagccacaagggcagagctgcccaaggctatggaagcccacctatggcatcagcatgacctggttggcagggattcccacagtcccaaggtggttccagaggtgccaagaactagagtcaaaaacattaaaatctacctggtgttctattgtactattcctgagctggcactcaggccagatgatgcagtccttctcactcttccctctcctttccaaagaaagaggagccttaccccatggctactgccacagcaggtccccaaggagccaagtgctctgcagtcagcttgtgatgaatactgcctggcttatgactcaacttctgggcagtggactcccctctggccctaagcaggtcttaaaatgtccaagggccatgatctggaatcagaaaacccacatgatcgcttggtgttctacctctctgtggcaaagttc

SEQ ID NO: 479281 - DNA, 537 bp, Homo sapiens
aaagtcatagggtgggatgcttcctgccctcgaacattggactccaagttcttcagttttgggactcggactggctttccttgctgctcagcttgggaccttggaattttcagtagacaaagtgataaaagaaaatgatgaactcagggatgctgtctcccgacttcagaagcagacactgagcctcaaatctgctaagattgccctgagtgagaatagagaaagagctgaaattgcggtaaaacagacacaaactattatcatgcaagtggctgacctgcaacgaaacgtgcatgcacagaatcaccaggtgtctactgttaaagtgaaggcattgattggaaaagaatgggaccctgcaacttggaaaggggacatacctataactggacaaaagtcccggcgagcccctagatgtgaggttgagagtgtgacccatgattcataaagcaagtttttagagacctacaaagagactaagactcccacacaataatagagggagtctttaacaccccactgtcaatattagacaga

SEQ ID NO: 479282 - DNA, 570 bp, Homo sapiens
ggcattgattggaatggggacatgtgggaggaccctgatgaagctggggacactgagtttgtaaactccgatgaaccttttttgtcagaagaaacagcttctccatccccagtagtggcaacatcctttcccagacccatgctgcgatcagcctttccacctttgtctgagaagataaaccctgcattgcctgaggcaacagtgatggcctcccctgaggcagttgccaggcaagataacgttgattctcctcaggacacacccccaacaaccctgtttgcttctagatctataactagacaaaagttccagcaggcccctgtagaggaaaatattcaaatgcttagagagattggtaaggtggaatggattcatcacttcagatctactcaccccagctgtgagggtccagaagatatacccttgaccaatgccttgtgaaatagatttgtgaggacagcacctgcatcttggaagagccctgtaattcttccctttatgttcttctctactcatagaagtactgtcttgatggtcttggacaagatccagacaaattatctggaggat

SEQ ID NO: 479283 - DNA, 627 bp, Homo sapiens
ggggcactgcctagtgaagctatgagaaaggggctacgggctctgagaccccagaatggtagatcccctggcagtttacaacttcagtatggaaaagccacagatgcacaacaacctgagcggatcccagagagtccttctcctgctccttctctagaagagaatcatcgtcctgggagccagacctcttcccacaccagcagcagtgtgtccagctctccctctcagatggatcatcatttggaaagaatggtaagcttctctcctttcttctccaagccaagatgtacccagaactctttcatcagaactgtttttgagcataatatcacagagaaagaaatgtccccaatatcaaatgatatttgcattttccctagaaagcatcaaggaaggagggtacctaccagaaatgcaggttggtaggtggtctgagaatgtatttgcataattaattagtgtgtatgcttttagacatttctactcaggtactattaaccaaattatagagtgacacgctgatgtcaacacttaatttagaccttttctgttatttgccactgtgtatattctctttggcaaatttatatctcagcatatctcagttggtctaggctacccttcatt

SEQ ID NO: 479284 - DNA, 670 bp, Homo sapiens
caccacttccctgggcaaggctccatgttgctcccagacttggtgccctgcatctcagctatgactaaaagtgaccaacatacagctcaggctgttgcttcagaagatgcaagccccaagcctttgtggcttccacatgatgttaagcctctgggtgcccagaagtcaagaactgaggtttgggaacctccacctagatttcagaggatgtacagaagctcctggatgtctagacagaagcttgctgcaggggcagggctctcatggagaacatgtactactagggcagtgcagaagggaaatggggggtgggatcccccacacagagtccccaccagtgcactgcccagtggaacactgagcagagagccactgtcctccagtctccagaatagtagttccactgacagcttgcaccatgtgcctggaaaagccacagacactcaacaccagcccatgaaagtagccaggagtggggctataccctctagactacttgaagaacttcctgagtgatctctctgcctctaactctttgcctttccagtctatgttatattctcttaatagtgacattcttgtaaagaggagtatcttcacattgctcacctacaaaaaagtgttttgtggtttgatacttcctgtagaataaagttcaaaacttttaata

SEQ ID NO: 479285 - DNA, 1994 bp, Homo sapiens
gcctccacctgaatctatgtcatggcaaagaacatgattttattcttttttatggctgtgcagtattccatggtgtacaggcacattaacatcagatccctgtgtatgcacagcccaggattgatttcaggatgtcatagccacttttattggctcattgtcctcactgcctccttttttcctaagctctcctgtaccttccagttctttgggtgtcctcttttcagtcttttggccggatgcttgagacttagttaccccactatatcgtgcacttccactcctgtgtgtgcattcaagttcaagtggtgggaagtcagagagcaaaaacaaaacaaaacaaaaaatcaatgtgcttggccccactttctttatgccatagctcctgtggtcagagagggagattcctgtgctcctgtttctacgctagagattacatggaatctaggacataggcaatagacaaggaaagtgaacaccctttgaacagtaggcattcacttttctgctccctgaaccaaaattaaagggggctttctatattcctctctgtaccccagtgcctattcatggtattcggaatgcacttttgaaagtcgtattaatggaaattcatataccccaaacagtttttattcctgaaaattgaggaaattattagatattacagaaaattttccaaagtttctattggggcagatactggttttaaaaaattcaaatattaataaaacaaatatagaaactttcagaattctgtaggaagctgttaaataaaaagtatacttagttacagtaaagaaaaatgctgtcctgatttcaacttttatccattcaataagcatttattgcatactaataattgtaaaaatattgttctagtcaagcattgtacactgaaatagcttttgttgatggaaatgatggccaatgtagtggctaatatggtaaccactagccacaagtggttattaagcacttgaaatgtggcaagtgaaaatgataaactagctaaagactatgatattgtacagtacagttctagacatttttgaaaacacaaatataactgctaatgaggtagtagttatctattgcacattgtattaatattttatgtttgtttatctcattcattataaccatttgatcattatatgtttatagcagaagaaactgtggtctagagaggtaaagtaactttttcaaagtcacaaagttatgaaacagcaaaatttggcttcacagccatgtacgtattatttgagggtcttttattggaaactgcactatttattgacagggatactgcagtacaatttacatacatgaaaattcactatttagagtataccattctatagttattgataaatgaattcagctgtgtaatcatcaccacaaaaataaacataaagaatatttccatcaatcaaaaaagttaattcctgcccctttgtaaatgcttacactcatgaccagcaactactgatctgttttgctatctctataattttgcccattcaagaatgcaatattaacagagatttatgttataaatagcttctttgagtctggattctttataatcatcagtgttgtagcctttgttagtagttggtttctttttatttctgtgtaatgttctgttgtgtggatatagcaccatttgtttactcgccaataagaagatatttttgttgcttatggtttctgccaattgcaaatataccttctataaacatctgtgtacagatatttgtgtgaatatcattgtaagttgtggatgaataccttgagtacgactattgggttatgtgagacagtcactctattgtgttttaatgttccaatagtgtgtgagtaaataagattctctgacatatgtgatagaagactggttaaatgggacaatcatttttgtgtaagagacaagaatcaaaaggaagcattcttcacaagctattaactgaaaaaaaatcccctcaggtcag

SEQ ID NO: 479286 - DNA, 675 bp, Homo sapiens
aaggtttaggtcaccccaccaggaaaaaaaccacaacctgctgaggtgcttgctgaaggcaacaggaatacggaatgggtagtagaagaagtgaacgtatagatgataagaaagcaaaacaggcttttgctgatgtgaagaaagtttgtgtggtctggctagatcaaatcagccacaacattcccttaagccaaagcctaaaccagagcaaagccctacctctcttcaattctatgaaggctgagagaggagtcacctccaatggttcctccaaaacttgctcttctgacttaggggaactactctccacagacctgcctgatttgattgctaagagggctgaggtggaggggaagacagtgggggtgcccccaccgacggttctccctccttggtccctgggtcctagcaccataattgccaccctgtggttgcagatgaccattaatctgaaagtacaagttgaagtggacaagtccaaacataggcaaaaagtgcccttgaagacttaaatcaaataaacctgacaatcctttatgtactactcttttccccatactgattaaagaacaatagatatttgagggaaagtaatgagataggagaatttgtaagattaatttggtcaaaatgtttgatctttcataattattttacaattaaacttgaatgatt

SEQ ID NO: 479287 - DNA, 1269 bp, Homo sapiens
acatctgcttttaaaggtttttggggaacaggtggtatttggttacatgatgttccatcgtatatatgtataccacattgtctttatccactcgttgattgatgggcatttgggctggttccatatttttgcagttgcgaattgtgctgctataaacatgcgtgtacaagtatctttttcgtataatgacttattttcctctggatgggtacccagtagtggaattgctgggtcaaatggtagttctacttttagttctttaaggaatcttcgcactgttctccataatgattttactagtttacattcccatcagcagcatagaagtgtttccttttcactgcgtccatgccaatatctatttattatttatttttttattgtggccactcttgcaggagtaaggtggtatcacattgtggttttgatttgcatttccctgataattagtgacgttgaccatttttttcacatgtttgttggccatttgtatatcttcttttgagaactgtctatgcatacccttagccctctttttgatgtgattgatttttttttcttgctaatttgtttgagttccttgtaaattctggatattagtcctttgctggacgtatagattgtgaagattttctcccactctctgagttgtctgtttattctgctgactgcttcttttgctatgcagaagctccttagtctaattaagtcccatatatttatctttgtttttgttgcatttgcttttgagttcttgaccatgaagtctttgcctgagacagtgtctaaaatggtttttctgattttatcttctataatttttataggcttaggtcttaaatttaagttcttgatcgatcttgagttggtttttgtaataaagaatcgagtattgatttcctcaccatcatacaattctttttaaattttttaaatcagaaagttgttcattttttaagcttggctttgcagattgttcactgttggcatatactcagttggtgcaaacgtaattatggtttttgcattgttggaatttgccatttgatattggaatacattcttaaataaatgtggttatgttatacatcattttaatgggcatttcttgctttattttttttgctaatgacttattacttgctgtttattttaagtttattttagactatggaaatgatgttagacaaaaaacaaattcaagcgattttcttattccagttaaaaatgggttgtaaggcagcagagacaactcgcaacatcaacaac

SEQ ID NO: 479288 - DNA, 675 bp, Homo sapiens
gggcacacttggagaaatatactttatagaaaggcagggcaggctggctctgtgcccatcaaggctccatttgcaatggcagttggtgagggaaatggaggtggactccactcctgctgtggcagtggaagggcagagtgcatgcacacactattctggctggcaggcaaggaaaccaaaacccgcctgtacacgcacatgctggcaaaaagatgtgcaggcttgctgtgggcccaggggaagctgcagtgtggggaaggagcaggaggactggtgcatggccatggaggccccagtgctggagctctccaccagtcaggcatgatctgcaacacagaagcccagcttccatgtcttccctctgtccgttctcagtgccctccttctgaagatctgttagtgcgccagttgtctcattcccttggtggcagctgtttcaactggctgcatctagtcggccatcttgcccccaatatccagttcaaatttatctaattagctatatcttgaagggagaatacattttaatgtttcaataccagaaagacattaaaatgagtattttctattttaatatcttgtttattactaatcagctacaacttatataatatttttacagtcaatttttgtaccatagcctaagaaaaggtattatttatattattttggttt

SEQ ID NO: 479289 - DNA, 807 bp, Homo sapiens
cagtgaccagggctgagaactagcaccagaccatgagcttccccattgagaaagcaagcagactcacagttttttgccatctcatggagcttgcagtggtgattcagttccttcaaagggtctgtggattctcttggctttcctggtatatttctgtgaccgttcttggagcaaaaattcacagtgtggtacccctacaagtgcagtggcatcagggttgtgggttaactctgggattttctcctcggagaaatactgggatgcctctgattgaagtagtcaggtgggggcagggtggttgtgctggagtcccaggttgggcagctctggccagtgaggaaaatcgaggactggggcctgcatggagaaaagcccagcgacttttccttgaggttggtgcttggtgctgggagtccagaccagcccctggtccctgcagactctccagagcctggagacagcaagggcaagggctgcgggacagcaaatatggcaacccacgccttccactgggacctctgacccagggacttgcagagctgctactggatcagccctggtgggagactgctggagatccaggagaagtcatttgcgagaaacttacagttttagggatccagatttggaaggaatgagcccatgagtgtacctacgaagccgttatctttttttttcaatgcactaaactgagacaatgactctggcacattaacagacttaccatggcttttccccaacattttaaatgaccaacacggagaactgtacaatcagtgtttatttgtcatactttgtcatgagaaa

SEQ ID NO: 479290 - DNA, 535 bp, Homo sapiens
ccagcagatcaaggggtactcaggtgggaccgacctcacaagatggccctgaagagttcaggcgtaacaattcccctaaagctaaaggagcaaatagagcctagggagatgggctttcctggccttacaccactacagatgctcccacacaaaaccctctgggctccacctcaactggcatgctgcccctaccacttctctaagcacctctccctgccaactcaagtgttcatggtggttgaggggtctcctactgctgaaattccagaggcccatggcaagattggattgctccttgccagttcaactcacccattcccaggggtcactgggggccagaaacaagtcctgacacaaagttttagaaataagatgatttgtctgtgggattcgctattttgcatgtttacaataatagaaaaataaatgtgattcaatagcattcattctcatgtgaatttcagttcatcatacttcaaattaatgagagccatctatgacaaacccacaacaatcatcatactgaataggcaaa

SEQ ID NO: 479291 - DNA, 548 bp, Homo sapiens
cagtaagctgcagacatcatgctccttatactcagcaggatatatactcagcatgtatctcctgagggactgaatatacaaacaggcaatggccagaccatatataacaatagaatcctgacctacaacctctacagcaataagcatgggaagccaaaccacaacctcagtagcaatcagcccagatggccaaacgacttggaaaagaaaactacatgggtgatgtgtccctctcgagagcagtccttcgttatagagaaagctctgagtgtgtttcaaaatggcaacttgaaccctcttaccctcctgccctcctcttgccagaaacgtgaggggattgtctttagatcttcatctgaggaccttcttggctttctggagcaagcttccactgattcaatttcttcttttatttgttcactatattagtctgttttcatgctgctgataaagacatacctgagactgggtaatttataaagaaaaagaggtttcatgaactcacagttccatgtggctggggaggctttacaatcatggtggaaagc

SEQ ID NO: 479292 - DNA, 1552 bp, Homo sapiens
cacactctgtgcagagactgggcggccagcctgcccttgctgtcgctgacggtgactgcgggaggccaggttgtttttcatcattcagaacattgcctgaagcaggtccaccgtgccgttagtaacgaggaacatcgagccaaggcacctgtgccgtcagacgttgcctagcgttagaagcgagctggaatgcgtgaccaacatcaccctggcaaatgtcatccgacagctgggcagcctgactcccttgctgagagggtcgatggactacaagttaaagtcactcagctggatcccaaggaagaagaagtgtcactgcaagtaatcaacacccgaaaagccttcagaagctccaccattcaagaccagaagctttttgacagaaactctctcccagtgcctgtcttagaaacatacaatacctgtgatactcctccccctctcaacaatcttaccccttacagggacgatggaacagaggcactcaaattctacacagacccttcatacttctttgatctttggaagaagaagatgctgcaggacaccagggatatcatgaaagagaagagaaagcacaggaaagaaaagaaagataatccaaatcgagggaatgtaaacccacgtaaaatcaagacacgtaaggaagagtgggagaaaattaagatggggcaagaatttgtggagtccaaagaaaagctggggccttttgggtatccacccaccttggtgtaccagaatggcagcattggctgtgttgaaaacgtggatgcaagtagctatccaccaccatcacagtcagactctgcttcttcaccttctccttccttctccgaggacaacttgcctcctccaccagcagaattcagttacccagtggacaaccaaagaggatctggtttggctggacccaaaagatccagtgtggtcagcccaagccatccaccaccagctcctcctctaggctctccaccaagctctaaacccgggtttgctccaccacctgcccctccaccacccccgcctccaatgataggcatcccacctccaccaccgcctataggatttgggtctccagggacgcctccaccaccctcaagcccatctttcccacctcaccctgattttgctgcccctccacctcttcctccaccaccggcagctgactacccaactctcccaccacctcccttgtcccagccaacaagaggagcacctcctcctccccctcctcctcctccggggccccctcctccccctttcactggtgcagatggccagcctgctgtaccaccaccgctttctgacaccaccaagcccaagtcctccttgcctgccataagcgatgcccatagcgacctgctttcagccatctgtcaaggttttcagctgcgcagggttgaggagcagcaggaacaagagaagtgggatgtcgtgggcaatgacgtggccaccatcttgtctcgtcgcattgctgttgagtacagtgactcagaagatgactcctctgaatttgatggggacgactggtctaattaactctttctgcctg

SEQ ID NO: 479293 - DNA, 644 bp, Homo sapiens
ttaatttgcatgtcacataagcgatgcataatagtttcatttgcgcatgtcccaaatattgtccgggacatgcttttttgtctcggggagggtcgaggcataatcccaaggtgctgcggggtccccgtgagaatgaaatgctggccctggcagcctctaagcctcatgcccacagcagcagcagcatcccctccatgtgtcttccccacgcaggagaggcaccaaccgcggggatgcccttgggggaagccaaggaacagacctgcagaaatagttcagcagaggccccaggacaaagctcaggggctgagaattccacaagtcagagctttcaccgaaacttgcatgtgacttgtgaaatgcaaacattccagggagaactgggagtgacccgcaccctgtggcttctttcctggaacacttcagcacctgagtgtctcccagcccaagtacagaggtggtggccctggatgtggcccagacagaccagtgccagccccagtgccacgctctgaaccacccagcgtgccaggcagctcttgcagtctcaggctgctgtgtagcagtgacacctccagcgaagtggcaccacttattgccagctccctggacccaagccctccctggttgcctgccctggtggg

SEQ ID NO: 479294 - DNA, 801 bp, Homo sapiens
gcagcagtagcagcagcagcagcagcaacgacccacacctccgcttcgcaatgactacgtgcaggtattttacatacatgatcttctttaaggagacaatcatactgacagaagccttatggggtagagtaagagtgtctgcagtcggacccaggatgctggttggagcaatgtgggttatgatgacccagagagacaaatctagtcagaggccacctgagactccactggaaagaccaaatacaaacatgtgttccaaaggccggagacaagatcaatatttttttgcaaagctaagagttaacacacagagggagaccaaactcagacaaaaaaacaggacagggacaaatgagaaggatccaggaccatcatcctggttggactcaggcatctgcttgtataaaggcagtacagtggttaagagcatggactctggcaccggaccgcttacattcaaattctggctcatccgcttcccagctgtgtgaccttgggcaacttacttaagtgctgccttcctcagtttacccatctacaaaatggggaatactaatcacacttacctcttgggcttgttgagagaattgagtggtttaacacatgtgaaggatttagaatggtgcctggcacaccaggccaccactgtcctcattcccaagaatgtttgtacttttaactatatatgtatatttccataaataatatctagaactgtatgctttaaaattttatgcagatatcatattgctatggtttgaatgttccttccaaagctcatgttgaaacttaatccctaac

SEQ ID NO: 479295 - DNA, 724 bp, Homo sapiens
gttccttctaaaggaaattctgtgaggagggagacatgagggagtgtagaggcaatgtgagaagagtggaggaagaactggggacattggaggtcctggttcttgggcctttgggctccagaccctgggacttatgccagtggcaccccagttctcaggcccttggactgagactggtggacactcctgggcgtcgcggcaaggctcctatttatgatcagtcacagtcagaggaagaattcaatgggaaggagtgtttccatcatgattggtactggttagatagggagcagatggcctttaagcgagacatcagccatgccagacaatataacatacctgacctcctcttggcaaaactgaatcagccaagtttttctgccattggcaaaagtgtgattcagcagtttgtctccaatgccctcaaagttcctggacctctttctcttcccctcacttcagtggcatgggggcccccacccttttcgtgaggcttctttaataaggtctgagacatgcagttatttcagttgtatttctttgctgttatatgggagccctagtgatgtggtggtaaagtttgggaagaggggaagtgttctgtagtcctgtgattaggtgtcagtctttcaatgagcctatgccttttggctgtgacctccacaggtgcttttcaacaatgttcagttctgcatagtctccctgaggctctagtgtctcagtt

SEQ ID NO: 479296 - DNA, 552 bp, Homo sapiens
cctgccaagatcagcttgggcggagaagggggtccctggcagtatgatttgccccacgtgggagaactgctgcaggggcatggctgtgcaggagctggggcaggggacacttaccacgaagaagaaagaaaacaagccgcctattaaatatatcacctttggactttccagagacgtcaactttgccaaactccacaggaacccaacagccccctatggcaacactttccgaaatgcatgctctcttccaaagcaactgaagaacacagacacccccttctttcccctagacaaggctgttgtttttgtcccccaggttgctaccatgtgggaatgttgtggtgtgagaaagtatcaacaccccaaatgcagatcacacttgctttccatcagctatgaaggggccattaatcattctccaccctcgtatctttcccctgtctttgttacagacaagctgttcttacaaattctgaggagtatctctgggtggtgactaacctttggcattgtccatgtggtctgactgatgggggaatagtctcctagcat

SEQ ID NO: 479297 - DNA, 823 bp, Homo sapiens
ggcctctggagatctgaaaggtgctatattggggaggagggccttaaagtttgacagaaattcacagaatggtgcaatgtgggaaaattatacccatcactcacttgtagataaagacaaatcaaaagctgtttgcagtcctttttcggggcctttttcacttgtttctgagttgccagatctgaagcttaaagctggtcctggcccttcctggagcttcacccctgattctgactacccatgcccagccggctgtagaaggaagctgagcctgagtctggcccctcaattaggggctgatgccctaaccccgaatgtgactgcatttggagatagtgcttttgaggaggtgatggaagttaaacaaggtcataagggtggggccattacgactggtgtccttataagaaaaggaagagacaccagagctctctctccactttcctctatgcacagaggaaaggccatatgcaagggagaggcagtagagctgagtgacagttgctggtactgtgcagttgtcccttcgtgggccttgtttatagtggggcttcaaatggtcaatactgagaaaggagtcatgggcctggaaacaggaaatggctaaggtcaggcacgagatgctagaaagacagtaaggcaaagctaagtcatcggactctaggtaagcacaaatgaggagctttgaatgtgagaaacaaggtttttgggacaaatccagaatcaacgtttgccataagcagagagagtagaaagggaattgataaggttatgttggtaaatattggtggacagtttttgtttacatggattcccttttgaa

SEQ ID NO: 479298 - DNA, 1149 bp, Homo sapiens
ccatcacactgtcacctctcagcaggaaagttcgtgtgcaggggaactgccctttacaaaaccataagatctcatgagacagctcttctggtcagctatggtgagcctgctctcttcattgtgcattctccacaaaagaacctctgctgacgccagaggtctctcccctaggagtgaaaggggaccaagcaggggagatcttggtgaatattggaaagatggagccaaggagacccatgcacttccaattagacagcatgctttccatggctcgctcaacgccttgctccttctcaaagcatgctcagagagtttcagctttggcaaaggcttgagagatttcatgctcctttccccccaaaaagcaggaaataaagatccaacccttcataatccaaaccacacggggaagaggcaaagcagagccttcaccaagaattcagacgttcagtgtggtggtcagacctcactgtacagactccaaattccaaatgagctttgcctaattcctccagttctctctcaccatcttggacctgcacaaaaacgtatctcttttggcttttttgcagaccacacaattgcattgcacaacctcagcctctgacattatcccctttatgctttaaaggccagggaactgaccctaaagtttacatgggccagataagtgacttccagctaagggggtagactagaaagaaaataattaccttaaatcttattttacatgtcacaatatgaagatttatcccagacacaagcatacattcttaattataatcacagcattgatctgagcaagtataagatatatggccacaagttgctggtggttttgtattaccattttagtgcaattaacgtctaccactaaagcaccatcttacgcataagacaaaattaaaaagaagcttgaaatgttatatcctatccaggaaatgttactactgcattttcaagatgaggagttaaggttttcatttttaattactttactgagtgattcttcttaagggaacctaattgtgaagaatataaattactttgcaagtttatggtgggggactagtaatccttttgggatgcaaacagaaaagcaaacgagaatttaggaacactcaatggtaaaatttaacatttctgtcc

SEQ ID NO: 479299 - DNA, 605 bp, Homo sapiens
cagccacttctcctacaagtatcatgaccgtcaaacacaccttccttttcggtgtggaggggggatgtgggcagagtggggccacgagggtttgcccaaatccatggagagccctgtacaagccactgaattatcttgttggatgggacacctgtgccaactgtggcatgagtgtgggtgaaatactggcacatcacagaccaggggtaggagagttcagagatgaccccgcacaacccagccttcgcatgcagaacatgaggctcagagatgtttgcatagaagaactggatacacacacgcaaacacacgcacacaagcacatgcacgcatgtacacatgcacgtgtacacgcactcacatgcacacaggcccgcacatgcacaactttaagaacattgtattacttccttctggcctccacggtttcagatgaaaaccccattgtcatccaaattggtgttccctgataggagattctaggtcctatttaaagaaaccagtttaggtttagcatacagatcctgatctacttttttggactgtggtttcaatgacagtttaattttcagagccttttcagtgcttcttggtatgcttgattt

SEQ ID NO: 479300 - DNA, 699 bp, Homo sapiens
gatcacccgaaaatgccaattgtgataccggtggaggatgcttctcacaaggtggtacttgggatgcagaatcaacaaggcttgatgatggaggaaacaggagtaagggtgactgacacctggttttctgacttgggtgacagggtgggtgggggcgtggtcactgagatagaggtccctaggaagagaagcagatttggggctggcaatgacaagtgtctgaattatcttgttggatgggacacctgtgccaactgtggcatgagtgtgggtgaaatactggcacatcacagaccaggggtaggagagttcagagatgaccccgcacaacccagccttcgcatgcagaacatgaggctcagagatgtttgcatagaagaactggatacacacacgcaaacacacgcacacaagcacatgcacgcatgtacacatgcacgtgtacacgcactcacatgcacacaggcccgcacatgcacaactttaagaacattgtattacttccttctggcctccacggtttcagatgaaaaccccattgtcatccaaattggtgttccctgataggagattctaggtcctatttaaagaaaccagtttaggtttagcatacagatcctgatctacttttttggactgtggtttcaatgacagtttaattttcagagccttttcagtgcttcttggtatgcttgattt

SEQ ID NO: 479301 - DNA, 1958 bp, Homo sapiens
tgggcagaggcagatcatgtgtgggtatgaatgtcaggaagacaataggattggaagaagcaaatcatgtgtggggagcaagtaagtggtgggtagagcagatcatgtgtggttatgaatgtcaattatgcagaaaggcattggcagaggtagatcatgtgttggtgtgaatgtcaaaaagacagtaagatatgggcagaggcagatcaggaagacagaatttgtagcgaagaaccagatcttttgtgggaatgggtcacaggaagacaaagtgaagacaagtgaaaaatcgtatcagagaatggaacagagaaagtatgaaaaagatggagatagccaagtaatagatgggaagacagtaagagatgagcagagtcagatcatgtgtgagtatgaacttcagaaagacagcaaagatagaggcaaatcatgtgcggggaggaatgtcaagcagacagtaaaagatggggaaaggcagatcatatgcgaggatatatgtcaggaagactggaagagatgggcaaaattgatcatgtgcaagtacgaatgtcatgaacacagtgaagcagccactggaagattgtgtgaccaagggtgtggatggccacacgcacctcatccagaccatgagcaaggcaaggaaggtgtctctcttatccactgggaaataaaagtctttgccagtggccatgggggctgagtgcaaaaatatatttttaaaaggaatgggaagtttaatcttttaagccaagttcatgaatgaagaaattaaggatggcaccaagtgtaaggcatatgccacttgcctctggaaactggttcaatcctaaaaagtgaaatggaaaaaaacggtgctaaaatttgggtcagagatattacaggaaaatattttcaagtcgatattttctgtggccagggctcgtcctggcagtagggatctcccttgtcacaagccagacccctctgcaggaccaaattcttcttcctccacagggcccaccaggctggtagggcagattcggtggagtttgaggagagctgtttctgttcgttgccaacctcctgtttcccagaggcatcaccacaccattttccagaagctgggcaacaaaatccatgaggacactaacttggaagaggaaaagagttttcagggtctttgtttccttggtttttaaaattatttactcaagggcataaagttgattttaagatgtgcaattgggagggagagtagtttagataagaagtttgaaaggttccttgtggataccctcttctggccatcaaggtgtggatgtgcacttcttaaaattcttacacactgcatctttcagcctggggaccacacaaaaacatgagcagtgacatcacactaattatgggaaacagagcttccctcttattggccgatgggccctgaggctgtctgctgaagaatgacaggacgatcttcccctcacattttcccctggaagaaaaggaggttttggttgtgatgtataccagtatccaggaatgagcaggaaagaaggagttgctggctacttggttgattataagagagttgtgaagtagtggatttggaaaaacctggttttcatagaacagaatgcaatgaaagcctaaatccagcattgcttacatagcccctgaatgaacagagcccaattgagacaaacccctgaccacaggaagttcaaggaagagaaagtaagcaacttgggctaagataagctgtagcaaaggaggggcagtccccgattaccaaagaccatttttgcctggggcctttgcaacacacagtgttcatgccctagcatggcacctgattgttttgatagcaacttcattgcagttttaccaggttatttcttgaaatgataatatagcctgtctgttcactgtttccaggcagtgatatattttcctagttgtttggtttttaaaataaataa

SEQ ID NO: 479302 - DNA, 573 bp, Homo sapiens
tcagagccacatcatgtgtgggaagacagtaaggcatggacagagacagatcatgtgtgagtatgagtctcacaaaaccggttagagatgggcagaggcaggtcatgtgtggtatgaatgtcaggatgacagtaacagatgggcagaggcagatcaatgtggtatcaatgtcagggagcaagaagacagaatttgtagcgaagaaccagatcttttgtgggaatgggtcacaggaagacaaagtgaagacaagtgaaaaatcgtatcagagaatggaacagagaaagtatgaaaaagatggagatagccaagtaatagatgggaagacagtaagagatgagcagagtcagatcatgtgtgagtatgaacttcagaaagacagcaaagatagaggcaaatcatgtgcggggaggaatgtcaagcagacagtaaaagatggggaaaggcagatcatatgcgaggatatatgtcaggaagactggaagagatgggcaaaattgatcatgtgcaagtacgaatgtcatgaacacagtaagagatgggcagaggcagatcatgtgtgtgtatgaatgt

SEQ ID NO: 479303 - DNA, 557 bp, Homo sapiens
ggcagaaggacatctacttcggatcatgagcgatgggcctgtacaagacagatatgccgaagaaggtaaacaagtccagaaatccaggactgcaagagtcacagagaagctcccctgcccccagtggtctcagctgcctgcacgactgaagtgggtgagtctcaaggtgatatccagaggctgctggcaaaccccacatctgcctcctgctgatgctcaaaagcctgtcctgtgcagccaccagaaggaagcggcttctcctcacctccctcctccccaaatcagggcacagggtctcttggggcagaatctaagaatccaggtctactggcaaaggagtgtggcaagtgtcgcgtccaggctttatgcctctaaggacagggaggaaccgagaagggctgggatggtggcaagtaccaacaatgttcagccctttagaacacatcagtgactccgtacattaactgcagagaagcttaatctttttcgtcttacatgaatataaaaggaagttgtaagatatgtgtcctgctcccaatggactgatttctgccccc

SEQ ID NO: 479304 - DNA, 701 bp, Homo sapiens
tgagaaccagtgatcggtctaatgcccccattctttagtgggacacgcggaggcctagaaagggggcagcacattgaatggggcaaagaaaatggagccagcattgggcaggcctgtcagaaacaagtaacaggacctagaaaagcgcatggcagtaaaggcacccaccacagcccattcgaaatacagagaaatgtaatacattctaattttaaaagactagactttaatggaagcataaattcactctcagtcactcagcaaacatgtgatgtaaatactcccaacatgagttatttccagaacaccggagccggagcgatcgccgagagcaaagagcagctgcccccctttccattgcagctcctccactgccagcctaccctccagctcacagccagaggaggcaaagcattcataatgagattgacatacagtcttctgcaactctgcaggctattgtactgtaccttggtcattaatggcatggaccatgaagctaaactgcctgactttgaataccagctctaccacttgcgagcttctctttatctgtaaaatggggataatatcaactttacaaggttgttaaggaggctaaatatgatgttttagaaataagattaaactatgtatatgtatttgtgcaagtgcctagcacagtgcctaaaatacctgaatgtgagtctatattcaaaatc

SEQ ID NO: 479305 - DNA, 632 bp, Homo sapiens
ctcagcaggccccgccatgatggtgcacagtgttttgccatactgtgctgcttgtgagcaaggcaaagataacgagcatctaaaaatagccctgcagttggaggtacagcttggcttgaccccgctattagaggggtggggtctccgttaccagctccctgaggagcaattcaccttcaggtctcaaggcaaggcagggatgctgagtgctggtccatgtgagaagggcagcagctctgagaagcctcatccattcccgggtgaggcccaaagccactgggctgcaaggctggaggatgggagcctggacaggggtccctcttttgcccccagccatggatatccatccctggctttacatcccctggtggaaacccctggacagttgggtgaggagcctcttcctggtcagcaggagggtggcgccagcctgtctgaagggggccgcctccagctgatggtgaagaggccgcctggaatggagataggaagggactgaggactttgcagtgattgcagtggaagcaggaagtgcaggtcttctgtgggtcctagattctgtgagcctgctaggctcccctcattatttattttcaaaagccttcatttcttccctgttcactttttctttc

SEQ ID NO: 479306 - DNA, 641 bp, Homo sapiens
ttgaagtaagagtaggcaggaaccagtaacctttccccttcacatgcaagttagaattgcttcaatttgcccctctgtctactatgtttattctgttgggaaatttgtaaagaaaagttttatttggctcatggtcctgcagccttacaagaagcatggtgccaaccacctacttttggtgagggcttcaggctgcttgcaatcatggcagaagacaaaagggagccagaatgtgcagagatcatctggtgagaaaaccagggaaaaagaggggagagaaattgtagaaaagtatgtgaatggacatacagttgtcattgaacttcactggaagactagggtgaagagctggcctggagaaggattggttattagttggaggagaaaactgaaggctcttctttactcattgtgctacgttttatctggcttctcctatttgttgcttcccaccccacctcaccctaccccatcctttgcttatttcctgtgtacctactgtgtattgttcgcctagccatttccccaaatacctcagtcctgtttgtgaggagataacatgctgtgatggaaagatatagacttcagagtatgtaaagaatgtaaattatgtattcagagagaaccaagcttagttttgc

SEQ ID NO: 479307 - DNA, 522 bp, Homo sapiens
gtcaccagcatcaaagaccaaaggtagataaatccacgaagatgaggaaaaaccagtgcaaaaaggctgaaaattgcaaaaaccagaacacttcttctcctccaaaagatcacaactccttgccagcaagggagcaaaactggatggagaataagtttgacaaattgacagaagtaggcttcagaagccatgttcaagagattacccagtcctgctctatctgccactcagtgtcacccccgggctccctctggccgccaccttttcctacccaccaagcccagggccaggtaccaaggcaatattggcaagtagacttcactcacatgcctcccaataaacgaatctgctatcttctagcctttgtctgcactttctcctggtgggtagaagcgttcccagcaacttcaggaggtgcaaatgtcgtcacgcaaactctcattatgcatataatttcccatttctgactcccaatatccatccagtctgataacaggcctgccttcatcagccaaattaccc

SEQ ID NO: 479308 - DNA, 812 bp, Homo sapiens
gctgccacactggccggcctgcaggtgcatgatctcctgcatggtggtggtgctgagggtggatgtggcggaggtggcgctccaagctagccccagtggaccctggtgccatgctggcccctctaaacccgagtttcaggcctgcaccagtggtcccagacaccaggcaacctgtgcagacaaaagctccagttataccccacggccaggccagctgccactgatccaagttccaggcctgctctggcaacacttctaccccaatggacccgggctccatgcccaacccagtgacaagccagtccaagcagacctaagctccaagtttgcaccagtggtcccaaacaccagtctgccctctgcagacagagaccacaggcccacttcagatgcaggctggtccccacagacccaggctttagacacattccagtgccagaatggcccctgtggacctatactccaagcccagttctgccccagcatcagggaagccaccacagacccgggtctccccttgtggatccatgctccaagcctgccccagtggactccggtgccatgctggccccatagacccaggcaccagttttatccaggcctgactgtttgcaggcagacccttgcagcaggcccgtctacagtgcccacttactatgtgtgtccttaatgtcaatgtaaacaatgcttggttcagagtttttctttttctttcagcactttgaatatatcatctcactctctcctgtgtacaaggattttgctgagaaatctgctgatagtattatgtgagttcctttgtatgtcatgag

SEQ ID NO: 479309 - DNA, 670 bp, Homo sapiens
atgggcctgcctccagttctaatggggggctgcctggaggtggcatgggttgggccctcttctggaaggcttgccctaaaggggcttggtctcagctctgctatgggcacactgtgcttgacagttatgctccacctgggaacatccggtcacactgtgacagagaggcaagtccagatgctgtgggtgggaccatccaaggcttcttgaggagaggacacctgagcagagattcacaggtcacctgggagttgtgtgaagtagtgggggaggtcttcaagggcccagcgaacagcgtccatgggagcaggggacagcgggaggggaacttggagagtgggagaggcaggcgcagagtccagggatctgagggaagagagtgtttcatggaggaagatacagctgcttgtagatataaagcctcaccagagtggtccctcgtccgtgtgctgaagcctgctgcactccaagggctgtctgtgaagcagtgaagaggtaactttgatttttaggacatttattaactagagggaggaagactaactcacacaactagacagatggcttctattgatgcagaatcacaggaagagtcacagagaattagtaaatgattaaacaagttaatatttgtaaaatatttagaacagtgcttggcgtatattatata

SEQ ID NO: 479310 - DNA, 663 bp, Homo sapiens
ctgaacatttttattaatagaagacaagagtgcgagccttctgttatacgcagacagggccaccagaagggctccttggtctagcggtgacgccagcgtctgggaagatgcccgttgccgagcagacggtggtgggcactggtgccacttcgcatgcattccctccagagcctgctatgagctttcctttggaacctgggttgcttgttttacttcatggcgctgagcatttattcctggagcattttatatccaagaattcgggcttacctcttcctcctggctggcttaccaaatatatattaccaaatatattaacagtggagggggtccaggttcttggtgtgttggagaaagtattggataaaatgcacaaacagagcaaggaagggacgaagggacttattgaaagtgaaagtgcgctccacagcgtgggagtgggcctgagcatagtggctcaaaggccctgttacagagttttgcttgccaacaaacctcctggaagggagaataagaagggttgttaccagaaaaactggtcccccataatggggtctatccctgtttggtaccatgaagccaatacacaaaaccgcaagtgagcatcaaaaagcggaggctttcaaaattgacaaatgggatctaattaaactaaagagcttc

SEQ ID NO: 479311 - DNA, 2188 bp, Homo sapiens
ctatcccagatgagctcccaaattttcatggtaacctgagccagggccctcagttctgccgctgccattggaacctgtggacggtgcgggacctggaccgggaccgggacaaggaccaagaccagcgcggtgacccgagcaaagctgtcacccccgccgccgccgacccccatacccgccactgttcagcaggagggcccctcccctcgccccttcctgccctctcgccaaacgatgcgctcccaaagctctgacggcctggatggactcaagagctgctaaaatgactgccccgccccgccccgccccgccccgccccgcctcgcctcgcctcacctctctttttttttcctcttgtcatgaaactgctacctgggttaacagccaagtccctgtctacccgcagctgtgctggcatttcagctgaccaatctcgctattcatttcttgccctctggtactgcctagttgatcttcttctgcctcccttccatcctgcgggcttctccctaccagatcctgaggacctaccactaacttttcaggaattttgtgagctagatgatgttacactgggagcttgcagttggccgtggtgggagtatttatatgatggaaatcagcaaacattagaaatcagattttttgttgttgtgaagagctgtttgctaaacatctaccagtgcaccactagtcataccattccaagctcaatgaactccaagaaggataaactcaaggacatccacaccaacacatatcataatcaaattgtacaaagccaaagacagaatattgaaagcagcaaagagaaacaactcattatgcacaaaagatcctcaataaagattaacagctaatctctcatctgaaacaatggaggtcagaagactgtgggatgatgtatttaaagtgtagaaagaaaataaaaccctgccaatcaattctatattcagcaaaacaacctttcaaaaagggagaaactgagacattcccagttaaacaaaaactgaaggagttcactgttgttagaacttccctacaagaaatgccaaagggcatccttcaggctgaaatgtaattaccatatatagtaactctgtaactgcatgaaaaaaaaacaacaccgttaaatataactacatgggcaaaaataaaagtcagtattaatgtgtcttttgtttataactcttcttttttcccatatgatttaaaagacaattgattaaagtataaattataatctatgttgtatgaaaccaaaagcacaaggaaaaaaaggggaaaaaagataaattggacttcatcaaaatttaaaactttatgctttcatggacacatcaagaaagtgaaaagacaacccatagaatcacagaaaatatttggaaatctgataacagtctagaatcccaaatacatataaaattacaactcaacaacaaaaaacaacccaatcaaaatgaacaaagaaatagacatttttttccgtggagtatataaaagtgaacaataagcatatgaacagatgcttaacatcattagccaatagaagaatatgaataaaaaccataatgagatactacttctctagcatggctgtaattttttaaaaagtgaaaataaattttggaaaggatttggagaaatgagaaccctcacacattgttgacgggaatgtaaaatggtgcagctgttgttgaaaagtttattagttcctcaataaattaaacatagaatgaccatatagcaattcaactcctagatacatacttgagaaaactggtaatatatattcacacaaaaacttgtacgcaaatagcagcattattcatagcatccaaaaagtggaagcaacccaaatttcaattattcaactctaaaaatgaatgaaatacagatacatgatacaatgtggatgaaccctaaaaaattatgtagtgctgtacaatttattgaacaattcatgctttccctaccaatttgaactattaccagtatcatattttgataataacattgaaaacgtagcagtctttggcagtcaggtctttcagagattcctgtgtaatgattgatggttattatagcctattctattttaattataaatgtactaaaataatgcaacttatctctaagcagttattttaagtatttttctctggaaggcatttttgtgaaattattc

SEQ ID NO: 479312 - DNA, 1955 bp, Homo sapiens
tcctggaaattccggaattaaatgcaaactaatgagggattcgacaaggcatctatatgcttaacaagctccctgctgattcttattatcagccggctttgggacccacagctttacactatggattgaccgaggggacaatagagagggaatgggaactggctattggacatggtgccagagctgttgtggacaaggaaattgcccttgaggaagatgtggcagttagaggagtgaggcaggatggctgtgtcatcaagaaagtttctcatttgctacatgttgggtgcctgcaatggtttactctccaaggtggcaggcctccctggtatcaaccaggatacaggttactgcagagatttgttaagaatcgattaagaagacaaccttctgagatgatgacatttaaaggtgaaagtgataatggtgctggggaggtgtacctggggatcatgggctttatggtgctggaaaaagctgacatttatggagtgcttactaattgccggccagtgtactaaggattttacatgtgttggttcattttatcttcctgataacccagtgcagcaacctaataggaaacaaatttgttggttttataacatctcatgtatactatacattacttaaatgaatggttttatacgacacttagcttgtgactactttgatgcaggccagagtctggcaacatttcccaaaccatattccataaaaccatagggccccataaatggtcaaatgtatttaaatggtcaaatatatttacagaataaactgccctcttagtcgcagtgcacattaggatattaaaggtgctgaaagtcctgcagaaaaggcctgcatatacatacttcccccaaatttgcttctgttttgaggctccatgctctccaactgaattatctccctctgggattctcatcctcacctcatgtgaccagccttaccaaatgctttgactctgtcattgggccaggttctggactggctgactttcacatttccctctaggggcaaggaatacagaaagctaagatttgggccctgaagaaacattatttcatagtcttcctgagggtctcactgcttattctcaggtgtgttagcaagccagaggttccggggcctgcttgcacatgtgcccagcttagaagaaatcccataataggactcgttcattgtattagacatattttgttgtcatggtttttaaagtacagtacaacaatatttgtatggaaaaaaccatgcttatcataggatgtaatttgtgcataattttctagatggagtccagaatacatctttttcaaaggtaaacttaatgacatttgtttcataaataccatcattcttcactgtcagtcctctgtgaacactctagcctctgacattcagtgaagcaataaagaaatcaaacatgcctacctaacctttatgaaaatatttaaaattatgatttaatttttaatctcccatggcagcagtaaaataaatgatataaatctcaacaggactgtctacttcacaataacacttagggtatggcctaaacaggcaagaattcctcttaatcataaactgatgcggcacaggtctgggcaaagggagggtggtagatgttgacatttcgcatttcctggggacccagagggtagagagtggagaggcagttttgaaatgtcctgtactaacagtttgggtataaatacaatgtcctgttcttccttgccactgaatttttctttcttgtgattaaaacaaaacaaataaaaaccaagaaaactcaaaacacacaaaacaaccgccaggccaaaaagaagtgtaaagacaaggaaaagcatgtattttaaacttttaaaaggaaatgaaataatctactcagtctaaaaggatgggatttaaggtttagagtccattgtgaaatctcttacacaattagctaaggt

SEQ ID NO: 479313 - DNA, 724 bp, Homo sapiens
aacaggttattgtaaggcagtgtgtgcacgttaccaccccatggaaggtttgatggacatggacatgagccccctgaggccccagaattatctttttaattgtgaactaaaggccgacaaagatgatcactttaaggtggataatgatgaaaatgagaccagtggtagcaagtttccacggaaaaaagtaaaacttgctgctggtggtgaagaagaagatgatgataatgaagatgatgatgatgattttgatgatcagaaaactgaagaaaaagcaccagtgaagaaatctaatccccttccctccgtggcaccaggtgagagttggccaaaagagaaatttgtgcaagatttggaagacagaaatgaagtagctatttcactctctgagggtcgttgttacatgcagcgagaactagacatagaggtgcctgctgattccagcttattcttgcttttctccattcagaattcagctcttcttcccaattgccagtaagacaaatgcgagtaaatggtactctagtaaggaatttgggaggaatatggtggtggggactgatacaactgttctgttttacaaatcttcaattccccagtttaaagccccacttctcattcctgttcccttctgtacttgctgacttacagcccagagtatctccaggattctgccaaataggctggctcctgtttcctctggagcttccttataacattttct

SEQ ID NO: 479314 - DNA, 2472 bp, Homo sapiens
cggcagcagccggtaccggaagtggcggcagcagctgaggcgacgcaccgtgaggcagctgcttgactaggccacagccgccatggcgatgaattttggggaccatgccagcggcttccgccacaatgatgtgatcaggttcattaacaatgaagtcctcatggacggcagcggcccagccttttacgtggccttccgctcgcggccgtggaacgaggtagaggacagccttcaggccattgtggccgactctcaggtgccgcgcgccatcaagagggcctgtacctggagcgctttggctttgagcgtgcgagtggccacgaggcagcgggaggagctgctgcaccacgttcggcggctgcaaaggcatgcggaggagcgccaggcgacctcctgggctctaacgtcccagctgcagcagctgcgcctggagcatgaggtggcggcaacacagctgcacctcgcgcaggctgccctgcagcaggcgctgaatgagcgtgatgggctgtacgggaggctgctccagatcgagaggtttccccaggccgctccactggcccatgaaataatgtctgggccgcaagcagagcagaatggggctgcggcatgtcccctggctacagagcagcagagcgatatggtggccatggggacacatgctaatgcccagatgccaaccccgacagatgttctttatgtgccaggacctctgagtccctgggcccagggcatgcaaccccctctgccagtgccacatccattcccacacccaccaccattcccaatgaaattcccatccttgccacctctaccacctgctgtagtcacgggggcagaagcagcagcagtcccacttcagatgcctcctactgagatccacccaccttgcccgtggcctgcagtgggcttccaggaggagatggcccctctgtggtaccagagaagctacatccaggaggaagattccaaaatccttcaggggtcattccccttaggagacagcagaagccacagccagggagaaggttcagagaggtcccaaagaatgcccctccccggggacagtgggtgccacaacccgctgtcagagagtccccaggggacagccccactggggagcagcggatgccactcccaggaagaaggtacagaaggaccccaggggatggatcccctggggaacagagagagacaaaatcagaaagaaggtccaaagagggcccggaggatgcacaccctggtgtttcgcaggagccacaaatcagaaggtccagaggggccccaggggacggtcccccagggagacagcagaagctacagccaggaaggatgttcagatagggcccaggagatggccaccctggtgtttatcaggaggtgcaaaccagaaggtccaaagaggccccagtggactgtccccctgggggacagcagaagtcatatcaaggaagaaggcccagaggggccccagaggattgtcctccagggagacaacaggagctatagccaggaaggaagcccagagagggcccaggggatggccaccctggtgtttagcaggagctgcaaaccagaagaaggtccagagaggccccaggacactcccctgggggacagcagaagtcatatcaaggaagaaggcccagaggggccccagaggattgtcctccagggagacaacaggagctatagccaggaaggaagcccagagagggcccaggggatggccaccctggtgtttagcaggagctgcaaaccagaagaaggtccagagaggccccaggacactcccctgggggacagcagaagtcatatcaaggaagaaggcccagaggggccccagaggattgtcctccagggagacaacagaagctatagccaggaaggaagccgagagagggcccaggggatggccaccctggtgtttagcaggagctgcaaaccagaagaaggtccagagaggccccagggcactcccctgggggacagcaggagccatggtgtcagagaaagcccaaagaaatggcaacctcagaggcagaaggccaagaaaccaaaagtgaataaagtctcgggatcccagcagcaggagaagcctgcctcatttccagttccagtgaattggaaatgcccatggtgtaaagccattaatttttcatggcgtacggcctgctataaatgcaagaaagcctgtgtgccatttgagagtggaggacaaactcagtgatttcaggaaggctcccccaaggcagctgctgcaaggcaaggagggatccagggtagagctcagggatggtgggttagatctgcctccagtccaagctaaagatgtcttcaagtttccctgtaagatcccgcccagctcaccaaaatcaacctttgtcaggggttttctgatcctaactagtaataaagagtgtgcactggactgctgtgtcttctgtgtagtgtgtatctcagggcaaattttct

SEQ ID NO: 479315 - DNA, 704 bp, Homo sapiens
tatttgacttagacaacatggtctggctgctgctgatagttttgatggctgacacacttagcaaagtctgtctctggaaactggcctcggtcaaagagaactgccttttccaaggggatggcatctccttgcctcaagaaggcatcttcccaataggaccagatgttcgcccaatcaatacagactgcacccaatcagatgaggttctagacccaactctttctggcaaccactgtgggatgaattactttggagaatgtgagagtcaaggctgtttccacctgtatgctgactctgtggagcaggggtccccaaccccagagccacagactggtactggtccatggcctgttaagaacctggctgcacagcaggaggtgggcaacaggcgaatgagtgaagtttcacctgtatttacagccactctccatcccttgcattaccacctgagctccgcctcctgtcagatccgtggctgcattagattctcataggagtgtgaaccctattttgaactgtgcatgtgagggatctaggttgtgtgctccttttgagaatctaatgcttgatgatctatcactgtctcccatcaccccccgatgggatcgtctagttgcaggaaaacaagctcagctacattatggtgagttgtataattattttattacgtattataatgtaataataatagaaataaagtgcac

SEQ ID NO: 479316 - DNA, 804 bp, Homo sapiens
tcctccaacgattcctcacaatgtgctctctcatgagagagcacgtgagtgagcaagtgcaggatccagccagccactctgggcaccgacacaggagcaagctctgtgcagggcccgtggctagaccaggcatttggctgcctcctgtcactatcaccaagacagcaagaccaacccctcttcttcctcctcctcctcagcctcaatgtgaagacgatgaggatgaagacctttatgtggatccactccactcaatgaatatttcttatcactatgccaagatgagcataatagattttccaagagaagattctgactttctacccccaagacaatttgaaatgttctatgtcagaaattcaggacaaaacttcattgtctttgacagaacttcaaattgtttcctctatcatgatggctcatcacctgcttttgtgttttgagagttgaagtgttttaccatcagattgttctgcttaaattcctcttctagcctaaaattccctaaacataaaattcatgtagcataacattatgcttcgttgaacccattgtatgtttttttttttctgagtcaggtaaaagaaaaatagtgtagaaataaactttaatgatcacacttttttatagagaatcagacttaaatgctcacatatttttaaaagaggtctttcattcttacaggtgtcttcaatatattcatctgaatagctaaaggaacattaatgtttcagaatctcttctgatttactgcttaataatatttaatatgatccttgatgctgaatatgtgttttaaaatgt

SEQ ID NO: 479317 - DNA, 673 bp, Homo sapiens
tgtttgctgtgccattactgctaagccatggctggcatttgcacagtctgctcttggaatgtgggcaaaggtgtaggcaaagattcagggacacatgtgcaggcttgtcacatggtggatatattgcttcatggtaaggagtcgaggaagtatttttatgggaacctgaccttaaaacttagaccagatggacggatacagctaaacttggagaagaagaaaggggagatttcagaagaaggaatagtgcttacaaagagatttgtccagaggaagcatgatgtgctcaggaaactgaaaatgtcagcgttgttgctcagacagaaagatgaggaaatcagttccagtgggaagacacaaaatataaaatacagtccacccttgaacaacacaagtttgaacttcacaggtccactcatacatggattttcttctgcctctgctacccctgagacagcaagaccaagccctgctcttcctcctcctcctcagcctcaacaggaagatgatgaggatgaagacctttctgatgatccacttccactgaatgaatagtaaatacatgttctcttccttataattttcttaatgatattttttctctaccttattttattgaaaaaataagtatataatacatataacatacaaaacattgactatggtattcata

SEQ ID NO: 479318 - DNA, 817 bp, Homo sapiens
agctgcctgtctcctgcaggcatttgaattttcatctctgacttaaatgatcgtatgtggctctcgagtagattcaggattgcggcatgcttgaaaatgggaacagcacgtttttcctctccaaagcacaatactgaatataattttgatgctacccaaaatgtatcagttgaagaaaacaatataggtttgtggtcaaagttgaaagattataaagaaaatggggacaaatataaattttctttcaaaataccaacagactggtttatctcaggagatgccaatagtcaatctccatgcttcccagtgatgacagccaaaaatgtctccaaatattaccaaatgtctactggggatacaattgccccaggtgaatctccacaccttccctgtgagctagataccaatacatccattttagaaaggagaaaattgtcaatgttgaccaagaataaaatcaggtctgtccaatgtggaaaattacacactggtcttccaaatgtcactggcctcagtgacttaggctgcccagagacagatatcaatcaatcaaggaggaacgtggaaaaaccaagatcccctgtttaaagtcttccagttacccagctgcaacagatcaccatgagtgtgttcatacacaagatctgaggacttcagtggagtaaaatctataatttggaattggtttaacagttatcatgactagcatgctgctgattcttaatgaatgtgtgttaacgtcaagtgttaatttagagtttaaaaatcagggctccctgtttacttccatgaatgtttattgataccgacatgtgat

SEQ ID NO: 479319 - DNA, 955 bp, Homo sapiens
tgaatttaccttgcccggatccttctggatcctgaagtcacagagatgggggtccgtgcgagcagaacccagggcatgaagatccaaaagagcctgattcagttttctctccggggccatggcggctttcatggtgtccggggtcttaccccactcatcttcagctggcttcttgatgtcctggaagagagcacggctgccacgctggttttgcatcttcaggagacgctcgtagcccttgcacttttcctcagccaattcgcggaagaagtggctcacgccttccagagccacatgatcgccgtcgaaatagaagcccagagagaggtaggtgtaggaggcctgcaggtacaaattgaccaggctgttgacggctgcgtccacgtcagtggaataattctgacgaatctgggagctcatgaaggagctaaccacaaaaacggtgctggcaggtcccagaagcaggagatggccaagaagatggtcctggaggttgcaagtggagaggaaataggagggcggtcggaagctggaagaaagagtccccggaactgttccgtccaaacactgttgaagcaagagacagacccgtgggaccgccgagcagcaattcaggataattttcctatccgggcgccggaagagcaagacgtgcggttctggttcatggatcatataatggacccatccctgactctgctgaatgccaagattcctccattcagattcagacatcaaatgggtttcagggaccagcttggctatgtccttgggcagcatgacatctttaatggtcattcacctgtcaaatcttcctcaagggtcttccacattgcagaggcctctagcatccccccaggctcctaaatgaatatctagttatttattttttgtctataaatattttataactatcatactattttagtagtgctttgtaaataattttcctatc

SEQ ID NO: 479320 - DNA, 2212 bp, Homo sapiens
aatttagcatagaggcaggcacctaggagatgactatctcctgatggaaaagaagaacgattatcagtggcaaatggcagtttcagcgaagcaacaccaacagccggcttcacactcactagagaatgctgtgcctcctccttgtgatgcatctgctcccccttcaccttcaaccatgattgtaagtgtcaggcctctgagcccaagccaagccatcgcatcccctgtgacttgcacgtatacatccagatggcctaaagtaactgaagatccacaaaagaaggaaagtgcgaactcagtcccccatgtacacaaattatgcagtcgagtctcccctgtttgtggaaatatcgggtgtcagcacactcagggtgcaatagatgagcctcaatctaggaaaaccacctttgtgctcatggtatctcccctgacaggtgcacaaacacagaattgttatctactcatcataaattcactgagttgtcattatgacatggtcttctttatcaatggtaatattctttgttctgaagtctactgtgtctgatatcaatgtaacaactacgtctttattgtgattagtcttagcttggtatactgcccccacctttatgtttacgctatgttgtgtctttatatttaaagtgggtttattataggcaatatagagttgagtcttgctttcttatccagtctggtggtttttgtctcttaattggcatgttgggaccatttatattcaatgtaattattgatatggttaggtttaaatttaccatcttgtgttatgttttctattggcttcatgaatttgctcccctttccttctttttggccttcatttttgaaagacattttcactgggcatagcattctaggttagcagtatttttcatttagtacttcaaaaatgttgctccagtgtcttctcacttgcatttttttctgatgagaaatctgctgtcatcctcatttcagtccctttgtatgcaacgtgtggcctctccatctttcctgactgctcttcaggtttttttcttcctctctggttttgtaaaatgttattgtgatgtgccttagtgtagctttctctacgtttcttgtgcctggtgtgtgttcagcttcttggatgtgtgggctaaaagtttttatcaattatgggtagatttcagcagctatttattcaaatatattttttctgtccctccctcctttattttctctctttcagggccaacaattgcacatatatttggctgtgtgacattgtcctatagttctctgttgctctgttcatttttcttacatttttttctttgtacagcttatattcccatgtctttaagttcactaatcttttttcctgcaatgtctcatacactgttaatcccatccagtgcattttccatcatagatatagtagtgcccatctccagaagtttgatttgcattttttctgtatcttccatgtcttgacttgactttgagcatatgaactacagttattataacttttaatattcttctcttctaatttaagcatctttgtcaattctgggtcattttcagttgactgatttttctccttgttattgtcatgttttcttggttcttcatttgtttgctaggttttaactggatgccaagacatgatgagttttagcttgttgagtgccgaatatttttgtaatctcataatttttcctgagctttgttctgggatgcagttaagtcgcttgtagtttcatactttggggtcttgcttttaagctttgttagatgataccaaagctgtgtttagtctaggacccattactctccactagttaggtaaatctcttttcagcactttgtatattgctcagagaattgagagactttccagtctgatagttgagaataggcattattgctagtcttgtgaaagtaccaggtactgttccctctaattcttttgcatggctctttcttatccggggcagttttcttacatgcttatgttgatcagtactatgagaggctttaagtagcaatgaatcaggtgtctatttctcgagatcatcatcatattagctaacttttattaaacactttttatacagaacataatctgtagttagactggggttaatcccttctgttccttctgttgtcggacgagctgttgatgagcaggcctgtgctaagcatgctagtttatttaatatattaa

SEQ ID NO: 479321 - DNA, 448 bp, Homo sapiens
cacactgtgatgtactcgtacaatggaatactactcagcaataaaaactaacagacttacatttgcaaacaagaagaagaagaggaagaagatgaaggaggaggaggaggagtcggcggcgaaggtgaagaagaaaagaaagcctgctagaaagtttggtttagagggaaacatctccaggttgataagtgaatcagacctctttgaagaggatgtagctgccaaaagaacttgcagcctgccagtggtgtcgaaacttaccagagagtgtgggcctttgctggtctgtagaagagaccaccaaggcaggaaggtggtgggtggtggtggtgcatgggaaggctggagctgctcagaggcaactgatagtggggaaatcatggtctggaggtgcagctggagcttgtctgcactggtctctgacctccttcagtgaatatcatcaaac

SEQ ID NO: 479322 - DNA, 953 bp, Homo sapiens
atcacagacagctgctcagctgctgtttcgtattatggttaatgccatagccactcagagaagagacactggtggagaaatccatatgcaggccactttatggtctcttcttcccatgaggggtcacacaggatatacttttttcccagcaataaaaactcagcaacatgtgtgtgattatttctgctcagggaaaccctttttagattccatgcttagggcttttattgagagctggtcacataggtaccctccacctagcatgttccgaaattccaaacacacaaaaaggaagtacgtgctcagtgtgagctatgttgtttgcacaaactgtccaggcagagtgattcgcccctatgagttagggaacattgagaacactctcagaattgaagttcccagatgccagccaaaaactaaccttccgagcaggccattctaaggatagcagtctcagacctactatgttaactctttcctgcgcaggtactgccaatactactgtgttgtgttacctacattcataatgtaaaaatgtcctctcccgtttcaacttcgaatcattttattcacttgatgagggattaagagtcatgcaaacatgatggttcttgcatcattttcatcttgcacttagacgatgtatgtgaaatacagccactaaaatgaaggtgagtgagatagtgctctgaagccatttaaacattctttaaaattgtacacttaggcattgtcacaatcagtcaataagttgcgtgtatgagcgaaagacaccaccagttagtcttttcaagtaataatatctgagagttgaccatatgtttgcctatgtagttatatagacttcttactgatcaatagtgctgaattagacttgttttttccattatagtcatagtcaatggacctctgtatgaataaacagtgatgtccaaccatgaacctgatgtttt

SEQ ID NO: 479323 - DNA, 734 bp, Homo sapiens
agtgttgctctggattaggtttcgacctaagggaatgttgtggccggcacaaggagaactctgcttctcagacctcttacacctcaccagtaacgtataactagttccagccaacgaaatgggaaagaaaattattggtttggctaaatcagagaaaagccccttggagactttctggcttctctacaagcaaagcccaatttataaagaacttttcttctatacatttagctatgaagttggttgtttggaattccaggtgctctctcccaattggaatgaaatgataaaggatgttttatcccaagagcttgaccaacagttcagcaaggtagaacaggaaaagaaaaacagcaaaatcaaaagagtacaagacctagttgttcccttccaccttttgaacttgacaaacattttacagattgaggaatgggcctataggagaggccatttggaccagaaagggagacatactgaaaatataaaaacttggaggaaaaacactgtagtagtttatataacaagggcctgaactgctcagatggcaataggaattttttaaaaaggacatattcaagacaataattattaaattgagttgataaatcgtcagaatatcattctgaatattgcaccttccccatgctcaatgtgcatacttcacttgtaaagtttaacaatgtactttatcttattaaagacattgagatatgctgaagaaaaaaagttaatct

SEQ ID NO: 479324 - DNA, 1133 bp, Homo sapiens
gcaatgcccttctcactgtgctccactgcaaaatctctgctttcagttggaagaagtagaaatgtcgcaaggttttcagcttttgcccaggcgttgttctgtagaagcgctttgctggttacttgtggaagtgcttttcaacccttgtggcccagggaagccaaaagattggacatccctgaaagggtatatcctggaagtatatctttccaaagttggttcctgccggtgggttcttggtctcaccaacttcaagaatgaagccgcggactttcacggacaccccaactgctgttgggaattgggcaatgaccgctctaactacttcctgctggatagaggcaaagaaggggccctgcagttgaaacctgctgggttaaggatttttgataggaaggctacgggttgtcagtggcctcagtgctttcgggctacactcttgtttacactgacagtaaggtgactgccacctccttgggtttttgcactgtgtgcaataactccatgatttccttgtgatatttaatgggggttccttcagaggttaggaactccctttctttccatattgcagcatgggaatgtaggattagataagcatacttgctatctgtatacacatttattctttttccctttcccagttctaaggctcggggcctgctttaaggttttgaaggctgtttctgcctctggttcccattctactagatgagtatttgccttctgggtctccttgattagagtatagagtggtctggccatctcgctgtatccagggatccatagtcagcaaaagccagtgattccaaggaaccccacaactgttttaatgtcctagggtgaggataagccagtataggctgtattcattccttgctgatggccctggttcctctggctaagattaggcctagatatttgacttgttgtaggcagagctgggccttcgatttagagaccttgtacccttgattagctagaaagttcaagagatctagagtagcctgctggcatgacgcttccgaactggtagccaaaagtaaatcatccacatactgaaggaccagagtgcctggacttgagaagtggcctagaccttgcgccagtgcctgaccaaacagataaggtct

SEQ ID NO: 479325 - DNA, 884 bp, Homo sapiens
acaactcaaagagcggaggcagccggcaacatgaagtcaactgtagaagttggaaagatactggagtggggcaggaggggtggcaaagtatctgcccaaggattgtggtactctctggcaacaactccagcccatagcagctgtgcaggcagcagcagaagggatgttagccatcagaggtcccttcagggcatgtcagcattattccaggctgacaccagaagggccaaactcctctccaaccatagtcttcgatgtccagctgcttcttctctgtactgtccagagttcatatccaaactcctctctgaccgtagtttccactatccagctgcttcttttcctctcaatgttcaactgcttctctcttccatgtgctgtcctgctacgccacaccagtctgctgctctgccagtggagcttggggtttttacgggcacaggatgggagcatggtgggccaaaaggcaacattcagctttcagggttggtgtggggtaccagctggaccaagagcctttccaacttctccttcagcttctctctctggctagatgaatctttagctttatggttctggacagcagattttcctgcaggacactcctgttgtggaacttggaagattgaagtggtgagagatcaacctaagctctgtcttgataaaaagcagctgctgtccaaaaatcaatgtgaaacaggaaatgaagatgagtgtgttacagttaattctctgttagcagttgctgttcccaaatggctaagtgttaaccatctcagtggagaatcaggatgacagccttttacaccctgtcctcttggtacctgggtccttgtccgacatccaggaagaatcaggtcacacggacttggaggatagtgaat

SEQ ID NO: 479326 - DNA, 590 bp, Homo sapiens
cagggatctagttcatgagctgcagtgtccctgccaataattctgacatcttcaggtggccctgggtactagtggaagtctcattaaggagaaaaggcttatgcactctagaagagttaatttaccaaagcatacagaaccaggtcttccttttagaaaaatactggcaagcagcttctttttggaaactttcctactgcccacaccccttcattgcaaccccaataatccaccagacaggggatgatcccttcagaactaatcctgaaatgaagacatgtggggcagagcctcagccaaaatgtaacatgagtgaaagaagactgagaaagcttgttactgtggacactagtgatatttcagcaatgaagaaagtttgcaagttgctgatgaagccaggattgattttgtccaccagcgggtatctggcaatatctggagagatttttgacatccagatattttggtacaacaaggggtagggtgggaggagatgccactgccatctaaagtcattctgtcatgtctttgacggttttttgctatgttgctcttaatatttttcctttgtctttagtgttctgcatttc

SEQ ID NO: 479327 - DNA, 974 bp, Homo sapiens
tgcaaaaggctttctctagcaggtaaaggatattgataagccatggggggcacctgaaagtttttgaaaggagaagtaggacgttcagagctatgcattaggccattagtgtttctttgactatccctgtggtcgccatgttagtgaagactaagaacccagatttcagagcagaagcagaactctggggccacctagagcattcctcccatccagaagacacagcaacaaggagccatcttggaagcagagatagcagccttcaccagacaaccaaacctgccagtgccttgatcttgggcttcctgactgtaagaaataaaactgttctttatcaattactcggtgtcagccagagtgtgaacctctccagcaagtctggacaccggaacctacctcagcccctcaggaagcataaggtgaataccttctgtgaagtaagagatgggctaagcagtggagattcacataggagatccctgctctccaggaggtttctgtctcatgcaagaggtaggcatatacatcattttttaaaaatggttaactagacatacatctgttaaaaatattctatttatggaggatgcattgtatttatggcttgtggggaatcaatttcccatagtgagaaagaagtattaattaacacaaataagtatggaattgattgcaaatagccaatccttttattagtttctggttcaaaagaaactaaactgagacacagaataactatacttagaacatttgacttttttcttttcgaagaaaaatatgttatttaaatcctgataatagtaaaatatgatagtacaaaaaaggaagaaagctaaatattaacatcttgctctgtgtggagattctctagttgcaccttattgcctgtttagtctaatctgttcctaggtgtaccctaaaatagaaagaacttacaatgtaaatgtcagactggtggaccataccatcccttc

SEQ ID NO: 479328 - DNA, 467 bp, Homo sapiens
tcatcagttaaggcaggaacaggccattttcacttcttttttggaggaatgtcatcagttaaggcaggaaccggccatctggatgtaaacacggtaaaagaaatgaagaatgcctttaatgagctcatcacaagattggacatgatggagaaaagaatttctgagcctgatagtataggaatagaaacttccctaactgaaaaacaaagagaaaaaagactgaaaaagtcaagcagagtagtcaagaactgttggacaattgcaaaagaagtgaaagatctctataatgaaaactataaaacactgataaaagaaattaaacagcacaccaaaaaatggaaagatatttcatgttcatggattagaagcatcaatattattaaaatgtccatactacccaaagcgcttgaaggattcaatgcaatccctatcaaaatattaaatacattcttcacaaaaatataaaa

SEQ ID NO: 479329 - DNA, 549 bp, Homo sapiens
cccagaattcccacgtgttgtgggagagatccagggggagctggatggtggctgcagctgcatctcctcgagctcagtttgaggcagctgcagccatatcaactcgaacttggcccaatggcagggtgcagcccagcattaaactctcaaaatcgcaccttgggcctgccaccagggagtgtggggcctctcctaggcaagcatctttggcaagaagctgtgaggagtgttgtccacttgagtctcagctcagtctcacagcagcccgtggcagggtagttggtattgtcctaaatacacataggatatcccggtttccttgtccctccttgggtgggtggcagctgcaattgtgtcagtctgagctcaaggtgcgctgcatctcagcattaaactctcaaaatgacaccttgggcctaggaccagaggacacatgggaatctaaataccaaggagactaatgcatagttcttgtgtaaaattgcacagagatttttcaaaggtcattaatagtgtagtgtccataaagagtcagagtttctctgagtt

SEQ ID NO: 479330 - DNA, 650 bp, Homo sapiens
aatcagtgagccacataaggatgatctgggcatactgtgtaggtaaggtctgtttcattgacttatcaattatgttaaaggccattgggggtatgtgggccaatgcagctgtgcagctccaaaaatgtgtttacagtgtgtctagagagggaccacatgaagcactcattctgcttatggaatcaacaagctcatcagacatgtctgcccagtttaggaccagtgccatccacaatttgggatatggacccaaaacaagacctagcaatttgaatacacaacgccaaggagcctggaaatgtgtgcagcttgttaactgcacagtcaagtatggtgggatccccagatcccatagccggaattacttgatgataccccaggttccttttaagtgtacccctggttatggctgtataccttttctgagtatgatactgccaaacttattctcacagaagacgtggaaatttcctgccaggactcttagactttgtttcatgtttggattccttgactgcatccagtctgactgaacattactgtgtttatatgaagctatacccagcattttcagctacctgtgatgtttgctgaactgtttatgctgtccataaaatttcagtagcaggagtcattgaaggatggcctgg

SEQ ID NO: 479331 - DNA, 1017 bp, Homo sapiens
gaccaaaagtttaagaaagtaaaggagtgttcctcagagctgaagtacagcatggagctagatgaaaaggatgaggacaaattcttctcacaggaaaaatactggggcaggaaattccacacgccatcgaattcttataccgcacagcgtgtgaagatgaagtatggagcatggtacctcaagcctaagttgtggaaaaagctaagaagtgatgaacctttgattgaccccaagctcttacttaaaaagcctgatgaacctgacgttcttgacgatctttatggaccaattgcctttaaggatttcattctaagcaagggctatgaaatgcctggcatcattcaaaggctgtttgccaggaggggatggacttatgactctgttaagactcctattcaacgtgcaatgatattttacaagtacaaagaaatcgtagaggcatcggaagaagattaggcagttttcaatttactactcaattgggtatttcttgctctcattttaatcatcaatcataatttatgatgactggccccgtggatgcacaactttggcaacatctgtaaattcaatacctaatgtttatcaatatttcttaatgaactgctttggcttcattatttcatatattttatcaattatgtgattaatattcacatatactttttcacattgttgaagcattgtgaatattacatcatcatgtcaattatttgtaaaaatacataaaaccagaaattattattattagaattattctttaaaagagaaataggagaaattacgtgggtttctccacactgtaattacacacattggtattacttgtcacacagatataaaaagaaacaatgtttgatctatttggatttttaacaccagttggacttctgaaatcatcctgacttcaaatccataggttttagaaagagatggaattcaagagagcttggtatataattgtccctgtgtagcctaaagctatgaatggtatattccataaatactgtagtaatc

SEQ ID NO: 479332 - DNA, 550 bp, Homo sapiens
ttcctgcagtctggcttcctctatgaatatcaatgtggtcataatgttaatgctgatcatgctgatgagggcaacaccattgcgggtggaggtggagagtcaagcgagaccacaaacccactggaaggaagaaactccagacacatctgaacatctgaaggaacaaactccagacacatcatctttaagaactgtaacactcaccgcaagggatgtgcatttcctaatccctgtaatctgtgaatatgtcatatcacactgtaaaggagactttgcaaatgtgactgaagttaaggactggagaaggagagattatcttggattatccaataagtttcaacctaattatgaacctttaaaagcagagaacccctcctggctgtggtcaaaagatatgatggcaaaaggattagagacctgcaatgatactcattttgaagatggaggcaagggccatgagtgaatgaatttgtatgtctttattagcagcgtgaaaaaggactaatacagtaaattggtaccactagagtgggtcgttgctgaaaagata

SEQ ID NO: 479333 - DNA, 1376 bp, Homo sapiens
ccactcaggatttggattctgctctggtccagtcaaaggtggccaactgctcacaccatgttcaaataaggcaaatgccatgccgaaaccagtccagctatttttgtacctcacttcagttttctggtggagagatcatccaataaaattagtggaaaagacagaaaaagaaagaagaagaagaaggaggaggaggaaagaagaagaaaaagaagaagaggaagaagaagaaggagaaggaggaggaggaggaaagaagaagaagaataagaaggaggaggaggaggaggaagaaaaaataagaaggagaagagtcaccagagatctctctctcttcatgcaactaaagaggcaaggccagatacaggaggtacatgtgcagatttgttacacaggaatattgcatgatgctcaggtttggaatacagattcctatcccacagaggaacacaatactgcaaaactgaaaatgccatcaaatccattgattcaacaagtactgttacacctaagcaggaataatgaaaaggtcacatcaagccatatgagagttgaactgctggaatctaaagacagagaaaagtttaagaactcatagattttttgaatataatactaattgagtaactgtcacatggtattaaacttttctcatggattctctaaactgtttgtctttgggagaaagtgtgctttattttttgtgtcttcattatataaaacactattagacccaaattaatgcttcatgaatgtctatcaacttttaaatagtgataagaaacctctgctgtttggtttcccatagtttttgtattgtactataactgaatttagtcagatttaaacacttatgcattgcaacaaatttcaatgtgtttaaaaattgaaattgttaaatttgcagtgtatttatctgaatttgtttatatagggatgaatttaagaaattcagtaatgttggtagcaatcagatatgataagaaaatgcaactgtttaaattaatggaaaatgtggacatttcttcaaaagaatcactcaacactaacgtttattaataaggcaatgcataagttattatagaaatgaaatagtaggagacagattcttatttttcagtaacgtcttattattaggtttctgtctttcatgggatcagaaaattctaggtaattatgctccttttatctttctaaattttttttctgaaatgtgaattacttagctgttgtcatgggaatgtggctaagaggaaatgaactgcatagtaacattattgttatttgctgccactaatacgttcataaaaatagggaaacacatgaagtctctgaaggacaagcctctcactagaaatttttctatttatgctttc

SEQ ID NO: 479334 - DNA, 1744 bp, Homo sapiens
ctctctgctgagagctgaatactcattgggacaccctggctatggagaggagctgcccactgagcgtctcctctgagctgttgtgggtgacaagaaaaagagaagagagaatgagagaagagctgtggcccttcagggagcccagacctatgagctccccaaaccagggctgtgacaccttctttaggacttttcagttcctggtgtctccaagcttctgggtgccacattgtgatccccaccatcagctttggaagctgcttatagtatgcctggtcagccacagccttgcagggagccagcgcccatgcccatgcctggacctgcctgccctgctgcggctggcatgcctggctgtgtgcagtgcttggaccccacacttattcacacaccctttgccactctgtacctggcttgcccttgtcaggcatgggatccaggccagcagtgggagctgagtgcaggctgtgaggccgagtgtgtggaatgagcccagtgggccagagcagaaacttgggcaaaggctctgctggccacagaggtttctggctggtgaagcaacaccctaaggatcctgtaacacaatgaaaggtcaagggtaattaatcacaattaaagtataagtgtgaaggatagagtgagaaataccacttaaggaaagtctactttttttctttatgaaaagatattccctttctgatgcttagttttatccaagaacagggagagcacaaggttaataaaaatgtccttaaacagaagtgtttcaactattggtgtaagttatttctgtctggtgattcaagatgtgagtcaaaagaggaaatttgatagtaacagttgatcttaccttgcacaatacatgtcaccagcatctgtgttcctcttgttagggactctggggaccaagataaattatgcagaaaattgatgcatctaattctgccctaagctgtcacttcacatctgataacaatttgtacttgaagaaaattattttggaaagttagcataaccttttactctgtgcaagtgtataattttgctatcaatccataatgtacctgatactctgaggctaaaattttacatattactcattgaaatgtttactcggaactttgtgcatattaagttaaattttatttttatacacccatttgcaatgaattcaagcaaacatttataattacttgtcttgtagagatccaagtgtccctctttgccagctgttaacctgaggccagactaatataattagttttgttaattacttctagttcttcaggaataattgagattattgcatccttacttcactctagaattaaattgatggattcttctcatgtgagaacttgtgacctttaagtccacctactcaaaatttgttctggaactaattaaatatatatatttttcagtcttccttatctatagaaaaacataataatcaaaatgctccaaagcacgcttaaatgaaagatactcaagtatgttactcacagtgaggtcattagttttaaatatttctgtttttgtgtgtctgtggagaaagtttctctctaagacacgtgcacattgatttatgaaatgcacagatagtgatagatagccctaaaatacttaagttttgtcagtgtctctcagtgtcagtgcacatgtacttatgtaaataactacagtttcagtttatatttcaaatactctctcaagtcatttttaaattccatggctgtcttaa

SEQ ID NO: 479335 - DNA, 658 bp, Homo sapiens
tttttcctatactgttttcacagtgaataagtctctgtaaaacgtgtctttcctcctccttcaccttctgccatgattgtcaggcctctgcaaccatatgaaactgtgagtcaattaaacctctttcctttaaaaattacacagtctcagggctcagaagaaggcaggaaaatgtgggaaagtttggaactttctagagacttgttgaatggcttcgaccaaaagcttgatagcaatatggacaataagatccaggttgaagtggtctcagatagagatgaggaacttgttgggaactggaacacagttgactcttgttatgttttagcaaagagactggtggcattttatccctgccctagagatttgtggaactttgaacttaagagaggtgatttagggtatctagcagaagacagttctaagcagcaaagcattcaagaggtgacttggttgctgtcaaaggcattcagttttataagggaaacagagcataaaagtttggaaaatatgcagcctgacaatttgatagaaaagaaaaacccattttctgaggagtaattcaagctggctgcagaaatttgcataagtaaccaggagctgaatgttaaaccccaaaacaataggcaaaatgtctccagggtatgtcagaggtctt

SEQ ID NO: 479336 - DNA, 570 bp, Homo sapiens
tctcttgccatgaattattcaaagattaatctagctgctctactagttacctatgaagtactatggataacaaattgcttacataataccaatttatgccaaatatcttctgtttccccctctaccatcacatttcatcctgctttctgccccagagggttcctgagccctctggcttctgattgggttcaaccagttggaagtcccagcagaataccagaggaggggacaagagttgggttagggtatttattttcatggctctttctctatgaggttacctcagcggaaatttacactaggaatcatatgagcaaacataaagccagctgggccaagcaaatcaccagacaggtcaataatggccgttctctgggaatgaagctttcaaaatgctccaacccttttctgctccctccagtggctaccagaagatcctataatggatattctgagattgaaaagtgaaggagggtattgcttctagttcagttctatggacccaaatatttaatattaagtaaaatcaatggtctcttcctaaattctcaggactttattctaaataag

SEQ ID NO: 479337 - DNA, 1085 bp, Homo sapiens
agctctgtcgcccaggctggagtgcactttggtttcccaaattgctagtgagaggtgacagcgtgctggcagtcctcacagccctcgcttgctctcggtgcctcctctgcctgggctcccactttggcggcacttgaggagcccttcagcccaccactgcactgtgggagcccctttctgggctggccaaggctggagcccactccctcagcttgcaaggaggtgtggagggagaggcccgagcgggaaccggggctgcatgcggcgcttgcgggccagctggagttccgggtgggcgtgggcttggcgggccctgcactcggagcagtcagccagccctgctggccccgggcaatgagggacttagcacccgggccagcagctgcggagggtgtactgggtcccccagcagtgccagcccgccggcgctgctctcgatttctcacggagccttagctgccttcccgcaggacagggctcgggacctgcagcccgccatgcctgagcctcccacccactccatgggctcctgtgcggccccagcctccccgaggagcaccaccccctgctccacagcgcccagtcccatcgaccacccaagggctgaggaatgcgagcgcacggcgcaggactggcaggcagctccacctgcagccccggtgccggatccactgggtggagccagctgggctcctgagtctggtggggacgtggagactgtaacactcaccgcgaagatctgcagcttcactcctgaagccagcgagaccatgagcccaccgggaggaacgaacaactccagacgtgctgccttaagagctgtaacactcaccgcgagggtctgcagcttcactcctgagccagcgagaccacgaacccaccagaaggaagaaactccagacacatccgaaacatcagaaggaacaaactccagatgcgccaccttaagagctgtagcactcaccgcgagggtccacggcctcattcttgaagtcagtgagaccaagaacccaccaattccggacacactaggattataggcacgaggccaccatgcctggcctgtattttttttttttcctctg

SEQ ID NO: 479338 - DNA, 729 bp, Homo sapiens
cacggaccctctgcttcagtgcagaatgaaccaaggagactcaaacccagcagctactccgcatgcggcagaagacattcaaggagatgacagatggatgtgtcagcacaacagatttgttttggactgtaaagacaaacagcctgatgtaccatttgcgggaggctccgtggtgcagttactgcagccatatgagatatggcgagagcttttttccccacttcatgcactgaattttggaactgggggagatacaacaagacatgttttgtggagactaaagagcggagaactggggaatactaagcctaaggtcattgttttctggctaggaagaaacaaccatgaaaatatggcagaagaggtagcaggtggtatggcggccatcgtacaacttatcaacacaaggcagccacaggccaaaatcattgtatttgatctgttacctcaagtaatgaatgttttatgttctactggaaaggcaaatggcagtgcatttgtgtgttggaggaggggttagtgatttgtgctaagacccacttctgactgtgcagatattgagttcactttcattttttgccagacttctttgcactactttaagcaaaaatagtcaatctatttttctttgattgacatcccagtttgcttcagtgacagaacttactgcttagtctttgtactttaaaagaaatctataaatttaatgaactgtccaagtgaaatgtc

SEQ ID NO: 479339 - DNA, 495 bp, Homo sapiens
cagcagcagacaacatttgagttcaatatgcgtaatggaatagattcatatcctgtttgcagcctcttgccctgtgaagattcagaatttggcaaatcttttgagggagagaccagctgtgcatttagcatccttcaagactccaattttgtcattaccgtctgccaaaagttctgccaaggaccaagtgtggattcttatctttcagcaggttccagatctgcaaaaggtggttggaagatgtggctctgtgtagctgtcaaaaagtccatcagcagcagctctccacctagacctagctcaaattctcaagctcagatccatgttcagaatcaggacatattctcggagacagctgtggagcctcagtttacctccgaaagactgtcctcattctggaattgtattccctctagtcttgcttacttctacacatagtcaatgtttctatttagaatgtttttttctattaatttgtcagttatatcttcttcc

SEQ ID NO: 479340 - DNA, 1084 bp, Homo sapiens
ggacagcaccacagacgtatccgagatctgggaatgcagctcccggatctcctcttcatacagctgcctgaggaagttgatctcgtcagtcagcccgtccaggcgagactccagctctaccttgtgcatgtcagcttcatccacatccttcttgaggaagacaaatgcatttgccatcgctttacgcatattgatctcatcctcattctcgtccttgaagtcctccaccagcccatgaatgttgccaacctccgtctccaacttcagcttctcctggcccagagtctccagctgccgcctaaggttgttgatgtaactctcgaacatgttgtccatgttgctctgagccatctcctgctgctgcaggaggctccacttggtctccagcatcttgttctgctgctccaggaacggtaccttgtcgatgaaggagacaaatttgcctacgagcgtcttgatatgctccttctcctgggtgcgcacggcctggatgttggggtccacctccaggttaaggcggctcagcagactctggttgaccatgacggcggtgatgcctccgatgccgctggccccaccatagcctccgcccaggccaccccagaagctgctgctgcccactcgggagaagctggagaagctgatgcgggcaccgggcccactcgtgtagaagcggctgctgaaggcccgtgtgccagaggtggacaccttgtacgacttctgggtcaccctgatggacatggtggaggcaggagtggaggcagcagtgtagaagtgttccctaatcgccgcatccacgtcaacgtctactgttttttgattctttgattatggccatttttacaggactaagagagaaatcatgggccaagatgatctcacttggtgccaaattttgctggtttgggggaaggaatgacacaggtaaaatgaaattgctcttttttactgtttcagtgggcctgttctagtgttttgtgctcatctggggtattcaacatcttaactggattctggacatctcttggaggtattttgattaatatatttttgttaaataggtgtttctgtaaggaaatgaggg

SEQ ID NO: 479341 - DNA, 706 bp, Homo sapiens
aagaaaggaagaaactctcagccaaagttgcttagaatttagctcagcaacaggcctctgcgttggcatggatctttgccccttcaaacagggtttgcaccagagaacagggcttttacaggcaggcagaccaagaggaccctcagctgcaggtctgttggagtttgctagaggtccactccagaccctctttgcctgggtatcaccagcagaggctgcagaacagcaaatattgcagaacagcagatgttgctgcctgatacttcctctggaagctttgtctcagaggggcacctggctgtatgaggtgtcagtcggcccctactgggaggtgtctcccaggcagcagctgcagggtttgtgcgtatgcatgccagcagcagaagggcagccgccattctcacgccaaaccctctgtgctccacaaaggcagaagtcctgtccctgccaactacccatgaagctctccttgccagctcaaatgtctgtgggtgtcatgggttctcccccagttaggattccagaggtctatggcgagagtgggctactccatgcctatttaactcaccccttctccatgagttactcaggaccaggaatgagccctggtgctcagtaaccctgtgcagggttcctagcttcctcctcatttcacccctgactaagcatcttccctctgtcccctcttaatgcctttcttccgaag

SEQ ID NO: 479342 - DNA, 516 bp, Homo sapiens
catctactgatttaaaattcttatagagcatctgctatacgctatgcagagttttataaacaggaagatgtggggaagttttgagcttcctagagactcattgaatggctttgaccaaaatgctgatagcaatatgtacaataaagtccaggctgaggtggtctcagatggaaataaggaacttgttggaaactggagcaaagatgacttttgttatgctttagcaaagagaccggtgaaattttgcccctgccctagcgatctgtggaactttgaatttgaaagagatgatttagggtatctggtggaagaaatttctaagtggcaaagcattcaagaggtgacagagcataaaagtttggaaaatttgcacactggcaatgtgatggaaaagaaaaagccattttctgggaagaaattcaggctggctgcagaaatttgtataagtaacaaggagcagaatgttatttaccaagacaatgggtaaaatatctccaggacatgtcagagaccgtt

SEQ ID NO: 479343 - DNA, 677 bp, Homo sapiens
ggccaagctccatgttttcagaagatcccttttcctgcagcatgctgagaggacaggagagtggcaaaagtagaagtgaggacaccagagaggaggcagttgcagaagtccagggcactttgacattcggacagacatcaagaagaagaagaagctccagtaaaagagaagaagctacaaatcggttgaaaactggtcgtggcctctggaaccagttgacaaagataggagcaacccccttccatatccaaggatggtcctgtgagcatgaggacctgtataggagctggaagattgttggatttggacctggacttgggattgaacttccccctacctggtctccagaaccggggcagataactcagcaggcccaccttctcatgaatgctcgagagaaggaagaacagagttattttgtgagctggccatcaagagaatatgactgtagaggcacctatcgagttgaaaacgaaatatttgttatgctatcccttagccatactactccctgacataagtcttatttcatagcttctttctgcccccaaacctggctgaaaacctcttcttggagcacaggaaatggaaaagagcagtcagttcagcttgtcaaggaaggcttgtgtggcccttagccattccatctctaggagtccccttatcccctggactcc

SEQ ID NO: 479344 - DNA, 2459 bp, Homo sapiens
ccttcactgcctgtctgactccgagcatttctgggcccctcagcttcagagcacgggcagtgttcacttggagcctgtggctctctgcatatgagtagcagtggagggtcctctgtgaccttcttcttggccctcttcctggcagataagtgctctggttgtacatggaggatgaccgaaaaaaccaatggtgtgaagagctccccagccaataatcacaaccatcatgcacctcctgccatcaaggccaatggcaaagatgaccacaggacaagcagcaggccacactctgcagctgacgatgacacctcctcagaactgcagaggctggcagacgtggatgccccacagcagggaaggagtggcttccgcaggtgggtcccaccactaccctgctgcttccccttcctgtgcatggagcctgtcagggtggctaccactgccctcctcttcacggtcccaccagtcctgtccaccaagacctccaaggagcactgtcactggatagttcgcctggtggggatcatcagagaatgggccaacaagaatttccgagaggaggaacctaggcctgactcattcctcgagcgttttcgtgggcctgaactccagactgtgaccacacaggagggggatggcaaaggcgacaaggatggcgaggacaaaggcaccaagaagaaatttgaactatttgtcttggacccagctggggattggtactactgctggctatttgtcattgccatgcccgtcctttacaactggtgcctgctggtggccagagcctgcttcagtgacctacagaaaggctactacctggtgtggctggtgctggattatgtctcagatgtggtctacattgcggacctcttcatccgattgcgcacaggtttcctggagcaggggctgctggtcaaagataccaagaaactgcgagacaactacatccacaccctgcagttcaagctggatgtggcttccatcatccccactgacctgatctattttgctgtggacatccacagccctgaggtgcgcttcaaccgcctgctgcactttgcccgcatgtttgagttctttgaccggacagagacacgcaccaactaccctaacatcttccgcatcagcaaccttgtcctctacatcttggtcatcatccactggaatgcctgcatctattatgccatctccaaatccataggctttggggtcgacacctgggtttacccaaacatcactgaccctgagtatggctacctggctagggaatacatctattgcctttactggtccacactgactctcactaccattggggagacaccaccccctgtaaaggatgaggagtacctatttgtcatctttgacttcctgattggcgtcctcatctttgccaccatcgtgggaaatgtgggctccatgatctccaacatgaatgccacccgggcagagttccaggctaagatcgatgccgtgaaacactacatgcagttccgaaaggtcagcaaggggatggaagccaaggtcattaggtggtttgactacttgtggaccaataagaagacagtggatgagcgagaaattctcaagaatctgccagccaagctcagggctgagatagccatcaatgtccacttgtccacactcaagaaagtgcgcatcttccatgattgtgaggctggcctgctggtagagctggtactgaaactccgtcctcaggtcttcagtcctggggattacatttgccgcaaaggggacatcggcaaggagatgtacatcattaaggagggcaaactggcagtggtggctgatgatggtgtgactcagtatgctctgctgtcggctggaagctgctttggcgagatcagtatccttaacattaagggcagtaaaatgggcaatcgacgcacagctaatatccgcagcctgggctactcagatctcttctgcttgtccaaggatgatcttatggaagctgtgactgagtaccctgatgccaagaaagtcctagaagagaggggtcgggagatcctcatgaaggagggactgctggatgagaacgaagtggcaaccagcatggagcccacccttcttcctcccagctcccagcatcccaagcagcagactcctgggaccagcctctggatccagtggtacatgaagcgggagaaaggaaggcagcagcagtttgaccagtggaaaggcaaattagactgggacaaagctgctcaagggagatggctggagctgttttccttctgtccctgctacaagctggggagcactgagctctttcccatacgtcagcccactcgatcgtcacaatgagtctgtgaggtccccgcatccctttccccctccgtgagcacccactttaatgcatttgagatgagtccctgaatatgtttgcgttcttataaaatatagtgttgtttcgtgtatgtgtttttaatttgcat

SEQ ID NO: 479345 - DNA, 1012 bp, Homo sapiens
ctcctcaaaggacttcatgaacatttgcgtgccaatgttggctggggcccctggcaccctgaggtggagatgaaattgtctcaagctcctatttttacttctcatgaaaattcaaatctgtttcccaatttctgtgacttccttggaggctggaaggaacgttaccttcttatagaagccctgtactctggatttctgcttccacacacacaccccagaatctgtaatgaaagccaacctcttctgcaactttcaagcaaacacaccacactgatgcagccttcccagtgtagcataacaaacacagcaaaatacagtggagtccccagggtctacttttcccatctttatgtctgtgagtacacaatgtttagctcccacttagaactcacccattaccaaaaagtcatcatcaagccactcatgaatgatctgccccatgacccaaacacctttcaccaggcccactaccgacactgagggtcacatttcaacatgagatctgaaggggagaaatatccaaactacgtcagtaggggatattcacaatacatataaaaaattaatcttcctcttgaggactttccttctttgcaatctttccctggagctgaggatagccagactctaaatggataacaaataatttctcttgacatgtgctttcctttgcaacgacgtatgggaaattgaatttctcccaggaagaagtggggatggatgaaaccaggcttcaactcaatgcatctgtgtaattgctaagagagagctgcttccaccattaggtattataatagtccccagtgtctgttgtccccatctttatgtccatgagtacccaatgtttagctcccacttataaatgagaacatatgttaatttgcctaggataatggcctccagatgcatccatgttgctgcaaaaacatgattttattttttatggtggcgaggtattccatggtgtttatcagagaaatgcaaattaacaccaaaatgaaatagaatgact

SEQ ID NO: 479346 - DNA, 875 bp, Homo sapiens
cacaacaccttgcttgacaaaacagctttcatctggaaggatcataaaaatccttgagaaaccacagcctattacttgagagacaaaaaaggaaaatcccttaattttgcttaagataatggcctccatttccttccacgttgctgcaaaagacattatttcattcttttttatggaatcatacttccctttcactgccatctgcggtgaagctgccaccaaactgcagattttcgtgaaaaccctaagggggaagaccatcacccttgaggttgaaccctcagatgcgatagaaaatgtaaaggccaagatccaggataaggaaggaattcctcctgatcagcaaagactgatctttgctggcaagcaactggaagatggacgtactttgtctgactgcaacattcaaaaggagcctactcttcatcttttgctgagactttgtggtgttgctaagaaaaggaagaagtcttaccccactcccaagaagaataagcacaagagaaagaaggtgaagctggatgtcctgaaatgttataaggtggatgagaatgacaaaattagtgcccttctgacgaatgtggagctggagtgtttctgcatggaagtaaagacaaatcttgagttccttcaaagaaaattccaggcacctggatggccacgagaagtcaatgagcaactcgcatacgtccccgagctgtttttcaggaacccagaccccaccaatcggatctgctggcacggacctcagacagtttcggtttcccaagaaaacgttttcaagctgccttcatgactccttggaactcaaatgcgcagctcagaagccgcgggatgcagcggatgcgtcactagaggtacttgaaaacttcagt

SEQ ID NO: 479347 - DNA, 758 bp, Homo sapiens
gcagagctgcattggtcagatgtttgctagcagttaacttaggatgtgtgcaggaatatcaactcccagtcatctccagaagccaatagcaaccctcactctgagccttgccaaggaaaatcgtctcaagattaaagttaaagatgatgaaggcatccagcctgctggtcctaatctaattacctggtgtgaagagttatttttggcagtgagactagactgcactggcaatggtgataatggtaatgatggtgatggtggggacgctgatgatggtgatgatgatggtgatggtgatgatggcaatgatggttatggtaatgatggtaataatgatagcaatgatggtgataacagtgatgataatggtgatgatggtaataatgttgatgatggtggtgatgatgatgttggtgatgatggggatgatgatcgtgatgacggtgataatgataatgatgatggtgatggcgatgatgatgatggtgatgatagtgatggtgttggtgatgatggtggtaatgatgataaagatgatgacgatgattttatctctgttctacttatttattttaaattttaacaagcttttaatttgttacatgggtatattgtgtgatgctgaggtttgaggtacaatttatcccatcactcaggtagtaagcatagtacccaatagttagtttgtaacctttgtcacctttccttcttaccctttctagtagtcaccagcgtcaattgttgccatctttatgtcc

SEQ ID NO: 479348 - DNA, 3702 bp, Homo sapiens
tgatccagatagccctgaaaatcagcacatgatcaacatggccttagttagtcaaagcacagaagatatcaggagaaaattgcagaaacagcctgagtttgtggagaaagccgtaaggaaggcgaacgccaggccaggcgagaacgccgacttactggccacggccattaggggaattcccccgaagggagtgggaaagggaggttccgggaagaatacccagtctaatcgcccacgcttgcaacgcaaccaatgcacctactgtaaggaaataggacattggaaagataagtgtccccaactgaaggaaaagcaagggaccaaggactatcgatccgtacaggacttgcgcttggtcaaccaagctacagtgaatgtgcacccgacagttcctaacccttacacattgttaggattgctgctgccagctgaggacagctggtttacctgtctggactttaaagatgccttctttagcatcagaatagctcctgagagccagaagctgtttgcctttcagtgggaagatccggagtcaggtgtcactactcagtacacttggacccagcttccccaagggttccaggactcccctgctagctttggggaggccctggctcgagacctgcaaaagtttcctgctaaagacctgggctgcgtcttgctcctgtacgtggacaaccttctgctgggacactccacggcagttgggtgcgcaaaacggacggatgccctgcttcagcacctgaaggactgtgggtataaggtgtccaagaagaaagctcagatctgcagacagcagtaccaaagcttgctatgtgaaaatccccacataaccattgaagtctgtaacaccctaaatcccgccaccctgctcccagtatcagagagcccggtagagcataactgtgtagaggtgttggactcagtttattccagcagtcctgaccttcgggaccagccatgggcatcagtagactgggagttgtacgtggacgggagcagcttcatcaacccacaaggagaaagatgtgcaggatatgcggtggtaactttggatgctgtcattgaagccaaaccgttgccacagggcacttcagcccagaaggctgagctcattgctttaactcgggctctagagctcagtgaaggccagtacttctacatctcacacttgccagcccttgccaaagcagtagcacaacagtgcgttacttgccaacagcacaatgagaggcaaggccccagtgttccacctggcatacaagcttatggagtggctccttttgaggatcttcaggtggatttcacagaaatgccaaaatgtggaggtaacaagtatttgctggttcgtgtgtgtacttactctggatgggtggaggcttatccaacaccaactgaaaaggcctacgagcttcccatgtccacagtttttgaaatgagattaaggactgaaggctggtggggactcataaatgatacaagtaaagtattagtcagaacagaggaaaaaggggtgcccaaacacataaccttgaaatttgatgcctgtgctgtcattaatagcagtgaactcctgggcttccctgtctatgcttcccatgaaaagagaagcatagctgtaggaaattggaaagatgatgaatggcccactcagagaatcatacactattatgggcctgctacttggacgcaagacggctcatggggatactggatccccatttacatgatcaaccaaatcatacggttacaagctgtcttagaaataatcactaataaaactgtcagagccttgactattctggcccggcaagaaactcagatgagaaattctatctatcaaaatagattggcttttgactacttgctagcagctgaaggaggcatctgtgggaaatttaaccttagtaattgctgtctacacatcgattatcaagggcaagtagttgaagacatagttagagatatgacaaaactggcacatgtgcccatgcaagtgtggcatggatttgatcctggggccatgtttggaaaatggttcccagtgctaggaggatttaaaactgttataataggagttataatagtaataggaacctgcttactgctcccttgtttgctaactgtacttcttcaaatgataaaaagcttcattgctatcttagttcaccaaaatgcttcagcacaagtgtactatatgaatcactatcgacgtgtcttgcaagaagacatgggtagcgagaatgaaagtgagaactcccactattaagtgagattctcaaagaaggggaataagggaggggatcacccctcatattgtcttatgcccagtttctgcctccaaagaaagaagtaaaaactaaaaggcagaaatgaaatccacaagcagacagcccagcaccacatcctgggcctggtagttaaagatcgacccctgacctaatcggttatgttatctatggattacagacattgtatagaaaagcactgtgaaaatccctgtcctgttctgttctgttctaattactggtgcatgcagccccgagtcatgtaccccctatttgctcaatcgatcacaaccctctcatgcagacccccttagagctgtgagcccttaaaagggacaggaattgctcactcagggagctcggctgttggagacgtgagtcttgccaaagctcctggccaaataaagcccttccttctttaactcagtgtctgagaggttttgtctgcaccttgtcctgctacagggatacagaaagttgtcacactggccttccatccttgcaaaaaggcagagggtccactgagctggttaacaggttaacctaagccgtccgcagatggcaaggctaaaggagcacactgtaacacatgcccacttgggcccctgcacctgtccatctgtgtgctccctctcctgtaaggggtttgagcagcagcagtgactgaacagatgagccacacacctgtcacatgtcctgtgaatgggggtcaggaaactgtccatttccctctcatgagagagtcccactctattccttgagggagaaaatgttgatgtcatgaagcttcaataaaaccccaagatgacaaggttcagggagcttccagagagctgaacacttgtaggttcctggagggtggtgctgcaggaagggcatggaagctctgtgcctgttcccctgccatcaagaagagtccaaatctgtaaaatatttgaagagatttattctgagccaaatatgtgtgaccatggcccgtgacacagccccaggatatcaacagaacatgtgcccaaggtggttgagatacagcttggttttatatattttagggaggcatgagacttcaatcaaataaatttaagaaacacattggtttcatctggaagagcgggatagctcaaagggggagaagaccttctgcgtcataggtagatttaaattttttctgattggcaatttgttgaaagagttattatcaataaaaagaaatgtctgggttaaaataaggggctgcggagacctaagttttatcatgcagatgaaacctccaagtagcagacttcagagagaatagattgtaaatgtttcttatcagatgtaaggtctgtctgtgttgatgttaaagctggagggatagaattaggcatgtccaacccccacttcccatcatggtctgaaatagtctttc

SEQ ID NO: 479349 - DNA, 1945 bp, Homo sapiens
agttgagcgactgcagttcccactgttagatatccaccagcagcttgcatctggcatctggaaaaacttcagatactcaactccagcccatgagagcagcaatgggggccacaccctacatagccacaggtttggagctgcccaaggccttaggagcccacttcctccaggatgccctggataccgggttgggaacctgctgcattggaaagatcaaggtgttccggaccaatggccataacactctgaagcgtggtgtcagccaaagtgctttcttgggcaatgaaagtgggatatgtgatcattcacacatgatagcaggagcagcaatacagcagggtgcatgcttgtccattgggatattagacaccctcatcaaaatgttgccatggcaacattccttcattctcttggacgaccccgatctacttgaaaatgccctccattctcttggaggattccaagagaatgaaaccttaatagaaatgtttctaatgggagaaatatatgagaaaaatctagtagtacgggacatgcttagttccaatgttgtaccacagcaaggagttctagttattaggaggacaatatgaaggtttttgacacaccacatgagaggatggattggaaacaaagatgcagattctgaagttatatgctactgatttcatgattttgcaccagatgctggatttggattacaagctaattccttgttcttttcacctaagatttgaaattttcagcacacataactcatgagaaagtacaatccagcataaataccttgtgataaactttgatatattttgagtcatatcataagaaaaaatttcatagtgttcagctttcttactgcaggtatatagcttctctcattgttgctgcctctgccagtctgagtctgaacctgcgaatgattttctctctctcatattttctgcccttgtcttcggtttttgttcctggctatgtatatcccagtatggtttattctattgcttctgtagtctttcttgtctgatcaaattcctaaaaagtatttttggctctttccatctctgtctcttgtaagcagcccacacaatgcaactgataattcatgctttaggtatttgtagccaatgtcttgtgcatggatccactaagatgggtttgcgtgttaatgacaataaaattttcttcttgaatgtttcatggcccttcctcacaaatttgaatatatttaagacacatttacattgcaatatattgaagattgaagtgatccagtgccattcctcaattcacaatcacttctggggtttctgtgagaagaaacaaaatctgtatctgaagttgtcctttttgcaagttaataaagaccagaatgtacgtatctgagttgtgagtgtctttgttgttgttgttgtcgttgttattgaaaaaacagaacagcactaaggaaaactgctatagagcaagagtcaaaatgtgggaattttaaagtaatttttacagagcaaattttgggcagatacaaaacaccgattccacacatgtatatttaacttttaacttttatatttatcatgaccctctgagataaagagccagccttcaagttccaaaattcttttctcagcttgatctattctgcttatacttgtgattgcattgtgaatttcttgtagtgtgtttttcagctctatcaaatcagttaggttcttttttattgtggctattttgtcagctcctgtgtcattttattgtgattcggttttgctgttcttttgactctcgatgatctttgtttctatccatattctgaattctatttctgtcatttcagccaactgagctggttaagtacccttactggagaactaatgcagtcatttggaggacataagacactctggccatttgagttgctgcagttcttgcattgttttttttcttatgt

SEQ ID NO: 479350 - DNA, 1386 bp, Homo sapiens
ctcctcctgtcaggcacacagtgaagacatttctgagagtggcaatggccaaagttggaggtggtgtcagtgaacttaaggtcagtcttctccagagcctgccatttggtctggaccagcaaggacttgcagagggtgagcacttgcttcttggttcccaccacatagcctttcagcatgacaaagtcattggtcactttgccacagtggacaaagccacccagagagttgatgctcttgtcagacaggtcatagtcaatggaggcattgttcttgatcagtttgccgtccatgatagggtagccctggccgatcttatagatcttcttgttgatctcacctttgcccttggtcaccccgatgactttgatcatctcatcttgcccaaacacttggttgacaggtacctgctgctcgagcctcttctgggcccagtccagcttctcagccacagtgcctctgttcacctagatctccatcaggtgggctttctggtgcagaggaagcaggcgtatctgggtgtgggcaatgacgcggatgacttggcagtacttcttcatgctgctgaagtccttctacacctgctttttgccatcctctttctgccgtttcttgcagtacttggtaaagggcttcttcttagatttatgtcagttcttatagaaacgccttttgcactcactgctgatgtgctcagcaaagatggtcttgaaagtccagatgcctcgaagggtttccccatatcccacaatgcccacaaccaccatgggtggttgtctccacaatggccacagcctctaccacctccttcgtactcaccttggatcctggcctattgacttcccctcacgataagagtacttgtagcattggttttagttctccttaaatgtttattatatattgccactgaagacatttttagccgtggattttccctgtgcaaaatattttcactgaaaattgtatttgtttactaattatatttgtttgggttactctatttttttcaataaattttgctaatttttgattttcaagagttgtggtccattttatgtattaaatttattgacatagaatttttaaaatattcacttatgctttaaatttcagaatgtatgttcttggcatttgcctaaactaagttaactgtaggtttgtgcatttgtttgtaggttctctattttgtcctgttgctctgtgtgtctgtttttatgccagtaccatactcttttggttactatagctctatagtataatttgaagtcaggttttctaatttgtttacacagaggtgctcattgtagtctctgaggatcttttgtttttctgtgggatcagttgtaatatcacctttgccatttctgcttgtgcttatttgta

SEQ ID NO: 479351 - DNA, 626 bp, Homo sapiens
cgcctgtcttcactgctctctgttcttggatagagctgcaagtataaaagtaattaggtgctgcatgacacaagctgcacctcatcatctgttttgtagccatctgtactcctttgtttcattatcatcttgtgggacaaggaagacagggagcagggcagtgcagaagggaattgttgggcgagagcaccacacagagtcccacactggggcactgcctagtggagctgtaagaagagagccaccatcctccagaccccagaatagtggattcaccaacaggttgcaccgtgcacctggaaaagccacagacactcaacgccaacccatgaaagcagccaggagcggggctgtaccctgcaaagccataggggtagagcttcccaaggctgttggagcccacctcttgcatcagcatgacctggatgtgagacttggggtccgaagtgatcattttggaactttatggtttaaggactgccctgctggatttcggaattgcacggggcctgtagcccctttgttttggccaatttctctcatttggaatgagtgtgtttacccaatgcctgtaccctcattgtatctaggaagtaactaacttgctcttgattttacaggagcat

SEQ ID NO: 479352 - DNA, 1524 bp, Homo sapiens
agtgggtgcagcacaccagcatggcacatgtatacaaaaacctcaccaagaaaaaacagacacacagacacatcaacatactcttcaattactcacacagctatttggaggatgtcaatatgcttgaaattctacaacatctggcactgaagccaacaggaaatgaggatgaacgagaaaaaacacattttggatcattgagtggagtaactgtgcactggggaaaggggaatgatcagacttttcagggactagtggatactggctctgagctgacattgattccaggggactcaaaacgtcattgtggtcctccagttaaagtaggggcttatggaggtcagccatttgttcataaaattgggcatgcacagcagcattccatcatcagatggaagcggtatatatgtgatcaagctcgagcagttctggaaggcacaacagtgcacctggttgttcactttgctcggaaggagaaatggccagttgtgcgatcatatactgattcatgggctatagacaatgattggctggatagtcagggacttggaagaagcataattggaaaattggtgacaaagaaatttggggaagaggctaagaaaggagttacagtgttggttggagtgactgacccagactatcaaaatgaaatcagtctactactccgcaatggaagtaaggaagaattgtgtccaggaaactttgcatttagtcaaaattgttacgaagttcacctagaagtttccttctccctgtggtcttttcctaattccactggcatcccttcccaaggagccctgcaagacaaagtcaggaatggcttccctggggaacgagagtgccaacagggctcttcctgctgcttcctctacccttgtatttcacttggctctctaaattcatctcagctccaggaactaaaaataaaaagccatattaaggatataatgaatgaaggaatgaatggtactaagtaaaacagaagagttacttaggggcagggttattcagagtttgtagatcatggtaaggcttttttcagttttattccaagtgcatttgaaaatcattgaaaggtttaaccaggaatgtaacatgattagatttacatggttacataaaaagatcaccctggttactgtgtctagaatgaattactgtgaactggtggtaatagggggaatagaaatggaagaccaattaaaggctatcatggcaacccatataagagataagaatggcctgtgctaaagtgtgacactggacacggagaaaagtatatggattcaaatctatttagaaggtagaattactaggattttctgatgagttagaagtatgtacgtgtgtgtatatatgtgtgtgaactatgaggaaaataatagaaacacagatgccttcatattttctggcttgagggagtaattgaagggtgctgttgcattctgagattagtaagacttggagaggaactaatttggaggaaatcaagagtttaattttaacatccaatttaaaata

SEQ ID NO: 479353 - DNA, 690 bp, Homo sapiens
tggacacaggatgcaggactgcccatgtagactcatgttccaggcttatcccaatggccccagggccccaggccagcccccatggctctgggcatcaggccaaccagcagcagtaacttcaagctccataccagtactgcagacccaggctttacacctgcctcagcaccaggccagccagaggcttcaggttgatccccatggccccaggtgccagtgggcctgcttcagcaaaccaaaagtccaggccaacttcaatagaccctggagccagtcttgtcccaagcacttaggatccaggtatacccaggaagacccaggttttaggccccatggactcaggctccaggtcaatctcaatgcccggctgatccttgcagactcaggtttaaggcctactcaagtgccaggtcagcccatgcctgacaggtttaaagacagccctcatgaatacaggcttcaggccctcccctgcaaaccagtaccaccacagtggatccaggctccagacccaatcctgtggaatacgcaccaggcccaccaagctgctgccctaggcaccaggtcaacctgcctgaactccagcagcaagcccatccatggaccaggccagatggcagccccagaatttccagacagtctgactaattaagggctttcccatgcaaagccagtctgcaaagatagaat

SEQ ID NO: 479354 - DNA, 1032 bp, Homo sapiens
atcaatgaataaataaaattctagtatcatgttggtatcttttgacttacatgattcctttgcttcagttccctctgctgcaggtctgctggagttttttggaggtccatgcgagacctgtttgcccgggtatcatcagtggaatctgcagatcagcaaacattgctgcctgttccttcctctggaagctttgtcccagaggggcacccgccaaatgccatctggagctctcctgtatgaggtgtctgtagacacctgctggcaggtaactcccagtcaggaggcatggggagcctgcaggcaagaacgtttaagtctgctgaagctgcgcccacagccaccccttcccccaggtgctctgtcccagggagatgggagttttatctataagcccctgaatggggctgcattttttcttttagagaagctctgcccagagaggaggaatctagagaggcagtctagctacagtggctatgccgagagctgtggttccatttcattgccaagcccaccagagcaggtcttctacaacactgtgctgtatgggaaaatggtacttcactcttcaccagctgacttgtccagggcagtccataagggaaatggggggtgggtgcccccaaacagagtccacactggggcagtgcctattggagctatgggaagagagccaccatcctccagatcccagaatggtagatccaccaacagcttacacaatgcacctggaaaaaccacagacactcaatgccagcccatgaaagcagccacaaagtcaaagggacagaacttcccaagaccatgggaacccaactcttgcatcagtatgacccagatgttagacttggggtcaaagaagattcgctatttcctgacttcctcctcactgatcaaagatgaatagacatgacagtgcttcttgtaatgcattcaaattttatctgttaatactcttaatatgtaaaaaaatcaaaggttttttgtcttcttcctataaatgaatgacatgtctttaattattaattaatt

SEQ ID NO: 479355 - DNA, 602 bp, Homo sapiens
gtcttctttttaataggcttttattcgaagcctgacccatgcagttctttgcgttgtattcccacattattacgcgtaaacccttttgctttggtgccaggattcatgggtttaggaatcaaggggtggaagtggaagtggcaccactcaccattatccctagtgacccactagcaaaatttttgcttcctattcccacgacatttcattctgcaggcctggaggtcttagttccagagggaagaacactgccaccaggagacataatgattccacagataaccagggtatgtgagggagagagggaagagcatactctttccctcttcagtccttgcacccctctcatcccattgaccttggcaggcactgccatgggtaccaaagcagcttgcaccaatgaagcaaggggtccaagggggcaggaattatccactcttgcccgtgtacaccctatctcccctgctgtcagtagccttgaattccctagacttcatttatgtcatggatactaacgtggcctttatccatgaaacaggaagcttgggtttggcttaattggcaggaatcagccacactcacctgtgctgtgctttttaact

SEQ ID NO: 479356 - DNA, 602 bp, Homo sapiens
gtttaggcttaccgatggtttgaaggtttgaatcccaggtttcacacgggataagaagaggccaggctcatcccgctgcaagtggcatgaacttctgtggctccaccccagtgcacattcccagtgcgcaggctggttggaattatgccagggatcccctcccacctggctgtctcattagcaacttggagggctcagcagacagaaagatgtgggaagaactacctagagacttgttgaatggctttgaccaaaatgctgatactgagatgcacaatacaatccaggctgaggtggtttcagatggagatgaggaacttgttgggaactggagtaaatgtcactcttgctacgcaaagatactggtggcattttgcccctggtctagtgacctgtggaactttgaacttgagagagatgacttggggtatctggtggaacacatttctatgcagcagagcattcaagaggtgagagagcataaacgtttaaaaaatttgcagcttgatgatgcagtagaaaagaaaaaccaattttctgggaggaaattcaagccagctgcagaaatttgcttaagtaactaggaaccaaatgctaatcac

SEQ ID NO: 479357 - DNA, 705 bp, Homo sapiens
cccaagcaaactgcagcagacctgcagaagagggacctgaccattagaaggaaaactaacaaacagaaagcaatagcatcaacatcaaaaaaaaaaaaaggacaaacaagcaaaaactccatcagagggtcaccaacagcaaagatcaaaggtagataaatccatgaagataaggaaaaaccagcacaaaaaggttgaaaatgccgaaaaccagaatgcctcttcctctccaaaggatcacaactccttgccagcaagggaacaaaactggatggagaaggagtttgacaaattgacagaagtaggcttcagaaggtgggtaataacaaactcctctgagctaaaggagcatgttctaacccaatacaaggaagctaagaaccttgacaaaaggttagaggaattgctaaccagaataaccagtttagagaagaacataaatgacctgatggagctgaaaaacacagcacaagaacttcgtgaagcatacacaagtatcaatagccgaatggatcaagcagaagaaaggatatcagagagtgaagatcaacttaatgaaataaacgtgctgtattcaggagacccatcgcacatgcaaagacacacgtaggctcaaaataaaggaacgggggaaaatttaccaagcaaatggaaagcaaaaaaaaaaaaaaaaaaaaaaaagcaggggttgcaatcttagtctcc

SEQ ID NO: 479358 - DNA, 584 bp, Homo sapiens
gaggaaagggtgggagtgaggcttcaggccagtatggtttcagtcagtttgtctcatttcataccattcctgtcagttatttattatttattgatatggacatcatgcacaaacaattgtaaagtctctggatcctactatttttacttggagaggagttacttttcttcttgcaggaggacagaatatggtcaaatcacttggatcctattgaagttggtctgtttacattttgtcctttctcttagatgtatccctttcagggtcttaccagcaggcttttgtcatttaccagggtgtttcttccttttgactgagcagaatggcaaaagaattatgtttcagacaacgaaggtaaagaccatgaagaacaatggacagttatccaatccctgtatcatcactgaatgttgagtggccaataaattgttattggtcttttgattaggagaattgttatctgagtcatatcagcacgtgataatagatcatgagatcctagattcggggcctgatgacctgactgaataagactgttgagatcctagtttgggggtaagcatattttgcatgtgtgaaggatg

SEQ ID NO: 479359 - DNA, 637 bp, Homo sapiens
tttttcctggatatgggacaagaacttgggaccagacagacaaatggcaggactaaaagagctggctgtaacccccaccccaacaccactggccacattgtgggtgacgagaaggaaagaagtagagaagagctgcagttctttggggattgcaaacctaggagctccctgagccagggctgtgaaaccttctttagggctctgcatttccgggcatcatctccaagcttccaggtgccaccgcattccctggttcctgaggcagaagctacttgtgatacacttggtctagctacagccttgcagggagccggagcctgtgccagtgcctggagctgcccaccccaccacagccagcgtgcctggccgtgcgcggtggccggaccccacttttgcttcttcacacacccctcaccactctgcgcttggcccaaccttggcaggcatgggatccgggtgtttaattgaaatattttggatctattaataaatgtgtaaacttgcttcccttttttattatttgatatattcaactttaagctaaagggatattctaacctatttctaaatacaatctaaatttaccatgcttttcaaaattcctatcagtgttacgtgcagatcttggcaatatttc

SEQ ID NO: 479360 - DNA, 545 bp, Homo sapiens
ctcatgaaaatatgggccccttattgtcagactgggcccctttactgtttttaaccctcacatttctgctgtgggcatgggagtgtggttcccagtccagtggagttatattcccaggaggattatggctgcctcttctgagtcatacatgtcgccatggaagtgggggaaagctcgcagtcacaggcttcaccctactcccacagagcccacagtcccaaaggcctgtctcactcccaccatgccccatcaacagcactaagtctatttccaggcagccagtggccagggctgagaacttgccccagaccataagcctcccagttgagaaagcaaacagactcagagtttttcggcatctcagggagcctgcaagggttatccaggtccttcaaagtgtctgtggattctctcagctttcctggaataagatgaatattttggctctaactactggtattcatcattgtactggaggtgccagccacggcaattaggcaggaaatgaattgaaagcatccatatcagaaaggaaaagatttagc

SEQ ID NO: 479361 - DNA, 815 bp, Homo sapiens
tgtgtttatacattgatcagtggatgaacattctctacaagaatccttatgagttgggtgtatctcctgaagatataagaaaccactataatccttgggtttggctgttttacacaaacacatgtttcttagaaactgttatttcctttaactctttttatttatttttatctggttgggttcatttgaaagccttatcttcaagctctaaaattatttcctctccttggtctaatctattgttaaaactttccactgcattttatagttccctaaatgtgtctttcatttctatacgttttgattgttttttcttcaaaatatctatctctagaaaatgtcttatttatattctggatttaaaaaattctttaggttgcttttcatgtttctattgtatctccctgagtagcttaattatcaacattttgaattctttatctggattgccttagctattctgtagtcttataattacatcattgtgcacatgtaccctaaaacttaaagtataataataataaaattaaaataaaataaaataataataataattacatctcagtctttagtgagcctgttaccctggactgtgaacttcttatgagcttctaatcccccctcttagttgatgcaggatggttagactgggctggagttgggcatttctcttctcctaggtcacttagcctctgataaaaccaaccctttaagggttgctctgtgtatttcaaaatgtttcctttaccctctccctactctgatattcactgcgagaatctcagggcacttttggagataaaacttgtaaaagc

SEQ ID NO: 479362 - DNA, 803 bp, Homo sapiens
tgactggtagataagggaaagtgtttggcattttgccccaccctagagatatgtggaactttgaacttgagagtgatgatttagggtatgtggcaggggaaatttgtaagcagcaaagcattcaagaggtgaaagagtgtaaaagtttggaaaatttgcagcctgataatgcaatggaaaagaaaaacccattttctagggataaattcaagccagctgcagaaatttgcagaagttacaaggaaccaaatattaatcaccaagacaatgggaaaatatctccaaggaatgtcagaaaccttcatggcagccccacccatcacaggcctgaaggcctagagagaaaaatggtttcgtgggccaggaccagagccccccctgatgtatccagcctcaagactaggtgccctgcatcccagctgcttcagctccagccatggctaaaagaggccaagggaagtaggctcccttctggcccagggcaggaccagaaatgctgcccaggaaccaaggcctggaattgggaatcccaggagccaacctgatgctctatccccactgtggccaagctggtacccaagctgcaagacaatgtccccttttactctttcgtattcctgggtgagaatcagagctggctgccactgaggaataaggacaaagtgtcacattgttcataaacgctttgaacaatgtgatactttgtcctgattcattatcttaagagaaacaatcagaaacaggaagacaaatactgcatatcttcactgataaatgggctctaaataatgtgtatacataga

SEQ ID NO: 479363 - DNA, 541 bp, Homo sapiens
agcagcagccgtgttagtctcagccctatggcaggatgtggatctttggaagctgggctctcagaatggtaccaactgtatttccccttaggccatctatgggggatagctcctgggagtctggaggtatatagggagaagctagcaattggcaaggccttgggaaacttggtacctaaactctcaggtggggagagactaacctgcatattggttggacagattaaagttgcaacaagagaagagatgtcagtctcagtagctatggagcatagaaaccaaaccaaaaacaagccacagggctggttctgccgatatttcttatataagagatgtgaaaatgcacaaatgaaagggcaaaatcttatacactgtctgagatgcttcagtttactagtatatgaaaagggaattaatgagttttatgttaaatgcttaaggacaaaacgataaatttcaattctgcatttcagaattgaagaaaaccccaagtgtatatggtttaacctcttatgtgagggtttgaattagttccttttac

SEQ ID NO: 479364 - DNA, 1057 bp, Homo sapiens
cagcaaagcaatgttgaggggttgctgtgggcctgggggaagctgcagtgtgaggagggagtgggtgggcttgtgcatggctgcaggggccaccctgctggagttttctaccagtcaggcatggtctgccagcacaagagctagacatgggcagttctttctgccaactctagtgtccctggtgattgaggagccacctcctgctgggactccagaggcccatggcaagagcaagttgctcctttccagttcaactcacccccttcacaggagccactggggtcaggaacaagtcctggtgcagggtagccctgtgcagggttgccagcttcctttcccttcagcccagctgctgtgtctttcctccttccatccttggtgtcttccctctgaagatcagttaggagtattccagtcatctcagcccctcagtggcagctcttccacctgactgcgtctagtttgccatgttgcactctctccttttgtctatttttaaaaattgaattattagatattttttcctacagagttattagagctccttatatattctggttattaatcccttgtcagatgggtagtttgtaaatatttttttctattctattgcatgtctcttcactttcttgattgtttcctttgttgtgcagaaaattttgaatttaatgtgatttcatttgttcatttttgctttagttgcctgttcttgtggggtattgctcaagagctctttgtaaagaccaatgacttggagtgtttctccaatgttttcttgcagtagtttcatggcttgaggtcttagaattaagttttcaattcactttaatttgatttttatgtattgaggtatcattgattgataaataaaaattgtatatgtttaaggtatgcaacataatgctttgatatatgcattgtgaaataattaccacaatcgagctaattaacatatccatcatcttgcatagttaccttttttggtgagaatatttaagatgtaatttcttagcaaatttcaaatatataatacattattaactaatgtcaccatgct

SEQ ID NO: 479365 - DNA, 737 bp, Homo sapiens
cggtgacccagccaggaggaagagagacttgttgaatggctttgaccaaagcctggtagtgatatggaccataaggtccaggctgaggtggtctcagatggagataaggaacttgttgggaactggagcaaaggtgactcttgttatgttttaacaatgagactggtggcattttgcccctgccctagagatttgtggaactttgaacttgagagagatgatttagggtatctggtggaagaaatttctaagcagcaaagcattgaagaggtgacttgggtgctgctaaaattatttagcttgaaaagggaaacagagcatcaaagtttggaaattttgcagcctgatgatacattagaacagaaaaacccatttcctgaggagaaattcaagccagctgcagaaatttgcataagtaatgaggtgccgaatattaatccccaagacaatggggaaaatgtctccagagcatgtcagaggtcctcatggcagcccctcccatcacaggcctggaggcctaggaggaaatgatatgtctttatcagcagtatgaaaacggactaatacagtgagtttttttggggggacctaggttatatttttgtgaatatattaatatatgatccaaaattgtatgggacttctaaaatagtctgtgctatcaattgtaattatgattattatgttgttattgtaaaccacagaaataaccaaatttccttgtataaatctactaa

SEQ ID NO: 479366 - DNA, 812 bp, Homo sapiens
cagttctttggtggaatccttaggctctcggatacagccgacaccatgggtttcagagacctgaaaagccccgccggcctccaggtgctcaacgattacctggcggacaagagctacatcgaggggtatgtgccatcacaagcagatgtggcagtatttgaagccgtgtccagcccactgcctgccgacttgtgtcatgccctacgttggtataatcacatcaagtcttacgaaaaggaaaaggccagcctgccaggagtgaagaaagctttgggcaagtatggtcctgccgatgtggaagacactacaggaagtggagctacagatagtaaagatgatgatgacattgacctctttggatctgatgatgaggaggaaagtgaagaagcaaagaggctaagggaagaacgtcttgcacaatatgaatcaaagaaagccaaaaaacctgcacttgttgccaagtcttccatcttactagatgtgaaaccttgggatgatgagacagatatggcgaaattagaggagcgcgtcagaagcattcaagcagacggcttagtctggggctcatctaaactagttccagtgggatacggaattaagaaacttcaaatacagtgtgtagttgaagatgataaagtcggaacagatatgctggaggagcagatcactgcttttgaggactacgtgcagtccatggatgtggctgctttcaacaagatctaaaatccatcctggatcatggcatttaaataaaagcttgaaagattaaaaaaaaaaaaaagaagtagtaaaagtgggcatccttatcttgt

SEQ ID NO: 479367 - DNA, 919 bp, Homo sapiens
cctcccgccaggtccctcccacaacacccatcttccatttctttctcctggacccctccaggctctgatggggatttctcaacctatgcctgtggcactctgctggggcccagaggaaagaatcaagagagcccttagtcctcctgctcagagctttgacctcaagtatgcaacagccttgcatttcagtctggtaattaaggaggatgagcaggatcatgctttgggcaaagcaatacaagggaatgaagcaggaatgcaaagtgagtcccggaggaagtgtagccagcagcagggtggagggaaggagtggcctggaaccaggaggggattgagtcagcaggaaacaaccaaggcagattgtgggagtaagccttcccctttgtttgtgaagaggattcacaacaaagcctggactcctactgataagctatggttcagtgtcacacaggccctgagagtacaggagctatgtgacatggctgtgcctatccacgggcacggctttcttctggatgatttgacaagggcagaactccagcccctaagaatccacatgacttcattgactttgtacttgccgcaaaatgaggggttgtattttccaaagatggtcacaataatgtcccttgtcccacaaagttcagtatctgctgaacctcttactctcctggagcccagccaccatgctgtgaagaagctcaaactagtccacatggagagaccacatggaaagatggagaagccatgtcttcaagtagttgctttttgcggccccaaagtccttggagagctggatcctaaagtccaagtgactgaggcttagaggaaccaatctggggagatcttaagttttctaaaggagccaatgaagttccatattgttcttaagaaaaattgtgcccacaagaaaagaagc

SEQ ID NO: 479368 - DNA, 571 bp, Homo sapiens
tttttgtttgtttgttttgacctcctgcacaataatgaatagaaatgatgacaggggcctaatctctcatggccatgtgacaataacccggctcgtagctgaactaaagaaaaagtcttacaacaggaggaggccattttcacgtcatgtaaaactagaaagtggtaatgtttgtatggaatgtggtaaatggacgtggccaaagtgtcaaaccatcttagaccatgaagataaggacagcataaggtatcacagaagaaacttgggcttctgtaatgggaaactttctggctcatctgatttctctctatctatactccccatctactgcaccacacaagatttggtaccaccttactgcaaagaagccctggattggttttgggaggcaagatgtaaaggcactaaattattgagtggagcattagaaaagcataaaaaagaattcataagaattctccagtgcaaaaggacagacctctatcgaactcgttgttagatcagactagtgacaaaagaaactttttcatagctctgagtatacatttattaacttctagcttaattttaa

SEQ ID NO: 479369 - DNA, 654 bp, Homo sapiens
taaaacctaatcacccttaccccgctcaatgccaatatcccatcccacagcatgctttgaaaggactaaagcctgttatcactcacctcataattctcgtaaaaacacacgtgctctccctgctgatcgtgtccgattaatctcccaaacctcaatcccttacaaaacaacaactcctttccttcctaggcatggaaaagtagaatggactaaaagtctttcaaaaacacacctcaccaagctcagccaccaacttaaaaaggactggacaatacttttaccactttgccttctcagaagtcagacctgtcctcagaatgctacaagagatgcatttaccatgaagccactaaagcttaaacttcagggcccctcaattgcagaggcctcttccatgccccttgcagaacatgagcaatgtgcactgatttttgaaggaattgaaaagacaaacaacaactgtaaccctgtagttttggatgcaaaactgtcctagctttaaggtgtcttgcatatcctcggtccagatgctttcaataactagccaagagataaagaatgagttcctttgtgggaagtttgaaaataaatatgtctgcatcttcactttgtaatctctggaaaaggatgctcatgggtatttaaagaagctgg

SEQ ID NO: 479370 - DNA, 726 bp, Homo sapiens
cccgggtgcttaaacttctcaaaatgactagatattatcctattgaaggtgtgcctcgaaagctgttgagccacggcttcagtcagcacgggagaaaactgcgagccagcattaccccctggactattctaatcatcctcactggatgccacagaggcaagagggtggttttcctgaagcagctgggtagtggtttgttacctgtgactggacctctggtcttcaatcgagttcctctacgaagaacacaccagaaatttgtcattgccacctcaaccaaaattcatatcagcaatgtaaaaatccctaaacatcttactggcatttacttcaagaagcagcagctgcagaagcccagacaccaggcaagtgagatctttgacacagaaaaagagaaatatgagataacagagcagtgcaagatcaatcagaaagctgtggactcacaaagtttaccaaaaatcaaagctattcctcagctccagggctacctgcgatctgtatttgccccgatgaatggaatttatcctcacaacatctttcatctattgtattctgccgtgatttccttttgcttggagctcccataacagacagaacattcatttattattcctttcacttattgacactgtatcctattctaggtactgatctaactatgtggataaagggcatcaaagacttgacaacatgatttttaccctctcgatgtttaaaattaca

SEQ ID NO: 479371 - DNA, 1494 bp, Homo sapiens
gttcatctcccccttataaggacaaagctgaccctattggctctggcttcatcatggctatctgttcccatcatggccactctggactttatgtgttctgtggcttctcagctgggctgctgctgctgggttccagtgttgaagatggccacactaaaaaactcctgggggctacaatttacattgtagtttatgcaaatggaatccctggaattttggagcgcacagccccagtgatctatggcaatggtcctccaaaagcatgctttattcaaaacaacacatactcatattggatgactctcttgatcctgaacctacaagtggaaactgtactcaggttatgtgcagaccaatataagcatctacttgaattttgtgaaaaccagagatcactaggcaaggaactaagggagatctctggcaaccaaggcctcactctaataggccatgagaaattgaattcagccaacaaccacttgacccacttgactgagcttggaagcagatccatccccagttgaactttaagataatcacaacctcagaaaacaccttgattgcagcctgttctgctgataggaagcactagagaaagattagatggcagtgttgccagaaaggggtcctgatccagaccccaagagagagttcttggactttgtgcaagaaagaatttgagagaataggtataattagcatagcacttgccacataataggaatacaatagcatataattgaataaatattcactggaattagcaacgaggatgccaatggtaaccttgaggaaatgacttcagtgaaatattgagagggtgtgacagaccaggtctccattagcaaccagagcagtcagccttcaccaatatcttagtgtaactctaatgaatgtacaagttaaacattaaagaactggagaaactggtgccttactacaaagcctagaatgtacaaacaggtccattaagaccatgtctgggctttctcagaccttagagtttaattaaaataatggagacattcttgcataccttgtaccaggacccactttagattaagtaatttttgcaaggctctgaagtagttgtctagaccgtggaccctagttaagattaggtagagtgaaacactttggctttcggcttgtaggtgcactgaatgtatataagcactagaaaaaacttgtaactttgagttggtatgatgagttggtctgatgagttactccaaccttctccctgtaactggttgcagaaataaattcttttatgaatatatataagcactagaaaaaacttgtaactttgagttggtatgatgagttggtctgatgagttactccaaccttctccctgtaactggttgcagaaataaattcttttatgaatatatataagcactaggaaaaacttgtaactttgagttggtatgatgagttggtttgatgagttactctgaccttctccctgtaactggctgtagaaataaa

SEQ ID NO: 479372 - DNA, 1084 bp, Homo sapiens
tttttttttctctctccctccctcacaccgtagcggcgcgcgagcgggccgggcggcttcaccaagatgtccagtgataggcaaaggtccgatgatgagagccccagcaccagcagtggcagttcagatgcggaccagcgagacccagccgctccagagcctgaagaacaagaggaaagaaaaccttctgccacccagcagaagaaaaacaccaaactctctagcaaaaccactgctaagttatccactagtgctaaaaaaattcagaaggagctagctgaaataacccttgatcctcctcctaattgcagtgctgggcctaaaggagataacatttgtgaatggagatcaactatacttggtccactgggttctgtatatgaaggtggtgtgttttttctggatatcacattttcatcagattatccatttaagccaccaaaggttactttccgcaccagaatcgatcactgcaacatcaacagtcagggagtcatctgtctggacatccttaaagacaactggagtcccgctttgactgtttcaaaggttttgctgtctatttgttcccttttaatggactgcaaccctgtggatcctctggttggaagcatagccactcagtatttgaccaacagagcagaacacgacaggatagccagacagaggaccaagagatacgcaacgtaattcacataatttgtatgcagtgtgaaggagcagaaggcatcttctcactgtgctgcaaatctttatagtctttacaatacggacttctgtgtatatgttatactgattctactctgcttttatcctttggagcctgggagactccccaaaaagactaactttgttagggctgtgagggaaaaaaacgctgtggcatgttgatcgttgtgggaaaaatcaacaataacaataatgcaacaatattaatagttatcatttctgtgtattctagggcaagttacctagcctctctgaacctgagtttcttcatcaatacaaagaagttaacagtacctacctgatggcactgttgccagagtaatgaaatatataaccattgtctatggctgtgtga

SEQ ID NO: 479373 - DNA, 1574 bp, Homo sapiens
aagcccaataactttctcacacaggagatagaaaccacaccaagatggggtctcactatgtttcccacgatggtcttgaactcctgggctcaagtgatcttcctaccttagcctcccaaagtgctgggattacaggcacaaaccgccacacccagactccatcctattctttaaacaaactaggcatcctcccaacacaagtccttgagaagaaaaccttactgttttctctgcctggaacaccctttttcccaggtatccacaggccttctccctcatctcttctggaagtttgcttgaatgttaccttcacagtgaaacttcttcttaccagcccatttaaaaatgtactcccccaaactcagcccttcccatctttcttccattctttaaatttcttcatattgctattcaccatcttacatgtcatacttacttgtttaccatctctctctctcttccactaaaatataaactttatgattattcatattttgtgtattttattcactgctatatcaccagcacctagaacagtgcctggaacaaagtaattgataaataattatcaaacaaattaatgagtgaagaaagaaatgaaggaatgaattttactacaggatataagagatgttgaccttaaactatttcagacggatgcttaaaatattatctcatggtggccacccattcagtggattacagttgaatcctgttactgactaacagcatatatgccaaggtttaacagccttaattgtgtgagagttatttctatctgacttgcagaggtttaaagagatttctgttccttgctcagtaaaagtggataaaactagttagaatgcatcatatgattatattatccagggtctagttagaaatacagaaaccatactaggtacttcaactgaagaaacttaatgcaggcaactgaccacacaatcattggagggtagaacgatcaaaaagggaagattgaggcaatccatggattataactataagaaggagctgctactgctggggttgggagaataaaatacagagagggatgatcaaaactaagaagcttgaaaagtatcatataacccaataattccacttttatgtacatactcaagagaaatgaaaacgtatgtctacacaaaacttgtgcacaaatgttcatagtagaagtattcataatatccaaaaaagtagaaacaactcaaatatccattaactgatgaaaaaacaaaattggtatatccatatgatggaatactactcagccatgaaaaggaatgatgtactcatacatgttacaacacggataaaccttgaaagcatcatgcgaagtgaaagaagccagacacaaaagccaaaaattgtatggttttacttatatgaagtgtccaaaataggcaatcagtagagacataaaagcaggctagtggttgcttagggctgggggagaggtggaaaatgggaagtgactactgattggcactggatttcttttggggatggcaaaaatgttctaaaattgggttgtgttgacagttggacaactctggagtatactaaaaacc

SEQ ID NO: 479374 - DNA, 756 bp, Homo sapiens
ttacaagccagaagagactatattccctgcccctagaggtggaatctagagaggcagtaggccttgctgagctgtggtgggctccacccatctcgggctaccctgcagctttgtttacactgtgagcatagaaccgcctactcaagcctcagcaatggtggatgcccctctccctgccaagctcctgtgtcccaggtcgatctcagactgctgcactagcagtgagcaaggctctgtgggtaatgaggaaaaaaacctcctgaagtgtgatataaatggccttcaagaggcattagtgtgtaaggaccgaaaaaaaaaaaatcctttacttcaagtttattgcagagaggagcatttcatattagccaaaatgggaatagcaaagggtgaggcagaattttgcttcttaagtgggtcaatagatggactattcagctgggatggctgggatggctgggatggctgggatggctgggatggctgggatggctgggatggctgggatggctgggatggctgggatgactggggcctctccccttatagtttctcatcatccatctggctaacttgcacagtttacgaagctgcagaatatgaaagtctgaactaggttgccctttatatccatgccccaagagggagataaaggaactatttattaaacgtatacatataatatgttcccaacctgtgctaggcactatgtatgtgtgtgtactttacatgtattccatataaacatacatgtattct

SEQ ID NO: 479375 - DNA, 911 bp, Homo sapiens
ggtctagggacttttccgtggctaggatgcaagcatcatggtggaaatgtggactgctgtgggtcactcacttaccctttcctcatatatccaaaagaaataatatgtcacacataaacttgtacagaaatgtccacaacagcattatttataagagtccaaagtggaagcaatccaaatgttcatcaattgaagggcttcatgcttcattgaagaagatgacttacttaaatggttttgataagcatagagctgaggctgacttccaaataaaacttctaaaaagttctcaaggtcaatttaaaggagaatttaagctgtcttatgtcattaataacaagggtaaccattctgaagacaccgaagcacaactttcctcaattcacattgagaaggcagccatctgcaagccaagaaaagaggcctcaggaaaacccaactctgctggcaccttgaccttggacttccagtctccagaactgtgagcaaataaatttctgttgctcaagccatccagtctgtggtattttgttacagccctggcggactaacacagagactcatagaggaatgtctccaaaatagttcctcccttcacttcagggatcactgtcctgtgctacttgatatagtgtctgtaaatcatttttaaatatatgttttttccattttaaaagttgctttagacagagagtggaaaaatacattgccatacaaggaaaaaaaaggaaggaaggaagggacggcgggggggggggaaggagggaggggggaaggagggagggaaagagggaggaaggaaggaaggaagggaagggaagggaagaagggagggagggaaggaaaattctccaggacagaaattagcaagctactgtcctaccacctgttttgatctttgtgatttcatt

SEQ ID NO: 479376 - DNA, 1077 bp, Homo sapiens
cagtgaaccttcagaggactgtgtctggctcctctggtaataagagggatgggagcagaagtagtaaagggtccagaaaggcctcatttgattggcacccatgtgccattgatttcctctggttgtggcaaacacttaagtctgactctttatcaggaaggactctcagctgcaggtctgttggagtttgctggaggtccactccagaccctgtttgcctgggtatcagcagcggaggcctgcagaacaacggatattggtgaacagcagatgttgctgcctgatcgttcctctggaagttttgtctcagaggagtacccggccacattgcaggttgccactcccagctgcccgccacaattctggggtgatctcagggtttatgtttcctcctcaacaaagacagcagaggaagggaccttagcagtgattgtggcccaagggccttttacttgtcacctggggctccaccccagacagacgcaggcgatcagcagaaaacaacagcctgtagaacacattaccaaggagcagcaggcagccaagttttttataactgggctactagccgccaatttaaagctttaatcggaacacgcttacaccacacagaagtctgtttttctgcacaacataaatggaaggggacaaaacactgctgccttaatttacattgatatttttaaacatgattttggctttgagttggtaaacatgctttggaaaatgcatatccaaaaaatgaaggatgctaaaaataagagaatgtatgtaaatatacatgaaaataggtctttttaaaagttacgtccactaccacccttaccccctaccttttaggttaacttgcaactaattggctctggcagtattagactcggtccttacataatgccaccaaatgtttctctgtcttttagttactaataacactgtctgccatagggaaggcaaataacttcattctatttcatttgaattctggagagcctttttaaattttgatattttcagttccatgctgaaaacaagcactttccaagaaaaaaactattttggaggtgacttattgagggc

SEQ ID NO: 479377 - DNA, 552 bp, Homo sapiens
ggaggagccaaacaggaaaggatgataaggatgaaaagccaatgtaagtgtgtcttatcaagagaatgcatggcatcttcaggaataggggaccaagaagaggcaaaagcacaatgggatgagttaggaaaaaatgcggagccccgggagaaaactttgaggaaagcccagcctattaaaacccatcagagctggcaccctttgggaagaataccagaaaattggaacaaaaaagaggtgcagcttacctcacagcaggaaagaagcagccttttaattggattaaatctcatcaccacaaaacttatggatcctggccactgtgccaaagagacaaacttctgcctgatctacagaactctagaacatagtttcaagagatacttcaactggtttgtcaagagaaacaccagaaagaatccttgagcaagtttcttagacattgctttgccgcatttaggaggtttatgattacctctgagttacaatggtattcattcttcatgaccaaaagagaggactgacaatgtaaaaatgtatttcagctctctg

SEQ ID NO: 479378 - DNA, 551 bp, Homo sapiens
taggtaaaagggaccaaggcataggagcctctttcaatggctgccaccaccaaagacccatgctggcaggcaggaacgttaagtctgctgaagctgcgctcacagttgccccttcccccaggtgctctgtctcagggagatgggagttttatctataagcccctgactggtgctgctgcctttctttcagagatgccctgcccagagatgaagaatctagataggcagtccggctacagcagcttttcccagcttcagtgggctccgtccatttcaaacttcccggcatctttgtttacacagtgtggcaaaaactgcctactcaagcctcagtgggaattgaacaatgagatcacatggacacaggaaggggaacatcacactctggggactgttgtggggtggggggaggggggagggatagcactgggagatatacctaatgctagatgacgagttagtgggtgcagcgcaccagcgtggcacatgtatacatatgtaactaacctgcacaatgtgcatatgtaccctaaaacttaaagtataataat

SEQ ID NO: 479379 - DNA, 555 bp, Homo sapiens
cagcagcatctgcagcagggcaatctcagcaatagtgcagtttcagtagaagcaatggcacttgtagcaccaccagaagatcaacagcaatgtgggctgatgggaggcctcaaggaacttccaatcatcttggaaattgaagggaaaataaagcacttcacaaagccagagaaggaggaaaagagagagaggaggggtgccacacatttttacatgaccagatctaacaagaactcactcactatcgcgaccaagggaaacagtgctaaaccattcatgagaaactcctcccatgatccaatcacctcccaccaggacctacctccaacactggggattacaacacgacatgagatttgggtttatgggttcactggccctgccatcggggtgcttcctgggacaacagaaggctatattctccagctgagttcaggcagaagagggatccctgaggtggaagtctaacaggcattgcctgcctagctacaagcagcagggcatattttttatttgatggtgcaattcagtctccaatgaagtaggtgaagcttt

SEQ ID NO: 479380 - DNA, 605 bp, Homo sapiens
ctgtaagtccatcaaacgcttttcttttgtaaattgccaagtctaagaaaatatgtttcaaatgcctctcattctacagcttcttttggaaatggtttccattgttgttagcaggtgtttttctttgatagcagtaaagagagataaagagcacatcagagtccagcttaaagcagcagtctggctctgttttggtagaacagctgtgctctggtgggggatcccttccatccctgaatattttgatttggactctcctaaacccacaagctgcaacagctgtcatccaaaccgcaaagatggtagccaggccctctcccagggaactctgtcccatccaagtagtacagttgttaaagatgctgatgatgcgtgctcaaaagaaaatgaggaagacagtaaaaaggttgctgtgcttctggcttttgaagatgaaggggccatatgccaagtaaagtccaaagtctgatgtgttggtgaaatttagcatatacatattttaaaatatacttgactttaaaactttttgaaaatgaattgcattttatttttttcaaggtggctgaatattgatgtcagatgccaattcccctcagagagaatat

SEQ ID NO: 479381 - DNA, 592 bp, Homo sapiens
caaagaattataacaggatgttcagatgtgtctggagcttcttccttccagtgggtttgtggtctcacttgacttcaggagtgaagccccagactttctcagtgagtgttacagctcttaaaggtggcgcgtccagagttgtttgttcctccttgtgggttcgtggtctcgctgacttcaggggtgaagccgcagaccttcacaggatggtcgctggagagtctttctctgccatcttattctgcctgtcttctcttgcttcaccaactgacttcagcaggctcagaccctggataaaattcagtggcaggcagactgcagctgctgtatgccttaggatgtcttcctctatcactaagctaaagggaaaagtcaagctggaaactgcttatggccaacctgactcctattctgttcaaagtcgcccctccgctcactgagataaatgcacatctgattgcctcctttggagaggctaatcagaaacccaaagtaatgcaaccatctgtctcttatctacctatgacctggaagccccctccccctttgagtcttctcacctttgcttcgtgttatcccgtctttccagacc

SEQ ID NO: 479382 - DNA, 719 bp, Homo sapiens
gaatactacgcagccataaaaagtgatatgaacttaaaaccagaaggcaaggaggagcgagttacatcttacgtggatggcaacaggcaaaatgagaacttgtgcaaggaaactaccgtttttaaaaccatcggatctcatcagactcgttcactatcacaagaacagtgcgggaaagtcctgcccccgttcacagggtacatgcgcagttttgttatatgggcctgcagctcagatatgtctcagtcccaagaggaagcagtcccttatttctccctggaagttagcttggaccagagcctctcagagggagatgagcatccctggggggtcagcccttattgctgggctctactagagctgtcccatgcccaaatgtccctggctctgtgcctgctgcagcttcatctctgcctaatctctgaggagatccccctgccagctaaaatgtctgtggatgctgcaggaatcctctgaagctaggatcccagaggtccacagcaaaatatgatgttgactgtgggtttgaaatatatagtttctattactttaaggttgtgactttaatatgtatagtttattattgcctaatttggttcttggtgcttttaggggtggtgattatgtatgagttacttagttatagacagtcattttgtgctgctttctcagattctggttgtaatagttatgtacttggtgtataggcaaagttcact

SEQ ID NO: 479383 - DNA, 1624 bp, Homo sapiens
aagtcaccacttctctgtccagtatgccccagtgtctgttgttcctctctttgtatccggtggtgatttcccctcggtccgtggctgatctacagatgccatctgggaacaagggccatgagtctgaaaccctaggaatctacctggttcactatgctagtgtggctgagctgtcacccaagccacaagtcaaagtctttcctattttctctcctgtttcctcaagcatagaagtttattccctcagtcaccatcacccctggcttacagcaagtactgcctggctaccgctgatggtcaaacaaagcccaagagttctcctgtcagaacgtcagaatgtgaccctatttggaaatctgatcttcacagagataatcaagttaagattatggtgggccttaatccattatgacttacattacaaaaagggaaatttggacacagaagcacacacaggaaaatgccatgtgacaattaaggcagagatcagggtaacccttctacacacaaaggaacaccaaagattgccagcaaaccaccagaaactagtggagaaacatgcaaccgatgcttcctcacatcccccagaaggaaccaacctgcccacaccttaatctcatattactaacctccagaactgtaataatatttgctttatatatctaggtgcaccagttttgaatacatatttatttcaaattcttatattctcttgctgaattgatcactctacataatgacctatttttctctttttactgtttttgacttaacatccgttttatctaagtatagctactcctactcacttttggttttcatttgcatgaaatatcttcttttcatccctttatttttattctttatgtgtctttagaggtgagatgagtttattttaggtagcatatagttgcgttatgacttttttattcattcagccagtctatatcttttaagtgtagagtgtaatatatttacattcaatgttattattgatatgtgagggcttattcctgccattttactaatttctatttgtttacgtgtccttcagttgtttctctttcttttgtttttaatcattgtagtttggtggtgttccgtaatggtaacatttgagttttttctctcccttatttatgtgtttgccataccagtggattttatactcccatgtgttttaatgatggtagatatcctttcatttccaggtgtagggctccacttagcatttcttgtagggttggtttagtggttatgaattccttcagattttgctcatctggcaagaactttatttctccttcatttttgaagggtagttttgctggctgtagtattcttggctaaatgatttctttttctttcagcaacttaaatatatcatacctttctttcttagcctgtgaggcttttgctgaaaaatacactgttagtctaatgggaattccttcatatgtaactttatgcttttctcttgctgtttttagaattatctctttgtctttgacttttgacagtttgactataacgtgtcttagaaaagacctttttaggttgaatctattttgtgaatatactttgagcctcctatatctggatttctataattcttgcaagattt

SEQ ID NO: 479384 - DNA, 1173 bp, Homo sapiens
ttatacatgctccgtgaaggcagggactttgtattcattgatcatgggacacaagtcaaagctcagtagcggttttactcacttccacttccagaagcagatactgagcctcacatctgctaagattgccctgagtgagagtcttatctcctgtagagaaagcactgaagttgtggaaaagcagacacaagctcttatcatgcgagtggctgacctgcaacgaaaggtgcatgcacagccttgccaggtgcctactgttaaagtgaaggataagttgctgcatttggcccctcctacaaccaagaaagaggcccaacacctagtgggcctatttggattttggagggaacacattcctcatttgggtgtgttactccagcccatgtatcaagtgacccgaaaggctgccagttttgagtggggtctggaacaggagaaggctctgcaacaggtccaggctgctgtgcaagctgctctgccatttgggccatatgactcggcagatccaacggtgcttgagatgtcagtggcagatagggttgctgtttggagcctttggcaggcccccataggtgaatcacaatggaggcctctaggactttggagcaaggcccttccattttctgcagataactactctccttttgagagacggctcttggcctgttactgggctttgatggaaactgaaggtttgactatgggtcatcaagtcaccatgcaacctgaactgcctatcatgaactgggtgctttctgacccatctagacataaagtgggtcatgcacaacagcattccatcatcaaattgaagtggtatatatgtgatcaggctcgagcagttcctgaaggcacttcggtgaagggaaatcttcccagtggacagaacttcaagcagtgcacctggttgtgcactttgcatggaaggagaaatggccaggtgtgcgattatatactgattaatgggcatagccaatggtttggctggatggtcaggaacttggaagaagcatgattggaaaactggtgacaacgaaatctggggaagaggtatatggatggactgctctgagtggtcaaaaactgtgaagatatttgtatcccatgtgagtgctcaccaacgagtgatgtcagcagaggaggattttaataatcaagtggacaggatgaccc

SEQ ID NO: 479385 - DNA, 693 bp, Homo sapiens
actaggcgctgagaatgggaatgtcagaaagcattaagggactcatgtcccttgaaatatgtataatgattttcatcattttagagacgataaaactgagaatcagagaggttagatggctctctcaaggtcacatggctaggaggtggcagatctgggctttatctaacgcatgcctgtctggattccaagccggggccctttttgctatggagtattccctccctttgtggcaaagcttcctgctcctaacacccctgagttctagactcacagacctgtgcccttgggactttatcagtgctataaaaacaggattctgtggaaggagagacttggaaaagaaagagacacagagacaaagtatagagaaagaaaaatgggcccaggggaccggcgttcagcacatggaagacccgcgccggcaccggcctctgagttcccttagtatttgttgatcattatcgggcgtttcccggagagggggatgtggcaggacaataggataatagtggagagaaggtcagcagtgaagtaatgtttacttggatattcttgatacttgtggatgttcgttggtgtctggacattgcagagttatgtattcattgtagtcttaatagtctggggtttatatccatccttcttgggaaggctttccaggtatttgaagagacttgagcattgccatct

SEQ ID NO: 479386 - DNA, 573 bp, Homo sapiens
ctcctcaagtgccgccaaagtgggagcccaggcagaggaggcgccgagagtgagcgagggctgtgaggactgccagcacgctgtcacctctcaacagctggggaggcctcaggaaacttccagccatggtggcagctgaaggagaaatgggctcccagaacaaaaacactgaggcaggccctccatttgccagaggctcacagaataagcacctccccattgtggacattagtagtgaagacctaactgccacagccaaagcccttgcaatagcctgcaagtccctgttagctctcaaactcattgcctcctctctttgcctttacctggtggagtatatgagagatgaggacaggctagaacagcaggccccacatttagaaattagcctgccaatattttttaaaagagaccctttattgggcacctactctatgccaagtttcaagccaatcacttttacacaaattattgacctttctcagccactctgtgagaaaagtattgttattatacccatcttagtgatgagagaaccaaggcttggagaggctgagttactttcttaaggcc

SEQ ID NO: 479387 - DNA, 865 bp, Homo sapiens
ccaggaaaagaaggatccaggtgcctcccaggccctgtgagagcccgagtccttgcttggtagcatgctagagaagaaggtggacgagttggtgaaattcctgagtgtcaagtatacaacaaaacagcccatcacagaagcagaaatgctgaagggtgtcatcaaagaacacaaggatcacttccctccgatctttatgcaagcccatgaatgcatggagattgtctttggcactgacatgaaggaggtggaccccatcagccactcctgtgtgctcctcaaatcactagacctcacctacgataggaggctgagcgatgaccagggaatgcccaagaccggcctcctgattcttaccttcggtgtgatcttaatggaggccaactgtgcctctgaagagaagatctgggaagtgctgaatattatcagggtgtatgctgggtggaaggatttcatctatggggagcccaggaagctcatcaccagagatttggtgcaggaaaaatacctggagtgctgtcaggtatccaacagtgatcctccaagatacaaattcccgtggggcccaagggctcatgctgaaaccaccaagatgaaagtcctggagtttttctccagagtcagtgggagtgatgccagttcctttccactcctgtatgaggaagctttaagagatgagaaagagaaagctcaggctataattgccaccatgggtggtactactctcatggccagtgcacattcctgggccaagtccagcagcttctcttgccctgagtgaagtctcaggcagattcttcactctgtgtttgaaaagagaagtcaaggttttaagtagtgaagggctgattgcagatttttatct

SEQ ID NO: 479388 - DNA, 724 bp, Homo sapiens
tcatcagttaaggcaggaacaggccattttcatttcttttgtggtggaatgtcatcagttaaggcaggcaccggccatctggatgtgcaaaagttcatgacggcttggatgaggtgatttgagaatgagaaatatgaggggatcgaagtgtccctgccaatattttggctgctgcaaagatggcgagcataatgtttgggtatgtggctccattctgcctgaacttagttgccataatggttctataaaggagcctttaagagagggagaatctcaaaatttcatggagtcacaaataaggtttccttgtaagggacaatggtctttgagggagaaagaacacaattcaaactataacacctatccaccaactctctcaccttcctccacccctaccttttcaagggtctatttctgtgcctcaaattctgggcatgtccccaaaccactagaattcggcataagatataaagccagagagcataagaattacagaaacacttcaagtacaatgcaaggggcttttctcctctccaaatcatgtgacagtaagttgccagcctgatataatcacaacgtgcccatcaaaatcaggaaattaatatttatatgtaaatacagtataattcttagaactcattcaaacttcaccaatcatcacaacagtgtcctttatagtgaaaggacctagttcagaatcatgtgttatatttagttgttatgc

SEQ ID NO: 479389 - DNA, 686 bp, Homo sapiens
ttaacgtccagtgacttccaaaatggcagagctctgcatatgtgatctgactccactggtctttgaacatggccttggatgcatttgtaaactgaataatccttgctcattagcatttgaagaagacagagattggaacagtttggaggactcaggggatgacaggaagatgtggaaaggtttagagcttcccacaagagacttgttgaatgcttttgaccaaaatgctgatagtgatatggacaatgaagtccaggctgaggtggtctcagatgtaaatgtggagcttattgggaactggagcaaagatgagtcttactatgctttagcaaagagacttgtggcatttttcccctgccctagagatctgtggatcttcgaacttgagagagatgatttagggtatctggccgaagaaatttctaagcagcaaaactttcaagagctgaagctcgagtcccatgatcctttcttcttatgagtgtccatgctacatactgcttacatttttctcccatttattcaacagtattttcatatgcaaaatgaggataacaatagtatctacttcatagagttaaatactcaataaatatgtgctataataataaaagctctgactcccagagtgcctagtgcagagtttcacatatgatgaatactaatgaatagagtgccattgaaat

SEQ ID NO: 479390 - DNA, 533 bp, Homo sapiens
ggagacagcacacatctctagagctgtcctgcgtctacacaggagtgccctttggcatcgcggacaggatatgagagatcaaatgatgagtcaagaaggggtctctgctgagggaatcccggggtggttggcaatatgcatgtgtggtggagttgcccagatgctcaaccgttttgagccaccatctgagacaagtaatgaacatgaaacgataccacctgccaaggggatactcttaaatcacccaaacaatgcagaaattacacaatttacaagcattcaggctggccaagacccccataacagcactgtgttgcctgtgaagaagccagatggcatctggacaattacagtagactactgtaagcgaaacaaagtgatgatccctgtacatgcaattgtacacaatattgttcaactgctagggaaagtggtccttaagctaggaagtgtccatgctatcattgacttggttaacacctttttcagtattcctttatcaggagattaacaagaccagtttgccttccctt

SEQ ID NO: 479391 - DNA, 643 bp, Homo sapiens
gcctgctcaatggtagccattctgactggtgtgaagcaatgctgaattctatgtctgtcatttccaccctttcagcctggttcagaaccattgcatggggaactagcatggtcattaggagtgacagcaggattcatgctcctacgtgtgtgccaatagcagtaatgatgcagcagggtgcacatgcattggcggggatgggacagcagcagggggataaagccttggtcaatccatatttgattgtggtggataagcttttggatgtgctgcaggattcagtttgccagtattttgttgaggatttttgcattgatgttcatcaaagtaacatgacattaaaacaaggtactgcagaacattggcctgtttttgttgttgttgttgttgttgttgtcgtcgtcatcgttgttgtttccccagaagatgactgtgcagaccacacagcttgcactcacccaattggatctccctctggtgtctgctccagaagcaggcccaaccagctaggttttttccctagccttccatgcccagattgctgggctttttcatctgtcccaggccatgggctctctaaagcagaagctgtgcctggccaataggctacacccttcctggacctgtgttatggagggaggga

SEQ ID NO: 479392 - DNA, 664 bp, Homo sapiens
tgacctggatatgagacaaggagtcaaaggagatcattttgaagctttaagatttgactgccctgctggatttcagacttgcatggggcctggaataggcaagaaagatgtcaagaaagagatgctgcaactgggctttgaaggcaggggtgatgtgactctccctatctccttcaagttgtcttatctccagtgggtctggcaaggctactctgagagtagtgataggggagagaagggaagtgaccctacctatatttacaaccaccgaagtttaagtgtgagtatgattgttaagacactggcaccaagttcaatcgggggccttggaatttcaatcagttctgaccacttcatgtccaagtccttcaccttccagacccaagcagatggtcctacaaagccccaagaggccacagaaaagaataatttgagaggtcctaaagtactggatcaattatgttttcctttgttggaggacagacaagaacactgagatccagatatattttggtgagcaggtactttgtcaccattacacttacagttttccctcaaacacttagctgattctggcacaaaactcaccttggaatttggcctaaatttcataagatttattgcttcttcaaattgacccacaagttaagtgagggttattttc

SEQ ID NO: 479393 - DNA, 523 bp, Homo sapiens
caatcatgtaagatagatctgttctccctattttaattagtgtttctattatgccctcagattttccaagggagtctaagcctccaaaatattacaaaacaaaactggaaaggttttatagcaaattactaatgaaaagtagaaatggtgtctcttctgccatcttggaggaagtgcgtggtttgccttctgttcactattacccttctaattttatctctatccatgaggaaaatggtgtaaatcgatctggaaaccttgagactgtgtctgttgcacccacgctgtgtttgtgtgcatattccaagacaaccaaggcagacatttttgttgttgttgttttagcttttctttcctggacttataaggactcaaattgtctcctggcaaaagtgtcctcaaaaggagaggacttcagcagcaggaagaaagcaggcaataggagataagaaagtaagagggtagaacttagtgtttcaggctcaaatttaaagcctcacctcaccatttcttgctgtgcaca

SEQ ID NO: 479394 - DNA, 740 bp, Homo sapiens
cactgtgagagatgaaggacttcaccatcacccgtgggaaggcgcacgcagaggatccccaggagcacatccacacccaatgggtggatgatgacaagaacgttagcaagggcgtcgtaagtcctatagatgggaagtccatggagactataacaaatgtgaagatattctatggatcagaatgtaaagcaaatggaaaagtcatcagatggacagaggtgtttttcccagaaaatcctgaccagcacaattgcctcagtgatcctgcagatcacagtagattgactgagcatgttaccaaggctttttgtcttgctctctgtcctcacctgaagcttctgaaggaagatggaatgaccaaactgggactacgtgtgacacttgattcagatcaggtcggctatcaagcagggagaaatggccagccccttccctcgcagtgcatgaatgatctggacagcgccttggtgccggtgatccatggaggggcctgtcagctcagtgggaattgaacaatgagatcacatggacacagaaaggggaatatcacactctggggactgttgtggggtgggaggaggggggagggatagcattgggagatatacctattgctagatgacgagttagtgggtgcagcgcaccagcatggcacatgtatacatatgtaactaacctgcacaatgtgcacatgtaccctaaaacttaaagtataaaaaaaaaagtgtttggattggctc

SEQ ID NO: 479395 - DNA, 884 bp, Homo sapiens
agcctaacacagatatgaagttggaaatggagaggtgttttattagcctttccaggaaccctggctgtgtcacacgacccagtcaagctagtaactaccagtcctctaccagcagagatggatattcctctattctctggcagtataactcagagatgaaggacttcaccatcacccgtgggaaggcgcacgcagaggatccccaggagcacatccacacccaatgggtggatgatgacaagaacgttagcaagggcgtcgtaagtcctatagatgggaagtccatggagactataacaaatgtgaagatattctatggatcagaatgtaaagcaaatggaaaagtcatcagatggacagaggtgtttttcccagaaaatcctgaccagcacaattgcctcagtgatcctgcagatcacagtagattgactgagcatgttaccaaggctttttgtcttgctctctgtcctcacctgaagcttctgaaggaagatggaatgaccaaactgggactacgtgtgacacttgattcagatcaggtcggctatcaagcagggagaaatggccagccccttccctcgcagtgcatgaatgatctggacagcgccttggtgccggtgatccatggaggggcctgtcagctcagtgggaattgaacaatgagatcacatggacacagaaaggggaatatcacactctggggactgttgtggggtgggaggaggggggagggatagcattgggagatatacctattgctagatgacgagttagtgggtgcagcgcaccagcatggcacatgtatacatatgtaactaacctgcacaatgtgcacatgtaccctaaaacttaaagtataaaaaaaaaagtgtttggattggctc

SEQ ID NO: 479396 - DNA, 630 bp, Homo sapiens
acctctaaatgatcttctgcttcattcactctgtcttcctcctctctctcgccaattctcaaccatcagctcttctctttatatacttatttccttaaaaaagcatctgcagaggagcctctccttgtggtcaccatgaccagcgacacacgggttctgccagcctactgccaacattcacttaaagtcccagggcccttaagtcagctggtgataaatgctgccaggcctggcactcacccttcagagcagtgggctcccctctgtcccagggaaggtccacaaatgctgactaagtgcctaaacatagactggactcagagtccccaagagcctatttgctgctctaccctactatggctgagctggtacctaaggtgcaagatggagtcccctttactttaccccatgcttttctcaaatagaaggagagtttcactgcaggcaccacagcttggaatgtgctgggtcagacctgaagccagcatttctcagagctcaacacccacagcatattacctgggtattgctgttggtttgttatccagagctcaggggctctttagtcaacagctgattaatcctgccaggtctctgctgtaattgggcagcactgagttcaatgtaaag

SEQ ID NO: 479397 - DNA, 720 bp, Homo sapiens
ctacacgcatggtgcaggaccccagccgattggatggtgcctgctcatattggcgagggtagatctttactgagtccactgattcaaatgccaatctcttctggaaccaccttcacagacatatccagaaataatgctttatctggatatctcaacccagtcaagttgacacctaaaattaaccatcacaactaccatcttgatgcagacaactgcaacaatccaccagctttaggatttgccagcagtgataggcaaatgatcactaatgggcttaaaccaaatcaactgcacttaaagaggctgcagcccaagtggcttgtggaaaacgaattcaatgaacctacagctgtgtttatatcactcgatgccctcctgacccttttcaaaatagcagacctccgtaccattcaacagttcctgcctaaatcttcggtccaggagactgccccacagttccaattgagttgacctgtttttatgcttttcatacctgaaacactgttatttatggctttagataattttttcactatgattttttactttcttatccagaatttaaaatactaatactaataattaatatcctggatgacctatattgcaaggatgggatacagtaaagaaaggatgaatctttgtctcctaggagaggaaaacaagccaccttctgttggtataaatgaccatggtttcaaatgggcatagcattgagag

SEQ ID NO: 479398 - DNA, 617 bp, Homo sapiens
ccaggttctttatggtacttccaacagctggacctatagcaattgcctgcgggtatgtcttcccttggacaatagtctgtccacctttgcttccagttgtcccacctttccagacagaaccaatgttcatcttacatatgttgattgatgtttcatgtttccttaaaatgtataaaacccaactgtgctctgaccaccttcgacacatgtcgtcagatcctcctgaggttgtatcactggattcaccagaggcactggttgggcctctgcgctcctgcttgactgttctgactttgaacaggtttattcagctgctgtctgctaagccctacagaaaagcacaatggctgctgatcggccttttatggtttattggaaactggtggtccgcactgcagctctgtctatcagaaaactactagaactgataagtgaatttggcaagttcaaatgatacaacgtcaatgtataaatttctatatacttgctataaacaattggaaaataaaatttaaaagaataccattttcaatagcatcaaaaaaaaccatggaatacttagagataatttaaacacatgtgcaagacttttacagtaggcagtgtaaaacattgtc

SEQ ID NO: 479399 - DNA, 681 bp, Homo sapiens
ctcccagaaataattagacgaaatggagactctgaagtggggatgaggagttttccttctaacagtcaggcccctcttctgcaggtctgctggagtttgctggaggtccactccagaccctgtttgcctgagtatcaccagcagaggctgcggaacagcaaagattgctgcctgctccttcctctggaagcctcgcccagagggtcacccacaagatgccagccaaaactctcctgtatgaggtgtctgtcaacccctgctgggaggtgtctcccactcaggaggatgggagtcagggacccacttgaggaggcagtctgtcccttagcagaacttgaatgctgtgctgggaaatctgctgctctcttcagagccagcaggcaggaacgtttaagtccgctgaagctgcatccacagccactccttcccccaggtgctctgtcccagggagatgggagtttaaatataaagacactttaaatataaagacactttagatataaagacacatatagattaaaagtaaataaagataaactatgataacactaatcaaaacaaagtggaagacactttaaatataaagacactttagatataaagacacatatagattaaaagtaaataaagataaactatgataacactaatcaaaacaaagtggaagatactttggacctc

SEQ ID NO: 479400 - DNA, 496 bp, Homo sapiens
tgttaccaagcacactgataccccccaactcccgcataatgcagtacccaaactggctgttactgtcctggtccattaatatcatcagcttgatcgtgcctctgctgctactgaattatgaagaatcagagcctgcagggctggaagccaaatccacattccccaaagctccaccacatacttccagttggggaactgatatttggatgtctttgaaatccaagaatacctactctgctcacatctggagggaaagagaagacaccggaggattaaccaccctcaaacatctccctatacagaaaaatagctggtatttatttcctagcacttctctggcttttttcctatctccggctggcaggcttgtctcagttgcagaggcctcatcccacccaaccccttccactccctattatcccccttcgtgcccaaaagtgcagctgcagactccatgagcccatccctctgaggcaccaatctttaacatgtgtct

SEQ ID NO: 479401 - DNA, 652 bp, Homo sapiens
tcccacgagtccttctatgaataagtctcatgagatctgatgggtttatcaggggtttctgcttttgcttcctcctcattcttctcttgctgctatgtaagaagtgcctttcgcctcccgccgtgattctgaggcctccccagccatgcggaactaatgaaaaagagttgaataaaaatacagccgaaggggaaaatgccaccaattatgatgccaagaagtggttttgtaaagaagttctatggaggaatctgacaggggatctggatgtaatttccacagcctactcatccttgcaccttcaaagtctagcagaaggagttttaaattggttgctcaaaatcaacaggccaacttctaagtctactggatacatcaccaggcaagccgagctgctgtgcccctacttatttggtacaccagacaagtttgaccaaagctacaagtggagatggataggaagtggtaagaagctgtataatgtggtgatggttaaaatgaaaagagatggatataaaagacatgaagagttaagaatacccatgaaacaaatgtgcacgtgtacccctgaatgtaaaataaaataatttaaaaaaacaaaaaaagaattaagagacttgtggttaaagatggcagataatttaactcacac

SEQ ID NO: 479402 - DNA, 635 bp, Homo sapiens
tgtccctgcgatagtttgctgagagagagcagccccatgacgtgctacaagccgcaaaaagaggatctacccggatcaataagccccataaagctaagagcagagaggctggtaagaaaatgtattcttattatctctttcaatgtctcatgtatagtaggttatagaaataaaccatttgaaaaatactaccaatggagatttgctgggctgcctcttaatggtcaccttttggtcaatatggctacagaagaagctgaagcatcagagcacgcagaccattttccaaagaagctgcatcattttacatccccactagcagtgtatgaaggttctgatttctccacatcctcaccaacacttgttattgtctatctttttgatcatagccatcctattggaaatgaagtgatactccactgtggttttgatgtgcatttccctatgactattaagcattttttcatgtgtaaaaacagacattttgtctaacaatactcaaagcctttcacctgggaaattgtgcattctagactctgaagcataagttctttctttttaattttttcagatacatatttccttgagttggcacaggcatagcacatttgtctagcataggacagatgaaaaac

SEQ ID NO: 479403 - DNA, 1036 bp, Homo sapiens
ctcaggaaaaggcattggagaaacaaattgctgttgcaccatgaatgtaataaggcagttagatacactttcactaaaaggaaaaaagctggatttttttggaagaggtgacacatatgtaagcctgatagataccattcctgaactcagccgattcacagcatgcattgatctggtattcatggatgacaactcaaggtattggatggccttctcttatattactaataacgccctcctgggcagagaagacatagaccttggacttgcaggagaccatcagcagctaatactatacagattgggaaagaccttttctatccgtcaccacctggcttcatttcaatggcatacaatatgcttgatatgggatggtgtgaagggcaaattagaactcttcctgaataaagaaaggatactggaagtaacggatcaaccacacaacctgacacctcatgggactctgttcctagggcactttctcaagaatgagagcagcgaggttaaaagcatgatgcgtagctttcctggcagcttgtactactttcaactctgggaccacatcctggaaaacgaagagtttatgaagtgtttagatggaaatatagttagttgggaagaagacgtctggcttgtcaacaagatcatcccaactgttgacaggacactgcgctgctgctctaggatgccacactcctcaaatgtgctagaagtgacactttcacggaggtttgctaagccagttggctggtgtaaacccacctacaaaattggaaatgaagatcctgacaattctcctttcacgtggagttatggacaaatttgaaagcataaagcttaaaatactcacttggctgctgaaatataccagtttcttgataaggcctaacataatgtgcatctgtggtaattggaaaaatgtcataaaattaagtgaaaaagtactttttatatagctttgtcttttccccttaaaaatgtgtgtacttttatcaactcatctatacagtcaattggaagattgtcattcattcta

SEQ ID NO: 479404 - DNA, 607 bp, Homo sapiens
ctacaccacatgcattatggagcagtacctgtggacttggtggcagtaggcgaagtcgatgcttccgtagatagaaaggaaggtgtggagtccagccaagttgtttcaaaaaaggacgatattggtgaagacacagttgctgtaaaaggatatgtcaccccagtggatatgagtggaaatgaggctccaggaacagtggatgtagtagtcattatatttagaagggagtccagtgtgggcttaggaataattaaagtagagggtgatgatgcagttggaattctgttccatgaagatgttattgtagagctaggcagaggcatggcaccaacagatagagtgtggtcagttgtagaaggtgacatagtctttctgctgaaggatgaaggatgagacacagtcctggggttggcagttattgtggttctggaggatgcctcagggtgtgtggaaatgtacacaatgtcatctgtgacatttatagacatagggagagaagttgggaagccagtagtgataccacccagtgtaggtgtaggaatggttcggactcatcctattttacctgaccaacgctttgtcccaggacctcttcacatttggctgt

SEQ ID NO: 479405 - DNA, 650 bp, Homo sapiens
cttcctgacaagattgtggatcttgctaatattaccataagtgatgcgtactggtcacaagatggagttttctgggcagatagcaaatctgacggtggccgggctggctttggctgtgctgcggggggaccacacgtttgatggcatggctttcagcattcactcctatgaagaaggcacagaccctgagctgctgctgctgctgctgcctcctcctcctcctcttcttcttcttcttcttcttcctcttcttcttcctcctcctcctcctcctcctcctcctcttcttcttcttcttcttcttcttcttcttcttcttcttcttcttcctcctcctcctcctcctcttcctcctcctcctcctccttcttcttctccttctccttcttcttctttttcttcttcttttaagatgagaaactgtctgcttttggtaattttccagtgccttcaagtcgttgttactttgtattgttgttatatgcaggagagttgagtttattaggagctacttagccatattgaaacagatgttgaattcccagtgtattttgtttacaatggggttttctatcatgaatcttggtggagagacaaaccaaacaacaccagttgtattcttggtgccaaactgcttacatattgaagct

SEQ ID NO: 479406 - DNA, 489 bp, Homo sapiens
agcacaggaactctacaaatataatcaaattaaaatgaggtcctattggattagggtgagccctaatccaatgattggtgcccttataagaagagagaaatttaggcataggcacacagggagaagaccacgtgacaaaagaggcagagtgatgcatctacagccaaggaatgccaaatattgccaccagcgaccaaaggtgtccactggggggtcttggaatgtatttcctatggacaaggaggtgctacataagaatgtgagagaattcataattgcttgttcatgcatttttatgatttgtgttttaaaaagattgtcagataactccaacatctgggtcatctcagtgtcagcatttgttgattgttctcattcaagtgtgattgtcttgacttttggtgtaatgagtgattttctattgtatcctggacatttggggtattgtgtcaggagaatctggttcctatttaatcctccttattagca

SEQ ID NO: 479407 - DNA, 614 bp, Homo sapiens
gctgcttcagaggatataaactgggactcctcagaggaggaagcccaccaccatgaacaacaagaaggcatccccgctacccctaactggacaagcaggccctgtaaaagaggccctgaagggattactggccaaccatcaggccagtctcaataccacaatctaccacatcctaacacgaaataagccctttaaacaaaagagtgctgataagggccccggggccaaattcaaccccacctccccagacaagacagccccacctccccagacaagacagccccacctccccagacaagacaactccacctccccagactcatcactgatcaaggcccagcagggacagttcctggtgaggactctcctcctggcttatgagagagagagagagaatgagctttctgatgtctcttcttataaggacactaatcctatcagaaaacacattaatatttctgcagtgaaatgtgtgtatcttcacattaaatagaataaataaagaccataaatagcctaatgccatttcaagacagatttgccgtcaaatccatttttaaaacttacaattttcagagccttttggattttggaatcgtagatataagcttatg

SEQ ID NO: 479408 - DNA, 1455 bp, Homo sapiens
tcatcacaacaaatccatatcctgatgccagggctgcaccccaagctgattaaatcagaatatccagcccattccaatgctcatctgatctctggagctttcatgttgtacacctctccaccctatcttaaccttgaatcccagctccactttgatcacctggtagcaatggattgtccaactacaccaagtgtcaagcctacaggctctcaggaacccatctctgagaaaggcatcagcttcccagccaactgcctgcccaatgtccggccccagacttggccccttgatgagaccttcacatttactcaccacccactcactgactcaaccagagcaacttctactattgcaagctccattcgtggccttacagagcttattctcattattccacctctatttgcaacggagcctgaaacctatccttatttgcagtttgccatttaaaaatcatcccttctggctttactttttgccctgttctttctgtgtccaaactgaaagtccgaagtgagagaaactcatgctacagaggatagtgcagattctacatatcgggtttttagggtgcacatgatgaatagtttggaaacgtttctgcaccagtttatcactggcaagacagaggcaatacgttacaaaatcagcatgaaatttgataaattaaaactcagaaacaatgtagaaaaaaaagcctcccgatctattttatactcgcaggctccttccaccaatatgctcaattattttccctgaacagatgttcccagacctttcactcacccaggagtttatttcttgtttattcctgacaaaattgctgtttagcataagatttaaaatgtgtgcatttacagcgctacatccagaatgcaccccagaaaggaattttcaccattaaatgtacaacttagtcagggttatgatgactaaaatgttgtgggaatgctgattatttaaacatgacattattaagttttaattcatctttgtaaacaattctttatttttatactgctgcagaattaataccactgttgacttgtgtttcagtctttacatatcgcattccctgtgcttttcacaggtctactgtgtttccacagttacttcccatctgagaagctggagaggaggcatttgccttgaccctccacccacctacagtcaggcaaacatgcctctgactaatagaaactgcctgaaggtgatgacttggtacatccagcagacactgaactgctggacagaatcatatttatagctttcttacaactatcttttgcttctcacacagggtagctactggatacaggaagaacatctgtcatattgggtgagggctcaccctaatgacctaattttaacttgattatatctttaaggatcctatttccaaataaggtcacattctgaaatactgtgatctaggacatcaacatatctttttgc

SEQ ID NO: 479409 - DNA, 918 bp, Homo sapiens
gcacctggaaaagccgcagacacttaatgcaagcccgtgaaagcagccacgggggctgtatcttgcagagccacagaggggagctgcccaaggctgtgggagcccacctcttgcatcagtgtggcctggattatccgtggaagctgagcatatgcctactggatgacccagccgtcctgcccctgcaagctgaggaacaaggaagccagtctgaatcccaaaacctcaaaagtagggaagctgacagtcgcctttggtctgtggccgaaggcctgagagcccctggcaaaccattgaaaagttattcagcttttggactcttggtggccttaaagatagaaggatttaaaggaaagggccctgagcgctggaggggcccagggcacttgtgggaccttggagctcactgcctaggttcacttcaagtttccgttccacacattctggcacagtgctccccagctgccctagttgtgactcaagctggcccaggtgcatctcaggctgcccttccagaagccagaagggagcatcccgcagtacacctcaagactttggagctaataagccacaagacagaaggagtctgggtctttgaaggcaaccacatacccaggaacatagtcttcagaagtctctttgttacagttgctggtgttgctgaccctaactggtagatattccttgtgttggtgttgaaatgactgagtaaacagtttgatattctgtaaaaacaattcttcaatcgaagaaaaaattatatcagtgaaaaaaacaatgtttttttggaagagatttccttgtgtttctaactttcacttgtaaattctgctgttactgcctttcatgcaatttcaggtcagcagcatgactttctaaaggaaaatatgattaagtcatactttttacaatggtcca

SEQ ID NO: 479410 - DNA, 529 bp, Homo sapiens
ttgaagacagtctctcctgtcttcctcaatgccccttttggtgatataaagttaaacccaggcgtttggatttttaaaaaagcagcctgaatgtttctggcatgcagccaggtttaagaactactgctctgctaatcagtgtttgtaacttcatgtggatgaagtctcctctgtgtgaggtttggtgggaggagagggagaggcaagaagtggaaggttcagagaactgggagccccaggaagagcagagatgtgaagaaagctgtgaaatggagaaaatggggaagctgaccattttgcacactatgcagctttgcccagggctgtcctggagagcgtccacatcagaggatttggaaaggtctgatcatgacactgtctcaatgactgtaaattctcaggtgatgctgatgttactggaccagagatcacactctgagaaagaatggactagtgttgtccttgagcaggtttatagacacagtagcatagctcttcctagaacagaccttgccatttagaacatcac

SEQ ID NO: 479411 - DNA, 729 bp, Homo sapiens
agaactctagtgatgacctcaccccctcaaccttggatggcaacactgccctgggcagtgggcctaccatctggaaccctgctggtgacctcaccccttcagccttggatggcagcactgccctttcagccctgggcagtgggcccaccatctggagccctggtggtgatctcattgcagcagctgtgggtggccacatcaccctctcagccttgggcagtggccctgtgctctaaaatcctggtgatgaccttgccccctcagccttggatggcagccctgcactctcagccctgccttggatggcaacaccccccacccccgcttctcagccctgggcagcagcaccacctctggaatcttggtagtgtctccacccactggaaccctgccattatcccgacaccctcaggactaggcagtggtcctgggatccctggtggtagacctgtcccctttggccctggggagaggtcccaccccctcaggcctgggcagtggccctgttctctagaatatagcaggtccaaatggctcagttatctgcataagacaattcagccgaatcctttgacattttataatgaagatcacctttcttccaatgcccaataccaggaagctcaccaaaagtacctttaacatttacatttcaagcaatgttcactttaaggcaatctaggctgcttctgtaatgagcctcaaaatgtttccagcctctgcccatta

SEQ ID NO: 479412 - DNA, 1401 bp, Homo sapiens
agagctgcgcgccgcggcggcggaagatggctgcggccgagttggcggacactcagctgatgcttggagtcgggctgatcgaaaaggacacaaatggagaagttctgtgggtgtggtgttatccttccacgacagccacattaaggaacctgctgctgagaaaatgctgccttacagatgaaaacaaacttctccatccctttgtctttggtcagtacagaagaacatggttttatatcacaataattgaagttccagattcttccattttgaaaaaggtgactcatttttctattgtcctgaccgccaaagattttaacccagagaagtatgctgccttcactaggatattgtgtagaatgtacctgaaacatgggagcccagttaaaatgatggagagttatattgcagttctcacaaaggggatatgccagagtgaagaaaacggctctttccttagtaaggattttgatgcccgaaaggcctacccggctggctccatcaaagacattgtatctcagtttggaatggaaactgttatcttacacacagcactgatgctaaagaaaagaattgtggtgtatcaccccaagatagaagcggtccaggagttcaccaggactctgcctgccctggtgtggcaccgacaggactggaccatccttcactcttacgtgcacctcaacgccgatgagctggaagccctgcagatgtgcacaggttacgtcgctggatttgtagacttggaggtgagcaacagaccagacctctatgatgtgtttgtgaatctggcagagagtgagattaccattgctccccttgcaaaagaggccatggcaatgggcaaactgcacaaagaaatgggtcagctaattgttcagtctgcagaagatccagagaaatcagagagccaggttatacaggatattgctctaaaaacaagagaaatctttaccaacctagcaccgttttcagaagtttcggctgatggagaaaagagagtccttaatttggaggcgctaaagcaaaaacgatttccaccagcaacagaaaacttcctttatcatctagcagcagccgaacaaatgctgaaaatctgactgtgtgacagaacgtatcactgatgactgatagaaagccctctttcactctgattacccactcactacatgaagtcctgaaaataacagagaaactgttatatctttttaatgatttatttgcaagtattgagatttgacctgaaaaacaatgaaacacatgaacacacttccgattttctcctcgctgattagcttcctgcctgctgtcagtgctggacgaagtgctataactactttatgtaacattacagaacagctagaggtcctgggtctgtcttcatcatactgcctcttctta

SEQ ID NO: 479413 - DNA, 613 bp, Homo sapiens
aatgaacaagacctccacagcatggaagtggacccaaggggttgccgctgctggctcgggcctcacctggtctacctgggagtgccatgtaacacactttcttcggattttttgccagaggctccaggaacagagctaattggtgggggaggggactgtgttaagatgttaagaggcaatcgtggcttactctgcacttggacaaggacaatgactcaactcaaaggtgaagactttgatgaaggggttttcgggccccaggagccagccccagtggaagagatttggccccaggaaggtgtgaacaagggagagcttcttgaggccccacacagcacaccacacaagcggtttcctttattttatattggcaaccaggccatttctttcagggccccactgcattgcactgaggggccagcagaaaagacttaccttcatggagcttgcattctctggatctagatctgtaagactttctgtgatcaagcacaatattggaaagcagttacttctgagacatgtatatattattggcacaaaaataatctcaatacttttattattaaagaatcagaaattaagcaaacagtaaaagctgaaagaggtttgt

SEQ ID NO: 479414 - DNA, 1061 bp, Homo sapiens
taagtgaagtcctgccacttcgagacatggaatcatctttctcatttggagtgatccttgctgtcctggcctccctcatcattgctactaacacactagtggctgtggctgtgctgctgttgatccacaagaatgatggtgtcagtctctgcttcaccttgaatctggctgtggctgacaccttgattggtgtggccatctctggcctactcacagaccagctctccagcccttctcggcccacacagaagaccctgtgcagcctgcggatggcatttgtcacttcctccgcagctgcctctgtcctcacggtcatgctgatcacctttgacaggtaccttgccatcaagcagcccttccgctacttgaagatcatgagtgggttcgtggccggggcctgcattgccgggctgtggttagtgtcttacctcattggcttcctcccactcggaatccccatgttccagcagactgcctacaaagggcagtgcagcttctttgctgtatttcaccctcacttcgtgctgaccctctcctgcgttggcttcttcccagccatgctcctctttgtcttcttctactgcgacatgctcaagattgcctccatgcacagccagcagattcgaaagatggaacatgcaggagccatggctggaggttatcgatccccacggactcccagcgacttcaaagctctccgtactgtgtctgttctcattgggagctttgctctatcctggacccccttccttatcactggcattgtgcaggtggcctgccaggagtgtcacctctacctagtgctggaacggtacctgtggctgctcggcgtgggcaactccctgctcaacccactcatctatgcctattggcagaaggaggtgcgactgcagctctaccacatggccctaggagtgaagaaggtgctcacctcattcctcctctttctctcggccaggaattgtggcccagagaggcccagggaaagttcctgtcacatcgtcactatctccagctcagagtttgatggctaagacggtaagggcagagaagtttcaaag

SEQ ID NO: 479415 - DNA, 914 bp, Homo sapiens
actggctgccactgccagagtgacaatgctaactcggccggccccaaacgcattcccatctggggcggctctgggccaggtggagagcgtgactgtcagacattcagtcaacaaacacatactgaacgctttcctattggtgccaggctttctgctaggtcctggcactacagagatgaagaagccttcactgctcctcattcacccctcacctctccagccacaggtttcgtggcatctttcccccttcaaggctcgccttgatgttcattttattctactaagcgaaggcagggctaatggttttgaatccagcctggttattcggtctctgatggagcaacaagggacccttttggagagggcaacactcagaacatcaaatggggctctcagccatgggctgtgggtatcacaaaactccagaggaaatgcaagcctgtttaggttgctttttgtccacacctttgaaaattcaggagataaaatcatgcaatcggccttgtgttgagacagcattttcacctcagcttcaggtctggaaggcctctctgaacccactggttctagaatttactgtagagactgtttgaaatgcaaagtacgaggcaccaccccaacctattcaataaaaccctaagtgggacagtgtcttggaatgtaaattttaaggagctgtcctgggtgattgtgatgtacattaaagtttgagaaaatttgtttgcacagctctttctgttcccccgcacccccccgccccacaacccgttccctttcaagacgggtaacttagaatgagccctttggcagtcctgagagcctaacttccaaaactaacttcaccttcaattgattgaggtgcagggaacaaagggacaactagaagcttcaaatttgcttcattctataactct

SEQ ID NO: 479416 - DNA, 875 bp, Homo sapiens
tcctttggtttgttacagacaaatcacagagaggttagaggacttgctccaaattacccagcaagtgagcagtacaaggaggcctggagcccagtgttctgcagacatgatcccatttcatcctcactgcagccccatgagcgaggcactattgttgtcttacagatccctacatcctcagcactcaagcccagaacgtcttcatgggactgacagcttctgtgaatcccgtggggaaccactgggcatcgacccaggccctgtgacagctacaaatagtcatgaaccatcttggcagggttctggaggcttccccacttcagagttccctgacatgggagaagctatttggccactacttcttccaaccaacccaatccctacccacacctatgcacacacctgtccccagcagtatctacaaagacctttgttgttgaggtccccttgccctgaagccagtcctcttgaacaggacaagatctctcctggggagctacatgcctggtatcataacaatgtatgcacatgtatctgctacccgagggttgggactcttccataacttccaaagggccttacacccagtagttgctcaacagatcctgggagaaggattgaatggagttgaaagggtgataacacgacccaggaggagagcacagctgcttgttaagcctggctggcctccccaccagaaagtgagggacttgactcttcgccagcgagttatgtgtgtcacagttggtactggctcatatagatctgtcactcctcccttatcaggccttcctgggtttccgaagttgctccaaattcttcccctgccccctgaggccttggcacctataaagggtattaaatcagggatgggt

SEQ ID NO: 479417 - DNA, 1405 bp, Homo sapiens
ccgcgcttctccaagcttcttgtgacctcacagtgcctcttagtggtcacacagcacactgcaggccgaggtaccagcctacagataaagcttaatgtgccagaggacccgcccacacttgcctgtggacatctccgcccagaaaactgggcatgacacctccctctctggggtcacagccagtcagaaagaacccccaaatgccccatcctgtatcccttccacactggagcctgtgtatggcaagagactgcaggcatgtgctatgaggactggggacacctcaggatgtagtgcagaggctgaagctgtcactgacccactgctggtgcctccctttgacttccaatgtcctctggcagcagatgtggccacagctacaatcagaaaacgatccttgctcttcaaagccagggccaccgttagaggtagagggaactccatgctccacggtgctgcctccgaggtgcacagtcaagatgggacctttgctgcccagctgtgtcagcagctggaggacagatgcctgcgggtgcgagggagagggcaggcttgtgatgtgagggagctgcgcttcaagacgaatcccctagcctacctttcgatggtttctaaaccctcctatgtagacattctgaagccacgactgcccatgatgccaccctctaggggtgactgctattaacagtttggagaatggacttccactatttttgtgcctatgtattatctttatatctgatattttaaatttaggaacattaggctatcgtaaaggcaaaagtgatgttaaatgtattagtatctgggataaatgacagctagagttattagttattactcttcctaaggttaggagaaggagcatacagaagtcacatcacgtcacttccctgagtaaagccagccatggctccctgtggtgtcgaatgaaatgcaagctcctgcctggggttcctcaggccctctgtgatcacgttcctgctcatcagttgtccagcaagtcctgtccctcacagagttctgcctggctgtcccctgagcacagccagctgttttgctgccttagggcctttgcatttctcttttcctttgctcagaatgtcttttgccagatcttgcacgtgtggctctttttgggggtattcaaatcaagatacggtgtcttggcttcctgaggtttaagtctcagctaaaacatcacctcctcaaataaacttttcctgaccaaggccccccgctgtaccctcgagtgcatccccgtttgatactctccacagtacttgtcaggatctgtagtgaccttgggtactgttaatttgcatgtctgtccaccctcatccctgccctgccctcttgatgaaggcaccatgagagcggcaaccttgtctggtttaattctaga

SEQ ID NO: 479418 - DNA, 638 bp, Homo sapiens
accagaaacctggcgggcactatggggaaaaaaactaaacaagaagaaagtggaggaagtgctagaagaggaggaaaaggaatatgtggtggaaaaatttctcgaccgtggagtgatgaggataacacatgggagccagaagagaacctggattgcctcgacctcattgctgagtttctgcagtcacagaaaacagcacatgagacagataaatcagagggaggcaagcacaaagctgattctgattctgaagataagggagaggagagcaaaccaaaggggaagaaagaagagtcagaaaagccacgaggctttgctcgaggtttggagccagagcggattattggagctacagactccagtggagaggtgctggagccaagatggccaaataggaacaactccagtctacagctcccaacatgagtgacacagaagacgagtagtttctgcatttccaactgaagtgccaggttcatctcactggggagtgtcagacagtgggtgcaggacagtgcgtgcagcgcacgaagcattactgaagcaggaagaggcattgcctcaaccaggaagcccaagaggtcagggaattccctttcctagtcaaagaaaggggtgacagatggcatctggaaaat

SEQ ID NO: 479419 - DNA, 843 bp, Homo sapiens
gtactccacacagcattgcctctgaccaagacactcactttatggctaaagaagtgcagcagtgggctcctcctcatgaaattcactggccttaccatgttccccatcatgagaatggattggtggaatggtggaatggccttttgaagtcacaattacaatgccaactagatgacaatactttccagggctggggcaaagttctccagaaggctatgtatgctctgaataagcgtccaatatatggtactgtttctcccatagccaggattcacgggtccaagaatcaagggatggaagtggaagtggcaccactcaccatcattcctagtgatctactagcaaaatttttgcttcctattcctgtgacattactttctgctggcctagaggtcttagttccagagggaggaaggctgccaccaggagacacaatgattccattaaactggaagccaagattgccacatggacactttgggctcctcctgcctttaagtcaacaggccaagaagggagttaaagtgttgactggggtgattgaccgagattatcaagatgaaaccagtctactattccacaacagaggtaaaaaagagtacgcatggaatgcaggagattcattagggtgtcttttagtgttaccattccgtgtgactaaggtcaatgggaaactacaacaagcccaatccaacagaactacaaatggcccatatccttcaggaataaaggcttgggtcactccaccaggggaaaaaaacatgacctgctgagatgcttgctgaaggaaaagggaatacagaatgggtagtagaagaagggtacatgtgcacaacgtgcagg

SEQ ID NO: 479420 - DNA, 859 bp, Homo sapiens
ccctttctaacaccgtagaagatatgcacacttccattaccagtctccaacgacaattagacttcctcgtgggagtcatccttcaaaactggagagtcctggacctcctaaccactgagaaagggggtacctgcatatacctccaggaagaatgctgtttctgtgttaatgaatctggcattgttcatatcgcaatgatcaacgacgccctttttcctttttatactaaagtaagaaataagaatgttagcccaaactgcactattttgcagacccctaccattttacaaactggtcagagtggaaaattccaccagggcctgagctgtgagaaacatcctgtcaggcaggtcccaggcctaacccctggctgcactaaattccttcattatcagcagccaaacacaccgcccccaccccattttcacaacaatcccagacctctcctgcccgggactgtaactggtccagcctatcaaactacttcattcaattctgactgaggtataaatattccattttatgaaaataatatacttatttaatccattttactttagttttatgtcattttttgctaccacaaacagtattcaataaacattttagaatatatttctttttgcacctgtgcaaaagttttacttcaatataaatatcttaaagtaaaattattttattgaaggacatacatttgtgttttatcccatggaacttgaacaggaaaaaagatcttcaaaatatggcctcccaggaatgtgagtttagtacaccatagtatagtagatcatactgattgttaccaataaacataaaggcaattggaaaaatttaagattttctacctagtacaaggatg

SEQ ID NO: 479421 - DNA, 1122 bp, Homo sapiens
cccgcggctggctcggagggtcccacacccacagagcctcgctcattgctagcacagcagtctgagatcgaactgcaaggtggcagcgaggctgggggaggggcgcccaccattgccgaggcttgagtaggtaaacaaagcagccgggaagctcaaactgggtggagcccactgtagctcaaggaggcccaactgcctctgtagactccacctatggggcagggaatagctgctcgaaaggcagcagaaacttctgcagacttaaacgtccctgcctgacagctttgaagagagtagtggttctcccagccggagtttgagatctgagagcaaacagactgcctcctcaagtgggtccctgacccctgagtagcttaactgggaggcaccacccagtaggggcagactgacacctcacatggccgggtacacctctgagacgaagcttccagaggaacgatcaggcagcaacatttgctgttcggcaacattcactgttctgcaacattcgctgttctgcagcctctgctgctgataaccaggaaaacagggtctagagtggacctctagcaaactccaacagacctgcagctgagggtcctgactgttagaaggaaaactgaaaaacagaaaggacatccacaccaaaaccccaactgtacgttaccataatcaaagaccaaaggtagataaaaccacaaagatggggaaaaaacagagcagaaaagctgaaaattctaaaaatcagagtacctctccgcctccaaagaaatgcagctcctcgacagcaacggaacaaagctggagggagaatgactttgacaagtggagagaagaaggcttcagaagatcaaacttctctgagctaaaggaggaagttcaaacccatcacaaagaagctaaaaaccttgaaaaaaagattaaacgaatggctaactacaataaccagaaatacagagaacgccacaaagataatcctcgagaagagcaactccaagaacatacttgtcagattcacgaaagtcgaaatgaaggaacaaatgttaagggcagccagagacaaaggtcaggttacccacaaagggaagcccatcagactaacagctgatctcttggcagaaa

SEQ ID NO: 479422 - DNA, 692 bp, Homo sapiens
tatttgtgggtacataccatcagctggggctgatgtgacacaagcacccctgttgccaccaccaccatgactgtgctgactcagacctcaagccagcacagcactgggtgtcacgcaaagcctgctataaccactccctggctactggctgtgttctttcaaggccctggggttctacagtcagtgggtggcaaagccagccaggcagacataattctgggtttgagtccagtctctgccatcttccagctttatgatgtttcctttcctccagggaagcagggtcgcccaggccttgggacagcactgagttcaatgcctcacaattgctgtgttctttctccccgaccccaggaagctctctgcaccatgcagctgctgctggggggtaggggagggtgggcatcggtgattcagggctgttttttctatctcttcagtgcgtccttcagcaatatgaagttaacaccagatggttgttaagttggtgtccttgcagcagggatgattagtggagccttttattttgccattttgtgccgccttcttttctgttgttagatatgtatttataaaaattgtatgaacagctgtatgccttagcaaatatgtatctctaacaaattaattatttataatcttttacgtgtaaattagtaaagattaaaccaagttctaaggaaactatcaac

SEQ ID NO: 479423 - DNA, 969 bp, Homo sapiens
tggagcctcactcactgctagcacagcagtctgagatcgaactgcaaggtggcagcaaggctgggtgaggggtgcccaccgttgctgaggcttgagtaggtaaacaaagcagccgggaagctcaaactgggtggagcccactgcaactcaaggaggcctgcctacctctatagactccacctctagaggaagagcatagctgaacaaaaggcagcagaaacctctgcagactgcagacttaaatgtccctgtctgacagctttgaagagagtagtggttctcccagcatggagtttgagatctgagaatggacagactgcctcctcaaatgggtccctgacccctgagcagcctaactgggaggcacccccaagtaggggcagactgacacctcacagggccgggtacccctctgagatgaagcttccagaggaacgatcaggcagcagcatttgctgttcagcaatattcgctgctctgcagcctctgctgctgatacctaggcaaacagggtctggagtggacctccagcaaactccaacagacctgcagctgggggtcctgactgttagaaggaaaactaacaaacagaaaggacatccacaccaaaaccccacctcaacggaacaaagctggatgcagaatgacttggatgagttgagagaagaaggcttcagacgatcaaacttcttcaagctaaaggcggaagttcgaacccaatgcaaagaaactaaaaaccttgaaaaaacattagacaaatggctaactagaaaaaccagtgtagagaagtccttaaatgacctgatggagctgaaaaccatggtacaaggactacgtgacaaatgcacaaacttcagtaacggatttgatcagctggaagaaagggtatcagtgattgaagaacaaatgaatgaaatgaagcaagaaaagaagtatagagaaaaaaagggtaacaagaaatgaacaata

SEQ ID NO: 479424 - DNA, 641 bp, Homo sapiens
ccgtctactcaagtctcagcaatggcggatggccttcttcccaccaagctcgagtgtcccaggtcgacttcagactgctgtgctggcagcaagaatttcaagccagtggatcttggtttgctgggctctgtgtgggtgggacccacagagtcagaccacttggctccctggtttcagccccctttgcaggggagtgaactattctctgtcgctggtgttccaagcgccactggggctctggggggcatattctttcattccatatattctggaggcagcatccctgatgtgctggattttgtgtttcctagggtgttgggtgctgcacgggcttgggaacctgtgatgtggctgcactactgggtccagtgggtaccacaacacagtggccctctgagtagatattctgaattctatgtttttcatttcagctctttcagcctagttaagagccattgctggggagctagcgtggtcatttggagatgagaagacactggatttttgaatttccagagtttttgcactggttctttctcatctatgtgggttgatgtccctttaatgtttgaatttgctctcctttggaaagggcttttggcttttatattctttgatgcccttgagggtttggctgtggt

SEQ ID NO: 479425 - DNA, 611 bp, Homo sapiens
aaactgcagtatcatgagggagtgggcagtgcagaggggaaacatggggttggagctccccgctagagtccccactggggcactgcctagtggagctgtgagaagagggacactgtcctccagatctcagaatggtagatccaccaacagcttattccatgcacctggaaaagccacaagcactcaatgtcagcccttgaaagaagccagtgagggtgttccaccctgcaaagccacaggggcagagctgcccaaggccttgagagccaaccctttgcatcagcctgcgctggatgcctgctgtaaccacttcctagctacacagcctatgttcactcaaggccctggggccatacaattattatgtggcaaggccatctttgactgtgtcttttcattcaaggtgggaagctcccccaggcttcgggttgggccagaggtgctacaaaggagccaggaactagggttaaaaatcttagaggtctaccttggaagccaggggtcttttttggagctgggagctttccagcctggggttgagggaggggtgatgccagtactcccttagcagcccaagctggtgtctcaggtacaagtgcacaatgtgcagg

SEQ ID NO: 479426 - DNA, 705 bp, Homo sapiens
cagggcggcggcagcagcaaccgcggcggtaggcggcttggtgggcgagcaggagggaactatggtggcggcggcacaggaggcagcagcagtggcgggaagcggagccgcgatcgggggctgaaccgagtctggaggcaccaaaaggggcagcgccgagtcggagggggcgaagataggtgccagtaagaactaggaggatgaaggccattcaaactcctacccatgacactctgaagcaacgacggcacggcgggaagaagggaagatggcgatcaaggagttttggctttgtgctttttaaagaatcggagagtgcagataaggtcatggatcaaaaagaacataaattgaatgggaaggtgattgatcctaaaagggccaaagtcatgaaaacaaaagagccatctaaaaaaatttttgttggagacctttctccagatacacctgaagagaaaataagggagtactatgatggtttcagtgaggtggaatccatagagctccccatggacaacaagaccaataagaggcttggattgagctttattatctttaaggaagaagaaccagtgaagaagataatgaaaaggaaatactacaatgttggtcttggtaaatgtgaattaaaagtagccatgtcaaaggaataatatcagcaacagcaatagtggggatctagaggaggatttgcaggaagagctc

SEQ ID NO: 479427 - DNA, 511 bp, Homo sapiens
aatacacttcctcctcctgactccagtgggctgctccttgaggtttaaaatttactgtgttgtgaagactgagatgtggcagctgctgcagagtgctagcaaatgcaaggatgcctgtttccctgtggatgttcaccacagcggcagaggcaaggcagcttggcaagtagagcctaatgggatagctgtccctggctgtggtccactacagacactccagcaccaaaccctctgggatccatatctgctggcttgctgtgccaccatgttgcttgtctcctgggtgttctaccctggagagatgcaggccatcaattgctcatggcaatcagcccaggatggagactctgtactgtgggcccaagccaggggttctttttctggttatgagcactggagtgtgtatgggacccataggagatggactgtcctcctctccttgggccgattgcagcttattagagatgtggataaggcatttaagttcttggcaccttcgttagtctgaggg

SEQ ID NO: 479428 - DNA, 669 bp, Homo sapiens
ccaacagatagcctcagcagaggaggattttaataatcaagtggataggatgacccattctttggctatcactcagcctctttccccagccaaccatgtcatcgccaaatgggaccatgagaaaagtggccatgggggcaggcgtggaggttatacatgggttcagaaacacgggcttccactcaccaaggctgatctggctacagtcaattttccgggagcagaaaccaactccaagccctcgatatggcaccattccctgggaatagacatttactccagatattggtttgcctatcctgattgcaatgcttctgctaagactaccatccgtggactcacagaatgccttatccaccgttatgatattccatacagcattgcctctcaccaaggcactcactttatggctaaagaagtacagcagtgggctcatgctcatgaattcactggtcttaccatattccccatcaccctgaagcagctggattggcctgacatttttaagtatgacccagctgagctctgcacaatgatgtcagcagttgtgaagggccgcgcagtttgattctctggccagtaggtggcatttgaatgtgagaagtaatttcagtaatggcagtgggatttttacttgggccttgctgattgtagaagtactgaaatgtt

SEQ ID NO: 479429 - DNA, 465 bp, Homo sapiens
gaatcaccacaccgtcttccacaatggttgaactagtttacagtcccaccaacaattcttgcttccacctttcagttcgatctcagactgctgtgctagcaacgagtgaggctccatgggcatgggaccctccgagacaagtgtgggatataatctcctggtaccatctgtcacggcttctcttggctaggaaagggaattccccgaccccttgcacttcctgggtgaggcgatatcccgccctgctctgtgggcttcacccactgtccgacaagccccagcctctcttctgcatgtctgctgcagtttgctggaggttcactccagaaactgtttgcctgggtaacaccagtggaggctacagaatagcaaagattgttgcctgctccatcctctggaatcttcatcccagaggggcaccagcctaatgccaaccagagctctcctgtatgaggtgtctgttga

SEQ ID NO: 479430 - DNA, 1724 bp, Homo sapiens
tctgctaaaatttaagtaaaatctttggggtttgtttaaacagctattttgaattctctgtctgaaagatcacctctctctctctctctctctctctctctctctctctctctccaggattggtccctgaagagtctctgtggccaccactgccccaggaccatgacaagttctgtctggctactgccaatgttcactcaaggccctagtgctcttcagtcagcttttgttgaaagctgccaagccttgaactttctcttcagggcagatttggggcctggaatgggagcctcaagtctctacctgcttccctatcctactgtagctgagctggtatccaagttgcaagacaaagtcctctttactgtcccttcccctcctctcaagcagaaggaaggattacctcctggagctgcatactgcactgcctggagctgcgggattggtgtggcaagcactgtcttggtcaccctggctagtgttttactaggtcacatgccctgcaagtgcgctggcactaagcccagcacagcaccaggacttgcccaggaattccagtccttatggtctaggctgcctttcacatatgttgaggaccatagagcactgtagcctgtcacggtggggctttcctgaactgaggttccaaatgctgggatgagtgatgctcctctagctagagatgttataaatggttcctccgtgtgttctagctttgttatgtctcatgttgctttccactgttacaggacaacactgagtttgaatgcagagtcccacaatcattgtgttctctctccctcaaatgcacattctctctctatcccctgtggctgctgccaggatatggaggaggagcagtgttgtcaattcaaaactgtattttctaccctcttcagtgcctttttaaggaatatgaagctaaaaacaggtattgcatttattcatctgatttttggttctcatgaagttgcttttctatgtggatacttgttcaattttgtgttcctgatgggaagctgatcggtggatccttctattcagccatctagctctgcctctttcatctgaattattctattcttaaatgggtaaattagaggtttggggagagcgagtttagatttaactagaattatgtgctttattttttgctccttccaaaatgcctgtcatttttcaaaagtatagtattatcaatgattagtatctattataaaataatcataattattgacagagaaaatcacattttcattcttcctagactttagcttaaaatacctacaaatacacaacacaaactcatatcagcaaactgtggatgttcttttccctggcttgtaaacaaagtgaaaattaagatgggtagacaacatgtaattaagatttatttacaaagtggtagccttaccttttgagaggtattttcctggttataaaggtagctcgatttctaaactgaacatgcatcatcaatgttaacaaaattagctcttaaaaacctcacatattttggaaataactcttttctttctttatttcttaattgtgtttcaatggattttctatatatttgaatttgagaaactgtcagtaagctgttatctgctgctcatttcctacttcttttctctgcagcttttatatgaaagctttgggaaggagcaagatcttatttttaagacaatttagtgttagtatttcacagttgttattcaaaa

SEQ ID NO: 479431 - DNA, 736 bp, Homo sapiens
ctctcagctctgagagtggacctgaaagcatgcagtagtctttgaagggaggccctgcccagtgaggagggatggattggggtcctacttaaagaagcaatctagtcacaatttggaacagcagctgtgctgcattgtggggggactcctcatgaggaccacctggactccctggagccggcaggctagaactgcctagttgactgaaccacaaaaatggcagcttcccctcctgggggcttcatccctggaagagatcagagttctgtttgtataatcctggctggagttgctgaaattcccacagggaggtcgcccctgagcagactgcctggacccactggattcagcaggctagaatggctgattcaacctaaccacaggaatggcagccgcccttctcaccagaaattcatttgtttcaagaacatatttgagaaaggaccatttcttcaatacatgtttctgggaaacttagatgtccacatgcagaagaaagaaaatagtctcccgtctcttgccatatatgaaaatcaaatcacaatggataaaagacttaaatgtaaaaccaggaactataaaactagaagaaaacactggggcaattccccagtatgtcagtctgggcaaagatgttttgagtaagacccaaaaagcacaggcaatcaaattataaatggacaattggtaccacatcaaggtattaagcttctgcacagcaatggaaacaatcaac

SEQ ID NO: 479432 - DNA, 532 bp, Homo sapiens
acctacagactgcctgtcaattgaagaagatcaattggttcattacattgatgacactatgctgactggacctagtgaagaggaagtagcaacaacactagacttattggttgattacattggactacttttaccagggaaggagcagaattttgttcttactggaataatcacaaacagatttgccttccctacactcaatgctactgccaaaactaccatccatgggcttactgaatgccttgtctccacaatcatggtatttcacacagcattgcttctgatcaaggaactcacttcacagcaaaagaagtgcagcaacgggccaggccactcttccgtagtgctgctgcagtttgctggagttccactccagaccctagttgcctcggtttttttcctacctggtggtatcaccagtgaaggttgtgaaatagcaaagatggcagcctgctccttcctctggaagttccatcccaggaggttactgccctattgccagcctgaacatgcctataggagtggttgaaaa

SEQ ID NO: 479433 - DNA, 2549 bp, Homo sapiens
agatcagttggttattcatctttttaacaacatcctaaaactccgagcactgggccagtggggctttgggctcagcagctatgaaggagggacccccaataccccctaagccaggctctatgacatcgataaagacctcgctctttaaggagctagacaagatcctgcaggagtacaccacacagcagagcaacaagctgcaaaggggcaagtcaaaggtgccactcaccatcaacaacgctgtgtcctggtgctccgagcgcatcaagtacaagaagaacgaggtcttcattgatgttatagagtctgccaacctgctggtcaatgccaaaggcagcattttgctgagtgagatctttggcaccatcaagctcaaggtgtttctgtcgggaatgccagagctgcggctgggcctcaatgactccatgctcttcgagctcactggctgccacaaaaacaaattgaaacagtcagtggccaatagtgtggagatgtctgtacccatacccaacgatgccgactccccgcacctgaagaccagcgtgtgcagcgccaagtatgtgctggagaaaaacatcgttatttgaagtattaagtccttccgagggggcaaggagtacctgatcagttttgtatcttatgtttaagtctttaatccaatttgagttggtttttgtatagtatgagataatagtccaacttcattattctgcatgtggatattcagttttcccataactgtttattgaagagactgtttttccccattgtgcattcttggcatttttgtagaaaatcaattgactgtaatgatgtggatttatttctctgttttcaattctgttattttggcctatgtttgtttttatgcttgtaccatactgttttgattaccatacctttgatatatatatatatatatatatatatatatatatgtttgtgtatatatatgtttatatatatatgtttgtgtatatatatgtttatatatatgtttgtgtatatatatatgtttgtacatatatatatgtttgtgtatgtgtatgtgtgtgtatatatatatatatatatatgtatatatatatatatatatctgtttgttttttgagacagacatatatattgcagttattgctttctagtttttttcattatagtcagaaaatatacctggaatgacattgatcttattaaatttgttaaggcttgttttgtgacctaacatgtgatctatctggagaatgttccctgtgtactggagaaaaatgtgtattcttctgctgttgggtagaaagttccatatatgtctattagtttcatttgttttgtaatgtttttcaagccagatgtttcttcatttattttctgtctgaatgctgtatctgatattgtgaatggggtattgaagtcctctactattattgtattgtcaatgtctgtcttcagatctgttgatatttgctttatatatttaggttctcagatgttgggtgtgtatatatttataattgttttatcttcttgctgaattgacccttttatcattacatagttgaccttctttgtctctagagttttaaacataaaatatattttgtctgatataagtatgaccacttctgctttcttttggtgaccatttgcatgaaatatttgttccaccccttcacttctcagcttatgtgtgcccttaaatctaaagtgactctcattgacagcatattactagatcctgtttttttaaaatctattcattagcaagcaatggatttctataataaagaaaaaaatctattcagccatactctgcctttgattgaatctgcttttttatattttgtatccattaaaaatttttatcttttaagttttatataaaggctaaaagtaaattatgcaccaccattacattgttgcattaatctatatatctctattttatgctttcacatcactatttagcatgtgtttctttcagtttgaagagttcccataaatatttctttgtaaggcagatctagtggcaatgaactccctcagtttttgtttgtctgggaaaaggtttcccttctttatttttaaaggataattctgcaggatatagtattctttgatggcagttttttttttttctttcaggactttgaatatatgttcctactctttactggattgcaagatttctgttgagaaatccactgatagtcttacaaggatcccttacatgcaaagattcacttttttcttgttgctttcaaaattatttcttcatccttgtttgttttagtctattctcaggctgttaataaagacatacccaagactgggtaatttatatagaggtttaattgacatacagttccacgtggctggggagcctcacaatcatggcagaaggcaaaggaggagcaaagtcatgtcttacatggcggcaggcaagagggtatgtgcaggggaactcccctttacaaaaccatcagatctcctgagacttattcactatcacaagaacagcatgggaaacacccacccccgtgattgaatta

SEQ ID NO: 479434 - DNA, 629 bp, Homo sapiens
gtctcaaaggactggtatgtggattaaaagagggtgatttgtgaggaaagcttgaaaaaaggaaaggtgtttatggcatctgacaggaactcaataacagcattccacacctatggttactcccactgagagcctagagcctcagccattccaggactgtttaatcttctttcccttccaggttctctatgggcagacggcgaaggtcttggatcaggtgctccaaagcttcctccctgagaaccctgactccagcgaggaagtcccaggaagcacctgtgagacctgcacacccacctcagagggtcccagggctgggaaagccctcctctcaggggctcagctcatctgcgacaagacagagcccctgctccctggagggcaagctgggaccagagaagccaagcacccacatcagtcacctttccaagtgtcctcgagaaaagagagactgtcccgtgtggcccaggcttttccaggcacgcaccggcccccagaggaagccatggtgccgcctgggaaggagcgagcaccagaggttacccagggcacttcctggcgttgccccggcacaacttagatgaacaaagacgaaactaaaacctgaagacccagacacaggaggagag

SEQ ID NO: 479435 - DNA, 1213 bp, Homo sapiens
gcctaagtgctttctgttgtctggcataagatcaggcagcatccaggtgattccactgttaccctgtccctgggggcacagtggcactttcgccttttcattgatgcccaacaacgcagatataaaaattggaacagatggcccctctgctgcaggtctgctggagtttgctggaggtccactccagaccctgtttgcctgggtgtcaccagtggaggctgcagaacagcaaagattgctgcctgttccttcttctggaagctttgtcccagaggggcacctgccagataccagccggagctctcctggcagtgaggaggggaaatgtggggtggatcccccacacagagtctccactggggcactacctagtggagctgtgagaagacagccaccatcctccagaccccagaatggtagatccactgacagcttgcaccatgctcttggaaaagctgcaggcactcaatgccagtccatgaaagcagctgagggagcttttcctgaggcctcttcagccatgcttcctgtacagcctgtggaaccatgagccaattaaagctcttttttaaaataaattatccaatctcaggtagttccttatagcaatgcgagtatggactaatacaaatgcctttctatttattcaggtcttcatcattttctttcattagcattggtaatttttagcctacagaactatacatgttttcttgcatgtataattaaatattttctttgagtgattgtacattatattgtgttttaaattttgatttccacgtggtcattattactatataaaaatgcgaatgatttttgtgtgttgatgttgggtcctgtgaccttgatgagttcccatattagttctaataagttttttgtatatctcttgatatttcctatgtagatcatcatttcacatgtaaatagggacaattttacttcttccttcacaatctgttttctttgtttcctcttttgccttattgtgatggctagaaataagagtgataagtgccaggctaaatcttcacatacaatgtttgatggaagttgggaaagggagcatttttgtcttttttctgattttaggggggaaagttttcagttttcatcattgtgtataatgttagttgtgggcacataccagaatatctgggacatatttaaagcagtgtgtagagggaaatttatagcactaaatgcccac

SEQ ID NO: 479436 - DNA, 764 bp, Homo sapiens
ctgcagcacatcagcgaccgcgagatgcccaaagatttagcattggagtcaaacccttctgaccatccaagggcaagcacaattttcctgcgcaaatctcaaacggatgtgagagaaaagaggaagagcaaccatttaaaccatgtatctccagggcagcttactaaaaatgctgcacagctaacagctgaatgtgcaatagtaactttggtttacttagaaaagcttttaacttatgctgaaaccaacatttgtcccactaactggaaaaggattggtctgcgagccattcttgcctccaaggtttggaaccatcaggctgtatggaatatggactactgccagatcttcaaggacattacaggtgaggacatgaatgaaatggaaaggcattttttgatgcttcttcagtttaatcttaatgttcctgccagtgtttatgccaaatactactttgatcttcgctccttagcagatgacaataacctgaattttctatttgctcctcttagcaaaaaaagagcacagaacctagaggctatttctagattgtgtgaagacaaagacttgtggagagccctatgagaaggtctttcagcactgatgacttcattggtattcagcactctaaagccatcctctcttaaagggagaaatgaggggttataacgtcacaggacctttatctacaaagactggagaaatatcacctttcctgctcaaaacccagcaaaattagtgttttcattaaaaggatagatctc

SEQ ID NO: 479437 - DNA, 1084 bp, Homo sapiens
gatgagagtgttactgacagtgaatccatatccatatgactgtcaggcagggacatctaagtctgcagaagctgtctgctgccttttgtacagatatgccctgcccccagaggtggaatctagagaggcagtaggccttgctgagctgtggtgggctccacccagtttgagcttccctgccactttgtttacaccactgctgcgctagcaccaagcaaggctccgtgggtgtgggacctgccgagccaggcatggggagggaatctccaaatctgctggttgcgaagacccctgggaaaagtgcagtatttgtgcaggagtgtaccattcctccaggcctttggcctcagattgagagttacgccatcagctcccttggttctcaggccttcagacttggactgaggtctctgacttgctgcgtgacttctggcatcacttttttcatctttgaaacagccatggatacctgcacctgctccagtggaggtatcagggcagtgaagcgcactctgtgtgggaccttggttgtagttttatttactgtgctggttttctcaagtgctggttgtgctggcagtaaaattgtcatgtcgatagactcaggacctctggggctgtatcctgtctcaggcagtctccatcctattgctattatctggctaagccagtggtcttatcttgtgaggtcctgtggaagtgggcccgcagactgatactgcgtggctccctggattcagcccccttcctaaggtttttagaccaaagaaagccaaacaccattttatatttaacaatgcttcctgtattatttttataccagataagctaaatttcaccttcatattagtgtgttattaatgttaagcttaattttaataaaaccttgtagacatatttattcaatttttaatgtctgaccataaggatagttctgacttgatgaggtgtgctcacaatgaagtttcctctaaaagttatttttctactttcttctgttagcaaagcagttgccactacagattgaatgcatttgggccatccgcgggttactgggttaaagattttttattagaaaggctac

SEQ ID NO: 479438 - DNA, 555 bp, Homo sapiens
tgatatttaattctttatgatgctgatttcagcatggctggggagatctcaggaaacttacagtcatggcggaaggggaagcaaacacatccctcttcacagggcggcaggaagaggtatgagagccaagtgaagggggaagccccattaaaaccatcagacctcaagagaagtcactcattagcacaagaacagcatgatcagcatgggaaactcttggagggcctctacttcttggaggtggaggcggtccacgtctaccactttcaaatgacggggcttcctagcagctcagcaccagtggtggctgccgggtccgaggaccgaaccgcgaagctgctagcactactgtgcaacctcaattcacatttcaatggacattctgagaaatctctgagtaaattaaattatgaaaacatttgctttagaattactcttgttggttactcatgggccatatcacattgaactttcaacaagtttacatatagcactagcagttttctgtgagttctctaacaaatggattttcaattagcatttcattgtcagttt

SEQ ID NO: 479439 - DNA, 957 bp, Homo sapiens
atcctcaatatctattgctatgcaatgttctacctgggccgctgcacgtcacgggggatcaaccccctagagactccacgaggcccctggtcacccaagggcgcctttcagctggaaggagaaaaatgccccttctctttggaggcgaaatttcagccagatgcagaaagttgcaaggagctgattgctaattaccaagtaaatggggaaaattgtctccaggaagtaggagtccctgagaatcagactactgtgcatgctgctgctcctctgggtctagctgcccaatggggctgccacactccagaggtctatttaagggtccctggcagaggggaccatcatccaaggctccggttgcatgaccatttggagtctgatggcctgaacgcaagaagagaaaaactgggttatttgaaaacgtatcaaaatgaaacaaaggggcgtcataatacactagcagttcttaaacagttgttcctgtatcaacaggatcagcatcagtgtaacctaggaattgttaaaaatgcaaattctcagacccgatttcatatctattgaatcagaaactcaaagagtgaagcctaacaaactgtgttttaataagcccttctattgattctgatacatgctaatatttgagaaccactgtacccatgactgatagtcaatcccctaaatatctcttatgcatgctacttctaccccatatctcttaaacccagtacttatgtatttggcttatgtttctccaattgtagttcatttcactagattcacttcattgcctcatgttagcaaatgcttcttggattctaacaatgttctcttctctaatatacttggtgaccctcacagctttggctttgtattaactgctaatttcataaacatgaattaaatatttattttaaatgttttattattctgcagataaagcagatttcatcattttct

SEQ ID NO: 479440 - DNA, 617 bp, Homo sapiens
taagaaaaagactgaattatacatggacatgtgcctcattgagtgccatcttagagaatgctgcctaacgcaaaatctttcttctacaatttactcttccccagttgaccatgtcccaagagaaacacgccaccatgctgatgctcactttgaatacgtgactgccaaattattagattctggaaatcatgctgtctttcccttagttcattcagtctctcagtctctggacttcagggtctatatagcagggaagaaatgtaatcctgtgggaaaacaggaattagggaaggataagaaagaagagttggtgaacagcaagcagatggtcactcaggcaatcatgatggctgagggctctggcatctcgttttccaggttcagtgatctggaaagtcaaatgggacttttgaggaacaaaggagagatacgagagtttgtggttggtaatttaggcaggtaccactggcctttctggcaagaaaaacatcagttaggtacttttttatactggctatatcatctgtaaactcctgcattattttattatgattcttagtttccttggattgggttttactgttcttctaaatcttgatgaccttcattcctatcca

SEQ ID NO: 479441 - DNA, 657 bp, Homo sapiens
aagccatagaggcagagctgcccaaagccatgggaattcacctcttgcatcagcatgacctggatgtgagacatggagccaaaggaaatcattttggagctttaagatttgactgccctgctggattttggacttgcttggggcctgtagccccttcatttttgccaatttatcacattcggaatgggtatatttacccaacgcctatacctccattgtatctaggaatccccactggggcactgcctagtggagctgtgagaagaaagccaccatccttcagaccccagaatggtagatccactgacagcttgcactgtacacctggaaaagctgcaggaactcaactgtggaagcagctggggatgttctgtgttaacttcactatagtttgtattctgttgttcctatatggaatattccacaactgccaagtagatcaagctgactaatggtactgttcaggtcaactatatccctgctgattttctgcctgcttgatctgtgatttattcatagagattctggatgttagacctttgttggatgcatagtttgcaaatattttctcccattctgtaaatatattactgaagtagtgtgaatttgaaaagcatttgggttactatttgtaagtactctttaagtttaagccaa

SEQ ID NO: 479442 - DNA, 605 bp, Homo sapiens
ccgggaaaaaattgtcttccacgaaaatggtccctggtgccgaaaagctgcaggaggtctgggaagtgtggggcgctacgaattttaagtgctcaagccatgctagccaactctgtgccccaggttctgcagtatgtttccaagtgtgtgtgtgtagaaacgcttctggcaatagggggtcagattctattgggcctggtagagatcaagagaagagatacacttttgtgtctttgaaaaactgcctacaagagcacaagaaagaagttgaatctgaactggtgtcttcagaaaaaaatgagaaaaacaattcttttctagaacactctgcaccctactcaccaacagactcccctcatgcttcattggccgtgccaacctctacattaattaccgtcaaaaagattacctgcatcattggccaaataccatttacccgagggcgtaattatctgatctggcaaagctattacatcagcacaaaaggatcttatttctcctttgcttattaagcttactgtggctgtatataaaattattttttttaattatactttaagttttagggtacatgtgcacaacgtgcaggaagttgttgtttggga

SEQ ID NO: 479443 - DNA, 739 bp, Homo sapiens
tcaatctttgagggaggaggcaccaggagctgcattgctaccatatcccaaagccagagtcagtgtagcatgggctcctctggccaccaaacaacatgcagggacctacttagagcacaaaatacttatttggtgcagctcagctcaagtggcctctggcagtctctggtcctattgccagaggacgatgagcagttgctaagaaactacttccctagttctttagggacccttttttatattgctgatttgaccccatgcactggggaaacaatggacacacttatagaaatgcaaaatgctctgcaaagcctcagcaatagaatcgaacaatcaaaagaaagaacttcagtgctcgaagacaaggttgtcaaattaacccaatccaacaaagacaaagaaaaaagaataagaaaatacgaacaaagccttcaagaagtctgggattatgttaaacaaccaaacctaagaataattggcacacttgtggaagaagagatatcatcgatacgttttcaacctatttgcacagacatcaacatatgacttttttcttcagtctattgatattttaaatcgtagttatttgttatattaatatataattatattcccaggaggtgcctaacaccagtctgtcacttcataattcgcactgactaaccacttggtttaagtgggaattgtcgtatttcctcgtttactaaggtaacatttcccctttgtaattaatgtacaa

SEQ ID NO: 479444 - DNA, 632 bp, Homo sapiens
tgggtggttttggaaaaggcaataaacaaggatggcatgtcagagaccttcacagcagcccctcccatcacaggaccggaggcctacgaaggaaaaatggtttcatgggaaagatggtttcctgggctgggtccagggccctcctgctgtgtgcagcctagggacttgattacctgtgtcctatccactccagccatggctaaaaggggtcaaggtatagctcgggccatggcttcagagggtgcaagcccaaaccttggcagcttccatgtggtgttgaatctggcagtgtggcagggaaatgtggagttggagcccccacacagagtccccacagggatgctgcctagtggagctgtgagaagagggccaccatcctccagaccccagaatggtagatccacctacagcttgcactgtacacctagaaaagctgcaaacactcaaaaccagctcatgaaagcagccaggagaagagctgtaccctgcaaagccacaggggtgggactgctcaaggccatgggatcccacctcttccatcagtgcaccttggatgtgagacatggagtcaaaggagattatttcagaactctaagatttgactgctttgctggatttcagacttgagtggg

SEQ ID NO: 479445 - DNA, 666 bp, Homo sapiens
actctccttaggagctttcacatagcaaaagattttattttaatgaaattcaacttattaatattcaccttcatggatgatacttttggggttgtatctataagctcattgccaaacccaaagtcacctaggttttaccttattttgtcttctaaaagattcatagttttgcattttacagttagggctatgatccactttgagttaatttttgtgaaaggagattttcttggctgccacttccctcacaggcccaaagtgccaagacttggggaacagaaagatgtcaaaagagatgcctctcaggaacacaggacctcagaacttactgcccattactgcctcaagtcattgctccctgcatttcagtgcagtgctccttggttgtctcagttgtggctcaagaggatccaggtacaactcaggttaccactctggaagggagtaaataatgttaatatggctcattattgaaaacattaacttcaatgacaatcaagttgttgtcttctagtactgtctatttcaaagttactgtttttttgtagctaataagcatctcttaataagatattctcagaaatgcaaatatcccatttcttatcatgttttcccattttaacatccatagatgtttactgcctgcaacaattagtactgtaatgt

SEQ ID NO: 479446 - DNA, 839 bp, Homo sapiens
ggctgctttctcccttttggaatgggagcatttacccactgcctgtacctctattgtatcttggaagtggtgtcagccaaaacacattgtactgcattgacaataacttcaatctttgtttgcatatgcaagccgcagaagcagcggcagcatggtgggcccatgctccttcactttggcagggtgctagccggtgctgagatgcctggctccaagcaggcattcaccacagtggcagaagtaacacggctgtgggaccaggggatccctgctgtcgatggttgtgatgatgatgatatttgcacagggacaggccgcccagagagtctacacagctttgggctggtactggggcttgtctgcacagagtcctataatgtgaaccgtctatgtgtctctcagctgtggatatcaacacctgttccggtggaggtggtgggtggggttggtggtgtgcaatggactctgtgacggctcttagctttggcagcttaatgctctacttttgtgctgtgttttaggcttaagattataaattttatatttataatttctcattttctcatatgttcattttaggttagaaattaactctaaacactccttttgttgtatccttcagattttggtaagttttatgttaattggtatttagttcaaaggtgtttttgtttttcatgagacttctttgattcatgggttatctagaagtctgtaccttaaaacttaaataccttgagattttccaaacatattttggttattaatttctaattttatattacaataaagtaaaagcattcttttccgatttctactcatttacatttcttaagtct

SEQ ID NO: 479447 - DNA, 1085 bp, Homo sapiens
ttcgcgcctgccagtgcagaagcggcttgccagttccagagcttgtgatttgcctgttgtatgaacatcatagagtgtgctctcacaaacctagatggcatagcctactacaattgtattgctacaattgcctacagtattcagtatggcaaacatagtaaagagggagaagaagaggatgaggatgaagatctttctaaatataaattagatgaagatgaggatgaagatgatgctgatctctcaaaatataatattgacgtcagtgaagaaggcgatagtaataaaaagaaatctaatagaaaaagtcactcaatatctcaatcttcacattcactatcttcatcatgttcattctccctttcaaattcaaggtctaggtccaggttcccttcaagaagttctagttcacagtcaagatcttgtttcagttccagagaacatttaagatcctctgggttgaaatcaagatccagttccaggtcccacaggggctcactaaacaaccctgagcccagggccaacccttacagaacacattactttacccaagcaccacaggtcatcttctggatcattccattctggttcccattcaagttcaaaaaagaaataaggcattaaaatgtatatcttaatgaaatctaatacagtgcatgaagcacatttttaaggaagttggtgtttttgatgtgtaattttaatgacattattacctgatggcctatggtggcattaccacatttcattagctctattccatgccactatgatcttaagcaaaatgcttaagattgtctaacatctatgagttttaccatagtgatgttatcactaggagcaactggggtggttcagaatctcatggcctctggttgtataactcctaaaccataatttctaatcttgtggctaatttgccacttctcttgtctacctgtaagcttgcctcctcttacctaatttgttatttaaatgattatttttacattgttaagggttataccatttacattgtcttctgtgtttttaattttaacaagtcttagtagcaatacctaggcaaaatagatttcaagacaaaa

SEQ ID NO: 479448 - DNA, 580 bp, Homo sapiens
atctcacagcacagcgctcgagctctgctaagaaacagactgcctcctcaagtgggtccctgaactccatgcctcctgatagggagacacctcccagcatgtgtcaaaagacaccttatacaggagagctccagctggcatctggcaggtgctcctctgagacaaagcttccagaggaaggaataggcagcaatatttgctgttctgtagcctccgctggtgatagccaggcaataggcatcaacatcaacaaaaaggacatccacacaaaaaccccatgtgaacttcaccaacatcaaagaccaaaggtagataaatccacgaagatgaggaaaaacctaaaggccaaaaatttcaaaaaacagaatgcctcttctcttccaaaggttcacaactcctcaccagcaagggaacaaaactggatgaagaatgagtttgatgaattgacagaagttggctacagaaagtgggtaataacaaactcctccaagctaaaggagcatgttctaacgcaatgtgaaaaagctaagaaccttgaaaacaggttataggaattgttaactagaaaaaacagcttagc

SEQ ID NO: 479449 - DNA, 629 bp, Homo sapiens
attttccaggtaccatctgtcacccctttccttggctaggaaagtgaattccctgaccccttgcgcttcctgggtgaggcgatgcctcaccttgctgcggctcatgcttggtgcactgcacccactgttctgcacccactgtcctgcacccactatcagacaaaccccagtgagatgaacccagtacctcagttggaaatgcagaaatcatctgtcttctgcatcactcacgctgggagctgtagactggagctttctgactatggtgggtcctcctccactagagattggatcacaaatcttattcgtaggaccctggatggcatgcccaattatcggagggatgggatcatgtcagtgaagttgtccacaggtctactgggttcaggaggtggctgtgatagaaaggggcaggctggtcccaggccacctatggaatattcaggtagggcaataatggttgcattctgggccttccacaaggaagagcaggcccctctcagaacgaacatctaggcaaacaactttgagggagaaagacagtcttcaaactctgagattctttcctctgcttggtctattctgctattgacattgattcttgtgattgcattgtggtattcttacag

SEQ ID NO: 479450 - DNA, 795 bp, Homo sapiens
ttggctctctgtctccctgggttcagcatgtgtaggttcaaccaatcactgatcaaaagtgttttgaaaaattatgtgcgtctgtacacagcagctgctgcggggtgctagcgggtggttgggtgcttgcttccatgcaggcattcgccacagtggtggaggcaatgcatctcatgggtgggagtatggaggggtccctgctaatgactgtgcagtcccgctggtggtggccttcgctcaggggctcggtgttggcaggcccaggctggtgcatgaccatggaggccaccttactggagctcttcactggataagcacagtccaccagcacagaagctattatgtgattcctcagggcacccaaaactgccccacaagcagttgtggccagccagcgacccctgtagaggccagcagaccaagtagtgctcaggtcagattggccacatctgatggaaataaagacacaagacaaagagatagaagaaaagacagctgggcctgggggaccactaccaccaagacacggagaccagtagtggccccgaatgcctgactgcactgctatttattgtatacaaggccaaaggggcagggtaaggagtgtgagtcatctccaatgattggtaaggtcacttctgttggttatttagaagcgtgtcatttaacgtctgcatatttttaattaccagtttttcttctaatattgatttcaaatttcatttcattgtccttgaagaacactgtttgtttctttttcaacttttatattagaatcgggggtatatgagcagg

SEQ ID NO: 479451 - DNA, 1815 bp, Homo sapiens
ttctctctttcacacgccctatcatggcttggccttcctggactgcccaccacagctctggggcaatctcggggtttatgttcccttcccaacttaaaggcagcagaggaagggacttcagcagtggttgtggccgagggtctttcacttatttcctggaactagaccccagagagatgtgcagcaatgatcagcaacaaggtcaagaccaccgctgtagcagtggcagtgggggctgtcagttgcatctgggagccttgccccaggaaattcagagccacgaccagtatatttgttcagccataggatttactttcgttaatattactactactgtcttccccatgtcactgaaatcatactatttgataaagctgcacaatgggctcagttcccagcaatcttctctacttgatattgtgggaaaaattctggaggaaccctatttgttgtattgctgatccaacaagaccacctggctagatctgagtaaatcagaacaatgcctgccttactgccatttctacgtgagccactgtctttgctagtttagtgttgctataaatgaacacctgaagctgggtaatttaaaaagcaaatagacttattcagctcagttctgctgcctggaaagttcaaaattgggcatcagctcttatgtgagctcttaattctcttataatatatactctcttaaatacattctcttataattgtcttataatatattctcaatatatatagagagaatactatatattttctgtatatttaagtactgcatgtttaaatattttatattatatatatatataccgagaaagaatatattataagagaatttcacatttctaaaggtatgatagagggaagattttcaggttatttagtttgccacattgctggaaatggaatcatattcttataatagtattaattgacataaaaattctacatatttttggtgttcaacatgatgttttaaaatatgtacattttgtgaaatagctatattaaactaattaacatatgcattatctcacatatttatcatttctgcggggtgagaaaacttaaaatctactctattagcaatttttaagtctacaatacattgttattaactacagtcatggtgtacaagagatgccttgaacctgtttctcctgactaactgaaacttgatatccttaacgataggcttgttatttaaaggataagaaaaatgaagtatcaataggttaatgaacataaacaaaatcatgtggctaatgatgaagctagatttattctgagtccagggtctaccttactaattactttactatactgcctcatggtgaccaatttcagtttgcattttggaccctcctaaacagtgcttttcattcctgttattaatattattcttattcctattaaatttctagtattatgttcagaacaaagaaacccctgggtctgaaatcacgtggtcaccttttcagtaataggaagtgtgcaaaatgaatgtccctggaaaattacttatggctctttgaattctaatgttttgctattctattctatttaattgcattgtagcatatataaagatgtattttgtgagaacaccaacataaaaaaggtggggatggagctgtatgtgagtaaagtttttgcatgctattgaacttaagttagtagtatttcaaactagactgttataaatttaggatgctaaaggtaatctccaggttaagcacgaagaaaatatcagaaaaaacacacaaagaaaatgagaagggaatcagaattattcactatgaaaaagtc

SEQ ID NO: 479452 - DNA, 585 bp, Homo sapiens
tttcatttcacggacagcatggctcgcagatggaatgctatgaagacaaccatacacaagaagaagaaggagaaggagaaggagaaggagaagaagaagaagaagaagaagaagaagaagaagaagaagaagaagaagaagaaggaagaagaagaagaagaaggaagaagaagaagaagaagaagaagaagaagaagaagaagaagaggaagaagaaagaaagttctttggcagtcggctcccttctgatccaaggcaggtccaaaaatgctgtccaagagccaaatcctggaattagggacctcaagagcccacttggtgccataccaaactctggccgagctggcacctatacgcaagacaaaacaggaccctcagctgtaggtctgttggagtttgctggagttccactccagatcctgtttgcctgggtatcagcagtggtggctggagaacagcagatattggtgaactgcagatgctgctgcctgatcattcctttggaagttttgtctcagaggagtacccggccgtgtgaggtgtcagtccacccctactggaaggtgcctcccagttaggctactc

SEQ ID NO: 479453 - DNA, 1381 bp, Homo sapiens
agaagatagactcgaagaaagccagtctttgagctgtaagattctttcctttgcttcgtctattctgctattaatacttgtgattgtattatgaacgcttttggtgtgttttttcactctatcagggtttatcacaatggcagaggcaatgtggttcagcaggtctgggatcccctgctggtgactgtgtgcacagacgccctcttggtggtgttggcacaaggaggagctctggcagatgcaggttcatgtacactctgtgcactgcagaaggagtctttccttgtagccaccacagctgtgaatttgctgggttaccctgaaagccagtatgtctcacagcccaaggcccatggtgtacaacctatgtatcactaccgggtggttggaggggcaaacttacctagaggttgggtccggcgagtccatactctggctctccttgtgtgctcaaaagcagcagcccccatggggatcagaaagtggttctctggccccaggggtaatgttccagaaaggagtgcagctgcttctgctgtacagaaaagcctgtaaagggagctgggggtagcagacagaatgctttcaacttttcccgattcagtgttatcttggctgtaggtttgtcatagatggcttttactacattaaggtatgtccctcgtatgccaattttgctgagagttttaatcataaacgaatgacggattttgtcaaatgcttttttgcgtctattgagatgatcatgtgatttttgattttaattctgtttatgtggctggtctatcaattttatcttttcaaagaacgagctttttgtttcatttatcttttgtattttttgttgttgttatttgtttgtttgtttccgttgcatttagctctgctctgatcttggttatttcctttcctctgctgagtttgggtttggtcatgtaacataatcccagacatcttggaggatttgttcatattttttttattcttttttctttgtccttggtggattgggttaattcaaagaccttgtcttcaagctctgaatttctttcttctacttgttcaattctactgctgagactttccatagcatttcacatttttaaaagtgtgtccagagtttcctgaatttttgattgtttattctttaaggtatctatatccttgaatatttctcccttcagttcttgtatcagtttttggatttccttgcactgggttttgcctttctgtggtccctccctgattagcttaataactaacttcctgaatacattttcaggtgaatcaggtatttcttcttggtttcgatccattactggtgaactagtgtgattttgattggggggggtgttgaagagtgttgttttgttatattacc

SEQ ID NO: 479454 - DNA, 2261 bp, Homo sapiens
tgaatgtggagggtgaaatgagggtgaagatggaaaaactgcctgtcaaataaaaccacaaagatggggagaaaccagagcagaaagacagaaaatttcaaaaaccagaactcctcttctcctacaaaggaacacaactcctcactagcaagggaacaaaactggaaggagaatgagtttaacgagctgacagaagtaggattcagaaagtcggttataacaaacttccctgagctaaaggagcatgttctaacccatcggaaggaagctaaaaaccttgaaaaaagagaaaaaagtgtgaaaagaaatgaacaaagcctccaagaactatggaactatgtgaaaagaccaaatctacatttggctggtgtacctgaaagtgatggggagaatggaatcaagttagaaaatattcttcaggatattatccaggagaacttccccaacctagcaaggaaggccaacattcaaattcaggaatacagaatttttaatttatatttattataattgtgaaaattatataggctaatccagtaaacacttagtttacaacttaacacataagaaatgtgtcaataaatataaaatatcattgttattataattgcaagcacaaggagtttagacacagaagacatgagtttaccaacacaggtctaccttttgcgagctgtcatgacattggccagggaacttaacattcttgggccttagttttcatctgtggaaaatttcagacacttatttaatggaagtttcaataaacagggaaataattttaaaaatactgacagatatgaattaccttttcatatgtctgataaaatagaactaaaatagacagaaaaattaataacatgttttcactgttagtttaaagtaaacattgttggaaatctcggtattccagaaacctattaagcatgtaaggaaaatcttttctaagcagtagtgcaccttgtggtaaaaatggacataaaatacagtgtttattaacttatctttatataaatagacatgagttaaaatttttgctctgtcatttactagctgtgtgaccctgaacgacttagttaacctagctaagcaataattttctcatttgtcaaatgaggcttaatactagtatctatttcatagggttgttaagaggattagaggacatgataatttatccaaaaccacttaatacagttcctgtataaaaacaactcagtaaatggaaacttatcatgatcggtgtttgttgccgaagtgactcattaataaagactgaaggtataaataatagaaaatctcctcaagccagtaggttgtactgtagtttatctctgttggatagatgacattttattaattacttggtagctactgtccttgttttacactctaactttaacatggaacagcatttggcttttcactcttatcttcaacatctaagacattttatatagatcttatattcaatgtgtgtgattaattttttaatacatacaatcatacaatcctatggaaaacttctcaaatgatgtttgaaatgctcaattagacaattatgagtgttaaaatatctgttttaacttatggtaaaatctgtccctttttaaaactcaccgttggtccgagttaaccctctcagaccattttaaattgagattatcccttgggtgcaaatccaaaatttctaataccttttatataagatcacctttcacatatttggagagggatctcatgtctcacagtgaatttttctctttcagggtaaacatgcaaaattatttaaaacatttttcatatagcttaattgtattaccactctcagtacactttcctcaatgcattttaatttttctaattattaaaataaaatgtgatgccctgttagaaaaccaagactctgggtatcattggagatctgattagtaatattgcctccttaatgttaagtaccatacttctgttaatgaaactaataatatcatacaattttttttggctttcacatcatatttttttctcacacagatctcattgttaactaaaagttctgactcattattacacaagctgttggaaagacttccttattctatccatggacatattttctgtgttcaagtacagaagtattttatttaataatgttatattaatcttatatttttctttctgtcaatatttttgaatgctggtaataaccatatattttgtttcatgtgccactaggagtaatgctagcaaaatgatatact

SEQ ID NO: 479455 - DNA, 741 bp, Homo sapiens
agtttgaagccctgaaatggaacgctagacctgagacatgacagtgggagtcaagggatagagtacagaacccccgcattggctccctgactgatagagtgatggccattatgttgggaaaggccaaatggaagccgttagagctgcctctacctaggaaagtaatacatcaaagacaatatcacattcctggtgggaatgctgaggttagtgccgccatcaaggatttgaaagacatagaggtattgattcccatcacatcccaattcaactctcccacttggcctgtgcagaagacagatggatattggagaatgacagtgaattatcataagcttaaccaagtggtgactccaattgcagctgctgtaccagatgtggtttcattgctagagcaaattaacgcatctcctggtacctggtatgcagccattgacttggcaaatgctttttctccatttctgtccataagtcccaccagaaacattttgccttcagctggcaaggccagcaatatacctttactgtcctacctcagggatatattaactctccagctttgtgtcataatcttattaggagagaccttggacacttttcgcttccacaagatatcacactggtccattacattgatgacaatatgctgattggatccagtgagccaaaattagcaaacactctggacttattggtgagacatttgtgtgccagaggatgggaaataaatctgactaaaat

SEQ ID NO: 479456 - DNA, 880 bp, Homo sapiens
ggttggttggtgcagcaaaccaccatggcgcatgtatacctacgtaacaaacatgcgtgtcctgcacatctactgatgtcctttgttcccttctttgtggccatgtgtattcgatgtttagctcctccagccttgaaagaagacagctgcttcatgaacacccacttcagaacagagcggtccaggggagcaccaagggatgcctgggtgtgggtcattgagccaaagaggacagggatgcctgatatccctggcttgactgcaggatggcctcctaaaggatgcaggttccctggaaaagaaaaagaaaacatatataaggcagcattctgctgcaaggataacctacacttggcagatgctacctacctcatggtaactacagctgttcccatgcaggaccccggttgggactacactacccagagggggatacaggccagaaacaatatgctcctatgcctagcagaggccaaaccccaatccagtaatggatttgaactgaagtggtcctcttctccagctgtctctgagatctgacatcatcataaaaaaaaaaaacgaaaccaaggcaagtctaatggtgtcagtatatttgccagttatagcattgctgtatcaaatagtaggttctgtgttaaattctttgagagatctccaagctgattttcatgtggctgaactaatttatatccccaccagtagtgtgtaaatgtttcctttttctctggaaaattacaaacatctttttaaaaaaaaatttaataatagcctttctgactggtatgtgatggtatcttattgtgatgcttatttgcatttctctgatgattagtgatactgagtgtttttattttatgtatttgttggacacatgcac

SEQ ID NO: 479457 - DNA, 771 bp, Homo sapiens
ttttccaggtccttgactatgtggatagacttccataatgtatatgctgtccaaggtgagcaggggcagaactgctgtggctgtcgtggcagtggcaaaagggttgttggttgcctctggaagcacctccccaggaaaacacaggaccttagcagtggaaatgctcagtctaggagaagtagcaatcagaaagataaccaggagcatgcaatatcatggagctcaagagaagaaaattatcaaaatttggctttcattcaagaatgaatacattaattttccatatgtcgtttctgagaccacactccacaaagtctcagaaattaaaggcactagatataataaagatcccagtattctgatatatatttcaaaggttccaaagagcaataatgagatccggcacattctgggtactatggcagtagaaaagacaatttttggaggagaatatgcaaatatacacacctttgagtggcataaggagaagagcactgtcaagagtttgaaatacttcagagtgaaaaattagttatcagaaaataaagttcacagaatttgccaaaaagaaacatattctttcaggtttggattaatctttttttgtttaaaaaaaaatttgaagtgggtggagtaaattggaagtgagaaagagaagtcaatgtgtacagaaaactttgccaaaaacttaactgtgaagaggagagaaagacaggacagaacagcttttatataaagttgattttgttttttattttatgttttcccttt

SEQ ID NO: 479458 - DNA, 647 bp, Homo sapiens
ctgacatcaatgtgacatctttttatagagccactagagacgacccatatagtaggtcatggctggcccctctcactggcttcagcttatcatccagtcctacaatgaaagtgtgtcattacagattattgcgaatgctgctgagatgagatttgaagactactcagtggttggactgagacaaagagccaaagcacttcccaaagccaaacttgcaccaaaggtcatggtcactgttggttctgcgcctaatctgacccactacagctttctgaatcctggtgaaaccattaaatctgagaagtatactcagcaaatcagagaaaattatgaacacctctatgaacacaaactagtaaatctagagaaaatagtaaaatacttggaaacataccactgccaaagattaaataaaaaggaaattaaaaccctgaacagactaataatgagttccaagaatgaattactaataaaaaaaatatgaaaccaaaaagccccagaccacatggattcacatttgaattctgccaaatgtacaaagaagagatgggacaaattctacagaaattattccagaaatttaagcagaggaatgggtccttaacttaatgtctaaattgagcattattctgataccaaaacctgat

SEQ ID NO: 479459 - DNA, 483 bp, Homo sapiens
gttactagaagctgggaaaggtgtttgacttcacatagaggaatgttatgctgctcctaagccaaaccctaaccgctgctgaaaaacaggcagttctgcagacagcagagaatttcagacatgagcaatatgtctcctatagcagaccaaaaaggaaaagtgaaaataaggaaggtgacaaaataggggaacaatcatttccgacaggaagagacagagtacttcttcacaaccctgactccacagagaaagagagggaacacaagagaaaaacagaggctctaatggctgctttgagggcttgcaaagtacaggatccccaaggtgcattcactaattgctaccagtgtggcaagtcagggcactttaagaaagattgctcaggcagcaagaagaagccacctcgaccctctccaacctgtggcagggactactggaggtcagactgcctacaaagatagaggtcaccaggttcagagataa

SEQ ID NO: 479460 - DNA, 808 bp, Homo sapiens
tcaaagagctccttgctaaatttccttaggtgaaaccaatgaaaatgaaagaaggaaaaggtgttaacagcaggcagaagtatttacaagcaggtacacaattctacttccctttttctccatggagatttcagaggatgtatggaaatgcctggatgtccaggcagaagtctgctgcaagggcagagccctcatggagaacctctactagggcagtgcagaggggaaatgtgggattggagcccgtgcacagagtcctcaatggggcactgcccaacggagctatgagaatagggccaccattctccagaccccagaataatagatccaccaaaagcttgtactgtgtacctggaaaagcgaaaggcactcaatgccagccattgagagcaggcatgggagctgagacttgcaaagccacaagggcagagctgcccaagtccttaggagcccaccccttgaatcagtgtgccctggatttgggacatggatgttgttacctggctattatgcagacttcattgtgtggttactttagtgtgtcagtgtcctatgcatttaactgtgttttggctgtggctggcttgttttcttctgtctattcgtaaaatctcatttaaatgttggcctttttcatctgtgtatcatcattgtcaaactcccctcctttagctcaatacggcttatattttctatgcttgtattcattttttacatgtaaaaatgttttaattctccaatgcaataataagttccttgaagataaaggttattttagatgtcttcatattccctcaaagaactcatt

SEQ ID NO: 479461 - DNA, 622 bp, Homo sapiens
accacttaagaacttattcaggatggagagtgtgaactacctcagctcccctgctaggtcagcaggaaagctattcacctcacagcctcactcctgttctagtgtttcagctattcagataagacaggaacctcttttcttgtataaaaatgttgatgttccaagcagggaggaatcatcactctgcctttcatgtggcctgaatctgaagtgtgttcctcctgtggggctgcactcaccatggattgttccagaaaagctgtctcttcttacacactgttacacctccctaattccactgagtgtgctcaccaaaggccccaatgagagagtcagggatggcttccctaggcttgagctggagaatgagagtgccaataaggctctttctgctgcagcttctacttttatattttatgcagttctctaaattcattctacctctaggttaatactgttctgtgggaatttgattctgtcatcatggtgctatctggttattttgcacagtagttgataaagtttcttcatagtgtcactggtctttatattttggtgtgtttttgcagtggttggtactggtttttcctttccatatttaatgcttctttcaagaggtctt

SEQ ID NO: 479462 - DNA, 449 bp, Homo sapiens
acttctaactgccattaggattgggacaatgaccgctcttaactgcttaatacagacagtgggtgttcttttggggaaaataggagtcatatcttctctcagaagcctgtgtggaaggcttggtggaggatttttaaaactttccattggctggaagctggtagatgaagtttgccatcctccaattgcagccatcctgaggactgaagagtatatcactaagagaagcccaaccaagttgttcctggggtccctcatcattgctccttcactggcagactgtgcctgtccattggagagctccagcagggtggcctccacagataccagcccatctgtaccctccaaacacaggagccacccctatgccatgaatatatgggcctcatctcagagactgagatttagagcatgcagtacaggagtcttgagctgagcctttaccctct

SEQ ID NO: 479463 - DNA, 603 bp, Homo sapiens
ctagtttctgaattctggagggatgagatatcatgagaactcaccaaatatcacgaggacagtaccaaggggacagtattaaatcattcatgagaaatctgctccaggattccatcagcttctaccaggcctcacctccaacattagctattatgttactatgtttcaacattagcttccttgctatccagattcttaattgtatgtctgtcatttcagtcattcctgactggataaaagccattgctggggagctactggacgaatttggagggaacaccctgtgggacaaaaggaacccgatgagaggccctgagcaccagatcctaccacttgaggaaagcctccttcagcagaggcacagtttaagtgctaagctcaccaaggaatgtcttcagttatcttccagccgtcaaacagccctggtgcatgtgaagggccttggaaaagaggaagtctttccctacttatccaccaaaataagcacagctgtggcttctcccatgggagtgtgacttgggtgcaaatataaacagactttctggaacacatcaggatgactgcatcttcaaagaagaagcaccttcctgtttcaggtttgca

SEQ ID NO: 479464 - DNA, 725 bp, Homo sapiens
ttaagaacccaggccataaggaaaataactgaacaaagacttgaaatattcccaacacaaagagatgatagttgttcaaaatgatggatatcctaaaagcccagatttaatcattgcatatcctatgaacatatcaaaatatcacagtttgcaagtttatctagcttcaatctttgatgctgctgatgtttggatggagtttttgtggggactttttgttgatgctgttgttgctttctgtttgtttgtttttcttttaacaggcccctcttctttagggctgctacagtttgctgggggtccactccagattcaatttgcctggatccctcctgcccctggaggcctgctcccgcttcaccttccaccccgagtaaaggcttcccgagggcctcaccaagaaggcttgttcagcctgcagaactgtgagccaaataaacctttctttcttataaattatccaatcttaggtattcctttgcagcaatgcaaaatggactaatataaagtctaattttctgaaaatagcattcatatgtccatctacttgtagacatgagcctagggatatcatttttgtggaaataaaacaagaaatatacacaataacttagatagctctcctaatagtcaagacctctggcttgctgtttggtatattttgggcattgtatccaggcagcgccctcaatcactgactttgtgtccatgcttctgggaccaac

SEQ ID NO: 479465 - DNA, 1956 bp, Homo sapiens
agtgcccagaagtactcacctcggcttggctcctgcaacaactcagctgcacttccccttgcctgaggggtggatcctagttatcaagaatttgaaagtctaaaatacgaaaaaaaggggggcagttcattatgaatctatatgacctacccgccctcatcctcattcactgtgacagcatcatcatcaccgacagtagtacaggcctttgcatttctgtctcaggggttaactctatattgcttgagaaaatggtgatagtatatcctgaggcagttgccaagcaaaacaatactgactttcctcagaacccacccccaccatccctctttgcttatagacctatagctagactcaagtcccagcaggcctttaaagatgaggtaaagagtgtaacccatgaggggatgtgctactctatgaaagaaatacttgagttttctaagaataagtgtgaggggaacacatgtgggaacaaatatcatggagggagaaatggtttcaccaggagacacaacaataattttattgaactggaaattgagactgccaccctgccactttgggcttttcatgcttctgagccaacaggctaacaaggttacgttgttggctgatattactgttccagactaatgaggggaaattgaataaatactttataatagaggccatggtgattgtgctagttgttatactaagcacttttgttcttaatgaagaaaatagtctcataaaaatatatgtaaattttgtgcttattttatcactgccctgagctacagaacttttgcaccttcctttgcaaatgtctttatggttatgacttcataataataaaatacatggttactattccctgtctatggattggacttcacaagccccctttgcacttcacatacctgaaatgcactaaagtgaaatgtctgcctcagagggaacaccatcaaaacgcacagataattaaaataaaatacttctgtaaacggcttcagagtatcaagtctgccaaattgccctaacagtgccttttcatgtagtcagtatgtaataagtatagtactttatagaaaagtaaatgcaaaattactttcaaaaatagtaaactaaacataatatttatttttctccaattatcttttcaaatgacttcgcagatttgaagatagcaccattttcctgtagtgacaacttgaggttttaatttagaaagttagtaatcatttcaaaggtatacacacatacatatatgatcacctttactttgtagtttttcattcttttccttcagttcattgtgtgccatttttgcaccctctgcccacttcccaaattgtatttaacacacttttgggtggttggtcatgttcggtaaatgtttactaaccaagtaaaagaagaaagaaaaaaagcagagggaaagagagacaaaaattccatttccaatataaatttataaaatcattattagcagtctataataactacatatggagttattatgtattaaaaaactgatataattatggaaaatcactactatccttactattatatacaacttagggaaagttttactatactgcattaatatttttaaaggaagaccaaaaagttgaagttacaatagaattactatgacttatttttgttgtaccatatgttaatgaatttcacttaaaatgttatgtgaattcatgtgtaattacaaaatttaagatacatattaacaataaatcactgttcattattacatttaatttttttaattaaaataattttagaattataggatgttgcaaaatgctcccaaaatgtacaacatgtactttatctagattattcaaatgttaaaatttttcttggtttgctttatctttctcattctctatgtacatacatcttcacacctgcaaacacccatttattctgaatcatttgcaagtaaatttt

SEQ ID NO: 479466 - DNA, 681 bp, Homo sapiens
gaaatgcgtagtatttgatctggaatgcaccaatcctcacggcacactccttcatggcttttcttggctaggggagggagatgttgcccaggtcatcagaaaccttccataaaacacatacacaatttgaaaataaagtttgaactcttcttaaaagtgttcagagtacaggatggaaacaaatcccccaggaagccccccaaaagccagaatattggattcatgattgaactcttcatgctcaaggagaagctgaaacttgggggttttctgctcaattctaatgaactggagggaggaagaaaaaatgtgaaagtgtatgggcaagttttaagaggaaaagagagggagaagaggcaggacctgtccaaacacccatgggaagagactgtgatgcaaagaaaaaaagaagcaaaagtctggctgaaatcaaccccaaaggagcttaaagctcagtggaaagggaatcttttgcctttgagccactgcaccaccacaccacctgcagccataccccacaatccactctgagtttggcaaggatagaggactagtgagtccctagtgagttgtaggtcacctgaatatttaaccttaattgtggaaaccctttagggatcggggagcacggcctgccaagaccacccataggacaaaggaaatatggatatggcagcagcc

SEQ ID NO: 479467 - DNA, 720 bp, Homo sapiens
gcagcagtccatggtcagattatggaccactgaaggtctcttcacttccccttttcccgcagtagggaatctcttaaggctcctgttaatcttggacaagctggtcactcactttcttctccctctgttcatcagcctgcagaccatatctgcaggagctggcctgtgggctgagtctatgagcactagcctggtggctgagtctgtgatatccagctgggaggatttaaacatactgtgggtcatctcttatactgtaaatctaacaactcttagcagggaaagcctgagagaatacgaatgttctccagttggagactcttctggtgaggcagtcatcagatccctgactgtaactggtccataccactggcttgttcccactgtccatcttataagtgtactgccagaataaactgcctgaacattaggtgttgcctaagatccatcattgacacgattggaccatagggaaaaaaaattgcctgtggggaagctggccaaatgggccaacccaagacccctgaacacaatagaggcttttccacttttaaaaatataagtacttagtgttatgcattttcctttcagtacagcttttaatatgttttattttcatttattttcagtaatagcatatttaaaattttcctttgcgacttattcttgatccataaattatttcaaaatgtgttgtttagttacatggataagttcttt

SEQ ID NO: 479468 - DNA, 2765 bp, Homo sapiens
tctgctcgaggtgcagcagtcttcccgctccaccaggtcctttatgttactctataaactggttattctagcctcttctgcaggtctgctgcagcttgctggagttccaatccagacgttgttcacctgggtatcaccagtggaggctgcagaacagcaaagattgctgcctgctcctttctctggaagattcgtcccacaggggcaccagcctgatgccagccagacctcttctttcgattatcccaggtcaacttcagactgctacactggcagcgagaatttcaagccagtggttcttagattgctgggctccgtgggagtgggacctgcttggcgagacctcttggctctctggcttcagcccccttgccagaggaataaacagttctgtctttctggggttccaggcaccactgggaaaatccttccccattatgaccaggacaacatcacatatgtcctacaacagcaataagaggaatagcttaagattacatttatgtttttcagcacacagtgttctcaggtttcccagtttgtgcactttatctaaatgtcggttagatttgtcttcatttccatatgctttgttctgtcaatcatctatgttctgtgtttctaaaaatatacctcagtggatgtaattttccatgttgtactagacacacacatgcacgcaacttatctctcagtgtatacatgtagacatataacatagatgccattgaaaaaaacacttttgtgataatatggaaatctgagaaatcaactttcaaaataggaaatatcatacctaaaatcagcttgtggcacttttatagctctattattcttggccatgtatgtattaaaattcaaggcaccccacttcactgaggctccaaatcaaaattatataatgtctcttaatacctgtgtttatttatgacatccttgaaaatgaaaacagaattatgtacaaacacagctcttttcattttccctatatttaactgtctgaatgccaagcctacatcaccaaatataagttctctcttaaactacaagcttaaattttcaaatggctgttaaatattatgtttctcattaagattctaagtaagatttagtttgaaaaagtatttcccaataatgatacataaataatttgtaaaattttagtaaaattttcagagcaagaaatacttgaaagccagtaatgtattttaaaatgcttatttcagaaagataaagacagtgcaaaagtgaattgccgagaccacacagctgaatgcctttccttatttttcatcagcactctagttcagaatattgaattattaatccttatattccttatacatatatttatttacactcacatttatatttactctggcttattcagtcatttaatgaagtaatgtagtgtaagcatttgctatattttatgaactctgttacactctagaaattcagtattaaatgctctctttctacccttcaggaacctgcaaaattgtgaggtagatcccataagtaaaccaataattgcaaatcaaattattaagaaccaaataaagtaaaaaagattattgtgaaagcatagttcccaaatgattaagtcattccgggtgttgtaaaaaaggtatactatgaaaattaatatctgaaaggagacttgaagaaaaaaaaatagatatgatcaaatagttttaggagtcgtgggaaggatgagctaagggaggagaagaggaaactaataatctaagcagagaaaacagcatattaaaattcacagaggcatgagagaacacagcatgtccaaaaatggccttagataattgtggatgtaaaaaaaatgtagcagtgagagtatgttaagagataaggttaaaaatgtacacagtgccagtatgtatcttacatgacagcctgcgcttagggacattaaagtgggcattgctgttttagttatggatgaggctctaaggcaataagtgacagaaaacctacctaaattttcaagcaagtagctcagtgagctaagctcaacttacaaaaaaggtggtcagaaattggattttcaacccttcattgatagccaactcttaagtgtaaaagtaatttaaagtggaacattgagaaagacagaaattagaagtaatgaggtgcatcactgcctatggaaaagggttaaaggagctatttttttcttaccacaagaccagtgaaaaggatttcaagaggacagcttagagagctcattgtcagtcttctggaacttaaagggcacattcaacgggtgtatgactcatgcatgagaaatcagagagcaaaagaattgactaacatcatccatggaagttagggaataatagttggaatttgaattcattataaccaaatgcatgtgcagcagtataaatgttgctgtatccccaaaactattatcgtaaaacttaatccacaaggtgatgatattaggagatagggcttttgaaatgtgattaggacataagggtagagtcctcacaaacaggatcagagcctttttaaaagaggctgggatacctaatgctagatgacgagttagtgggtgcagcgcaccagcatggcacatgtatacatatgtaactaacctgcacaatgtgcacatgtaccctaaaacttaaagtataataaaaaaaaaagaaaagtaaaaaaataaaaaataaaaaaaaataaaaaaataaaatgaaaaaaaaaaagaggctgggaaaatattccttttttgttcattc

SEQ ID NO: 479469 - DNA, 1132 bp, Homo sapiens
ttctgccccagcatgtattacttatatgcttttttgtctaaaaatcactttgtagaaatcaaaggctgtgatgcatttagggatttcatatacattttggtagtggatgacaccagagagtatgaggaagatctagagtgccagaggaatgaaagtattgatattatgttcaggcaaaaaaggggcacggagtgggaaggtggtcttccccggggttgggctgctaagtggctgggctctcctcccagtgccctcagcggaattccccttggcatccacgttgttctgccattgatggcctgccggcatctgttggtgtgttctgctggtgtgttcctctccacgtccagctgctggtgtgtgtgtgtccgcttaaggtctctggcttatatgggcacaggatggggggtgtggtgagcccaaaggcaactttttgtttgtgaaaacagaaaagctggtcctcacttaggaccgtgggcacaggcctgagggtggagcctttgtcagggacctcacccttctctacccagcatttccctgcccccatcctgtatcagtagtatcctagtgccctttaaaacaaatagttcattttgcttgctagcattttttcatttttaatgtatctgttaaaggtttttgctttgtggttaccatgaggcttataaaaacatcttaaagttataacgaagtacaccaatgactcatatacttgctcttttgatatagttctataaaactcattagcttttttcatacattcttattatttaaaaaatttctcctctgatggtcaaatttaaaataatctatcttcctttgagtttttgtactttttaatttaattgatcatttctgctgttgctacttttcattgcatattttatgaattgtattttaaaataattttaatatttctcacacatttctgattttttttattttattgaacttaactaagctttttaaagacaggtgttttgaattctttatcagacaatttatgcatcttcatttctttggaattagtcactgacaccttattttgtctgcttggtggcgtcatattcttccagttgttcttgattcttgtggtcatgaatcaatgtctgcacattgaagaggtaggtac

SEQ ID NO: 479470 - DNA, 4117 bp, Homo sapiens
caattgtccctggagcagcaattatggaaaatgcccaagagggggcaggttgctgttgctcgatccagtcctgcccggaggctggctacatgcatagccccaccatatgtcatggtcttgctgccacagatttagctgcttggaaatgtccaaaggaggtccacctattccattatattgatgacattatgttaacctctaattctcttgcagatttagaggtgactgcacccctcttacgacaacatttggcaacatgtgatgggctgtcaatgaatccaaggtccaaaggcctggattgtctgccaaattcttgggagttaactggtcagaagccccctccccctctccctctctctccccttttccaacttgggacccttcgtgggcagtgcctaaatatggaagaaacttcaggtttctcgccacggccagtgaaactaaaagtctttcagtggctgtttcctagtagttcattggaaattaagggcaattgactggtgccactacccgggtttcactgaagttttaagttgctaaggataaaatttttagttaacatgtaattccgtatccaaaatatgccataagggttatgttattagtaaataaaaataataataattttgtataattcagaagttatctaaaagttagttcaaaatacacatttacaaaggttatttatgaaacaatgtagtaaggaacgattaagtaggggaaaaatgaggaaaaagtttaaataataaaatattctttaaaacctgatagagaattggagatatttggctaattaacattttcatagttaaaactcttagtcttgattaaagtaaaataaaaagtattgtaaaaatacatcggcagtttggaaattctttttttaatatagctaagcatgaagcttgatttagtgtaaagccgaatttcacatacatgcttgcattgcttcacagtgtttactgttttgcatggatagtgctgaagtacttattggtcatgtgcgtaaagtgaatttcttaattgcacagggtgtatgctgatattagtgaatttaaggatattaaattgtgtagcaggaatgaattattcattatgtgggttttttcagggccccaggtaacactgtaacctgtaggtaaattgagtaggaaaatttaggattggtttcctgcatatttgtttttgtctctagttttcatttgtttgctgtttattctcctgtggctttgcttgtgtgtgcatatatataaaaccataattttttttagttcttagtggaaggcttttctttagttatgtgtttctatgcatttccagcaagtcatcattcgttcaatttatctcgaattcctaagctacctttgtcgggcctgcaggaattaatggagcacaccagctttttatccttaaactaagcttttggattttaagcttcctattactttaactgtgttgagtgtactctttcaaacagaatttgagtcatatttctgtctctctgcctaatttctccaaaatttgtaaagtatatgtgaatattctcaattcgcagcaacgtgtttgtatacagtcaagcagggttgccagggccactcaaggagagagaacccagaaacctggcatgcctgcaaaagggtaagaatttcttaccagtcagtctctggcctctttctctctgtgcaaactggttaatctcttctgtgaagttttaaattaattgatttaataataacaggagcttaaatcaaatattttgtcagaaaagtgaaaaatgtaatgccttttatttagttcatgtgacttaagtaatctctggaaaataaagatggttttaaaaattattggtaaaatgcaggtgtcattaaaatgtaaataggtgaaccaaactgtgtaggtcagatgcaaggtttgctgaatgttttaagttaacaaactgcttttggggttttaaaaactatttgacttgcagtctacacagtaggtaaggcctggggacatatggaactaaccacacccttaactaagaaggcaaaccttggctgcagttagcacacaattaaaccaacttaccaaattttatcttaaagctaaaaattgctagcagttaccatcataacttgtaattaaaactactgaaaatagatttacatgcaaggtatgtaaaaacagtaaaatgtgttttctaataaaaggttataagaaggaatggaaatataaatttttgcctagggttaaagaattcttttaaattagataggaaaaagctgaaggttcaaagaagtggtggaaaaattgtgaaaattaatcttgcagaagaggtgtccgtgtgaacacgttaattaaattcaaaaaggttattaaaggtttttacttctttaaaatttctgaagtcatcattttggcaaaataaataatttatggtaatctggaaatccaaaatcaaacttttgtttaaaaattgtctttcctaatgcctggctttttggatggatcagagggtatctgaaaacatccagaaaggaggtaaacaggattatttaacatgtttaggtacatgagaatgccaaaatgatgttcaatatttttaggttatatttttgtgaataatactaatatatgttccaaaattgtatgggatttctaaaattctaatgtctaagtatatgctatcaattatgattatggctattatgttatgttattgtaaaccatagaaataaccaaattttattttcagtgctatgcacctaatttgaaaaaacaactggtatgcaagaggatataagtataattttaattaagcatggatggactcatggagaaccaggatggtcaccttgtccttcctgagtccttgaagttttattattaaaaggtctgcatttcatgactcattatggaaaacataaaatgatccaaattaaatacattggtatagtaacttacaaattgtttaaaatagtttataaccaatgcttaatcccatattcctgggaaaacaattaaagcttcaggtacctttggtcacctgatgggtcatttatacattttataaagggatttcattcaatttttattttctgtgcatgttatctggttgtataaaagctttcctatgcaagagggctgatgttataacaataaattattatgctcacagtgtgttttcaccaggtaaagaaacttttttatgctttaaatcttctggaaacatgagagaaagactgcctttgtcatccacactacaataaaacttcaaaaaccttgggctttggattcatggtctcacaaatgagaagtatccctccacacttttggaactgtgcacccattggaaaccttgagataaagctaaccagggaaatttctcccaagaagaaaatggcacctttgatgtgaataacttttcctaagttcacagatgattaaaacttttactatcaaaaaactcttatctttgaatttttttcttgtttatacttccataaaaaatagaagtggaaaaggggtctgttgtgtgcacttggggggtatacttttaattgtaaagtggtttgcagccagccttacacatggataaacttatactttgataaataaaaaatgaaggcccaatgtatgtaacaaaaactttaatggtacatgtgttgcctcaaaatcagtcaaaaacaaagcattgtttcactcctcttaacccacatcatgggttaaaaagaacattgccagaacactgccagaacaccttcacttttttaaaagggcatcatttgtaggtcctttttccatggtttaaagtaaagaagcattgttaaaaaatgtatccctcatgataggttctgtatgtatccctcatgataaattctactgtaaaggctacagttacacaacagactttaaagtctcttgtaaaagttagggtaaataatagaattggatatacagaaaagtacctgtgcagctgctggcacttgtagcctatggaaatatacatcaaattaaaattataggaattcagtggtaggtgactaatagagtctgcttagttaggtgagcaaactctttatctagctcattctttaatctgtttaattttagaaggtttggtttatgagga

SEQ ID NO: 479471 - DNA, 2016 bp, Homo sapiens
tatctacaaccatctgatctttgacaaacctgacaaaaacatgaaatggggaaacaattccctatttattaagcctattttctacaacacaccacttggcacttgtaaattgcatggcagccctgctatgaggagtagtggggtctctgccaatggcttgccttttgccctggtggcagcagccagtggcagcacccagccatgggcaaaagacttgaaaggctcagaagacaggaagatgtgggaaggtttggaacttcctagagacttgatgaaaggctttgaccaagatgctgatagtgatatggacaacaaagtccaggccgaggaggtctcagatggagatgaggagcttactgggaacatgagtaaagctccagctatggctgaaaggagccaatgtacagttaagggagttgctgcagagagtgcaagccccaagtcttggcagctttcacttgatgttgggcctgttgttgaacagaagtcaagatttaagggcagtgcaaaagacaaatatggggtagagcccccacatagagtccccactggggtactgcctagtgaagctgtgagaagaaggtcaccgtcttccagactccagaatggcagatccaccaagagcttgcactatgcacctggaaaagcttcagatgccatatagaatgtgaattcatgttcatgaagacgatgcaggaggaacttaaattctagtgtggaaagaaaccccaaaaatgtgcaagaaaaaacaaaaaaaaaacctgttaatttgaaataaagatagtgaataaaacaaacaaacagaacagagttaagcataataggaagaataatcttccttgaatgaaatagttggataaatgtatctgagtggttgacataaagctgagaactaaatagcaatatttaaaatttaaggtgtttccattaatacaaaggtgaacattaaatctaaatatatttttacatttgaagaactagccaaatttgaaaattatctatagaattgcttcaaaattgctgacctaatatcacatttggaggaaaaaagcgtcaaaatggcatgactttatcatgtactggcttatcagtgtgaagattattggaaagatactattccaacaatatttttgcaaactctgtaacccatagcaaatacactaaatgtgcacagcctgataaaaattagcacattagctcatcgtgttccagtaaagatttgggattttattttatgcactagaatcttgtgtgtgaaatattctgaggttgaaaatgtacttagtaaaaacttgtcacttataatgtacttgctagcatgtttttaaatctaaaaattctacacttgaaagtaaaaataatagcagcttcattaattccaggtgactagtttacaaattattacatccatttattcactggactttaaattcaagtaagcattgaatcaactctaattttatattcaataattaatacatatattgatatttgtggtatattttaaatgtgaaaataatttataacattagcctgtaagaagctagtttttatttctaaaccaaatgactatgttgaatagaaatgtacactggacttttcaagtgatggtccaactttggaaatttctttaaaaatcaagaatggctactaataaattgcttggtaaaaattctgtatataattacattgaacaaaataataatttattatgctatgcaagatctcattattcctgttattttgtggaaatagatggagaaagggagaagagatcagaaatcctgagaaatacagataaatgtattttctctgattaatcaatgaagattctaataaatcatgatggctatcattcatgcagagccaaccacaatcatacaattaatgacagttggcatttaaatattttttatatttcaagtaatagaaaaaacagtcttgatgtattgtctaacttaatttatttttacaataattataagtaataggcaatactgtcaccacaattttaca

SEQ ID NO: 479472 - DNA, 994 bp, Homo sapiens
cagccatatttacccaatacccggaatgtcagagaccttcacagcagcccctcccatcacacacctggaagtttaggagaaataaacggtatcctgggtcaggcccagggccctcttgctgtgtgcagcctaaggacttggtgttttgtgtcccagttgctccaactttggtgaaaaaggtccaagatgtccagtcagaagtttgctgcaggagtggagcccccatggagaacttctgctcaggcagtacagaaaggaaatgtggtgctagacccccacacaggactccagaatagtagatccaccaataacttgctccgtgcacctggaaaagccacagacactcaatgccagtccatgaaagcagacagaaggggagctgtaccctgcaaagccgcaacagcggagcttcccaatgccatgggagcccacatctggcatcaatgtgacatggatgtgagacatagagtcaaaagatattattttagagctttaagatttgactgccctgctcaattttggacttgtatggggcctgtagcccctttgttttggccagtttgtctcatttggaatgggtgtatttacccaatgcctttactcccattgtatgtagaatgtaactaacttgcttttgatttttatcagctcatacatggaaagaaattgccttttctcagatgagatgttgcactgtgaacttttgagttaatgcagaaatgagttaaaactttggggaattgttggaaaggcatggttgattttgaaatgtttatagtattttccaagtttgctggatttttaaaattgattctctgtctgaagattctatgtattattgaaagtggggtactaaaatcaattactactattttattgctatcactttttttcattcagatgtcaatattttttctatatatttaggtgtcctgatttggggtgtatgtatttacaattgctatatctccttccttttattattatatgataa

SEQ ID NO: 479473 - DNA, 691 bp, Homo sapiens
tgaattgtagcatgaattatatttatataagatttattgtgcaaactgcattttatatttttattaaaaactcagacgacaaaaaagatacatctgaaaagggcatgaaacctgtaaggcgagtaagcaagcttacaaaagcagaacaaaggcagtttatcagtgacaggttttataactcaggcatgtcttgtgacctttgccatactgcacagctggaaaacaggaacttacaaaatccttacaagcttgcagaaatagttatgagaggagaaaaaaggaataacggagtggggaaagaatttcaaagggaacctctgagagacttgctgaatggctttgacaaaaatgctgatagtgatatgaacaataaggtccaggctgaggaggtatcaaatggagaagaacttggagaatctgatgactatgtgtcctggggacggctatcttgtgcagtacctttcaggggttctctttacttcctgaatttaaatattggcctctctaattataaacctgttgtgctagagaagctgaaatgtccccagtccactggccacaacactctgatgggtgattccagccaagccacttcatcagggcagtgacagcgggatccattctcccttgcacatgccagtagccgtggcagtgagaaataaagagttcagtgcacatatttacagtgcca

SEQ ID NO: 479474 - DNA, 614 bp, Homo sapiens
aaaagtcaattaatggaagcagcccagatattcttcaatagtttcgcactggcaactgtatcagctcagggacatgcttctggcagaggcagagctggtgagttccatgcctgctaatgctctgatgacaatggtgatggagcagggcaagtggatgagctatgatgctggctcgcagaaggtacctaggggctgcactgtaagcagacatggcgaggctggggccctgagagaggccagcctaccaaagggtgctcaggttggaccagcccctctcatgggcaaaacatccctgcagggttcaggtgcacagttcaagctgtcaatgtacctgccagtctggggtctggaggagagtggtcctcttctcacagcccccctaggcagtgacccagtggggaatatgtgtgggggctccaaccccacatttgttctccacactgctctagtagaggttatccatgagggctctgactctgcagcagactttttcctggacatccaggcatttctatacatactctgaaatatagaatgggggtgttatggggagaattggtggttgttaaaatgccagcttttagtagtctggtgatgatgggttttattcccct

SEQ ID NO: 479475 - DNA, 663 bp, Homo sapiens
ctgttctaaagacattttaagtaaacggatgatgcaagatttttctcagccccttcactggactcatggcagggacatcctctctacttggcccaccttgttcaacctcttacagaagctctgtgtggggaccacagccagaccatgtgtgtcacctcaagaggagtggagtgatgccaatgtgaggatgcccatgaccctgaatccccagagagtgtgtgacattgcttctttagttcctttatccacagacaagattgtgttagcagctcagttggccccttgcctcattgcattgggcagcttaccttcacccacaagggcaaagggctggtgtgacagcatttctgggtacccacactcagtgggtcctgagctcttatctggaatccaagaagaatgagatcacatggattgttgaaggatgcttaaggtggagaaattttgagcaataaaaacagctctcagtgaaaaagggagatagagaggggacaggaaagacaggtcgtatttcccaaagtcaggttgtctcttccccaaagtcaggtcatctttccctccacttactgagtctggggtctttataggcataggatggagagtgcatgctgattcatttttaaaacaagttgaggcataactggaaaactatttttacaagag

SEQ ID NO: 479476 - DNA, 807 bp, Homo sapiens
tctgaattcttcagcttttggactcttggacttaaaccagtggtttaagccagtgacttaaaccaggggctctgggtcctttggccgcagattgaaggctgcactgtcagcttccttacttttgaggttttgggattcgaactggcttccttgctcctcagcttgcagatggccttttgtgagacttcaccttgtgatcgtacagcagcagcagcagcagcagcagcagcagcagcagaagaagaagaagaagaagaagaagaagaagaagaagaagaagaagaagaagaagaagaagaagaagaagagaaagaagagaagcagcagcagcatggcatagtgcctggtttcatgccagtggaagtgttaccacaggggcggggtgctgttgggctttgtgcccaccagtgttccaatggcagtggtggggcagtagggaaaagggacgcattgtgcactcatgccagcagcagtgacacagcagggtacacacatacatggacttgggcagttctactgcaaaggcagtggcagagactttcagttgtccctgaaggttctgcccagggagttgctgagttgctactggctcgatagctcttgcatgatgtggctggaggccaaggcttggaggacattcctggtgaggagatatgaaaacaaacatgtacctgatttctttttttttttttcaatttggatgcactttatttctttttcttgtcagattgttctagctctaggtacgacttccagtactgtgttgaaaaacaatggtgaaagtgggcaaccttgttgtgtaccaga

SEQ ID NO: 479477 - DNA, 608 bp, Homo sapiens
ctaacggagaagctttgccacataagaggatggaataccaaacttcctatggatcaggctctggagagtttgatgtcctgaaaggagagttaaggcaagaggttgaggttgcagcattttggtcaaagccattcaacaagtctgcaggaagtttcaaactttcccacatcttcctgtcttctgagccctctaagtctctaggaagttccaaaatttcccatattttcctgtcttcttctgagccctccaaactgttccaacctctgcccattacccagttccaaagtcacttccacattttcgggtatccttatagcagcaccccagtctaccactacccagtctatggtattttgttacagcagccccaacggactaagataaagtttttatgtgaagctatttataatgtaatcagaaattgctgcatagcaagatatagctctgcttctagtggcacttacattacaaactcattgagtgaatgggatctgagaaccaagtctctctttatctcctgacaccaaaaacctgaacatcctccagcggtaataattccaccataaaagtgggcttttatgacggttttgaccagttagagcaatagc

SEQ ID NO: 479478 - DNA, 841 bp, Homo sapiens
ctcacactgttgtgcagtggccataagatcaggtattgccagtcaaccatgagtggaactgagtggaccatgaatccaattgatgagtggactgtggaatatgagaagcaatgttgtgttattctcagtgcatatcaggaggcagcttgtcccattattgatgatgctaccttgaattacttggttaaggagaggctggtggtcagccctggggtcagtaaccacaagaagccgtggctcccggaaggctgcctggatctggttagtgaaggttccaggagtgaagtggccagcaattggagtggctccagtggcagcagcaaacttcagcacagccctctggccagtattcccggaggatataacactgacatcagcagggttttcaatggcaacaacagcacgagctgccagcagaaacttctcccaggtcctcttcagatttatgatatagatgccatcacttttccttttatagatgacatcaagggctccggacattgtgaaagtttccctttaagttacgatgggaatccagaacaacgccatatggacccctctgtaggtggaaagcaagtgaccccagatagtaatccaaatccacaaacacaaaaaccaaagagcactggggaaggatcaagagggaacaccataggtcatgagtctcttgcctacttccaaggggccagatagctgctatggccactggaagcacatggggggctcttgtccctaacttttaagatcattaggatggattaaagagggcttagttagctttgggccccaacccagggctcaaacacagtaggttaatcactctacagataagtgacatatc

SEQ ID NO: 479479 - DNA, 1372 bp, Homo sapiens
agctcatgataaaagttgaatggatgaggagttgcttcttatagatgagcaaagaaagtggttttttgagatggaatctactcctggtgaagatgctgtgaacaatgttgaaatgacaacaaaggatttcaaatgttatataaacttagtcgataaagcagcaacagggttggagtggattgactccaattttgaaagacattttgtggataaaatgctatcaaacagccttgcatgctacaaagaaatcttctgtgaaaggaaaagtcaatcaatgtggcaaactttattgttttctcattttaagaaattcccacagccaccccaaccttctgcaagcagcaccctgatcagtcagcagccaccagcattgatgcaagactctccaccagcaaaaagattacagctcactgaaggctgagataatcattagcattttttagcaataaagaattttttcattatttcatttatttattagcaataaagcatttttcattttttgttttgggcataatactattgcacacttaatagactacagtatagtgtaagcatgacttttatatgcactgggaaaccaaaaaatttgtgtgatttgctttactgtaatattcacttaattgtggtgatctgaaaccaaatccacaatatctccaaggtattcctgtacttcttgattgactagttcagttcctcttctaaagaaggatagtgttggagtggacactgttatttgcctacacaatgtgagctaaggcttgcattacctttgcacatggcacaggttgagtaccctgtatctgaaatgcttgggactagacctattttggatttggaatttttttcagattttggaatatttccatatacataatgagataccttagggatgggatccaagtctaaacatgaaatgcatttgtttttcatatacaccttatacacatagactgaaggtaattttatatactattttaaataaatttgtgtataaaacaaagtttgttttcaatacttatgtgtggaattttccactcgtggcattacatcaatgcattttggagcattttggatttcagatatttagattaaggatactcaactgattggtccctggtgccttatttacttcatttggtgaggtcacattttcctggactgtcttgatacttatagatgttcgtctgtgtctgggcattgtagtctttgtagtctgagcttgtttgtacatgcccttcttggaaaggctttccagatacttgaaagcacttgagtgttgtgatctaatctgtactgctttaggggggactccaagcccagtaacagtgtggttcttgcagactcatagaggtactgccttgatggtctt

SEQ ID NO: 479480 - DNA, 845 bp, Homo sapiens
gggtgactataatagtcaaataggaacctccatactgttttccgtaatggctgcattaatctacattctcaccaacagtatacaagagttcccttttctctacacctttgccaacacttatctcttcgttttaataatagccatcttaacaggaggaactagtggaccccagtgtcaactgcttcaggacaatctagaaggctacaaacctgtgcagcatgtgactctactgaatactgtagacaactgtcacacaatggattttgctagttggcatcacagagagttggaaatgatagatttacaccggattaaagaaagaagaggttttttattcggctgggagcgtcagcagactcgtgtcttaagagccgagctccctgaaaaagaaattcctagcccgtttaagggcttacaactcttaaggggtctacgtgaaagagtcataatagatcgagtaagcaacagagaaaatgaaagactgccaaacttgcccttggatatgaccactatcaacaatttggtgcacattttatttaatattaagcaaaaccactattaaaatttggtgcatattttattggtgcatatttccactattatcaatttgcgcatattctatgtaatattttatgttgctggatttggtttgccagtatttttttgaggatttctgtgtctctattcataaaagatgttggtctatagttttcttttcttgtaatatctttgtctggttttggtgtcagggtaacactggcctcatagaatgagttaggaagtgttcccttctcttctattttctaaagcatttgtaaaggattggtgctaattcttctttaagc

SEQ ID NO: 479481 - DNA, 680 bp, Homo sapiens
gttaggagcatgggttctgtcaccaagcttgtggtgatttgttatggcagccctgggaaaccaatacagacagcatctaagggaagagagctaaacagagagaatagcaggtgcaaaggctctgaggcagatcttttgcctgcctgcttgggaaagagcaaggaggtctgtgtgttcgggatggagggagtgatgggttttctgcagctgaagcagaagctgaaggagttaacaggtggaagttctctgctaacagcactttccacagctgggcagcatgttcttcctggaagaggagggatagtgtggtttggttctgtgtcctcaaccaaatctcatctcgagttgtgctctttagtgttggaggagaggcctggcaaccgtgatcttgatggatctgaaaactgtgacacaggaagaatagttgagtgtgtgtatccattcaccagttgattgacactttgattcttgccaatttgggaataccattaacaaagctgctatgaatatttcagtacaagtctttgtgtgaacatatgttttcatttctcttgggcatatacctaggcatgggatcactgcttcgtatgagcttcattttgggatttctattgctaatcttttcttctgcaaagtctaatctcccatgaatcacatttaaggtatttttcatctcacct

SEQ ID NO: 479482 - DNA, 1218 bp, Homo sapiens
ctgaatttgccctatgtcgtaaatagaggttaaactaggaaccaagaggcctgatctggcttctagtcttgtctcaaacatgacctgccgtgggaggttctttccagctcattggatcttggtttccttcactacgaagttactgattaaaagtggaattacagaatcagaagaaagaaacacttttaagactgctgataaatattgtcaaattgctttcataaaaggaattcttatttttctttccattgacagtataggaacacaaaaacatccaatcatcaacaaagtaaaattcacaatgtctagcaaccaatacaaaatgatcaggcatgcaaaaatgcaggacatagtgacccaaaatgaggagaaaaataaattcatcaaaacatatccacgaatggcagagaagatagaattagtagataaggatattaaaacaattataaatgccagagataaaactgcaatatttgagatgaaaaaaactctggatggaattaacagcacattgaactttgtagaagaaaagattggtgaacttgaagacatagcagtagaacgttaaggaaaaaatgagtgtgtaatataatatgatgcacttttatgaaataaacgatgacaaacactcatatgtttgtatgtgtgtatacaattacgtaagcttggtaaggatacacaccggatagtcaacatgacgtttctgtgtgcacatgtgtgtgtgctcgtgtgttggaggggtaattgtgggacagttgcatcaagctttgttatatgctattcagtataaagaggtcctagacatagttttaatactttcaagtactttaaaaaaatcatgcttggattgttttatcttattttttgagatggtttgaaggaaggagaagggagagatttatgagctccctaatattagttggaagcagtaattgtttctgaaaatgatgaaatgatgtctctagtataatatagcaaaagggaatttccaggtggagaaaaaataaactgaatgattcaccagagtaagaaagatgcaaaaactttattttctttagactatagcaaatcctctattactcaacctagttgcacaaagttaccaactggttaccaactttcaaatcatttgagcatagtaaaatatgtttaataaaattatagtcaatacactattaaaacattttattctgaaaattttcataaattcatacaagt

SEQ ID NO: 479483 - DNA, 702 bp, Homo sapiens
tgatcaatgatgttgagcggcttttcgtgtgcctgtttgacatatggggcaccccaagcccagtaacactgtggttcttgcagactcatggaggtacaccttgatggtcttggacaagatccagaagaattctccagattaccaggcagagacttttgttctcttcccttatgctcttccaaacaaacaaaatctctttctgtttggagccacctggaagtgggagtgttgtgacacaagcatccctgtggccatcacccccaggactacactggaagtctacttagtgttctattatactgtgactgagctcacactcaaaccacaagatgcagtcccttcccactcttccctccccttttcaaaggcagaggagcctcaccccatggccaccatcaccagaagcccatatagaagggaaagggttgcttttggagccacaagctgtacattctggggttagggatagggtgatgccagcactcctttagccaccccagctggtgtctcagtaggtcatggaacccccagtccactgtctctgagcccagttcagcagtaggactcacctaaggtttgcttgtctatttagggccctggaacactttagcccatggtggtgaggcttgtgggaactcagggaagcactgactagattgtctcacagttgctgccatctcctgctccccagcatacagaaac

SEQ ID NO: 479484 - DNA, 907 bp, Homo sapiens
atctacaatagtgatgttatccacagaagtaattgggaaagttgcatatcttgtggaatatctctggaataagggctgcctgggagacaagagtgaaactccatctgaagaagaagaagaagaggaagaagaagaagaaggagaaggagaaggggaaggggaaggggaaggggaagaagaagaaagaagaagaagaagaagaggaagaagaagaagaaagaagaagaagaagaagaaagaagaagaagaaagaagaagaagaagaagaaagaagaagaagaagaaagaagaagaagaagaagaagaagaagaagaagaagaagaagaagaagaagaagaagaagaagaagaagaaagaaagaaagaaagaaagaaagaaagaaagaaagaaagaagacagattcactcatcctttatgccttttaggttgggtttgaccttggaaagaaaagttggagcagcacccttcaaacaaaaggggcaacacattcacggacaaggcaactattcaaccgaagttttacagtctccctcaactgttctgctagtttcaatcactgatggtttaaatgtaaccgtccattactcccagaaggatgttatttcatctctactcatttctgatagtttcttctccttcttgtctatgctgcagtctacatgctctatttaccaggtacacaaagtagatgacttttaccatagtataatggtatcagttcaggtcctctggtaagcagacatcaaggacaagttagcagtataagatgtgtattggggagtaatgcctgtgaaaaatgactggagagaaagcaggagtagacatagaaagtcatagaaagatcatgatgccaatcagactcgtgattgagtgtggcttttgttgcaggaaaaaaaaatcagactc

SEQ ID NO: 479485 - DNA, 809 bp, Homo sapiens
ttctcctcggaaggaaccaatcctgccaacaccttgatctcagacttctagcctctagaactctgcagcagcatggcagcatacatgcttatcagctgtggcagggcattggcagttgtggggctaccagcctcagtgcaggtgttcacagcagtggcagtgccagcgttggctgaggggcagggccactcgagtctattcacacgtttgcactggcagtggtgtcagtgcagggtcaaagcactggtatgtgcaaggctggcagcaccttatgcacatattcatgctagcagcagtgtcaatgcgggacctctggcctctgtgcatgcattcacaccagcagcaatgacagcacaagattggagtgtggggccactggcctctgtgtgtgcatttgctctggcaatggtggcatggttgagtcggggatgggaggacagtcacaatgatgggacttttaacaacagacaaaaaaaacccataggcttctctatctggattatcacaaaggggaaagatctggaaatgactgttcatcaaagctatgattgaaggagcgactgcttctcagttgtgtcatttctccttgcatttttcagagtagcaacatagtatagcggttcagaaccactgacggaaaaatacatttccctgatacattgactttgggcttgtccatgctttggcctttaagtgggacaagttattctctatgtcccttgtgtttcagcttgaccacgtaccttgctttagccaacgatataatagtagacgtgatgcaagcagagatgtgaaatgtgcttctacaa

SEQ ID NO: 479486 - DNA, 738 bp, Homo sapiens
ataccagtaccatgctgctttggtgactatggatgtttggtatagtttgaagtcaggcaatgcaggcttaatctactcagacagaaatgaaaagggtgacactactgtgaactgggaggacaattccactggggattgggaggctgcttccactggatgtggagaaagctcttctactggcaaagaagccttatcagaatataggggctcaaagtccccagctttatcagggtcttctcagacatcttcattccaacttacaggatcccattctttaccattcaatgccctcactttaacagtagatatcctgcgaggctgggagttaaatttgcattgtaattcagccaatctcaggatgaagtcctgcattttatttccagcaatttcagccctgcagctacaggagatcaggttctcccttggggcatacctaaaagctcttaaattagagagtcaattccagaaaccccagaatcaattcagaaaactcatctttaaaattatcttcctctaaaatcactgtcagtaccaaaatttgtattagccagtattcttcagagaaacagaaccaactggcggggtgggagggaggaagagagagagagagagggagagggagagagagagagggagagggagagagagagagagatattattatgggaattagcaaattagttcatgtggttaaggaggccaagaattcccatgaactgacatctgcaagctggagaa

SEQ ID NO: 479487 - DNA, 618 bp, Homo sapiens
ttttcaagttttttacctggtgtttacttttgtcacctttgtcaaagatcaggtggttgtagatatgtggctttactttcgggttctctattctgttccattggtctatgtgtttatttttgtaccaaattcacatgctggctgtgacagagaggaatgggatggttcctgggtcaccagcagaactctcaggcaggggcaagaagaatgctcaggcagcagcagaatgctcaggtggtgggaaccccagaaaagatcacaggcctatggggctaggctctcagaagggctccagaccactgctgaaatggtcagcactcttgatgctcgatgggatggctattcccatcaaacttcgccgctcccctccccagctcagataaatgcagaagttccaccagcttctcagctgcagttgaagggaactcactcaacttagagtggtgggtgctgtccatgcccgactgtgttttcaagaaaagtgatgatttctgaggtctaattcagagctgggaccaggataaagccctcactgatcccctgaaagaagccaatataatgtaaacaaagctcatttaatacttgtgggtttcaaaatgagacatggctcaacatcaa

SEQ ID NO: 479488 - DNA, 536 bp, Homo sapiens
caccacatcattctgcaggtcgatggtctgctggcgtctgcggatgtctgtcagtatgctcttctgttggtgtgttcctctcaacatccagcctcttgtgtgcttttctgccagtgtgttcctccgccagtgtgttcctctcaacatccagtcacttgtatgttcttccaccggtgtgttcctctccatatccagccacttgtgtctctgccctctagggtctcagggtttctataggcacaggatggggtcatggcgggccagcatggtctttggaaacgcaacatttaggcatgaaaacaggagtgtctgtcctcacctgggtccatggaagtcacagaagcatcacattgttttgcattttattcataagaagcaagtcagtcaggccacaccatattcaagtagaaggagatttgactttgcctctgaatgagaggtgtatcaaagaagttgcagacatgatttaaaaccaccactcttctcttactgataaagacaggaaatcgtgtagttaacttcagctgctccgatcg

SEQ ID NO: 479489 - DNA, 756 bp, Homo sapiens
acacaaagaagccagagggattccagtaaagggcaggggcaaaatgccaccagtctttttgctaaaacgtaacaagagttatgctccagttcccaacaagttcctcatctccacctgagaacacctcagcctggatttcattgcccatatcattatcagcattttggtcaaagccattcaacaagtctctagggagttccaaactttcccacattttcctgtcttcttctgagccctccaaactgtttcaacctctgcctgttacccagttccaaagtcacttccacatttttggatatctttccagcagcaccccactctactggtaccaattcactgtattaatctgttttcatgctgctgataaagacatacctgagactgggcaatttacaaaagaaagaggtttattggacttacagttccacgtggctagggaggcctcacaatcatggcggaaggcaaggaggaggaaaatgctttccacttttcctgttcaatacaatgttgtctgtgagtctgtcatagatggcttttattatcatgagaatggaagtgatttggatattgttatgtgggatattaccttgatgcaacagtgacctctaagtagcatgcatgctctgtcagagaccataaaacagaaaggcttatgggccaaattaaaatatgcaaatcacacaatttattgaaccaattgaaaatgcaagctgtcatttagggctagatttttaaaaaacattccagtgctactca

SEQ ID NO: 479490 - DNA, 514 bp, Homo sapiens
ctccaacagacctgcagctgagggtcctgactgttagaaagtcaccaacatcaaagaccaaaggtagataaaaccacaaagatggggagaaaccagagcagaaaggctgaaaattccaaaaaccagaaagcctcttctcctccaaagcatcacaactccttgccagcaagggaacaaaactggacagagaatgagtttgacgagaaggtgggtaataacaaacttctccgagctaaaggagcatgttctaacccatcacaagaagctaaaggccttgaaaaaaggttagaggaatggctaactagaataaccagtgtagagaagaacataaatgacctgatggagctgaaaaacacagcacgtgaacttcatgaagcgtacacaagcttcaatagccaattcgatcaagcagaagaaaggatatcagtgactgaaaatcaacttaatgaaataaagcgtgaagacaagattagagaaaaaaaaagtgaaaataaataaagcctccaagaaatat

SEQ ID NO: 479491 - DNA, 733 bp, Homo sapiens
gattaataacaaccaattgttcaaggatggcttacctagatgtttatgaggacaaggggcttagagaagcaggtctcaaatttgaggccacaggaggaaactccgggatcctacataaagaccgcaaatgtgacagctgcaggggcacatggctgcagatgactgcagactctggcagcatcaatgggattgtggctcctagagtcccactcagcagtagcagcagcagcctccgaggaggatgggatgacaagctgagaaggagacccccatgggccctggatgaataccagacaaatgacagccctcattatgagaagcaaaagtttaaaacactggaagatatacagaaaatcagcagccctcctagtgccctgtggcttttatttttctttgctgctaaagaggctgcccacgtgttctttcctctacacattgccgtggatatatcccacacgttgtctatgaccctttacacagaggctacagcaaaagtggtctataagcgctgccaaaagctgttctagtacagcatcaggacagaatcatataacctctaattcttccccttattattctttgtattttcaataaacttgcaaaagacgcaagcacaaagtgaagtttgttccagttttactctccacagaaataaacttacctaaagccatgaaatcaaagcacaatccagacttcaatcctattttcaaatctgaaatattacaatgtgggg

SEQ ID NO: 479492 - DNA, 583 bp, Homo sapiens
ctccaacagacctgcagctgaggaacctgactcttagaaggaaaactaacaaacagaaaggaatagcaccatcatcaacatgaaggacgtctacaccaataccccatctgtaggtcaccaacatcaaagaccaaaggtagataaaaccacaaggatggggagaaatcagaggagaaaaactgaaaactctaaaacccagagcacctcttctcctccaaaggatcgcagctccttgccagcaacagaacaaagctggacggagaacaactttgacgagccgacagacatagacttcagaaggtcggtaattacaaacttctccgagctaaaggaacatgttcaaaccgatcacaaggaagctaaaaaccatgaaaaatggttagacgaatggctaactagaataaacagtgtagagaagaccttaaatgacctgatggagctgaaaaccatggcacaggaacttcgtgatgcatgcacaagcttcaatagctgattcgatcaagtggaagaaagggtatcagtgattgaagatcaaatgaatgaaataaagcgagaagacaaggtttgataggtgtacctgaaa

SEQ ID NO: 479493 - DNA, 693 bp, Homo sapiens
ctgttagatatacacggggttggacaaggggcaagtggagctgaaatcaagccaagcatgttccatttgccaagccctgtgcccatggggctgcatcttcttgtagacttccagtactatgttgaagaggagtggaatggcctgctaggggacccagccagctcccagggcctttctgctgcttcctctacccctgtatttcactcggctctccagattgactcagctccaggtaaagtcggaaacttctcccgcaaacagaccttcagcttctccagtgggggtgtgtgttctggagaagagggtctccctttcctacttccacagttggggcactcaaagtttctgggggttgtcctgggtcctgcagtcacagtccacctccttcagagggtctgtgtgtcctctcaggattgctgccctttcaggttcttgatgatattattattcactgactgcagtgactgcaggttctccatctagcctccttagggtgctcatcagtttgagctcagagattatagaggtcgcaactaacaaagcaggaaaatgtaactctaaatatatttataggatgcctaaaccctgcaaaaattgtccatttcaacactcattagaaaatgaccaataagaaacagatctcaacattgcaatgatataactttggaagactgatagaaataagttgggctt

SEQ ID NO: 479494 - DNA, 1119 bp, Homo sapiens
ctgaattttttctttccaacaagagagacaccatctgagatggggccgcaagtggggcttggaggatggctaggagagacgttcttcgccgagagtcgtcgaggtttcctgcttcaactgtgcttggacggaacccggcgctcgtcccccaccccggccggccacccatagccagccctccgtcaccttttcaccgcgccctcggactgccccaaggtccccgccgccgctccagggccgcgcagccaccgccgccgcctctccttagtcgccgccttgacgaccgcgtccacctcgcaggtgcgccagaactaccaccaggactcagaggcggccatcaaccgccagatcaacctggagctctacgcctcctacgtttacctgtccatactgtgatgactgggagcgggctgaatgagatggagtgtgcattacatttggaaaaaaatgtgaatcagtcaccactggaactgcacaaactggccactgacaaaaatgacccccatttgtgtgacttcattgagacacattacctgaatgagcaggtgaaagccatcaaagaattgggtgaccacgtgaccaacttgcacaagatgggagcgcccgaatctggcttggcggaatatctcttcgacaagcacaccccggggagacagtgacaatgaaaggtaagcctcaggctaatttccccatagccgtgggttgacttccctggtcaccaaggcagtgcatgcatgttggggtttcctttaccttttctataaattgtaccaaaacatccacttaagttctttgatttgtaccattcctgcaaataaagaaatttggtaccccccccccaaaaaaaagtaaatttcaatagaagattgttgttttccttgaataagaagctgaaattgtggagtgaagtttttatttggtttaatttttatgggggtttttattttttaatttttattttagattcagggggtgaggacatatgcacaaagaggtcaaatatctttctgagttgacagagcttggctggggatggtagtctcaccttcccctttgtctttggctctcttcagagatatgtctcctttcaggcactcaagatgtttcttgtgggttgaa

SEQ ID NO: 479495 - DNA, 514 bp, Homo sapiens
cctgactgttagaagaaaacctaacaaatggaaagcagtagataaatccacaaaaatgaggaaaaaacagtgcaaaaatgctgaaaattccaaaaaccagaatgcctcttcgcctccaaatgatcacaactcctctccggcaagggcagaaaactggatagagaatgggtttgacaaagtaggcttcagaagtttagagaagaacataaatgaactgatggagctgaaaaacacagcacgagaacttcgtgaagcatacacaagtatcaatagccaaatcaatcaagaagaagaaaggatattagggattgaagatcaacttaatgaaataaggcgtgaagacaagattagagaaaaaagattgaaaaggaatgaaaaaagcctccaagaaatatgggactatgtgaaaagacaaaacctacgtttgattgaggtccctgaaagtgacggggagaatggaacaaagttggaaaacacacttcaggatgttatccaggagaacttcccctaacct

SEQ ID NO: 479496 - DNA, 540 bp, Homo sapiens
agcctaacgtcctatttctgatgcctttcaattttcaaaagcattcagcatgccaaagtgccatattttggaaaatcatgttctgcagcccaacattctctttcctgaaacttccctggacaaatcaagaacctcattttttacagtgaatcctgggaccttaaaaaaaaaaaggaaatgccacaggaccaagctgtgcaacacttccacagggtacctcacggcacctcacggcaaaggagggaggttcagggacacaagaggactcaccaatgaggtcctgggctgttggggagacgatggaacacaaagggatcctacaggtaccatgcttgaatccatggcagtgccagaacgcaggggaaaatatttgaaagaacttgggtgttgtgatctaagcagtatctactttagggggcaccccaaacccagtaatgctgtggttgtttcagacttgtagagataccaccttaatggtcttagacaagatccaagagaattctctgaattacccagcagagcctcctgttctcttccctt

SEQ ID NO: 479497 - DNA, 637 bp, Homo sapiens
aggtagataaatccatgaaaatgaggaaaaagcagtgcaaaaaggctgaaaattccaaaaaccagaatgcctcttctcctccaaacgaagaacttcgtgatgcatacacaagtatcaataaccaactcaatcgagtggaagaaaggatatcagagattgaagatcaacataatgaaataaagcatgaagacaagatgagagaaaaaagaatgaaaaggaaagaacaaagcctccaagaaatatggcactttgtgaaaagaccaaatctacacttgattggtgtacgtgaaagtgacagggagaatggaagcagattcaccaaggttgaaatgaaggacaaaatgttaagggcagccagagagaagggtcgggtttctgacaaagagaagcccatgagactaacagcagatccctctgcagaaaccctacaagccataagagagtgggagggtaatattcaaaattcttaaagaaaagaattttcacctagaatttcatatccagccaaattaagcgtcataagcaaaggagaaatagaatcctttacagacaagcaaatgctgagagattttgtcaccaccaggcctgctgtacaagaggtcctgaaggaagcactaaatatggaaaggaaaaaccc

SEQ ID NO: 479498 - DNA, 1016 bp, Homo sapiens
gggcaccgaggcttttccatcttctgcaatataggtccctcccacaacatgcggggattatgggagctacaattcaaaataagatttggggtacagcccccctcgtggctgctttcatgggctggcattgtctgcggctcatggtgcaagctcttggtgggtctatcattctaggtctggaggacggcggccctcttctcacaactccactagtcagtgctccagtggggacactgtgccttacgtggaaaattgatacaaagaaaagactgaaaaatccattctggcaagcacagaatgggtgtgctggcagcctcatcagttgtccagcaccagtgatgtctagatccagcagtggtggcagtaatgtcttccagtacttctgtggtgtagctctgatgcctctctgcatggttcttcagccctcctggaatctcccctggcaaatccctggtggaagtccaaaaattcgaaagctgaagaagttggtgtctgatgttcgagggcaggaagcatccagcatgggaggaaagatgaaggctggaagactcagcaagtctcctcattccactttgttctgcctgctttattctagccatgctggcagctgattagatggttcccacccagattgagggtgggtttgataatttgatgctacaaaacaaactgcctatccaggccttttgcccatttttaaatttgattatttgatttttgtgctattgagttgtttgaattatttacatattctgtatatcaagtctttgccagagacatagtttgcaaatactttctcccattccataaggtgtctcttcactttatggattgtttcttttgctgtgcagaagtttttaaatttgatataatcctgtttgtctattttttgctttgatccctgtgcttctgaggtctttttctaaaaattcttgcctagtcctatttcataaagtgtttcccttattttttcttctagtagtttcaggtcttacatttaagtctttagtccattt

SEQ ID NO: 479499 - DNA, 1141 bp, Homo sapiens
cagccaaaccatatcagactactggccacaacactctgaagaatggtgccaaagtgcttcattgggcagtggcagcaggatccgtgcccattcacatgtggcagcagaagcagcagcacagcagggtgcacactcgtcagctggagcaaggcgctggcaagcttggggctattggcctccatttgggcattggaaacagtagactcagtgccgggctggaagggtgttggggcacaagtccacttgtattcatgtgtcctgctggatgaatacatcctttggattcacgctggcagcagtggtggcgtcgtgaagggtatggggctgctggtgtccccaagcatgtttctgccctcaatgggaatgggcatctctggccatgctcccctgcagacattcctgtaccaaaccctctgggctccacaccggctggaatcctgtccctaccacctctctaagcagctctccctgacagttaaagtgtccgtgggagttgtggggtatcctgctgccagaatgattgaagtacatggcaagagtgagttgttcctcgcctgctcaactcaccccttcaccggaagacttaatggacagttgagtcattcagtagaagaagtcccgattctttattgactgcatgaagcataccataatatgttattgagttgctcttattttaaaattgctcattacaacagccaaactgtactgactacttcagggatggaccaatataccaatcaaactgtgcttcattatgtaattgcaatagaaaaaaacaaagattaaggggccttgaagggcctaactagtgaatctttcaaatcgtgtaaaaagtttgagctgcatttatatttaaactaactttggcggggggcatgggcaatcaagtatatgtcatagcggctttacaagtagactttgcatgtagaaaacagaaaaggaaaaagtccatatagttttcaaataagttatagaactttaagagttaactatgtacaaatacatgtataatgcaaaaggcatgctcacacacgagtgcaaatattagaataaacattttcatctatttgaaaacatatcctttctacaaatgatcacgtgacaggaaaagttgagtgataatatctggggaataatc

SEQ ID NO: 479500 - DNA, 628 bp, Homo sapiens
tctcacgagatctgatggtttcgaaaacaggcgtttctctctgcacaagctctctctttgcctgccgctatccacagtggtttgtgatgttcatatgctcgcaattgcaccagcagaaaagccaggaagtgggagccggctctcagcacaaggagcatctgcgatgtgctggggctccacgtcagcccccagttgcctcggaaactctgaagccagaaggctgttatggttaagtcgtgcaaacagccaagatggcagcccacccctccctctgggagctctgtcccagggaatcctgaaacctttgtcaacgggtgaacactggcatgtccagagatgctgtctgggagccagtgattggagtagaaaaaccacagcagtttacctgatgttctattctactgtggctaagctgacactcacgctacaatacaaggtccttcctgctcttccctccacatttcacaggcagaagaacctctctctttggcaactaccaccaccagtccacaggttttctgccgggccacttctgatgttcacttaaagtccaagagttcttctgtcagctcatggtgaatgctgccaggcctaggacttacccttgaaggcagtgcgctcccctctg

SEQ ID NO: 479501 - DNA, 473 bp, Homo sapiens
cctgaagacagaagacaagtgttacagaatgttacatcttcctttagacacccacagagaaaacagccaaactgagtcaccttcagttgtctgctgtctgcccacttgttctccatttgtgctgcccaatcctcaacttcaggcttctccacattccttggtgcttgcatcacacaagctagagatcaggtggaactgtggaagtagggaatgggaaggtgaaagatttcaaaggcaaggctggatggtgtcgctcattcaaccaatactgaatgccctgttctctctagaaaagggacctcttggaaagacttacattttgagagagcaaacagcaaaaaggaagaaagaggtgccttttgacaagtgcattggaaaaggaaaaatacttaaaaaggagaaatttaggatcatgctagccaaatacaagcaaaagaataaatgaaagaagcacaacaaatctccaaaaattc

SEQ ID NO: 479502 - DNA, 773 bp, Homo sapiens
ccctggatgatatcctggaagagcaaaaggacactaagttaaaacctaaaacttaaatcttagatggcacttctgggcattccctgggccagaagggagactactaccctgaagggtgagtcccaggccaggcagcattcaccacaagctgacataagagacctcgggccttataggaacatcagtggtaatctggcagtactccttgtggctggggttggcagtgactatggggactcatatccagggcacactgatacgaagaaggaagggctccccacggccttgggcagctcagcccctgtggctctgcaaggagatattccagaagaaggcattgttatcacaggggaagacagctccatgtatgttaataccccaaaagaacttccagtggaagaagatgtaaaggtggaagagattcgtattgatggccctgaccccgtatgcacagatacttaccactgtgtcatcgttgcctacaatattcagtacagtaacaggctacaggttattaccttcccttaaagtttaaatttcaaaatttaattgagaaaatataaaaagaaaaagaaagcaggtgcctaaagacaaggtcattataactgacacgatgtaatacattttgtgcttaaggtggtccatctagtctgtggcagctatatctatttgctctactattttacactaattattaacattttctatgtttactgagaatgtggaaaagttttaaaaacatgacagtagatcataggcacttaatcaatatc

SEQ ID NO: 479503 - DNA, 1023 bp, Homo sapiens
ctctctcccgtagtccgcaatcatgattaaagcagctgctacatttaattacctttctaagagacaatttgctgaggaaattggtatggatataagtaagccaggtggtattcttcaagaaattgggagaataacactgaaggtatttcagagatttttcaggctccaatgcacatcacaggccttgagaaaagaaggtttccagagagagccccagtgtgcccatgagactttggaccttgctgctcaaggtacttctagtctctactccctgaattcctgtgcagtacttctcacccacttcagctgtgacacagatggacccagggctcatcaaggtcaagacatctggcagacccgcaattttaaccaggccttgaatgtctgccagagatatggccagcgtttagtgcttgtggcctttccagcctcacagtgcaagctgttactggatctaccattctggagtctggaggatggtggccctcttctcagagctccactagacagtgtgacagtgggaacactgtgtgggggctccaaccccacatttcccttttacattgccctagcaaagtttgttcataagggctctgcccctgcagccgacttctacctggatttccaggcgtttcctttcatcttccaaaaccttggtggaggttcccaaacttcaattcttgacttctgtgcacctgtaggcccaacaccatgtggaagccaccaagacttggggctttcacctctgaggcaatggcctgaactgtaccttgatgctttttcgccacagctagagctggagtggctgagatgcagggcagcaagtcccaaggctacacacagcagcaaggccctgggcccatgaaaccatcttttcctcctaggcttccaggtctgtgatgggaggggctgctgccaaggtctctgacatgctctggagaaattttccccattgtcttggtgattaacatttggctccttgttacttatgcaaatttctgcatccaggttgaatttatccct

SEQ ID NO: 479504 - DNA, 744 bp, Homo sapiens
cattacctcagctcactgcaaccttcacctcctaggttcaaatggttctcgtgcctccttcacccaagttgctgggattacaggatctcctgagggctgtgtcgcaggccatggtcacctatattttggctcggaataaatctcttcaaatattttacagtttgactctcttcatcaacagccacttgctcaagctgagctttcgcttgccgtcgaccactgctgtttgccgctgttgcagacccgctgctgactcccatcccgccgctgactcccatccctccagatccggcagggtgtccgctgtgctcctgatccaagctataacactcaccgcatggcccaagattccattccttggaatccgtgaggccaagaaccccaggtcagagaacatgaggcttgccaccatcttggaagcagcccgccatcatcttggaagtggctcgccaccatcttgggagctctgtgagcaaggaaccccccggtaacaatgttatgctagagtcagattggaaaataggaatttaggcaagataaaaaacatcagagcttagttctcaggttgatgtttagaaataagtactttgtgacaaccacaagaagacaatcaatgtttacttagtacagtttccgaaagcttcacatagaaaataaagaagaaatttaaggtagaaatgaaaagaatgtctattgacaatatgaattattctctttatcaaaaataatttgtacaagagtgca

SEQ ID NO: 479505 - DNA, 885 bp, Homo sapiens
agacctctggagagagaaactgggacatgcaagagggtgaggtcaacatgtggtactctgcaactttcacaaaggaagatgaaaagcaaaacaaaagtttagttctgaaatttcaatcatgggtctctacataccctggagtgggtgctccccctgagaccaaccggaaggtggttgaaacagtgttgaaaagtagccatgagcttgatgttaattggagctgttccagaggggtaccaggagagaggactgaaaatgagcagcaaacagcaactgttaaaaacagcaagagaatacaggtacaatataaacatggaagcagggctacaaataacagttgccttttcaatgtaaataatggagggcagaggcctccaatacgggaagctatatttgaagtatggggggaaatgaacctagaatctatctccagtaaaaacatgcttaataactgaaggtaaagggaagatattttcagaatttcaaattctcagataatttgtcttcagcagaccagcaccttaataaatgctaaattataattcccaagttaaagaaaataattttacatggaattctagttctgggataagaagcagcagcaatataaaccgtatatatgtcagtaaatataaaataccttttaaaaatatgacatatattttaattgttaattatttaaacaagaacaaaaacaatgtcctgtgaatttcatagcactgtagaaaaatataaagcagcaaaatcacaaaggagaggaggagagataaatggaattgtactattttaagtttgctgtattgttcttaaagtaatttttaaaaataaattatcataatattaaaatatgcattgaaacttatggaatgaccaataaaagaacac

SEQ ID NO: 479506 - DNA, 755 bp, Homo sapiens
caaaggcataagaatgatatgatggactttggggacttgggtggaaagagtgggaagggccaagggataaaagactacaaatatggtgcatctgtggacaatgctccaagcacctacactgttgacaatactttgagcacctacactgtgaacaatactttgaatgcttacactgtggacaatactccaggtacctacactgcgagcaatgtaaacatttacactgacaatactcccagtacttacactgctcacagccctccaagcactaacattgctgacaaagctcccagcagttcttccattgaccatgtccctagcatttccatctcagacactactctgagccctgctacctctgatggcattctgaacccttctagcactaatcatactcccaagactgccacctctgacagaactcccagatcatctgatagtactcgcagaccatcaagttttgacagtacgccaagctcttccgcttctcacagtgctcccaacacttccatctctgaaaatgctcccaacacttctgacattggtaatgctctcagtactccaacactgccagtactgagattgagactagacatagaaagaaacagagtgctataggaggtgaagaaatcaagcagaaaccaagtggaaaacaaaacaagtgaccatcaccaaataatgcagataaagattcagagagtccatgtgcagatttgttacatgggtatattgtgtgatgctgaggtttgggtttc

SEQ ID NO: 479507 - DNA, 550 bp, Homo sapiens
atctacttttggtctttgatgatgcacccctgtggccaacactactttgactgctttgggtcagacctgaggtcagcacagcactgcgtcttccccaaggcctgctgtgaccactccgtcgctactgcttatgtccgtcgctactgcttatgttccctccaggccctgggcctctacaatcagcaggtggcaaagcaaggcatgtccagaaatgtcatcgaagagttaagtcctggaatcagagccccaagtgcctgcttggtgctctactacccccctgtggctgttctggtacctaagcccccttacttttctttctgcttttctcaagcagaaggaatttttcctggtaaccaccacagctggatggtactgagtccagtgcctcacaattgctgtgctctgcctcccccacctcccagagatgctctccacaccatgcttttgctaccagggtaggggaggggtggcgttatagatccaggactgtttttcctatctcttcaatagttgttaattttgtgtttttgcagactgggggggatggccc

SEQ ID NO: 479508 - DNA, 705 bp, Homo sapiens
ttccatctgtgagagcgcacccttctatagaactaaaggattgtaaatgcaccaatcggcgctctgtaagatggaccaatcagtgctctgtaaaatggaccaatcagcagggtctgtggcttcactgctgaagtcagcgagaccacaaacccaccaggaggagcaaacaactccagacacaccaactttaagagctgtaacactcactgcgaaggtctgcggcttcactcctgaagtcagcaagaccacgaacccactagaaggaagaaactctggacacatccaaacattaagaactgtaacattcactgtgagggtccgtggcttcattcttgaagtcatcaagaccaagaacccaccagaaggaaccaattctggacagaatagcacaatgcgttacgcacgtatttgtggtgatgctgaagtaaacaaacctactgtgctgccagtgggaattgaacaatgagatcacatggacacaggaaggggaatatcacactctggggactgtggtggggtcgggggaggggggagggatagcattgggagatatacctaatgctagatgacacgttagtgggtgcagcgcaccagcatggcacatgtatacatatgtaactaacctgcacaatgtgcacatgtaccctaaaacttagagtataataaaaaaaaaaaaaaaaaaaaaaagaaaatgcttaggggaaa

SEQ ID NO: 479509 - DNA, 549 bp, Homo sapiens
ctcctcctagaggtttgagccgcaaggcactgaagaagcgagccacacccccatcacatgccctgtatacacatgccatggtggtttgtggcacccatcaacccatcgtctacattaggtatttctcctaatgctatccttcccctagccccccatcccccaacaggccccggtccagctgacaaaatgcagcacctgggaagagatgctttgaacaaccaatgggtcaatgaagaaattaaaagggaaattaaaacttttcttgagataaatgaaaatgaaaacacaacataccaaaacttatgggatacagcaaaagcagttctaagaaagaagtttataacaataaacacctatattaagaaagaagaaagatctcaaataaataacctaaccttgaacctcaaggaactggaaagacaagaagaaactaagcccaaaattagtagaaggaaggaaataataaagatcagagcaggaataaatgaaatagaaactagaaaaacaatagaaaagataaatggaacaaagagttgctgtttttaaaag

SEQ ID NO: 479510 - DNA, 681 bp, Homo sapiens
gaaactaccttcacctccatcatgaagtgtgatgtggacatctgcaaagacctgtacgccaatacagtgctgtctggcggcactaccatgtaccctggcattgccgacaggatgcagaaggagatcactgtcctgacttccagcacagtaaagatcaagatcattgctcctcctgtgcataaatactctgtgtggcagcaggaaggagatgtgctgagcaaaagtgaaaaagccccttataaaatcatcagatctcgtgagaactcactatcacgagaacagcatgggggtaatcgcccccatgattcaattacctcccaccaggtccctcccacaacacatggggattatgggaactacaagatgagatttgggtggggacacagccaaaccatatcacttaaatacgcatttttcaaaagaaaacatacaaatgaccaacaggtatatgaaaaaatgctcaacatcactaatcatcaggaaaatgaaaatcaaatccacaatgagataagctcacacccgttagagtggctattttcaaaaggacaacttttagaaaggatgtggagaaaaagaaacccttgcatgctcttggtgggaatataaattccaggcatgtcacctttgctacttcctctccgaatcattttcaaagtagtttataaattataaatatgcatc

SEQ ID NO: 479511 - DNA, 772 bp, Homo sapiens
ctactgctcactgtttggagctataacactcaccgcaaatgtctgcagcttcactcctgacgtcagcgagaccacaaacccaccagaaggaagaaactccggacacatccgaacatcagaaggagcaaactccggacacaccatctttaagaactgtaacactctccaagagggtccatggcttcattcttgaagtcagcgagaccaaggacctaccaattctggacacaaaaggaatcagcagaataagatttagagataacacagatgttggaactgtctggcatgaaattcaaatagccattagtaatatgctaaaggccccaatggaaaaggtggatgacatgcataatcaaagagatcaaaactataagaaagaactaaatgaaaagcacagcaacagagatgaagaatgtgtctggctcattagcagactcgacatagccaagggaagaagcagtgaacttgaagataagtcaatagaaatgatcacaattgaagcacaaagtgaaaaaaagaaaaggaaggcataacagagcattccagagctgtggaataacatcatatagtaaaatcactggggtctgtctgcatttacccttcctgaagcgtggcctggaaaacctctcaaggctgtaagatggagaaattatagagctcatctcctttgttttctttctctaatggatcactgtccttcattttctgatgtacagtgtcttgcaaactgctatttcatgtaacttgtctgtgttttagttgtttcagcatg

SEQ ID NO: 479512 - DNA, 526 bp, Homo sapiens
gggcacagcttcaaccatgatgatcatgccaggggctacagctgctccagaaggtcttattgccccagctgctgggagtgctgccagcaaacagcctccagctgccagtgcatacaggggctgcctcagcttcagagaatcaccaccccagaggctacgtccctgctcaaggtggaagaagaagaaagaagaagaagaagaaaaaagaagaagaagaaagaagaagaaaaaggaggagaaggagaagaaagagaagaaggagaagaaggagaagaagggggatgagaaggggaggggtgcctttgatgtcatcagcattggagcatgggctagcaggccggtccagggaatgtctcttcctaacaaaggagtggggctttcaggcataattaaaaagacatgtgaaaagagtaaagttccccagtcacaacttagtggctgggagaagttatctagtgactgcctgtcctaggaccccttggatagtgacagatctggaggacagttgtccaggacagaggagtat

SEQ ID NO: 479513 - DNA, 746 bp, Homo sapiens
ttctgcttttccttgctctctgccggtcatgccaacttcccaactttgttctctggaccctcaaggtttggagtccattgtgatgcagggggccaaggtgtggcagctgcagcagagtgccagcagattcaggggtgcttgcccccttgccaacgttcatcacagtggtgaaggcaaggcaactgggagggggaatgggggggccactgctggagactgtgtgcacagttgcactggaggtggtgttggcttggggaggggtgctgcccagtgcaggtctgggtgccttctctgtgccccgcaagcaggagtgatcactcaggaacattgctacacaaacagtggtacaggggccagccaaccttccaaggaaccaccaggcagaccaaggacgatctttgcaaaagaggtctattctgcttcttcagtgctggaactggcaatgcaggcttctattgtcaaggctactgctgagctgaggaaaaaaggatagaactagtgaggccatagcatatttaaacagtgtttcttgagcaaagaaaaaaaaatacattgtgatatattcaatacctttcatgtactaacagatcataagatgcaagttaaataaactaaccattaagaggacacagaaaagtcaatcaaataatttgctcattagatgatctttgagagaaattgtctaccatatttataagttgttaaataaatttatttatttatttatttatttatttatttatttt

SEQ ID NO: 479514 - DNA, 758 bp, Homo sapiens
ggaggcactcaaggacctcatcaacgaggcctgctgggacatcagctcgagcggcgtgaacctgcagagcatggattcgtccacgtctccttgctgcagttcaccctgccgtctgagggctttgacacttaccgctgtgactgcaacctggccatgggcgtgaacctcactattatgtccaaaatactaaaatgtgctggcaatgaagatatcgttacactaaggattgaagataatgtgaataccttggtgctagtatttgaagcttcaaatcaggagaaggtttcagactatgaaattaagttgatggatttggatgttgaacaacttggaattgcagaacaagagtaccactatgtagtaaagatgctttctggtgaatttgcaatggagaccttggaaatagaaaacaaattgtcacagacaagtactgtcgataaagaggaggaagctgttaccatggagatgaatgaaccagttcaactaacttttgcactgaggtacctgaacttccttacaaaagccactccactctcttcaatggtgacactcaatatgtctgcagacatacaccttgttgtagactataaaattgctgatgtgggacacttaaagtactacttggctcccaagatggaggatgaagaaggaccttaggcattcataaaattcaagaaaataaaactaagctctttgagaactgcttctgagatgccagcatatactgaagtcttttctgccaccaaatttgtacctct

SEQ ID NO: 479515 - DNA, 686 bp, Homo sapiens
aaagtcacctagaggagtacagagaaacttgggggaggggtgttcctggccatgctccactgcagatgttcttgcaccaaacgctctgggctccactcaggctggagtcctgcacctgccacctctctaagcagctcttcctgtgagctcaagagtccatgtgttttgtggggttttctgctgctagaattccagaagtcgtccatggcaaaagcaagccatttcccacctgttcaactcatcccttccccaggggtcactgggacccaggaaggaattctggtacttagcagcaatgtgcagccttcccagcttcctcccccttcaggccaacatctgcgaacttctgtccactctcaatgccttccctctgaatatctgctcagcgtgtgtgtcagtgttcctgatgtcgtggtgtctcgctgggagatgttcctcctggctgtgtctagttgaccatcttggctcctccttcctatattttatcacaataaaaaaactcatcatgagaacatttaaaagaataataatatggcttatcgtgtttggcttctaaaataaagattttcactgacaaagacattctagcccacagctgggttaccaaaacaaacaaataagaagcacaaataggtaacttattcactgctttaaaaaaaatgattttccattataagatgaaatgt

SEQ ID NO: 479516 - DNA, 693 bp, Homo sapiens
aatcccttctttctcccttctgtcaaagtatcgtatgcgttatggtgatctgtgatcagcagtctttgatgttacaaccatgcccatataaaacagtgaacttaaatttggtccagataggagatcaaaccagccacaccattcctttaagccaaagccaaatcaagagcaaagccctaactctctttcattctatgagggctaagagaggtgagaaaggttcagaagctagcagaggttggttcatttggtttaaagaaagaagttgcctctctaacataaaagtacaaggtgctgatgcagaagctgtggcaagttatccagaagatctagctaagataattaatgaaggtgactacactaaacatcaaattttcaatgtgggcaaaacagccttctgttggaagaagatgccatgttggaagaagatgccttctaggacctttatagctgaagaggagaagccaatgcttgccttcaaaacttcaaaagacaggcatctcttgttaggtaggggccaatgcagctggtgactttcagaattggcaatacattaattcaaaatgttttcactaagcaccaaatagaatcgtccccaatctctgcaccgagaacccctttgaaagaatgcctaaaacttaatcagtttatttaggtttttaatcaagaaatccattagcaacaatcttcctt

SEQ ID NO: 479517 - DNA, 1389 bp, Homo sapiens
cccggaaggcagagcttgcagatggtaaaagaagaaaggagattcctcttgcaaaagaagccaagtataaacatggaagaacaactgcctaagcaagtagaaaagtgttccataatagtgcgcaatgaatgaagagttctggattaatctctggaactcaacctgcaccctgatctttattttgaatgggatctagaacgggatcttgaagtagctctttttggcggaggggacacagaatgaccctttgagggtggagcaggtaggggtgaattggaacgagactggctccttgatctgtattttgacttcatatcaccttttccattttctttggaagatcgggacagagacctgcttggagatttctcatactcatccttagatctgctttgagaacaagaacaggagcccagatcagatttgggcatagatttgctccttgagctagatttcctgccttttgaacgagaacgtgatcgacctttgctccgcaacctgatcaggagtgactttttgagatacttcgagatctactgtggctgctcctgcgactcctacttcgtgaccatcttctagatctatacctggatctgcttccagaatcagatcgcctatggcttgtgcctggcttaccttcaataagcctaatatttctgcaccatccagtttgtccaaagcaagcttcatgtcaaaataggagtgaaactcaacgccctcacttgtgcattccttgtgagcatcaacataggttacttcatctgcttgttgcataaaatcctttaaatcttgccaactgtaacaactagaaagactttctataataagctcgtattctgtatgaacaggtggtccatatttgtctctgccagatgttctctgactgctgtatccacttccaccaccatctccctgcatctaatggcaaaaggccgctgtcatcatggcttccgagcctgcattcaatactttcataaaagaaatcgtggtgacagtgtatatcaggaaatgagtcatgcgttatttgaaattctaaagacatttacctccagaatcagagcaacaataataataacaataaaacattcacgcacacacaaaacttctctgacagatgacatgcaagttgatgtaatagcacagtctctggcttgcaaggtagacataaatacctacagcgcgttcccatcagtctcaaactgggccatctgcaagataggatgggaagtgcgtgggctctgcagtcagaaagaccttgatgcatatcctgacattaccattttctaactgtatgactttggatgagtttcttaaatatgaaatggcaagagtaatagctagcccacaggattgttaaaagggttaaatgagatcatgtacataaagcac

SEQ ID NO: 479518 - DNA, 747 bp, Homo sapiens
aggcacaataacaacccccaaagatgtccacaaagatgtccgcaaagtataacaatccatactttcacggcatgacatggcaaagggactttccacagctctgccaggaagcccctcttccaagactacaggtctcatcttctctggtaatcctactgcctccccttgcccttgctggcccacggaagcaacagcaggaagccacaaaaacagagggagaaggggaggagcccatgacacaggcactgaggagcaggagtcaacccgtgaaagctggcaccaggacgggtctgtccttcaagggaaaagacatagcccctgtgggagaagccatccaaggcagggaggggtggtctagctttcccctccgaaccattccttccattggctgcacccaggcagctgacacaggagcttactcagaaaactggcctgcaggggtcaaccctcctgccctacaaagtggaactggaaaacgacacaaaaataaattgagagcaagatcaggggtacatgtgcaggtttgttatgcagaatcacaagtgggctgcctgagaaggagcttgcagggtgatgaatgcaaacttttgaaaaacagtatatagggcatcagaaatgttaaagagtcatgagatcattgtccctatcaagtcatttcctttcctttgtcttttatgtgctcacaaaactttttataagcccacaagactctgtgtgtatgtgtatgtatgtgcatgcttacacaac

SEQ ID NO: 479519 - DNA, 1330 bp, Homo sapiens
tgcccacatcagctcctcaagcttctcccgagtgggcagcagcagcttccgggatggcatgggtgaaggctatggtggggtcagtggcatgggaggcatcaccaccatcatggtcaagcagagcctgctgagtccccttcacctggaggtggaccccaacatccaggctgtgcacacccaggagaagaagcagatcaagaccctcaacaagtttgcttccttcatcgacaaggtacagttcctggagcagcagaccaagatgctggagaccaagtggagcctcctgcagcagcagaagatggctcagagcaacatggacaacatgttcgagagctacatcaacaaccttaggcggcagctggagactctgggccaggagaagctgaagcctgaggcggagcttggcaacatgcaggcatgcaggggctggcagctgtatgaagaggggatccgggagctgcagtctcagatctcgaacacatctgtggtgctgtccatggacaacagccgctccctggacatggacagcatcaccactgaaatcaaggagcagtacaaggagattgccaaccgcagctgggctgaggctgagagaatgtaccagatcaagtatgaggaactgcaaactctggctgggaagcccggggatgacctggggcatacaaagactgagttctctgagatgaacatcagccggaacatcagctggctccaggctgagattgagggcgggcttccctggaggccgccatcgcagatgccaagcagcgatgccaaggccaagttgtccgagctggaggccgttctgcagcgggccaagcaggacatggcgcggcctctgcgtgaataccaggagctgatgaatgtcaagctggccctggacgtagagatcgccacctacaggaagctgctggagggcgaggagagccggctggaatctgggatgcagaacatgagcacccataggaagaccaccaggggctatgcaggtggtctgagctccgcctatgagggcctcacaaaccccagcctcagctacggcctgggttctagctttggctctggtgtgggctccagctccttcagccgcaccagcttcaccagggccatggttgtgaagaagatcgagacccgtgatgggaagctggtgttccagtcctctgacatcctgcccaagggaacagctgcggcagcccctcccagcctgcccctcctgcggctgccccagagcctgggagggaggctgctgtgcaggggagcacagggaacgggagggaggctcacctgaggctcagtgctagccgtcagcccattcgagggggagtttacc

SEQ ID NO: 479520 - DNA, 667 bp, Homo sapiens
cctttgaccaaaatgctgatagtgatatggacaatgaagttcatgctgagatgatttcagatggagatgaagaacttgttgggaactggagtaaaggtcacttttgctatgcaaagagactggcagcattttgcccctgctgtagagatctgtggaactttgaacttgagagagattatttagggtatctggcagaaaaaatttctaagtggcaaagtgttcaagaggaagcagaacgtaaaagtttggaaaatttgcagcctgatgatgcagtagaaaagaaaaacccattttctggggagaaattcaggcttactgcggaaatttgcataagtaatgaggagccaaatgttaatcaccaagacaatggagaaaatgtcagagaccttcatggcagcccctcccatcacagacctgaggcctaggagggaaaaatggtttcgtgggttgggcccagagtccccctgctctacgcagcctcaggacatggtgccctgcgtcccagctgcttcagctccagccatggctaaaaggggagaagggttggtccctggtagcttatttagtttatttggtgaggtcatgttttcctggatggtgttgatgctagtcaacaatcttcagtgcctgtgtattggtgagttaggtatttattgtagtcttcact

SEQ ID NO: 479521 - DNA, 844 bp, Homo sapiens
ggagccgtggcacaggtggtttaggcatagccgccagccatctgactggtggcgcattgctgcctactcctcgccaggcatggtagctgaagaagtcgctcactccgtaggcgatcatcaccaaacacgcaaagaacgaggtagccgcacgctggttatacggctgcgtgcccttcagggacgtcaggtcaactgccgcagagcgggcgatgaaggcgagggtgaagaagacgattgtcaccagccagaggaagacagatacgaacatcacccagccataggccgggtacaggtggtacggggtgtctgcaatcagggcccacaccagcagccccagcaccagctgcagcagcatgaacgcccgaggcgggagcgcacgaagcccaggtccgtgcgcagcgcctacaccaaggctccagcgtcctgcgcgggactgctggtcgctcgggccgccgtcgccgcccctccagtggtgggtgccagctcccgcgccgctcttccccgaggctccctatcccgctgcggcccagagcactccaggaggcctggatgtggcccttggtcctatggatttcttgcctcatgtgaagggcacactggaggagatatagtgcagggccttctaaactttagagtctgacttgtttgccacgatcaggaatgtgtgatgtaacatggcatgaaataagtgtagacttctccatagatgaggggcctagtatattttgtctgatacgagtataactacacctgttatcctttggtttttcatttacatggaatatcatttcctatccccttacttttagtctatatgtgctcttcaaggcaaggtttgtcaggt

SEQ ID NO: 479522 - DNA, 540 bp, Homo sapiens
tggcttagcacaatatgaatttatttctctctcataagaagtccaatgcagattttcctggcctgtggttttcctctgagcaaagacttggagatccaagctcatttagtcttttggggctgcagaggagcctcatgccatggctagtaccaccacaagccttcagagagtactgtcaggctactgccaatgttcccttaagacccaaaggcccttcagtcagcttgtggcatatgttgcctggcctggaactcatccttcatgacaaagggctcccctctggcccagggcagttccagaaatgctgtccaagagccaagtcctggaattgggcagaaggagtcttgccccatagacaccacagctgggaatatgctaagtctcacctgaatccaagaagtctcagagtctcacccacgacacatgacatactatctgggtattactccttgttattcagggcccaagggctctttagtcagcaggtgaagggtcctgccaggactgggtctcttccttcaaggtagtggattccctttt

SEQ ID NO: 479523 - DNA, 621 bp, Homo sapiens
tgagatcaactagggaacagatgtagaatgactgctaggacactccaaaatgtaaagaccaggaagaggaggagaatccagcaattaagaggagcagctagtgaggtggattccaacctgctgctttggctggctgggattccaagccagcgggtcttaacttgtgaggtgccatggaagtggggcccacagaataacactgcttggctccctggattcaaaccccttcctagggatatgtacagatggatttcctgccttgccagggatcctggggccagagtatgtgaaaccgctgagctgggaagtccaagatcaaggtgccagcaggactggtgtctggtgagagctgctctctgctttcaagatggtgctttgttgcagcatcctctggaggaaatgaatgttgtgtcctcacaggacagaagggacagaaggggcaacgtggaactggcataattggagacactagttattttactaaggctttgactggaataacattttcagatttccttgaaaaaaatgagtgtgacctatagagccgataaaagccccttggaaaaactggcctcatactttgtcctttacagggtcctgacctgtggactttgaaaatgt

SEQ ID NO: 479524 - DNA, 688 bp, Homo sapiens
tctctcctgcaaggtggctttagggtatttgaactccatacatcatgctcagggctccaagaggcacagctgcaggccataaaaatcactttgctgcagtctggaatgggcccctcagtgacagggtgtcacatcatttttgttgtagtcatttggctctttgttttagtgttgccctgctcaaaggccatggggagctggcacccttggctacccttcctttcactgtctttgtgggtagaaaggccaagaacttgcgggaagagagagtgtggaaaagttttcctggggcaaatcagagtgtgtcctccaattttcagaaccagagcacccttattttcttccccaaaacctacctccactcacagcagaggaggctcaccccatggccaccaccatcacaggcccacagggagtactgccaagctactgctgatgcttccttaaggcccaagggctcttcagtcaactcttggtgaatgctgtctggactgggactcactcttcagggtagatgcctgaacacctatcccacaaaattgtgagtaaaatggttgttatttaaaaccactaagttttgggatggcttgttaggcaacagtagctaactgggacaaatgctaaagagaaaaataaatgagggcaaagaaagaaagacaggtaagggtactattttagagggaatgat

SEQ ID NO: 479525 - DNA, 746 bp, Homo sapiens
aggaaaaccagagacctttgttcacttgtttatctgctgaccttccctccactattggaatgggtgctgctgattggttggggatgaaatcacaggggtgtggaaaatggtccttgttcactgggtcagcctctgggcagggtccagaggaccagactccattgagttggccgttggcaccaaggagcctccatgaaggaggccattccaggatggaatgcaaaatcctgctggtgaaagagtctgggacatgtgattccatgtgtttaacctttgaaaaccaggagagcatagaaggaggtgcaaagaatgctgaacgtcagcacagcctatgtccaacacagcaaaccattgtccctgagcctgtgtcctcaccagcagatccttcaggaagtattccagaagaaggcattgttatcataggagaagaaagctccatgtatattattgcctttgaagaccttccactgggacaagatgcggagatggaaggcagtgatattgatgatcctgatcctgaccctgtatgcgaggaagctgcagaagaaaagcttgaagctggcagagattgggtcatgagatttaagaaaataagccatctccatgacataaaagtgcaaggtgaagcagcaaatgctgatggagaagaagctacagcaagttatccagaagatctagctaagatcattgatgaaggaggctacgataacaacagatattcaatgtagacaaaacagccttctatt

SEQ ID NO: 479526 - DNA, 531 bp, Homo sapiens
caccatggctgcaggcacacagtgacaacctggaagatctgtggcatgagggcacagatcctgccatggagtcataccataaagctgtgaaagttgtcccctggttgaggtacagcatgaaggctgagtgggtgtgtatgttcagctgctctctggtgcccaatgatactactctggcaaaagtaggcactgactccttctcattgctacctggtgaggatggaggctcagtttgctgttggaccccactgacactacactgtggggcaatcagcaaactgcctgcttttgtttggcagggagtagaaggtcagctttctgctcagctttaccagtacctctgcatgggaatcagagcaccagctgcttttgcctggtgggcattggaagatcccacagcagggaagggtacagattttctactggtgtttggttggagtagggcaggttacctggtgcttctgtctcaccgttcttaagattctttacttcgttttagctctggataacctgatgacaatgtgtctaggc

SEQ ID NO: 479527 - DNA, 802 bp, Homo sapiens
tctggagccttaagatttgatgttggctgtgccagggaccacggacatgggcaaacttctgagctaccagcccaacaggggcataaaacgtccccgagatggcaaagaggaggagcagaagatgcatcagaaacaaactagtactcaagattgggaagaggaaatgattgtggtggaagaagcagaggatgacaaacatttgctgcttcagattattgacacagagggtgaggaggaagagaaagaggaggagccattggatgaaagctcaattaagtttccagacaatccagagaagttcatggaatcccaactggacctacatgacatcattcagaagatgcacttggtggccaccatgccagacctgtacctcttgctggagctgaatgctgtgcagtcacttcttggtttgcttggacacaataatacagacgtgtccatagctggggttgatttgagtcaggaattaacagatatagacatcttctatgagagtggagagggagcagaagtactcattgatgctctggtggatgggcacgtgatagcgctgctggtgcagaacgtggagcgcctggatgagtctgtgaaggagcaggtcaatggtgtccataacactcttgttattgtggaaaacatggctgagttctagctggagatgtgtacaaaaggtgcgcagcagggtcttcctcagtggctgttgaagaggctgaaggcaaagaagccttttgatgccaacaaactgtattgcagtgaaatgcaggccatattgctccaggacaatgatgaaaacaggaaa

SEQ ID NO: 479528 - DNA, 736 bp, Homo sapiens
cttaaacaggtctgtgttttaatgaatttgtggcatatgggccataataatcaaagcgcctggcatttcctggaatttatgatctttctcaggtatttatagcagtgcaagaacggactaatacaatgatcaaacccgaagatgtcatcgaggattcacaaaacagttctatcattttggtacaccatccgtttaacagacatgtatttagaacctgctgtctacaggcaccatggggatacagcaatgaagaagacacagtcctactctcaagttggaatcttgtggagaacacaccaaagcctgtcagagtcccctgtgataaactgtatgacaaagtaaacatgggcaggtctcctgaattttggggacctggggaagctcccatgggaagcacactttttagagatagtattgctgcctggaatgatacactgagttcaatatcatcctttaaaaatggcggtacacaggcttggggaaatgaggatctgaagggttttgtccctttgaagggagaatgtgagaaagaatgcgagaacatttctaagagcagagcatggcccccagctgagaaccagggaggaaatagacttcagtccaacagctgcgaggacctgaattctgccaacagttaggattaacttggaagtcaattccttccccagagtctccagacaagaacccagccaggccaacaccttgatttcaaccatgtgataccctgagccgagaa

SEQ ID NO: 479529 - DNA, 1366 bp, Homo sapiens
tttattgttgctcctccaacagatgcccagtgaatttggacccaaacctgatggacactgagaaacaggccactctgcaagcagcagagagatttgggaatgagttttgtatcacgtatagcatcagggaagggggtgactattatccatctggaagagaaggagtaccagtgagtaactctaaacgggatcccaatgacgagatggaagactggaaaaggagacactttcaggtgtgcataatggagggtttatgtaggaccaagaccaagcctctcaattatgctaagttgtccattattgaccagggatttgatgacaattctactgcttatctggaaagcttaagagaggacttggtaaagcgcacctctctgtctcctgattcagtcaagggacacctaattctaaaggaaaaatttattactcgggcagctcctgacatcaggaagaagttgcagaaattggccctaggaccagatagcacattagaggacgctcctgaaagtgaacaccgagaccctagcaggcagagacacaagcagctggaagttgagaggaacacatcagtggaagaagacacagtggctggacatcaagaggacacctgcggaagagctcaccgacaggccattgataggaggaatgacatggagtttggctggggcagacggaggagagactggaccactgagcagcccgattccaaaagaatagcaccttcccgctccatctcccttctggctcccccgtctgctgagagctacctccactcaataaaaccttgcactcattctccaagcccacttgtcctctgattctcctgatacaccaaggcaagaaaccctgggatacagaaagccctctgtccttgcgataaggcagggtgtctcattgagctgactaacacaagccccctatagatggctaaactgaaaaagcacccttgaacttgatatacgtgtatgtgaattgggtatgtgtgtcactgaattgtcgtatcttccagagacactgttgcctcttcattgttactgaatgttttttagaagcttgggatcagaatggctgcaagcacctgggtgtctctaaaggagcagtttctatgttgtgggtgggagctaatgccaaactgatttcagttacccctctaaatcttacctaagctccttatgacatgagcgcctttgctagaaataacagaaaagagagaaagattagcatagcaatgctcatgttttgcagaatgaatcatgacaaaccttattttgaacctgttaactaagatttatggaaataatgtgaatttgatcgtcaactctgaattattaacattaattattagttatttaatatgtttcacatt

SEQ ID NO: 479530 - DNA, 685 bp, Homo sapiens
ccttctttctgaagatctgataggaggatgctgtgagattatttctcaactgctttggttcccttggatcatggccctcctcctgccggcggcgacggcgacggcggcggccagacttgggctgggggcgaccgggctgcggttttacctccattttgagaccggacttgcctcttccaactcgagatcaatatggaagactattttgtgtgtgtggttgaaatctacctgatactcttttgtaatacggctaagctggcactcaatctacaagacatagttcttcccactattcttcccccttcccaaaggcagatagacctcatcctttggctaccaccaccaccaccacccaatgattgggactcacctttcagcagtttgggcttccctctgacccagggcaggtctagaaatgctgtccaagagccatgtcctggacctcaaaagcccatttggttctctaccaccctgtggctcaggtggtatctaaggtgcaagaaaaaaatcccctttactttccccattacttttcccaagcagaagacatcttttctcatagccaccacagctgacaaagttctgagtctcacttgattgtagctattgtcagagtgtcacctaaggtgcatgatgtacaatctggatgttgttgctggttatttagaacttaaggggtctttgt

SEQ ID NO: 479531 - DNA, 1265 bp, Homo sapiens
agtaggtggattttcaatcctcaccctcctcataccctccaccttcaagtaggctgtggtatttactgttccatgttttgtgttccccctatatttgtgtccggaactggtgggttcttggtctcactgacttcaagaatgaagccgcggaccctcgcggcggcacgtccggagttgttcgttcctcctggtgggttcgtggtctcgctggcttcaggagtgaagctgcagaccttcgcagggagtgttacagctcataaaggcagtgtggacccaaagagtgagcagcatcaggatttattgcaaagagcgaaagaacaaagctaccacagtgtggaaggggacccgagcgggttgccactgctggctcgggcagcctgcttttctagatacagagtgccgactggtgtatttacaatccctgagctagacataaaggttctccacgtccccaccagactcaggagcccagctggcttcacccagtggatcccgcaccgaggctgcagatggagctgcctgccagtcccacgccgtgcgcccgcactcctcagcccttgggtggtcgacgggactgggcaccgtggaacagggggcggtactcgtcggggaggctggggtagcacaggagcccatggagaagggggggaggctgaggcatggcgggctgcaggtcctgagccctgccccgcgggaaggcagctaaggcccagcgagaaattgagcacagcagctgctggcccaggtgctaagcccctcactgcctggggccggtggggctggctggctgctccgagttcagggtccgccgagcccacgcccacccggaactcgcgctggcccgcaagcaatgcgcgcggccccggttcccgcccgcacttctctctccacacctcccggcaagctgagggagccggctccggccttgatcaacccagaaaggggttcccacagtgcagtggcgggctgaagggctcctcaagtgccgccaaagtgggagcccaggcagaggaggcgccgagagcaagcgagggctgtgaggattgccagcacactgtcacctctcatactgtttctgctgtaaaatctactgttagttcaatggggttttctttataggtaactagatgtttttatcttggtgcttttaggattttcactttttatcatttatcttagaatggtttgatttcaatgttccatggagaagaccttttgtgttgtatccacctgggcattattaaattttctgtattggaaagtct

SEQ ID NO: 479532 - DNA, 869 bp, Homo sapiens
ccttatagtgtagtttgatgtcagatggtgggcagggccatagagctcccaaaagattatgacctttgtcttcagcttccagagcaggtatagaaagaccaccagaccaggggcgtccccattgagagaggaagcctactcacagtttttcggcatctgggagagcctgcagcatggatccagttccttcaaaaggtctgtggattctcttggctttcctgacaaaacagagccaaaccaaaatgcacaccatcatgtttccagtagggagaacaaagaaagctggagatcttacatttgcagctgtcttcatcatcaaaaatcgggaagattagactccaaagttgaagatacgttcttttatgctgacagcagaataacattgagcttcagtgacttacgtggcaaagatctgtggaccatccaaacaaacaagaatacagttgatgagagtgtgctctaaaattagtgttccaccacaggacaatgaaggatgctgtgtgaatatttggaagacgaccctaaagcaaggatccccatttgctgcagaataaaatcaacttccttactgtggcttgaaaagccaccatgatctggttcctttttacctctggattctcatagcctcacattttgtgctccagtaacactagatagtttgttattgtgcctaaaataccatgctgtttcctacttttcctcattttatcccttctgcttagaatattctacccgatcctatctgcctggtcacatatttgaatgcagtatcttggctgttaaaaagaaaaataatacctttttacataattaaagcaagcacaagcctctatgccctgtttccatctatttcctttttaacaaatgtc

SEQ ID NO: 479533 - DNA, 503 bp, Homo sapiens
tacaaatcaagttgagttttgggttatgttgagtagaaatgtgtttggtgattaccatccatcagccattaatatagcagctgatgaagccatgatgcttatcctcaacaaggacacaaaggacagcactgagtgcaatatgtcacagttgctggactctccctcccccaactcccagacatgctctccacaccatgctgtggctgctgagatagatgtctctcccagcgatatgatgttaaaaccagttactatgagggctcacctgatttttggttcttatgatggtgtttttacatccagcccttctggctacagtaacaacaggatggttcaaattcttctatggcatctacgacatcatgataaaagaatgcatctctgttatgcccaacactgagagtgcctgctttgttgttgctgccccctctctgttcaaccatttctctgaaatgttcatttgtttctgctgaaataggcacgggggaaaccagcaagcccac

SEQ ID NO: 479534 - DNA, 1075 bp, Homo sapiens
gattaacatttggctagttacttacgcaaatttctgcagctgaattgccatgcagccacacaaggagagattaaaagcctcaaagaagaagacattctggatatactatgaaaggtggaaaaacataccagatgatcatgattcagtggggacccagggatatgacatttatcaaagaaataagaacagcagctgtgaaggggtaaccagcaccacactgaagtttagaatccaacttacaagggaagtgaaggacctcttcaaggagaactacaaaccactgctcaatgaaataaaagaggatagaaacaaatggaagaacacggccatactgcccaaggacacaggcatgggcaaggacttcatgtctaaaacaccaaaagcaatggcaacaaaagccaaaattgacaaatgggatctaattaaactaaagagcttctgcacagcaaaagaaactaccatcagagtgaacaggcaacctacagaatgggagaaaatttttgcaacctactcatctgacaaagggctaatatccagaatctacaaagagctcaaacaaatttacaagaaaaaaacaaacaaccccatcaaaaagtgggcaaaggatatgaacagacacttctcaaaagaagacatttatgcagccaacagacacatgaaaaatgctcatcatcactggccatcagagaaatgcaaatcaaaaccacaatgagatatcatctcacaccagttagaatggcgatcatgcaaaagtcaggaaacaacaggtgctggagaggatgtggagaaataggaacacttttacactgctgatctttcagttataataaaacatattatttgtagtaatatgtcacctatattaatagtacttagactataacctggttaaaacccaccagactaaatgatctctaatagcttcttccaaggctaatattttatggatgtaaataaaacgatggcttagttgtattactgctaaatatttatatccaagccacctcttccttcacaaaattgtactaggaaaatgaaatgatattaacatataatatagtacagtgtttacctg

SEQ ID NO: 479535 - DNA, 911 bp, Homo sapiens
ctcctctttgcctctcgccatgattatgaggcttccacagccttgtggaactgttctgatggccgagctgccccacaggatcatcaaggaaacccagcgtttgctggcagagccagttcctggcatcaaagcagaaccagatgaaagcaacgcccgttattttcatgtggtcattgctggggaatcaaaggattccccctttgagggagggacttttaaacgtgaactattacttgcagaagaatacccaatggcagcccctaaagtacgtttcatgaccaaaatttatcatccaaatgtagacaagttggaaagaataagtttagatattttgaaagataagtggtccccagccctgcagatccgcacagttctgctatcgatccaggccttgttaaatgctcccaatccagatgatccattagcaaatgatgtagtggagcagtggaagaccaacgaagcccaagccattgaaacagctagagcatggactaggctatatgccatgaatagtatttaaattgatccaatcattaagtgtgcatcacttctcctgttctgccaagacttcttcctttttgcttgcatttaatggacatagtcttagaaacattacagaataaaaaaacccagacatcttcagttatttggtgattaaatgtacattagcaaatctatgtcttgtcctgattcactgtcataaagcatgagcagaggctagacgtatcatccggattgttgtgaaacgtttaaaagcagtggtccctccctgcttttattcatttcccccatcctggtttaagtataaagcactgtgaatgaaggtagttgtcaggttagctgcaagggtgtgggtgtttttctttattttatttttttgaggggggttcgttacatatgtatacatgtgc

SEQ ID NO: 479536 - DNA, 605 bp, Homo sapiens
ttcttttactattcatcacacactatgtgtggttctcttatatttgggtgtctttgtgctattggggtcctgggatggtctcctacccctcacactcagaagtgccttctcccgctgcctggcttctccccgttgctgacacctgctccaataacagaggtatggctgaggatgcacactccacagagcctgcaggagctgggtacaagtgggagccccacccctttcaagttgtattggtgggaggtccctggatgcagctgtagccatccaaatctggctgcagacccaggattctctgtactcttggggacctgggtaggtccccgtacctctcgaggctcagaagtgcctgttcctgttgcttggcctctccccactaccagagcccactctgatcttggaacaaagttggggctgagctctggtgctactgcagcccagctgggttcccagttaagtatttgtattagtgtgttttcacacggctataaagatactacctgagcctgtgtaatttataaacaaaggaggttttattgacacacagttctgcatggctggcaaggcctcagaaattttgtaattttataaagaaggcagcc

SEQ ID NO: 479537 - DNA, 756 bp, Homo sapiens
ctctgctttctgctttattattcttctgaatagtccatccttgatacacaattgacttggcttctggcttgtgtagaaatgtgtgcaagtccctcaaatgctcatgtttcccgaggggatagagaaaaagattttccaccaggcacacagacgtgtgccactacctatggtccttgccagtgtgaccacgtcacatcctatgtaagaacaggccaagagattcggaaggttggcatcaataaatgtcgtaatttaataaactatattatggaacaatatgcctatgaaagtcacctgccattgacagttttgtcatctcagaagatgaatcctgattaccaagaagaatttttgttgctgctacacaatgtaaataaaatcgaatatgttcggaactgccttcttagtacttccacgctgcctcttaatcttttcatcatcaagagaaaagattacctgccttatagagtcatcaaggaaaaattttgtgcatcatactgagaaccaggagacacgggtttttttaattgttgtttatttttgtctttttcttgttcctaacttacaggctaatgtaaccttaatcaagttagctttgtgcatttcttattttataaatagtgatgtgttttttataatctacaagagtgttgtaagcataaataagaaaatacctgtgaaaagccttagattcagaaaagaataaaattttgtgctaagattcaatatggccaaagaaataattgttaatattaa

SEQ ID NO: 479538 - DNA, 597 bp, Homo sapiens
ctatttgcaacctgattgcaggtaacccactctgagaactctctgccatccggcagtatgaaccagaggcctgagcaccagaaatctacagaaccgtacgcttatgagacaatccattccagcacagcagtagaaaggggtcaggtgggattggattccccacacagagtccccacaggggcactgcctagtggagctttgagaagacgaccactgtcctctggcccacagaatggtagatccactgacagcttgcactgtgcactcagaaaagccacaggaactcaacaccaatccatgaaagcagtcattggacctgtaccctgcagagccatagaggtggagctttccaaggccttgggagcctaccccttgagtcagtgtggcctggatgtcagcagggaagctatccacttctcagacatactcctgttccagtgctccagctattcggaccacacaggtacctcttttcatctgtagaaatgtagatttttcaagttgagaggaattgtgactctatcttgaaagcctgaacctttaggatgtcctcctgcagggatgctctcaccctaaagtgttccagaaaggttgtct

SEQ ID NO: 479539 - DNA, 636 bp, Homo sapiens
ccttctgagatctatccttctttgagcctcaaggacatcctataccttccttaaaatgcagtcccttggtcatgccatatttcaccttattttccacagggaatccgcacaccctgggccagaaagcaacctgctgccttgaaagaaatgaccaagccctggcagcattcatcactggccacctgaatagcccttggttcctgaatagacagcagcgatacccaggtactgcatcaaggaccttgggtgaaccactgagacatactggcttcaggtaccagtatggacttaactcttggacagcatttctagacctgcccgtgaccagacaggtgcccacagccctgaagggagggaagtgtgggaagaacggcttcttgtggtttgagttatggtttgagtgtcggctcagctgcagtacagtagaacaccagaatggctacaaacaagctcagacagtgaagactacaatagatacctaaatcttcaatgaccagatgccaaagaatatctactagcatcaacaccatccaggaaaacataacctcaccaaatgaagtaaataaaccacatggaccaattctggagaaacagatatgtgacctttcaaacagaaaattcaaaatagctgtgttg

SEQ ID NO: 479540 - DNA, 618 bp, Homo sapiens
cggcttcattcttgaagtcagcaggaaagtgtatcatctgtttagatgaaagtgcagagaaacaagaacaaaccaaaccaaaactcagcagcagaaaaaaaaataaccaagatcaaaacagaactaaatgaaattgaaacacaaaaaataaaaaagaaaaataaaacaaaaagctggttctttgaaagagtaaataaaattgatagaccattagcaagcttaaccaagaagaaaagacagaagatccaaacaagctcaactagaaacgaaacgggagatattacaaccgacaccccagaaatacaaaagattattcaaggctactatgaacacattaatgtgcataaattagaaaacctagcacagatggataaattcctgaaaaaatacaaccctcctagcttaaaccaggaagaatcagaaacgctaaacagaccaataacaagcagcaagattagaatggtaatacaaaatttccgacagaaaaattcctgggcaagatgaattcacagctgaattctatcagacattcaaagaagtattggtaccaatcatattgacactattccataagatagagaaagaaggaatcttccctaaatcattctatgaagccag

SEQ ID NO: 479541 - DNA, 1556 bp, Homo sapiens
tgctcacagcagtcccgggagaaatgctctatgcaccacgctgaccctgccggggcattgggagttggtggcattttttccttctggttactggtgatcactcccttttctcatctttttaggcgtagagaacactggaaagtcagagaaggcaacatggtgaggaaagtaaaaattggagtaatggagccacaagccaaggagtgctggcagcttccatatactggaagtgacaagaaacagattctcccacgttgtcctcagaaagaatttgccctgcctaatatcttcattcagtccttattgggctttatttatcacatgcaatgcaagtttgaaatgtcctctcgtgggttcattaaaatcatctgcaactgctttctgaatctttttgttgaaatatgtacaacatttcaaagtagtctaggactagcaaaaatagcaaagtagagagtaatagtgaagtcctgttttctataattccatggagttcaagaaaccttggtttttgttttaggaaagcgttatgacttcttaaatgtggtgacaaaattcgagacaaccagcccgtgaaggcatgtccagtagcaggatttctcatgtaggcgttgagcaacttcctcagtaaaattttctgggaaacggaggctcgggagattgccacaagggaattaattaattttgggctgtggctactggaaggggtaagactattgctcagtagtgacgaaaaatgtttcctttctcccatttcacacaatattgtgttctatagaatgatataagaagtagtatggattaaactaggggtcaagaacttttcctataaaggtccagatagcaaatatgtttggttttgtgagccataaattctctatcacaattgctcaactctgccaacatagtacagaagcagtcatggcgaatatgtaaatgatgacgtctgtgattcaatatatttaataagataggtgacagttcagatttggctcatgggcctcagtgtgccaatctctgcactaaaccgtaagggtgaagtaaatccaaactcacaatgtctaaacttagaaaatgatagaatacaataaaaatgacaataagcagtcaaaatcattaatgattactgttaggtatcatgaatggaaaaaagcatttttacaaatctgcacaatttctcttcttaaatatggaatgtaaatatcaaactcagtacaatgtttaaaattttatctattatttacaatgcacaagataagaacaagttctaatattctgggtcatagtttggcagtcatctggatatgtagtatctattaataagcattcgtaataaaaagctgcagagattgagagcacaagagtaaaaaaaggacagagaaagactgaggctaagtaaatcatagggaatgtaaaaattatgcagagactcattatgtcatggtaaatgattctactaaaatttaggaaaagagttccaacacatagatggctcatactttataatgggctgtatttagagagataaaccacagtcctcatgatgtcctttgttgttc

SEQ ID NO: 479542 - DNA, 616 bp, Homo sapiens
gagggtccatagcttcattcttgaagtcagaatccactcagttacccagcaggagtactcccagggacacaatgggaggcaccctgctagtgcaactggtaacaggtacaacatgtacaaatccaactgcagatgctaaaacagacatttgttgcagcaccagtcctatggaccaaggtattagaggaagtctgatctacccaggaatcagctccaaccccattaaactgcaattccagataaaatttcaccagcccaaggattcaacaagagaaatactatgcctgctgaaaccagtttgtaaagactggaagcagtgtttgcttcttcaaatgtacagacacaaattaaaagttacatggatcatgaagaatcagacaaacaggtcaccatcaagggaaactaataaatctccagtaactgatctgcaagaaattgagatctataaatttcctaacaaaatacaaatgatctccctaaagaagctcaatgagatggaaggtaacacagacaactaaagaaatcagataaatgcttgaatacattcagaagtttaattaatataaactgtaaaaaacaaccaaatataaatcttagatctgaagtgtacaatgat

SEQ ID NO: 479543 - DNA, 736 bp, Homo sapiens
gggaggagccccccccctcacagcgctgaaaggagcaagacacatggattcctgggccagaacgggagtgggatgtacctctctccacagggcaggtccagaaagactggaggaggtgccaagacaccggaatgacaaacggcagacaaattctcaaaccgttcagtatggtgcagaagttgcagcaagggtcacacttgagaagcctgcaaggagaaatgaggactatctcactagctttgtgtacatatcagactgcctaagtggatggctagcacagggaaatggatgtaccacacttcactcacctacaccgttctcagtaaactctttggtgctttgtgtaacccctgagggactcagatacaaggttggggaaatgggaaggaagaaatcctgcaatgacagtgattcagttttgcccctccctggtaggtgtgggcccacaaagataagatgtagagcgagaaagagagaaaaggaaagaggagagagactgaagcaggattctgggcaaagtctgagatgacctgatgacctgtgtgatctcttccactgacttgctaccatggaagttacataggaggttaggctaccttttatttatttgccattctccctgggcattgtatatattggcatagttgaaattgctttgcaggtatgtctgtgttctagcccacaggaagatgaatgagcataaagaaattcatttccaatgttttaagacccagtc

SEQ ID NO: 479544 - DNA, 706 bp, Homo sapiens
cggcttcattcttgaagtcagttcaggctgtgatgtgaggacacctactgttaggggtagaaggggcttgagttatgggggcgaacccatatgggtctacagcaacctcaattcctgcctgctcggaagaaaaaattcgactgagcggcataaggccgaaaaagacaccaaggaaatggaataatctaaagcacaaaaagtttaagtttcccaatatcacaagagtagtatgtgctgttaattgtgaaggctactgccaatgttcccttaaagcccaaggcctcttcagtcagcttgtggtgaataatgccaggagggcagtgggctcctctgtgccccatggcaagtccaaaaatgttgtccaagagccatggcctggaatcagggaccccaagagcccacctcggtctctagcccctgtggctggctggcacctaaggtgcaaaacaaaatcccctttactttttcttctgcttttctcaagcagaatgatttaaaccccagatcagataaaaatacttggaagagcataatgactcaatcctatcacaacatagagctggattagataacaccaaggcaactttatgactaataaatatatgatttaacacagagactaatccaataaagtccccaagtaaacctatgtagaaacagccaatgtcttttagtgccaacactccgttccttatctggacacaga

SEQ ID NO: 479545 - DNA, 657 bp, Homo sapiens
aactttctagagacttgttgaatggcgttgactaaaatgctcaggtggtctcagatggagatgaggaacttgttgggaactggaacaaaagtgactctcgtcatacttcagcaaagagactggcagcatttttgcccctgccctagagatttgtggaactttgaacttgacagagatgatttaaggcacctggcagaaaaaatttctaagcagcaaagtattgaagatgtgagtcggatgctaataaaatcattcagttttatgcattcacaaatatatggtttggaatttgaacttacgtttaaaagggaagcagagcataaaagcttgaaaaatttgcagcctgacaatgcaataaaaaggaaaaatccattttctgaggagaaattcaagctggccgcagaaatttgcaaaagtcacgaggagccaaatgttaattgccaggacaatggagaaaatgacatggtgccctgcatcccagctgcttcagctccagctgtggctaaaagagaccaatgtacagctcagtctgttgcttcagagtgtgtgcaagccccaagccttggtggctttcgtgtgctgttgttcctgagtggtgagagaaggcatccttgacttgtcccggttttcaaagggaatgttttctgttctaaccat

SEQ ID NO: 479546 - DNA, 555 bp, Homo sapiens
caggaaaggaagcgaaaagtcctgcagtaagtcattcagagagatgggtacaagacaaagtcccttttacttttccctttacttttctcaagcagaagaagccttgcctcatagccaccacagctgggaatgtgttaattctcacttgaagccagcaagtctcagaatctcacccaacactcaatgtagtacctggatatcactgctggttattcaggggccgaaggctctttacttacccagtgatgaatgctgccaggactgggttcttcccttcaaggcagagggttcctttctggctcagaatgtgtctagaaatgttgtccagaatgcttttcaagtttatttaagacccgatagcattttaacccatggtggcaaggcctttgggaactcatgtttggactactgggatcagtgatttgcttgtacctagggctcatttaaatgtaccttccatgggtagatgccagctgagtttggtctagtcttcctttgtactctaacagggcagaactgagttgagtgcctcacaattgctgtgcactcccttcc

SEQ ID NO: 479547 - DNA, 686 bp, Homo sapiens
ctacacctgggcctgcttgagccatggctaaggcagccaaggggcactgcaccagaattatggaagcagagacccaagatgttcagatgtgtccggagtttcttccttccagtgggttcatggtctcgctgacttcaggagtgaagccgcagaccttcgcagtgagtgttacagctcttaagggtgtcacgtccggagttgtttgttcctcctggtgggttcgtggtctcaatgacttcaggagtgaagccacagaccttcacatgagtttaggagagcagttctctgctgagatcatccgggctttgctgtgtggcatgttaaacccgaactgcatcaaggacaatgctaccaacttcgaaggaatcatcaagttcagtgtcagggtttcctcaacttttattactccctgtcttcaatgccaagtggtaaaaattatgttaaaaccagagagactatgggagaggtataaatagatgaagcaaaggaaatttttagagcagtgaagctattctatttgatactgtaatggtggatatacgacattaagaacttggcaaaacccataatactgtacaacacaaacagtgagccctattttaaattatggattttaatgaataataatgtatcaatatcagctcatcaattctaacaaatataacatactaatgcaatatgttatt

SEQ ID NO: 479548 - DNA, 1015 bp, Homo sapiens
tgagatctgatggttttataagtgtttgacagttccacctacatgcactcatactctcttctgccaccttgtgaagaaggtgcctgcttccccttcctacatgattttttaattcaagaagaaaaatgggagtacaatagaagagaaaaagacactcggatcccagggaagagcataccggcaaacagctcccatggcagcatccagctgataaaagtgagtgaagccccagtacggatctgggtgcagggggtgcctcctctgctctacactcaggcaaatctccagacagttggagtacctgctcacctggatcagcagcctgagccaccccaccttttctgtgcagagattgtggcaaagggggctgtccccagttcctgtgcagagaacttgggactaaagaggtttccaagccccatgcctgggcacaccaatgggcacttgatgggagccctctggaagcccctcaacactggaggttgggctgaactattgagggacatgtgggtgtgcctgctcagtctggctaccccacccatcttagaccgctatcctgggctgagcagagagctcagaaccctgtgcactccacagatcagcccattgcctgagacaacagagagcttcttccagcaaataaggattagaaatacaaccatccgttttggacacagctggctcgtacctaaaagtgtcatctaccaacctggtctccagatgagaaggagccagggcaagaattatggtaacataaaagatctgaatgttttgacaccactgaaggatcacgctagctctcctgcaataatcccaaaccaaaatagaaactcataaatgacagataaagacataacaacatgtattgcaaggaagctcaatgagatccaagacaaggttgaaaatcaatacaaagaagagtgtaaaccaatcaaggaaatgagggaagaaataaacatcttaaaaagaaatcattcagagcttctggggttgaaaaactcacttaaggcatttc

SEQ ID NO: 479549 - DNA, 929 bp, Homo sapiens
ttttcaaataactcagtaaatccttcagactaaagcagccatggcacaaatggccccaggtacagcttggctgttgctctggatagcacagaccccctcgctctctctctgcgcctcctcggcctgggctcccactttggcggcacttgaggagcccttcagcccaccgctgcactgtgggagccgctttctgggctggcgaaggccggagccggctccctcagcttgcagggaggtgtggagggagaggcgctagcgggaaccggggctgcacgcagcgctggcgggccagctggagttccgggtggacgtgggcttggcgggccccgcactcggagcagccggctggccctgccggccccgggcaatgaggtgcttagcacccgggccagcggctgcagagggtgtactgggtcccccagcagtgccagcccaccggcgctgcgctcgatttctcaccgggcattagctgccttcccgcggggcagggctcgggacctgcagcccaccatgcctgagcctcccacccactctgtgggttcctgtgccgccccagcctccccgacgagcgccaccccctgctccacggcgcccagtcccatcgacctcccaagggctgaggagtgcgggtgcaccgcacaggactggcaggcagctccacctgcagcccctgtgcgggatccactgggtgaagccagctgggctcctgagtctgccagcgagaccacgaacccaccagaaggaagaaactccgaacacatccgaacatcagaaggaacgaactccagacgcgccaccttaagagctgtaacactcaccgcgagggtccgcggcttcattcttgaagtcagtgagaccaagaacccaccaattccggacacaggagaaataaagatcataaagatcatgtttagaaattcaatttgact

SEQ ID NO: 479550 - DNA, 1226 bp, Homo sapiens
acctgggaggccaaaccaagcctagacaatccgtgcaaagtaaccctgaggaggacgacaagccctgctccagtcacacccggaagctgactggtctatgcacggccgaagcatgaggaaaatcgtcgtgggacttattttccttataacatggacttgtgtggtaaaagcttccactgcttcttcccacacagaggactgctttcagtgcatacatgaggtcactgacgtaggacaacaagttaaggcaatctttttgttctatagttattatgaatgcttaggatttccaaaaggagcatgtttgtatgataacactcagtacaaagtctgtaatccaggagtgaccagcccgatgtgtgctatgacccctctgaacctcccatttccagtttttgaaataagattaaggactgaagactggtggggactcataaatgatacaagtaaagtattagctagaacagaagaaaaaggggtgcccaaacgcataatcttaaaatttgatgcttgtgctgctactttgaaaaaggttgaaaaagatcctgtttggctccaaaaagggaaaggaagcccctcctgcacgagtggaagctgcaaccctttagaattagtaatcacaaacccctcagacccaaaatggaaaaaaggagaatacatatctctaggcattgatggaaaaggactagaccctaaggacggcttagttgtcttggacgacaactgtataatggtaccacaaaaacagttacatggtggagttccagttacacagaaagaaatccattcagcaaatttccaaaattgcagactgtttaggcccacccagaattccactgggactggactgtccccacagggttatactggatatgtggacgtagagcctatgctaagctacctgatcagtgggcagaaaggcaacatagttaccatggtttttcaaatgtcaactgtgttcagcatgtgcgtaggtgctatagggacatgtgacaaaagtgcaagcaatagtacgaactctcatggaactttgcattgatgatagtacgatatcctaagactggaatatggtaagatataaattgctcaggtattctaataaatttcccttctcatcaattcagactagtcctacttctgggacaacacattttcttaaagggcatctaactgtaatccttcattgcatattgaaaactacaaacctagggtttgttagcattttt

SEQ ID NO: 479551 - DNA, 568 bp, Homo sapiens
tgaataggaagaaatactttcaaacttttacaaggttttatattgggctatgcagttcagtctacaatctagtaaatgttacttagaggcaagcagatgttctgaatgccgagagatctgccagggtatgttccagagacggccccctacaccaggatctctgcacaggaaaggtggaatggctccggctactgatgcagataagctgttgcttccaatgcctggagatgtgctggggcttggagcagagaggcccccctgtgcaccaccatctatgtacaagaagggtgaagcggctcaggttgctgacacagatgagtggatactcagaatgcctgatgatatgtctgggtgtgaagcagagatggcctgcctgcaccaatatctctgcacaggaggggtcaatgaggagctacatccttcagcttttttggtcagtgtggttctctctcatccaatggtagccctggagtcgcttagataatggaaagcatcactttcgacaacatcatggaaaagggttgggaagccaagatttcttggttaaataaaggaggtttttaattat

SEQ ID NO: 479552 - DNA, 499 bp, Homo sapiens
tttcctcactatgcaagggtccttcatcattaatacctctttaataaaaactcttctcaaggccgctttacttccaaaggaagctggagtcattcactgcaagggccatcaaaaggcatcagatcccatcactcagggcaacgcttatgctgataagaatttgggcctgtcctcggaatgctacaaggaatggggtgctgctgtaaagatacccaaaaatgtggacatgactttggaactaggtagcaagcagaggtggaacagatttgagggctcagaagaagacagaaaaatgtgggaaagtttggaacttcctagagagttggagggctcagaagacaggaagatgtgggaaagcttggaacttcctagagatctgtggaactttgaacttgagagagataatttagggtgtcttgtggaagaagtttctaatctataaagcattcaacaggtagcagtgcacaaaagtttgaaaaatgtgcagcctgatgaggct

SEQ ID NO: 479553 - DNA, 1100 bp, Homo sapiens
tctgagctcctgctctttctcctctttgagcctgtcacaaaggctgagatgctgacgactgtcatcaagaagtataaggactgctttcctgtgatcttcaggaaagctcatgagttcatggaactaatgtttggcattgccctgactgagatggacaccaacaaccactcctatgtctttgaaaacacagtagaactctgcgaccaagggaggctgagtgatggccagggaatgtccaagaaccacctcctaattcttattctgagtgtggtcttcataaagggcagctgtgcctctgagaaggtcatttgggaagtgctgaattcgataggggtgtatgctgggagggagcccttcatttatgggaagcccagggagctcctcactatagattgggtgcagagaaagtatctggagtaccgggaggtgccctacaatgctcgtccagagtatgaattattgtgaggtctaagagcccattcagaaatcagcaagacgaaagtcctagagtgtttaggcagctagacagtaccattgctagttcctttccatcctggtacatggatgctttgaaagatgtggaaggcagagcccaggccgtcattgacaccacagatgaggctacttccatggcccatgcaagcccactatcatgtccaccaacttctgtcctgagtcaagtctgaggcagattccccctctgtgtttgaagagggcagtcaaggttctaggcaggggaggacgagagtggagctggagggaccacagtgttctttgtgttcctgtttcatatgagtgacttagaatttaacattttgtgtgtgtgggcgggggggggggggcagtatttttcaaatgcttccccttttggttggcttaattcacttcagaatcttagttcatgaaaatcgtcacacatgtactgctgtttatctggtttaagagtaaggatttcatagtttgtaaggaaaaaaattgaaaacctgtcttatgatctggaacagtagaatgtggtgtcgggattggattggaattttctttgaaatgtgaaagaactccgtatttaaatcatggaacaaaataaaggattgttaattttt

SEQ ID NO: 479554 - DNA, 1041 bp, Homo sapiens
tcacactgaccagttccatcacccgaaaagtcccctgtgcatctcttttgagttggcagggtgttatgggccgaattataccccttcctcaaaatgcacacatacaaagtcactgcatttggacatagagcctttgaagagtttaatggaatcattgttgtgtctcctggcggcagcgtttctccctctggaaataagacctctaggccaccagaatgtaatgtcatgggaataggaagcaaaagtgttgctagtgggtccctaggggtgatgaagattgaagggccttgctccaaaatcctagagccccctgctgtgattcaccaatgggggcctgccaaaaggtttaaacagcatccctatccgccactgatacctcaagcagcattggatctgctggatcatatggcccaagtggcagggcagcttgcacagcagcctggacctgttgcagagccttctcctcttctgaacctcactcaaaactggcagccttttggtcgaccagtgatcttgtgtaagggaaaatcgatcaaggtctctcctaataagattatgacacaaagcaggagagtggatgtacccctgaggtatgacggtaaaggtatattgctggccttgccagctgaaggcaatttgcttctggtgggacttatggacaggaatggagaaaaaggcatttgccaaatcaatggctgcatcccagcccttcataatagcctttcccttcataatagccctcaccctcccagtcagggagccaatgtgggggttctgcaagctgctaagtatgtctatgccaattatacattctggcactgggaaaatggccacaggatgagtccggggacccactggatcatcttgcatttaggagcaaccaaccaacttcattatgttccttgattctccacatatggtcaaaggtattaaatatagggtcactaaacttttttctcacaagcagttaatcaggagtgtcaaatgcatttattttgcataattctctaaacagttcacgccaaaggctatcggtgttct

SEQ ID NO: 479555 - DNA, 643 bp, Homo sapiens
taatcaagttaacatcatcagtgacaaattttgttggtactatgtgctgtcggtgcactaagattgggaagctaaaagcagactcagggagtatgcctgcagctgcaggaagaggacatgaaaggagtttggtttatattccaaacatgacagggtgctacagaaacctgatgcgaaaatgtggaaaatatagaggtttgtggagaactgaagggacccagttatcctggaagctgggaaagaattctaaaggcaatgcaactccctcacaaggatgtgctccattgtctagcatcacggtgtgcatattacttaggcttgtctttcgctttctaagttatgaaaaaccaaagccaactaacaaagatggattcatccagccacatgttcacaagatgatgggtacatgtctcagaaatattagatcaaggaatcttttgactggaacattcatcaccatattaatccgttttctggctgctgataaagacatactcaagactggacaatttacaaaagataaggtttaattggacttacagttccacgtggctggggaagcctcacaatcatggaagaaggcaaggaggagcaagtcccatcctacatggatggcagcaggcaaagggagaacgaggaagac

SEQ ID NO: 479556 - DNA, 813 bp, Homo sapiens
acttgcgctgcagagaatgtctgatgagggagaggcctggagtaggctactgttgctctagggtggcaggggttagggaaaaatcaggagaggctgtaggctactgttcatctaggatggcagagtttagtgaagaagaggaagacactgtacgctactgttgttctacaatagaagatgttcctgaagaaataaaagaggctatagcctacttttgctctaagatggcggagattaacaaggagccagaagggaatataggccaccattgctacattatcccaaaggttaccgaagaagtaggagaagctagttcagacatgcctgaaccatccacaagcacaagccaagaaaatcccagcatgaaatggagaaagaaaactacttgtgaagctaaagaaggtgaaactgacgagttgttgaaggcagcaaagaagataagatcatttgttcagcagaattcagaaagacgtaaagcggggaaaaagtcaactgtattaattttttattaccacagtaataaaaaaagggatgaaaatcagccaaatgaggatgaagacagccacgagtaatctcccacctcaagtgattctgagagctcatcagaagaccaagacctatctcatctctaggttaacctctagaaatggtctcctgtgcagagaaactacatattgcaccaagattcttggatgttggtgattaaaattcaaccaaaagattttgaaaagttctgtatatctctgtggtgttttctaataatggagagggagggaaagaaggggaagagcatgtgtatgaggagggagggag

SEQ ID NO: 479557 - DNA, 470 bp, Homo sapiens
gactttcgagcgcagagacccgtaaggatgatgccaccattaaccatcatgggaaactcaaccaggataaggcataaagcacttgatatttgtcaggactgcaggatacctgctcctctatttaaaagattaaataattcaaagtcccgtattatcacatttgtgctagaccctacgggctcagaagaagacaggaaaatgtgggaaagtttggaacttcctagagacttgttgaatggctttgcccaaaatgcggatggtgagatggatgataaagtccaggctgaggtggtctcagatggatatgaggaatttgttgggaactggagcaaaggtgactcttgttatgttttagcaaaaaggcggcagcattttgttcctgccatagagatctgtagaactctgaactttattgggggaacccacccccaatatttccacgtaggttcttcctattttccgtaagtgtc

SEQ ID NO: 479558 - DNA, 529 bp, Homo sapiens
gctgcctaagaccatggcaacctacctcttctatcagtgtgacctggatgtgagacatggagtcaaaggagataattctggaattttaaaatttgactgccccgctggatttcagacttgcatggtatctattgtccttactttttatgaccctgacagagctttgagagataatcatattagaaacctagacctgggtcctagctttgttggttgtcaatgggttgccattgtttttaggctctcgcagttgacaaagcaagaaaacatagaagttggagctccttgttcttgggcctttagactcagactaaattacaccactggctttcctggttctccaactttcggacatcagatggtgaaacttaggcttcacaaatgcatgactgaacccatggatttccttctaataagtagaataaggcatgagtgacggcgtatcagttgcaaatgacatgacaaaagactttgcctgttatgttactggtactcttactgacactctattttgccctctcacctgcac

SEQ ID NO: 479559 - DNA, 984 bp, Homo sapiens
tacacgaggcatagctggcgaggcctcaggaaacttacaatcatggcagaaggtgaagaggaaggaggcgtgtcttcacatggccgccaggaaaataagagacagggggaggtgctacacacttttacaacaaccagatcctgtgagaactcactcactatcacaaggacagcaaaaaggaagttggctcccatgattaaatcaccttctacctggcccctcctccaactctgtgaattacagtttgtcatgggatttgggtggcaacacagagccaaaccatatcacctttctaatttcctcatgaattactgtggcacctcaactactactctgcaatatttctgccaagactggacaaagggcaacatgagtgaggaccaaccccggcacttagctgcacaggaacaatggcgagcccctttgggcgcctcactgatcagaagggcagaggacaccctgctggatctggaggagtggaagtcaatggcggcggtggtggacggacggccttcggcggtggtggacggacggccttcggcggtggtggacggacggccttcggcgttggtggacggacggccttcggcggtggtggacggacggccttcggcggtggtggacggacggccttcggcgttggtggacggacggctttcggcggtggtgaacggaatgcacttactgataagagatagaggcaaactgaaccagcagctcctggggatgcgctcggtgggtggtacccgaagcccctgcattatctctctgtgatagtttaagcccctgcacctggaactgtttatttttctgtaactgtttctgtaaccattaatctttttaactttttgcctgttctgcttctgtaaaaatcgcttcggctaaactccccctcccctatttagaccaaggtatcaaaagaaatctagctccttcttcggggccgagagaattttgagctctagctgtgtctcagtcgccggc

SEQ ID NO: 479560 - DNA, 1217 bp, Homo sapiens
caggggcgagggttgaaaaactgtgagaaatgaggatccagtttcagtcttctacatgtggcttgccagttttcccaggaccatttattgaatacagtgtcctttccccactttatgtttttgtttcctttgttgaagatcagttggctgccttttctacagattatcatcaaggtgtaggcttggtaggtttagatcctgctaacagtgtgttccagtactgggaagttgatgttggagtaaaaggaacacaaactctcaagaagttacatagattttttccgcaagcagctcttgcagcaagaatttatgaagtgacgctggtcttgagagaggtagtgcagaagacaaatgtagagttggagccctcacacagaatccctactcaggcactgcctagtggagctgtgagaagagggtcaccgtcctccagaccccagaatggtaggtccactgacagcttgcaccatgtgcctggaaaagccacagagactcagcaccagcccgtgaaagaagccaggaggggggatataccctgcaaagccacaggggcagatctgccaaaggctgtggaagcccactttttgcatcagcgcatcctgaatgacgacaatggcaatatttatactgtcataggtgactacataaaccagatcaacacttcaagaggcaagtttaacagtggggttttatataaatttggtgaagattttgaagctgccagtatacaatgtgaggtcttaaagtatatacaccagacagcaaataatatgctttatctgaaattaattatgaataaatgctcaggatcaaatgtaaatttttcccacaacacctaatgtacagaattgttgtgtttcgttttttgaaatcaaatcaaatgtggctccaagacctccacttgtcaaatatggtgaatagtttattgaatctctatttttattcatgtctttctcctcatttggttgcaccaggattgaatagcacagggcagtagattagaggcctttctggtaatcattccatagtcactgctgaggatgttgcctaaacttaaatgcctaaacttaaatgctcttaaaggtatgtggtgctactggtgctatagttcctctaagtcagaatgatctgaaggacccttagcatttaacatggtctttggtgtcatccacacaggtatactcatttcaatacaccaatacctctaggatgcttca

SEQ ID NO: 479561 - DNA, 730 bp, Homo sapiens
ctgccaaagtgggagcccaggcagaggaggcgccgagaatgctctctggcctgctcccatgtaagatgtgcctttgctcctcctccgccttctggcatgattggtatccggcagacaaaatttctaagcagcaaagcactcaagaggaagcagagtataaaagtttggaaaatttgcagcccgacaatggaatagaaaagaaaaaccctttttctggggagaaattaaagccagctgcagaaatttgcataaagagtgcaagccccaagccttggcagcttccacatggtgttgagcctgcaggtgcacagaagccaagaattgaggtttgggaacctccaccaagacttcagatgatgtgtggaaatgcctggatgttcaggcaaaagtttgctccaggggcagggccctcatggaggacctctgctagggcagtacagaagggaaatctgggaatggtagacccacttacagcttgcactgtgttcctggaaaagccacagacactcaatgccagccatgacagcagccaccggggtggaggggggctgtaccctgcaaagccacagaagcagagctccccaagggagcccacctcttgcatcagtgtgacctggatatattactgacacatcagctcctgtatccataagcccataaaatgtctttcctgtaatttgcactgtacagcccaatgatttcctttattgcaagaaggcaaagtcctggc

SEQ ID NO: 479562 - DNA, 637 bp, Homo sapiens
gaggtttggaaacctacgcctagatttcagaagatgtatggaaatgcttggatgcccgggtagaagtttgctggagggacagggccctcatggagaacctcttctagggcagtgcagaagggaaacgtggggtcacgaccctcacacagggtctctactgaagcaccacctagggatagctgggaaaagagggccactgtcctccagaccccagaatggtagctcctccgaccacttgcaccatatacctggaaaaacagcagacactcaacaccagcccatgagagcagccaggagggaggctgtaccctgcaaagccacaggaatgaagctgcctaagaccatggcaacctacctcttctatcagtgtgacctggatgtgagacatggagtcaaaggagataattctggaattttaaaatttgactgccccgctggatttcagacttgcatgcgctgcctccgattgccctggtgctcttggttgatatttgactttactctgccgaggggcaaggaagaagcacttattacacaaagataaatgatcagatgtttctcaaagtctgactttggatcatttccagacttctgaagaggtttatttattctgactatttttgccagtgttcttacc

SEQ ID NO: 479563 - DNA, 650 bp, Homo sapiens
accattaagacatacgcatgcgtatgttcttgacagcactattcacaatagcaaagattttgaatcaacctaaaggcccatcagcagcagactggataaagacaatgtggtacataaacagcacggaatactatgcagccataaaaaaacgagatcatgtcttttgcagcaacatggatggagctggaggccattactctaagcgaactcacgtgggaacagaaaatggaataccacctttttccatttataagcaagagctaaacatcggtatacatggacacaaagaagggaacaacagacacccgtgtctacttgggggtaaaggatggggaggagggaatccagctttaacttataaagccaataaagcccttgaaaaactggcctcatattttgtgtacacagatcacggccatttcacagacaactacccaaaaacatctacagacggcattgctcctactgtcaacccaaaaaactctccgtcccctcgtcagcaggaaatgcgtcatgaattatttgcaggtgttcctctttttcaatgtaggcacttatagctataaacttccctcttaatactgcttttgctgtatcccatgggttttggatgatttttctgtgggtagatgatttagttccttgccttc

SEQ ID NO: 479564 - DNA, 716 bp, Homo sapiens
accattaagacatacgcatgcgtatgttcttgacagcactattcacaatagcaaagattttgaatcaacctaaaggcccatcagcagcagactggataaagacaatgtggtacataaacagcacggaatactatgcagccataaaaaaacgagatcatgtcttttgcagcaacatggatggagctggaggccattactctaagcgaactcacgtgggaacagaaaatggaataccacctttttccatttataagcaagagctaaacatcggtatacatggacacaaagaagggaacaacagacacccgtgtctacttgggggtaaaggatggggaggagggtcactagtcagaagtcactttattggaaaggctatcctccatttaatggtgaagacgttaaatggtacttgtacttctttccaaaaaaatgatacttttatcagttattttactacagtacctggaacatgtaaacttgcaagcaatatttggtgaatgaaatatttggttaacctgaatttagtattgcagtcttcattactagaaagcatttacatgttttaactgtcagggagcaacactggtttaagcaacttttggaaggttaattgtaaagaaaatttcgtgtgtgtacatactggctaaagttaaaggggtatcattcagtttttctgtaaatcgagcattaaaataaaagcacaatgggtttctgtt

SEQ ID NO: 479565 - DNA, 1111 bp, Homo sapiens
gtctgaagatctgctcagagtgtgccagtcttcctgatgtctcaggcctttgaggggcatggacctgatgccagcaggaactctcctgtataaggtgtctggcgacccctctgctgtgctgtggggaattcctcctggatcaaaatcatcccgtttccctggcactggcaggggaaaaatggcagactggagccacagtgatggcagccacacctccctgcaggagttcagtcgtcgcaggcagctggcagccacagtgatgacagccacccctcctccggggggctcagcatctctagccgtgtggccaccaagaatctgcacagctctgtgcttgggacccaaggccctggtggtgtgggctcacgagggagatcccctgatccacaggttgtgcagatccatggcaaaagcatggcttcctgataagggtagcacaatcgctcatcgcctccctttgctggagatggtagtaccccttgccccatgtgactcccagtagttcttttctaagatgaaattacattattgaagctttctggtcactccggccaaatgaaatatcactcattaacctgaagcaccctgcgtaagacctgtcactttgcagctgacatagtgacacttgctctaatttcagttgcgatatacctgctgcagttcttctctttcagagcatttcatttccagtcacttgagtacattctgacaccctgtgatttttaaagtcaaataaataattgcttaatttcctcctgagctttgatgaaatgtcaaaatcattatagaaattgatgagaattgtgctagggtcttgtcagtagctcactgcatccctattaccctcattcctagtcaaactctggggtgatttaaggagcatgttctgatctaaatttagattttaattgcaatagttaggatataatgtttttcattgactgtttacttttgtttggaattaatttggatgacagagtcagtattaattaggaccaggagaatgtgcaggggaaaaaactatcctgataatttaaaaatttatttttgtccaataacttcaaacttttctctaaaacgtttttgcagggtggttaaaaatatcacattt

SEQ ID NO: 479566 - DNA, 639 bp, Homo sapiens
cgaggaccactgattttgagttaaacttcagtttgatttggaatgtgcatgcacagattgcggatagatagactgccaccctcgtcattgcagaaggaaacttgtgagttatgcccagtgcaattctttccaactctgattccactgtggttactgctgatggactctaggtggccacagatgatacaaacatgttcccatggagcctcatgtcatcctgacatgctgttccagtctaaggtaactgctgttcttcagtttagaaaaggagcaactgttttggatacattttcagtgccagaactctttctccactgccttagacttctcagtggtgaagtgagaaggagttttgacagctacagagcaacatttccaaacgagaaaagaaaacaaggcaaactttttataaattattcaaataatatgttaaattcaaggaaaagaaaatttccattttatggtgaagactgatgtttcctaagtctattgaaactatccaagtcaataaattgaagttacacatgtgctcttctgttctgtatcttaatttttaccttatttatgatgctttccattgtgcaaaaggaaatagtgtccctgtgtttgtccattttcatgctgctgataaagacatat

SEQ ID NO: 479567 - DNA, 543 bp, Homo sapiens
ttggagctattcctgtcacgttattgtcaaaccacaggaaattatgcctttcctcattaccacattgagcgctgggcacttctcattggatttagggcccacctgggtcatccaggatgatctcatctcaagatccttaattacatctgcaaaaaaaactctttcccaatatggagcaggacccctctggagtgagggtcttatgacctacagtcagacaaggaggtatccagaagaaggcattgttatcataggagatgacagctccatgcctgttacttcccctgaggaccttccagtgggacaagctgtggaggtggaagacagtgagattgacaatcctgagcctgtgaaccttacctccatgacaaaaatgttcctggaactcagcttcccaacgtcatctctacttcagttctttaggttgccagatgttgaagataaatcactttaactgtggttgcatagaattggttgggaatcacatgagtttcttcatgtaaaaactaccaagacctctgctttgggtctagatcctggttt

SEQ ID NO: 479568 - DNA, 550 bp, Homo sapiens
ctttcaggagccacctggaggcctctttggtatttgagtttgcttagtaacatggcagtatcagaaaaagggatgcccgtagggagaaggaagtgtgagagtggggctcaggattcagcatttttaatgggctcccaggtggtgttgaagctgctggctcagggagcacagtctgagcatagtctcccaaggtcagtgtcagaaaagctggccacagcagggctggcaagctccctaaagcagttgggtaaatgcctcacatgcgacatcactgggaagcttccaatgaaccagtatccaggaatgactgttccagaaacacatcctccctttcttcctccaggcaacaaggaggaagcaagaagggctggcccaaagaataccaacaaggcaaatttggggcttgtgtgcacttctgactttgctaaaattctcatgcctgctttaggaattgccaaatcaagtcatcctgttgcctgacaattccaaaccgtgctcacactaccctccttgtgaagtcttttttgatttgtcccaagtatccagtcac

SEQ ID NO: 479569 - DNA, 701 bp, Homo sapiens
tctcgcccacgatgagcccgtgcttctggctgttaacagggggcactggagagggacaactggacgggagagaggggttcatctcgattggcttgctgcttcgtcaggatgcaggggcgcttcactctggctgcagcggctggtggcagcctccaacttctttccgcacttccagaagcatcctcctggggccggtcggtcacaccggcaacagctgggaggcgccccttcctcagcggcctgagcttagcctagcgtctcctcctctaaacccctgctcccagcagcagccgggtagccctccctcctccgcagaggggtacccggccacttggacacagagccccacagctgactacggagagctgcacagctgtggcgatagaacacaggtatcctggcagcaaatatgcccagtagagggtaatccaagccttatctttcctcctggaagtaaacctgaagtatccgatgaaggagcagacttcagtatcctagcctccagaaaggaatgcagccctgctgacaccttgattttagcccagtgagatatgttggacttctaactgccagaattgtaagataataaatttgtgttgctttaagcagatcttttcccatagaaactacctgtactcacattattgacccacagttgacttctaggggtatccaaccactgtggtttgaatgtgtcccct

SEQ ID NO: 479570 - DNA, 942 bp, Homo sapiens
acatcaaagaccaaaggtagataaatccatgaagatgaggaaaagccagcgccaaaaggctgaaaattccaaaaaccagaatgcctcttctcctccaaaggatcacaactcctcaccagcaagggaacaaaactggatggagaatgagtttgataaattgacagaagtatgcttcagaaggtgcataataacaaactcctcccagctaaaggagcatgttctaacccaatgcaaggaagctaagaaccttgagaaaaggttagaggaattgctaactagagtaaccagtttagagaagaacataaatgacctgatggagctgaaaaacatagcacgagaactttgtgaagcatacacaaatatcaatagtcgaaccaatcaagtggaagaaaggatatcagagattgaagatcaacttaatgaaataaaggatgaagacaagattaaaaagaatgaaaaggaaaaacaaagcctccaagaaatatgggactatgtgaaaagaccaaatctacatctgattggtgtacctgaaattgatggggagaatggaaccaagttgggaaacactcttcaggatattctccaggagaacttcctcaacctagcaagacaggccaacattcaaattcaggaaatacagagaataccacaaagatactccttgaggagagcaaccccaaggtacataattgtcagatttgccaaggttgaaatgaaggaaaaaaatgttaagggcagccagagagaaaggtcaggttacccacaaagggaagcccatcagactaacagtggatctcttggcataaaccctacaagccagaagagagtgggggccaatattcaacattcttaaagaaaagaattttcaacccagaatttcatatccagccaaactaagcttcataagcaaaggagaaataaaatcctttccagacaagcaaa

SEQ ID NO: 479571 - DNA, 896 bp, Homo sapiens
atatacagacagctagtaagtgatgagtcagggtcacagagtcaatttcaagtcacttagcaaatctttcatggagaagtttctgaaccttagcactactgaccttttggacggcatgacagctgtgtgtggctgtgctgtgcatcagaatgctaccaatatccctggcccctactcactagatgccagtagcattcattaccccagttgtgacagccaaaattgtctgcagacattggcaaatgttccctgtggagtaaactcaccctgggtggagaagcactgccctaactccaccgtgtgtttccaagacgagaggctctctgtttgtccctttcctaagaataaacatctgtttctcttctgggtttggtggacattagatcttcagttgctcagaggacctggagacttaactgtttcttcaataaatattccactaacccttctattgttagatccccatttgcactcccccactccccaccacgaagtacctgggccaatcaattcctgagcctctgggggttccataatactcggtttttccttggctttctccattgctgattgaggttcctgctttcttgggcctgctaaatcaattagcatatccatctgcttaccagctgctgaaattttgttcttattatctcctctctttttctttgttgtcctggacttctgccttttgttttgcaaatgtctttacagtcatgggagttaagtaagggatttcaggaaagatgaccaaacaaaatagaacgttccccaagaaaactgatttaaagaagttgagttcagggtcagtcttattttattttatttttttccatctatggatctttcttttagtttgtaccctctgggctgattcaaattagaagagtattttc

SEQ ID NO: 479572 - DNA, 588 bp, Homo sapiens
ccatttccatcaccacttcccatctctgagttagaaaaagcataaatgatgatgtatgacttcgagactttctcttttggatcatcgattctggaggaagccaactgtcaaattgccatatggaaagacctatgttttgaggaactgatgcctccagtcaacagccagacaggaactgaagtctcttgcagacagcagtgcaatatggaaatgcaaaaaaggaggaggaagaagaaagaaagagaagaagagggagaaggagaagaagaaagaaagaaggaagaagagaagaagaaggagaaagagaaagagaaggagagggagagggaggaggaggaggacagaaggaggaggaggaggagaggaggaggagaggagggggaggaggaggaggaagaggaggagctactttctttttcaggcctttctgcagagtttcatgaaaacttttctagcactaaaagtaaacttgtggattccaggctttctgtgagatcttagatctaggactggtccagaagcttttaactaagccatttgaaacagtttttcctaatcctcaaatgtagagggcttattataatattt

SEQ ID NO: 479573 - DNA, 656 bp, Homo sapiens
tgcaactaagagtaggctgcctgctgggaagcttagactgcagaaactactcaggaggctggaagaaaacagcagatgctatggggatagcccaaagaacaggtgtaattggaaggtattttaagtcagttagagattcacattcctcaattactagaggaaaagagaaagtaaacaagctgttttctgtgctttttatgaccctatatttaccctcaagctcttgtaacctagggagggcgccaaagatacactgcaggaggaaagggttgtacttccttgttccgctgactcagcgggttcctgaagcatgcttagctttctccgacattaggctcctgcagcacaggcagtttctccagtacctagctcttgcagtgtacagtgccagccgtatccagcataagaacaccttctttgacttttacatacaagttcttgccaactatgctgtcttggaaatgtgaacaaaaatgcacatgcatatttaatccatggtatataatcaacattattcttcatgaagcccccagaagattttttaaaaaatataaatagtattctatatgtataacatatagaatactatttatattttaattatgattatgcaaaatctcttgtcattttgtgttatttgttcaactttaaagtaa

SEQ ID NO: 479574 - DNA, 1111 bp, Homo sapiens
gcgggtcttacgacctacagtcaataagaatgtggtcatgtcgattttctatgtcaattactctttatgggaacatctgatatcaaatatggtcatcttcaataaagctggggaattcaagatcaaggcatctggtgaaggctgctctctgtttctaagatggtgccttgaacactgcctccttcagaaggtaggaatgctgtgtcctcacatggcaaaagtatctgccctaagggtgtttactctcagtttggcggccccttgccaatggagtggaccaggaggcaagccacagcagctgtgcagctcttttgaactgaaggctgcacctggcactgttcttactgaactaaaggtgttaacaatccccttattaaacggactgagaccacacagtacttcaagaataaaagtggacactggaatccactttgcaaattctctaaaggtgatagggaataaaacactctagaggcatccttttcagcagaaggttttaggactgaaatgtaattttgcttagaagcatctagggttagagctgtataccaagatataactgcttagaattaatagaaaactcaaaaactcttgttcacaaatgtgttctaaggaaccaaagacatttaaagaaatccactgttgctacatcattctctcgtgttctcatttattttaaatccactggtgtaactgttttaactgcacttccagttttttgggccaagtgattatctccaactttatgttcctctgctttgtaattttctcttccaactttttcttatgaccaaaagcttttgactttccttttgaagtagcaggtatttattatccctttttctagtatatttttagttaatgtcttctatttcaatatgataaaatgtttcatatgtgaggaactaagcaaggtcctgcagagtctacaaaaatgactctttagaaatgcaattataaccttacaccttcccttcaccagacactccttacagggcatgcttatcccaccaggagatagcctcaagagacaaaagtcagcttacaaccaaaagtacaactacttttgtccatgatggagtcagctcaaccacctgatagataaggcacc

SEQ ID NO: 479575 - DNA, 1157 bp, Homo sapiens
acacaatatcagatctgcagtgattcttcattgcctgccctcctgtccacactcctgcctactgccacccacaagggtcatcatgtctcaggatcaggagagtccacgatgcacacatgatcagcaccttcagaccttcagtgagacccagagcctggaggttgcacaggtctccaaggctctggagaagaccctcctctcctcctcccatcctctagtgcctggcaaactgaaggaagctcctgctgctaaggcagagagtcctcttgaggttcctcagagtttctgctcctcttccattgccgtcacaaccacctcatcaagtgaatctgatgaggcttccagcaatcaagaagaggaagatagtccaagctcctcagaggatacatcagaccccaggaatgtgcccgcagatgctctcgaccagaaagtggcttttttggtgaatttcatgctgcacaagtgtcagatgaaaaagccaataacaaaggcagatatgttgaagattatcatcaaagatgatgagagccacttctctgagatcctcctgagagcttctgagcacctagagatgatatttggccttgatgtggtggaggtggaccccaccacccattgctatggcctcttcatcaaactgggcctcacctatgatgggatgctgagtggtgaaaagggtgtgcccaagactggcctcctgataattgtcctgggtgtgatcttcatgaagggcaaccgtgccactgaagaggaagtctgggaagtgctgaatttgacgggagtatattctgggaagaagcacttcatctttggagagcccagaatgctcatcaccaaagattttgtgaaggagaagtacctggagtaccagcaggtggccaacagtgatcctgcacgatatgaattcctgtggggcccaagagccaaagctgaaaccagcaagatgaaagtcctggagtttgtggccaaagttcatgggtcttacccacattctttcccatctcagtatgcggaagctctgaaagaggaagaagagagagctagagccagaatttgagtcagggctgactccatttccacagccactgtgagttccagtgctatgtctggtagcttctcccatacctagtgaagacaaggatagatgttttatgtaa

SEQ ID NO: 479576 - DNA, 530 bp, Homo sapiens
tttctgcgcatgcccatgcaactgctctgcaaagactccacaccactctgtgtgtcacacccaaggctttggtggcatgggctcaccaggggatctcctgatctgtgggttgcaaagatccatgggagaagtgtggtttcctggggtcacgcagtcactaaccacttttcttggctgggtgtgggggttcccttggctttgtgtcactccctgctgggctgtcaccccactctgcctttcttctttgtgtgtctagttgttttcctaatcagtcccagttccattcaggctgctgtaacaaaatgtcttagaccggtaacttataagccatggaacttgatttctcacagtttggaaggctggcaagtccaagatcaaggcaccagcaacatctgggacagcaaatttgatagggcttctcaaacagtcacatgagtctgcaagagcaatgtttcccagagtgcccactagattttcctcatatacattctattcatgtttaatgacagaaacactgttccttattttcc

SEQ ID NO: 479577 - DNA, 3822 bp, Homo sapiens
ctgtctttcttaccctcttcagtgcctcttctagtgatccttatttgcattaaagatgagtcttagacaccatctgagtattcaatcagtttattctgacaatgctctcacaagacggttagaggaaacatgttggtgtcatgggccagatatactcaggtggtctgataaccagatgaccaggaaggtctctgtgtggaaactattctcagtttggggaatctttccctctttctttataattgcattcattcttgcaacactttatgacaaaaaccctcaacaaattggcatagaagagatacatctccaattaataaaagccatctatgatgaactcacagccagcatcatactgaatggggaaatgttagcattccccctgagaactgggacaaaacaagaatgcccactttcaccgcttctattcaacatagttctggaagtcctagccagagcaatcagacaagagaaagtaataaagggcattcaaattggtaaagaggaagtcaaactgttgctgtttgccaatgatatgatcatagaactagaaaaccctaaagacttatccgaaaaactcctagacttgataaatgaaattcagtaaagtatcagaacacaatcaatgtacatcaacaacgaccaaaatgagactcaaatcaagaactcggtctcttgtacaacagctgcaaaaaataataaaatgctcaggcatatccttagccaaggaggtgaaagatctctacaaggaaaactacaacatattgttgaaggaaattatagatgacacaaacaaatggaaacacatcccatgctcatagatgggtagaatcaatattgcaaaaatgaccatactgcccagagcaatctgaagattcaaggcaattctcatcaaaatatcatcattcttcacagaactagaaagaatgatccaaaaatttatatggtatcaaaaaaaggtcccatagagctaaagcagtactaagcacaaagaacaaatctagaggcatcacattacctgacttcaaattatactacaaggctgtagctaccaaaacagcatggtactgaaatgcaaaaaggcatgtagaccaatgaaacagaatagagaacctggaaataaagccaactgatctttgacaaggaatatatgatgaattaaatatatttagatcattttagtctatctccttaagtcttttatctctgttttatatttattaatttctttgtgtttctgtgttgaattctgattttttttccaaatgctccttttttctaactatgtctctcttcaatagtctttaatttgctgactgactaggccatttatttgtaatttttatagtttgtcattattagaaattctcatatgtaatttcttccagacaagatttacatttgtatctgccagagctgttagcaccactttcaactaaataattacagtagggtttttgaggcctcaggtataatatgaattgtgggctcagacccacatgggttatgagggttttcaccttaacctttgtctcatgattcccacatgtagcccttaaaaatcaagactccatccaggccacggtagagttgcagatacaccaaagaaaatatcaactctagtactccctgacttttgtggattcacccttttatagttccctacattttaaaaagtggttttgtgtgtgtgtgtgtgtgtgtgtgtgtgtgtgtgtgtgtgtgcgcgcgcgcgcatgcatgtgtgttgaatgtaaaattttcagatatatttaactgggataagattctctgaacatccttttcagcatattgccagaaaaggctggcactaacttattttaaacaaaatttacctcactgtgaacttctgccatggatttaacttaaacataagacatcataattatctcttatgagtgacttctagataacattgcgaacttttaatttttgaattattctcttggttcactagtgacattttatttgtgacccctcaagaaattatataaactgaagaaggatcatcaagtaatagactgtctttctgttgcctacgatgttgattgaagtgcaacagggaaatgccataagtatcatttattaaattgtgatttctttagatgtaagaacaaaattcaagttataagtatttaatatactgatcatggcctgatgtcctaaaattatctctgaacgtcacacaacaaaaatattttcatgtgcatgtacttgcaataagtcattagacattacagaacactgcagggactcagattcatgcagttaccaaggtgattttaactttgtttactccacattaaaaaaaaatgctgagaacccatgttaaaggtggtttccacttgtatcggtatatttagtctttaccctgcacattcataatagtctgaaattctctcttattattcatgacccttaagagtaacaaatagtcatttaagctggtagctccagaaaataagtaacagtgatcaattttaacataatcaaacaataccttgtatttttgttcaatagcagctgtaagtgctttacttgctgaaaagtgactgtattcatttagttcagcacaactgtgaattatagctaagacacctcctaaaaatttgcaattcagaagttagcacactagaaaaagatctattatgacattggcacaagaaagcctcatccaaataattggcaaacaagcttttattccactttcgtaaatatacgatattagaaaacttctgcttaatgtctaaataaaatgcttaatgtgagcacaataaaggtcttatgttaggcctacattaaagcaagataaaaatagtttttatagtcatcattctgccactctctgaaatgatatacttttcagaaagatatttgttgccaattgccatcttcaaaatggaaaatttaatccaaaatttgatttctaatattatgtgtgtggagaagcactgcttgccccatttatttttaaaaagtgatgccaagcaaatgtattgccatttaattttgcattttcatttaactttggtcaggatatttctgctttccaccacattgtaatggcaaaattgcatgtcttatacctttcaactttctatttaactgttattgtgtttcaaagaaacatattcagaagtcaaacaatttgatattcaatggtttcttaaaatatcccttggaaacatttcaaggtaaagccaatattacatattttaattgatttttaccattaatctttttcttaaggcaatataccataaccataatagtaactttgagaatgaggtttatttttttaaatacgattcctttaaaataggctaattttattattgcttttacaaaacaaatgttaaatattttttaaaatatcaagaaatcaagaaatgctattttctccagctttagtgaggtctgattaaccaaaattgtatatatttagtgtgtaaaatgtgatgtgttaatatatatatagtgaaataattaccacaatcaagctaatcagcatatccattacctaacatagttaccatttttgtgtgtaaaatacttttctttttaatgagagcttttttgagacttttctttgttcttgaatataagccaaggtactttttatatcctgagcaagccatcctttgatttttgccacttaaatggtgtgcagctatttcaagattttcaacaatattattgtaacaacttagtatcatttttcacaaaatctaattttaatttatgtataatagaaatatgtaatattttatttttaaatatagctttttaaaactcaaaggc

SEQ ID NO: 479578 - DNA, 1776 bp, Homo sapiens
agaaaaccaattaggaaaggggatgataaaaatgcaataccggagtggctggcaagatggccgaataggaacagctctggtctgcagctcccagtgagatcaacgcagaaggcaggtgatttctgcatttccaactgaggttcccagctcatctcattgggactggttagacagtgggtgcagcccatggagggtgagccaaagcagggtggggtgtcgcatcacctgggaagcacaaggggtgggggaactccctcccctagccaagggaagctgtgagggactgtgcagtgaggaatgctgcattccggcccagatactatgcttttcccacggtctttgcaacccacagaccaggagattccctcaggaacctacaccaccagagccctgggtttcaagcacaaaactgggcggccatttgggcagacatggagctagctgcaggagttttttttcataccccagtggtgcctggaatgccagtgagacagaaccgttcactcccctggaaagggggctgaaaccagggactcaagtggtctagttcagtggattccacccccacagagcccagcaagttaagatccactggcttgaaattcttgctgccagcacagcagtctgaagtcgacctgggacgctcaagcttggtgcggggaggggcgtctgccattactgaggcttgagtaggtggtttttccctcaaagtgtgaacaaagccaccgggaagtttgaactgggtggagcccaccgcagcttggcaaagccagtgtagccagactgcctctctagattcctcctctctgagcagggcatctctgaaagaaagtcaggggcttatagataaaactcccatctccctgggacacagcaagcgggagaaggggcggctgtgggcacagcttcagtggacttaaaggttcctgcctgctggttctgaagacagcaacggatctcccagcgcagcactcgagctctgctaagggacagactgcctcctcaagtgggaccctgaccctcatgcctcctgactgggagacacctcctagcaggggtcgacagacacctcatacaggaaagctccggctggcatctggtaggcgcccctctgggataaagcttccagaggaaggaataggcagcagtctttgctgttctgcagcctccactgatgatacccaggcaaacaggctttggagtggacctccagcaaactccagcagacctgcagcagagaggcctgactgttagaaggaaaactaacaaacacaaaggaataggggcaacatcaacaaaaaggatgtccatacaaaccccatccaaaagtcaccagcatcaaagaccaaagatagataaatccacaaagataaggaaaaaccagagcaaaaaggctgaaaattctgaaaaccagaatacctcttctcctccaaaggatcacaactccttgccagcaagggaacaaaactggacagagaatgagtttgataaattgacagaagtaggcttcagaaggtgggtaataataaattcctctgaactaaaggagcatgttctaacccaatacaaggaagctaagaaccttgaaaaaaggttagaggaattgctaactagaataaccagtttagagaaggacataaatgacccgatggaactgaaaaacacagcacaagaactttgtgaagcttacacaagtatcaatagcctaatcaatcaagtggaaggatgtcagagattgaagatcaacttaatggaataaagtgtgaagacaagatt

SEQ ID NO: 479579 - DNA, 1135 bp, Homo sapiens
ctcccacagtgcagcggcgggctgaagggctcctcaagtgccgccggagtgggcgcccaggcagaggaggcgcccagagcgagcgaggactgcgaggacttgccagcacgctgtcacctctcacttccaggtgcatatgggcattgggacccaatgctgccccactggtatgcatgtgcttatggtgccccacctctgcatacctgcccgtgacttctctgctgccctgtagatgtgcacttacctgcagcttccccgcccacaacccctgccacctgtggccacccccctatcccctgccaccttgcttgtgtgcacttgtccatggccaccctgccgcagtgcactctcccgtggacactctgctgccctgccagagcgcattttcaggcagtccccatcagactgtcattaccagagactggaaacacctcagcccctccagcacgagcatgcagcccaggagtactgagctgagtcttggtcccctgaaagaatccagaaacaaagccaatctactaaacctaacttatgctacaattaaacccacaagggcatcaaataatgtgaaaacaaaactccccatcgaaagatcaggaacttgaaatattataaaatagttttctaattctgtgaaaaatgacattggtagtttgaaaagaatagtcttaaatttatagattgcttagggcagaatgactattttaatgatattgattcttcttaaatatgaacatggaatgtttgcccatttctttgtgttgtctgtgacttctttcagcagtgttttgtagctctccttgtagatatttgtcatcttcttgctctgacctttagtgagactgttgtacagttctcaagtaagataaataagaaatctcttgaatcttttctgttcgcaaatggtgctcagttctggggtttgagttatatttgattccaggcctgggcataatagagaaaaaaagcaaatataggaaactcatcattgaatcagcattactttgagttccagtttcctaaatgaacctgcttgctacaattacttttcagagtatttcattagctatttcatcaatttggtactttttattgcatttagttgaagaacagggttgaatacacatatttcatt

SEQ ID NO: 479580 - DNA, 741 bp, Homo sapiens
gtttaaggttatctcccttgttccctgaacattgctaattactaatagtgacccccgttttagcatgcaggaagccctggttatttcctcctttgttttctctcctcagaggcagtctccttcacagggcaagctaaatgagaaaacagtaaaaagtgaatggtctactgcaaacctattacaatggctaaaatctggaacactgacaacatcaaatgttgatgaggttaaggagcaacaagaactctcatttattgctgaagagtttggagggtttggaagaagacaggaagatgagggaaagtttggaatttcatacagactggtaaatggttgtgaccaaactgcggatagaaatatggacagtgaaggtaatgctgatgaggtcccagatggaaatgaggaagctattggagtaaagaatggtagaatcagcagcagcgttcagcctcagcatggaaaacctgtaggcatcagagtccaacccatgagagcagccatgtgggctatgtccagcaaatccacgacgtaatgttgtccatttgaaaaaacagccttgatacttaaagcaattcatttttcatcaattctttaacacattcaacaagttctcttaatcaatggactacatcaataatacttttttttcattgcatataatgttattgctagagagatactgaaaatgatgaagaataaataagtaggctttgctcagcagctaatcttaaaagccgacac

SEQ ID NO: 479581 - DNA, 678 bp, Homo sapiens
actgtgctgatgcagttccttctgcaaaaatatcaaacgaaagaactgatcacaaaggcagacatgctggatattgtcatcaacgagtacaaggatgaatttcttgagatcttcaagagagcttctgagtgcatggagctggtctttgctgttgatgtgaaggaggttgatcccaccagccacagttactcccttgtcaacaaactgggcctcacctatgatgcaaggctcagtggtgatgaggacatgcctaagattggcctcctgattatcaccccgagtgtgatcttcatgaagggcaactgtgcctctgaggaggagatctgggaagtgctgaatatggtgaacttatattccaaggggagatacttaatctttggtgagccaaggaagtctatcaccaaagatctggtgcaggaaaagtacttggagtactgccaggtgcccaacagtgatcctccatgctatgaattcctgtgggcttatttaagaatgtataagacataaatcttaataaatcagaccctgtgtacattggttcatttatttcccaaacattaagtgaacatgtcttttttgtaaagcactttactggggatgctaagagaagcaagatgcactacctgcccatagaactttagagtgcaagagcagcagtcatatgaagatgatggtgag

SEQ ID NO: 479582 - DNA, 824 bp, Homo sapiens
ggcaacagctttgaagcagagagcacccacttaaagcagcagtctggccacgttttggtaaagcagctgtgctatgctggaggatcccttctacccctggttggcttggactctccaaaacctgaaggctggaatgggtaaggtgcccaaacagcaaagatggcaacccacccctcctactgggatctccttcctagggaagttcaatgccactaccagtggaattccaagccagtgggtcttatcttgtgaggtgtttcggaatttccaatactctcatgaaaatggagaagtggggttgtcttggatgagagcaagcttggatttaatttcgttggttcttagtggacaggtcattgaagaaaaaaaggttgggtggtggtgtgaatatcaccaggtaggtagttaccagaatacatcacattcctttactgaatcattttctataaagaatgaatgcatgggcttcaaatgctgaggtgattcctatgatgatactgtgcacttgaagatggaagacaaactgaaaggtcatgggaaaaatccgggccagctttaggaagctgatttacatttttagctcaggtcctgggaaagtacagagcctcttagttatcattattatgtttttaaacacagaaaactcagggacatatagttaatgaaaatttttttatggtaatgaatattgttatcaatgtgtcttggaaaatgaattgataatgtctaaaatataaatgaatttctctcttttgaaaataaagttgacctttgaaccatacagatttgaactgtgtgagtccacttacacacagattttttta

SEQ ID NO: 479583 - DNA, 568 bp, Homo sapiens
gaggttcatttgttattttcttagtgacctacagaaatcaattttgatccttccggaacccatctcagaagcaacatctcttttaagctgatgttggggcttctgcactctcataattcggcaagtgggagggggtgttacagcttttttactcctgtggtttggcaagttccaagtccttgtctcatgatcaagagtaatgagatacatggacaccagagagtcatggagatagagccagcaatgaatggaattagtggccttataaaaggggcccagagagatcctcacccttctacatatggatacagcagaagatgcatctatgaacagaagtgggcctcacagacatcaacctactggtgcctgatgttgactctcatctcagaaggacttctcaatcttcagaaaccagtgattcccaacatttttgacaccagggaccggttttgtgagagacaacattttcacggacatgtgggaaaatggtttcaggatgaaactgttccacctcagatcatcaagcattagttagagtctcataaagagaacacagtctagattcctc

SEQ ID NO: 479584 - DNA, 675 bp, Homo sapiens
tgttcttatgatcaggtgatccctaccctatgattcaaccttgttcttctctggcacacaccccttcctccacctgcattccttctcataaagccccccttgctatccagtctctatcctattcacccaaaataatgtctttctggcctctccctgttttcttaacagatgcaggagacaccaaacagggacttagcccccgaaccgagtttgaaaaagatgaaaacaactccatcaatccagtccaagaggaggaggacgaaggcctagactcagctgaaggatcttcaaagcaggatgaagacctagacttacctgaaggcctagactcagctgaaggatcttcaaagcaggatgaagacctagacttacctgaaggatcttcaaagcagaatgaagacctaggcttacctgaaggatcttcaaagcaggatgaagacctagacttacctgaaggatcttcacaggaggataaagacgtagaattacctgaaggatcttcacaggaggatgaagacctagagaaaaagcgatcatctaggtcaagaaatgaaatcgaaatttcagaaattacagaaattctccaaggaaggagccagataaataaatattctgatttcattttcctccttctccagtgatctgcagggacctaccattcactaaaactaaccc

SEQ ID NO: 479585 - DNA, 517 bp, Homo sapiens
tcaacccattctgacaggccccaatgtgtgttgttcctccccatgtgtccatgtgttcttgtcattcagggttgttacatagaagtctactgaatgtgtggagccctcatggaggacctctactaggacagcgtggaggggaaatgtggagttggagcctccacagagtctccacttgggcactgcctagtggagctgtgagaagacagccactgtcctccagaccccagaataataaatccactgacagcttgtgctgttcacttgcaaaaggcacaggcacttatcgaccacccttgagagcagccacagggactgacccatgcaaagccacaagagtggagctgcccaaagtcttgggatcccaccccttgcatcttgtggtgaaggctgccaagcctagaactcaccctcagggaagtgggcttccctgtgtcacagggtaggtccagaaatgctgtccaagagagactgacctaaggtattcttatttatctaaatattttgatgttaggac

SEQ ID NO: 479586 - DNA, 2743 bp, Homo sapiens
ggaaaagacacctctatagaggcagaaaccattttgatattaggctaatgcttacttcagagaatatgctaacagtaggccaccaatctctccagacttgcaagatttctgatgagaagtatgctgttaacctgatgactttcccttttaacgaggacccaaatgttactcaccaagaaaatgggaaaaatgtctccagggcatgtctcagaccttcatggcagtccctcccatcacagccccagaggcctaggagagataaatggttttgtgggccaggtccagggccaccctgctgtctgcagcctctggccttggtgccctgcattcaagctgctccagctatggctaaaaggggccaaggtacagctcaggctattgcatcagagggtgcaagccccaagccttggcagcttccacgttgtgttgagcctgtgggtgcacagaagtcaagaattgagataagaccctggactgtggacttatgagtcaatgctgaaatgagttaagactttggggtactgttgggaatgcatgattggttttgatatttttcatagttcattgttcgtgtataaaaacacaacttacttttgtattgtgattttgtatcctgaaactttagtgaattaatttcctagttctaacagttttaggtagagtctttagggttttctacacataagattatgatatctgcaacagagacaatttaacttctttcttttctattttggtgccatttttgtttaattgctgtggctgggacttctagtactatgttgaatagaagtagcaaaagtggttcagagatagatttttaacatctatatgtgatatttattcacaggaacaatagcatattcatctctcctaaattcagacactggacttcttagtgttggctatagaaagatattattgttgactatatttaaaatagaatttatcaataaatacctaaaatgtattaacattttgttaattgctattaagagctgctgaaatgccataacttatattgtgtctagctgttttcaacgtaattttgctttaattatatttttttaattgttcagacaattgtggtaatagcatgtgtgtaattttatttactgtatttttcacataacatgcattccttatagttttaaatattctatatgaattaatttaatagctacaaaatattctgaaatttatcttagctattttccagttgttaaaaacttggattttttcctcatattcttgaatataatatttctgtaatgaagatatttacgtttaaagttttgttccatatttgggaatactttcttagtataaatacatagaattaaaacgaatggatttgcaacttcaggtcttgtggaaagcgtatgccaagaaggagttagaaatgcaagagatttattgagaaaaatacttgtgaaatcatagagggcacagaagtaggcagggagagatccagatcacaatgtacataagacacttgtgaaagagaggaaaagaaaagtaattattatgaaagattctcaaactgtcatgaagcttggagaaagtcttcactagcccaaaagaaaggagctctggttattgtacattaagtgtcccatgttctgcagaaatgcctaagctttggtagccctaccatgctcagtcagctgccagggaagagcatggctttggaggaaatgttgcaacaaataatgaaggtactgtatctagtgagtgtcagctaattgcattcctccagctgagctgcaagtgatttcttgactctccacagctattccagcaaatatggacatttttaacaataatgtagtatcaagttattttctgaaaggtctataaaaatttacactctactacccatgttctgtcaccagcttttactgccattattggtagtaattattagaactttgaaagttaaaattgctattcaactgttactttcgtttgtattttttgattagtaatgatgtgatttttcccattggtttgttaaccagttattgttcctttctgttaatttattcctaacggagactgaatattattatatatttatatatggtacaaatagttttcttattgtttgcttttactttttaattattttaattcgttaaagctataccttttaatttttagcgatttttgcctgtcacattaatatgtgaaaatactccatagatttgaaaaccatttctttatcttttttctatttattaaattcttatgtcagaatgctatataagaatttatattgatgtgctatgacaatgtaaatttaatgtatcctaaattgacaatgttcttaatatcaattactgaataaactttactttctctactgattttttataatagcatcaataattttagattcccatgaaaatccattatccatatcttgaaaccacaatgggtgtcaccgatatttacacctatgcagtatggctacggacaattgtatttcactatttaatttgtatggtcctgcctgctagtgactctaagcatcttttcatttacttcttcattcattccagaaatatttattaactcagcaaaaacgaaattgacaacgatcccttgatttttgtatagaatagttatatttattaaccagtttgtctcttatgaattaatcattcacatatttgaaattgttctctactttttttcattttttccatttgttggattttctttgtattctagaaacatc

SEQ ID NO: 479587 - DNA, 1162 bp, Homo sapiens
gccggcttcacaattgtaaaaggatataatgagtcatggaaatgtaaatttttgcctggggttaaaggattgtattaaattagataagaaaaacctgaaggttcaaagaagtggtggaagaattgtggaaattaatcttgcggaagaggttctctgtgtgaacttattgactaaattcaaaaaagggcattctatggtttttctcattcgacttaacaataaggagtccacgcaacccccaccaccagacacatttttgtcccagactcagttccaagcttcgagtcaaagccctagaaaagaaaactggatcggagggatccagaggcaaatgacaaaagtggttaaaaggcacagcaaaggccctttgtgcttcctggatgcaagccactttagcactcatggcggaacctgccaaggttactgggactcagagatgcaaggatggaagagaaagggtacactcaccagcagtcttgccacgggagtataccgaacaaaggagacagggtcatttataacctgacacgtctaccctactgctgtgtccggtttccgttggctggaacgggacctcacattctgtatttgtccagattggctagcaacttagagcttttaaaaagaggcaaaggcagaggacaccaaaggaaggaggaagtaacttgtggaatgctgagaaaggttcccttgatcaacctagccaatgatttttttgtgtgcacaagaaaaaataaaacaaaggcgtagaacacaaaactacttgcaaatttccaaaagctaaattttacaccccttgcaatactgccatttactactggtttctttctgacccagtcagaagatttcataatctacttgaggatatagaaaaatataaggcaatcacaataaattctattactttgctattaaaatatttaagaaattttgcgattgcagagagaaagaaatatctagtgtgggtggggtggtaagataagggttttggggaagagaaaatatttgaattatgttctgagacatgcaaatgttcccttgggctaggagtaggggtaagcatgtggaatgagaaagatttccaggaagatggatcagcatataaaaaggtacaaaaccatagacaggtctgacacatttgactagatcagacagaagaaat

SEQ ID NO: 479588 - DNA, 564 bp, Homo sapiens
ccctgagcgaacatagatcctctggtttacacatgagaaagctgagacacagcaagatgaagctcttcgaccaaagtcacgtagctatatgtatgctctcaggtgcacagtgcaagctgttcggggatctaccattctggggtctggaggatagtggccttcttctcacagctccaccgggcagtgcccccgtagggactctgtgtaggggctccaatcccacatttcccttccacactgccctagcagatttcaaagttccacaaatctctaaggtcggggcaaaacgccaccagtctctttgccaaaatataaaaagagtcacctttgctccagttcttaataagttcctcatctccatccgagaacatctcaacctggatttcattgtccatatcattatcagcattttggtgaaagccattcaacaagtctttaggaagttccaaactttcccacattttcctgtcttctgagccctccaaactttctaacttctgcctgttacccagttccaaagttgcttccacatttttgaggatcttttcagcagcgccccactct

SEQ ID NO: 479589 - DNA, 753 bp, Homo sapiens
ggagcccaaagttgtaaaagctcatggcagatgtgtggatccctggggactctcactcaatcatcatttctacagagtggggccttcatctttctcccgtgctggatgcatcctgccctcaaacatcagactccaagtttttcggctttctgactcttggacttacaactgtggtttgccaggggctctcaggccttcagccacagactgaaggctgcactgtcagcttccctacttttgaggttttgggacttgggctgagccactactggcttcctatctcttcaacttgcagatgttctatcatgggagttcaccttgtgatcttaggtgaagagaaggaagtgtgtttccggagatcaataacagctggattcctggagagaaggccagctagcaggacttgtaagtgtggaggaatgcaactacctccagagaagcagtacagaagaagttttagtttcaagtctttcatctaccttgatatgactcctgtacaaggtgagatacagggacccagtttcgttctttcacatgtggcctgccagttttcccagcaccatttataaaacaggtttcccctccccagtgtattttttgtatacttttttgaagatctggctgttggttttcacctttctctggtatctccttgagtaacttaagagttgaccttctgaattccttatctgatattccaattatttcatcttggtttggatccattgctggaaagctagtgtgatcttttga

SEQ ID NO: 479590 - DNA, 558 bp, Homo sapiens
ggacctgggcgccaccatgttggtacagtcgaggatcctttctccatccttgacctttgggagtttggttgttaaatgccttgagaagatttcattcagctatttttgtataatagaaaagagctcccctcacccttctcatgagatggaaggagttagaggacaaaaattcttgacaaaagaacctaggaaaatattaaacttcagtagaatccttagtagaggagtagccttgaaagacatgaaagacaaccgcctctgggctgtctttcatggaggaggcctggagagtgcaagtgcaaaaactgcagtagtcttggtgccgatcgtaacatcaggagaggtatttttcactcttatcatgggaagaaggagtagtgaaagaggacatgcttatgttgttctgggttgcaagggtaatgattctagtttttcccagtcagtatgatgttggctgtgaagttgtcatagatgactcttatcgttttaaggtacgtttttcagcctgctgttagcttgatgtggttacctttgtaggtgaccggccccttctgtata

SEQ ID NO: 479591 - DNA, 1273 bp, Homo sapiens
tctgctgcaggggcagagccctcatagagaaactttactaggacaatgtggaggaaaaatgtggatttggagcccccacacagagtctccactggggcactgcatagtggagctatgagaactagagggccaccatcctccagaccccagaatggtagatcaaccaacagcttgcaccatgcacctggaaaagctgcaagcactcaatgtcagcccttgaaaacagctgcaggggctgtaccctccaaagcctcagggatggagttgcacaagtcctttggcacccccgccccttgcaccactgcagcctggaagcaagaaatggaggctctgggaggagcttggagtgctcaggggatgccccgctttggcactaagtgtgaaggcagggaatgtcccgctgaaagaagccagccctttgggatgaggggacaaggggaagaggtcaccaaaggctttccagaagtggtgacacctcagaagaagctgagagaaagaaggttctatgccaatggaagcaaagatgagagagggacagagcactggcagcactctgagtctgagtctctgattccaaatgtccctaaggcccagctgcccttgatcttcccaccttttcttagtagattaaattcctcaagggccttccgaggagccgagaatggcagtgtggaacatggccacagagagcatagcagccgccagactccaaatctaagactggcccaggttccagatgcaactcaaaagggccatttcgaagaaaagagtcctgtgttaagtaataatgggctagatggatttttatgtgataagagcaaacaaagagaaaaccattgttgcaatggccataattatggccaaacaaattacacacttcaagatgagaaaaggaacaaacgtgtgattcttgcaaatgagtttgtccccatttttatgagttatgatataggacaagaaggaattcagaatacaatgatgcaagatgctccatctgtttatggcttcgtttcttaccatatgctgccgccactcagcaaaaacgctggggaggtggaagcttggcatttgggaaagaagtatccttttcagttaaacaaggaggtggaggaaatgataagaaagaagttgaagttggctcattatgaaaaagcaaaaaatctgaacatcatctgtcactctcagtgaactccagcatcaaataaagcatcaagttctttcaaatgtgtctcctaaatatatcttggaatagttcacttctgatcacccttac

SEQ ID NO: 479592 - DNA, 702 bp, Homo sapiens
gcatgccctaccctcagtctaatgtctctgggcctagttcagcactacgacttgcttatgagttgcttctgtttgcatcactgtaaaggaatacctgaggctatgcaatttataaagaaaagtttaattggctcatgtttctgcaggttgtacaggaagtacagtgccagcatttgcttctggtttggcaagtatccagggacaagcgaggaaatctattcctcctctctgctcagcacacagggcccattcagtatcattcctttagactacggctgggcttcttgccctccaatccccgggctccaccagccctcgggaaatgacaggccctgggaatcagagagacagtgcccttcctcatcacgctcagctgccctactccccccaacaggatgtgggcagcctgcatctccgctggactggagccaaaatgccaaagcacagcaccttcgagttccatgcctccagaagggcttgtccctgcgcactgggatggtgcttgtttgcaagattcttcaatgtattcggcattgaactcttttcccatacctctgataatagctctattgaaatgacttgaataaatgctatagtaattaatctaggaggggtaggagggatccagaaagtgtagtgtgatggagaaggcctggtttggggtcagctttgtacattactaaccatgtgaatggacaagtt

SEQ ID NO: 479593 - DNA, 676 bp, Homo sapiens
gccattctaactggtgtaagatggcatcttattctgcaggtctgttggagtttgctggaggtccactccagaccctgtctgcctcggtatcaccagtggaggctgcagaacagcaaatatcacagaacggcaaatgttgctacctgatccttcctctggaagcttcgtctcagaggggcacctggctgtatgaggtgtcagtcagcccctactgggagatctcagactctgtgctggaagaaccactgctctcttcaaagctgtcagacagggatgctgaagtctgcataagtttctgctgccttttgttcagctatgccctgcccccagaggtggagtctacagaggcaggcaggcctcagcaaaccttctggaaagattatagccagttgacaagttccagctgtgatgtctttggtccctattgcagcatttttgcccaaggtggtagccattgacgatgtgtgagtgagacacagtttagaaaaacaccttttcagcttcagtgtacaggatggattggatgcagggacatccatgaaaagacaaccataaatacatagttatccctgaccacaggaatgtagccttacttttctgtatgtgtctggctttagttggcattaaaccctatctagaagatacaggatatctatgtgagtctgcttgggctgcc

SEQ ID NO: 479594 - DNA, 523 bp, Homo sapiens
gtttgacatcagtcttttaaaaaatggattccacatatgagggagatcaggtgttatttattgttcacaaatggttgttcaccagcccactgtttctgaggttcagcccattgagagcagcaaacaaaaacaaaaccttcaaatggcaaagggatttgagagaaaacagcagagctgatacaggaatggctgatggtgttaacccactgtgtatatgtccttgggatccctggaaggaccagaaatatttcagtgggcccagggttgctttagattctgaagcaacttcagggtttaaaggcatccctgaaatgggtctctaccagttggtggtcaaggtgcttgccacccatatatgccaatatgtgctttcaagtgcacctagaattatgaagtggttgctagtgaatgtgcatatgtctagcagtctgggctgaaaggaggataggaaggttgataatgtgaaagatagtgaataaacctgaattgtgtggttggtgtgtctacttaaagaaatatagta

SEQ ID NO: 479595 - DNA, 681 bp, Homo sapiens
tttttgggcccctggatgcaggtatggtgtggtcaatgatagttgcagtggtggaacaagccttttgctcccaagctatccacactggtatttatgatggctgtaatgggttatgcaagatagtcctgaggcctgcaagtggcatgtgcaggccatgtgaaggtgtgctgcagcttcactgctgggggcagcaggatccttgccgatgccttcccttgcactttagccctcgtggcacagtgagctgcgatggtggctgtgggtgtgaaatgtcaatggggctccaaagatgtggagatgcaggggctattgggcccccaggcaggatgcagtctggaggccattgcaagtgtggaggctgcgaaggccctgagctctgggagcccacactatttactggtgctcaaacaaagaaacaggtgaaggcacagagaaagcaaattgaggcttaaaaacaatccttaaaccttcaatgtgcactgtacaggtgttgttcagctgcagtcatgggttaatctttctgtaaatttaaaaaatttaatgttaataaagctaaatgcaattgcatatgttgtgtcttatattcctagtctcctcccttttgcttttgtatttgagtttttaaagtacaattagctctttccactattgcttgtctttgtgagttatatggaacacccg

SEQ ID NO: 479596 - DNA, 529 bp, Homo sapiens
atcaatttgcattgctacggtgaaattttaacaactcactaggaatttccttgtgggcaaaatatggcggaggcatgtagcttttcatcttgtagccatcttattgaggacccaaaagtgggaggcagacacgacaaagactgggagaaaatatttgcagaagacatatctgataaaggactgttatcaaaaatatatgaagaactcttaaaactcaataagaaaatgagcaacccaatgaaaagatgtgcaaaagatctgaatggacatatgcccaaagaagatatacagatggtaaatatgcatatgaaaagatgctcaacatatatgtcattagggaattgcaaaattaaaacaacaatgagataccactccacaccaattagaatggctaaaatccaaaacactgataacaccaatgtttgtgaagatgtagaacagaaactctttcatagctggtgggaatgcaaaatggtacagatactttggaagatagtttagcagtttcttacaaaactaaatatgcctt

SEQ ID NO: 479597 - DNA, 531 bp, Homo sapiens
tccaactcactagtaatcaaagaaaagcaaattagaacaataatgagattctttggcaaagatattttttattttttaataacacttaatgatgacaaagtagccaccaaacaagctgtcttaattgctgatagcagcatatgttggttaaaaacccttttagaaagcacctttgctaattcagctctccctccagagccctctagtcagccttggactttgaatgtgttccgccccccaaatctggcctgtgggaactcataccaggcacttctctgctccttctttgcaggtggtgcttggcaggagctggaaacactttcagccagaaactgctgcccatttctgttttatcctcctcgtctgccacaagttcaaattcttatactaaacattgagagaggtctaatgagagcaaacctaggcactatcctggcaaaaatgtaaacaggaatgtatggattaccaccccatgaatagtatatgatctcctgacccattgtgaatgattgacttcaatgagtcgatttc

SEQ ID NO: 479598 - DNA, 612 bp, Homo sapiens
tatgatactcactgttgaatagcattcactcttctttaaatgtttggtagaattcagcaatgaagccatcaggtcccaggcttttctttactggcagactttttattacaacttggatattgttactcattattgatgaatctcaatttttggccaccaccaccacaagcccacagggagtactgccagactaccgccatgttaccttaaggcccacagggcttttcaatctgcttgtgaatgctgcctggcctaggactcacccttcagggcacagcattcccttctggcctagggcaggtccaaaattgctatccaaaagccaagacctggaatctaggattccaagagtccacttggtgctctacctccctgtagccaagctgatgtctaagggcccaagggctcttcagttagcaagtgataaatctagacaggcctgggtacttcccttcaaagctgcaggttcccttctagtccagggtgtatctagaaatgcagtctaggagctagggcctggaaaggggaccttatgactctgaccagtagtgtcagtcttctgactttattcttcttcaatattgtgttggagaataaagaacacagaaataa

SEQ ID NO: 479599 - DNA, 1720 bp, Homo sapiens
tgctgtaagcagggacccgaggacctcttaatagcagttccttctgagagagaggggcacgctgatgcaaaggatgtgctcccatggccttgggcagctctgcccctgtggctttgcaacgtacagccctctatgcctcacgcccaacccattgctttcatgggctcgtgttgtgtctgcatcttttccaggtgcacagtgcaagctcttcatggatctaccattctgggttctcgaggatggtggcctgtttctcacagatccactagccagtgccccagtggggactctgtgtgggggctccaaccccacatttcccttctgctctgccctagcagaggttctccatgatggctccacccctgcagcaaacttctgcttagacatccaggtgaaaacaggaagctgcaccctccagctgagttcacacagaagcgagactgctggcctgcaagctctaggaggcatttcctgcctggctagcagcagcaggggtaaggtcacctaccctggtgtctgggtgcttcctgggacaacaggcaactgtgagcactggctgagttcacattgtaggaggactacggtgcctgagtgcatgtggggccatgtgctctgtgttctgggtatttccctggacaacaggaagctgtacactttcgctgaattcacacagaagcaggaccactgagctagaagctctagcaggcattgccctcctggttcccagtggtgggggcaggtggcgttagtaatatcaaactgaagttaaactctagtgcagctctgaagtcttctccagctttgtaatatatttatgtaatatttattgagtgtctgctaggtgctaggtagtgtaataagtcttttacacatattaactcatgtaatcttcacattagccctgtgaagtagggattattattattaaatccattttgcagaggaagaaaccgaagctcagagatgttaagtaacttgctgacattcatggagctagtgtgtagcagaattaggacatgattccaagcctgttttgatttctaagtttgtgcttccaatcattttaagtctttcaaaaagcttttcctcatcctccctgccgccatttcaataacttctaaaagaacacccaagatatagcaccaaatcagaaatggaatagtaataatgatgctttggcttaaatgctttgaatgctgtctctttagcaatggacaaatggccttcgagcatggattggaataggaactttggagtcccccgacacttagatttagatctcagctctacctcttctttatctgttagtttctttatctataaattgaatataataatagctaccccaatagggtgattgtgaaatataaatgggttaatacatgtaaagcacttagaactgtccctggtccatagatagagctatgtgacaagattctgttatgaagctataagataaatttagatactgtgttgtttccttgcctcagagggtgaagaggaggcttatctaggtcaaagggagcactggaatggcaatactgttaggaaaaaactgttactcacttgtgcccgttgaagcaacatcggagtagtatttgcagttatctcttgtcactgctggacttgggcagatttattaactgatcaagtttgcattgtggtagtatccccttcatctaccctcctcagacactttgtacagttgttttctcttcca

SEQ ID NO: 479600 - DNA, 1534 bp, Homo sapiens
ccttctgctactcctacgtgcaaaggctcgagttaactcagaaaaagttctcacagctggacaacttcagaagcagggaaaaccaatttacaaattcatcagtcaaccctcatcatgagtatgtttaaattaaagacacctgccttcattcatctatacgtgaatttccacaactatatgtggattttagaatgccacattttgctttgcctaggttcagatcagaatgaaggatttcattgccgggaagaatgccggattcttggccactctgacaggtgctggatgccccggaaccccatgcccatccgttccaagtcccctgagcatgtgaggaacatcatcgcgctgtctattgaagctactgctgctgatgtcgaggcttatgacgactgcggccccaccaaacggactttcgcaacctttgggaaagatgtcagcgaccacccggctgaggagaggcctaccctgaaaggcaagaggactgtcgatgtgaccatctgcagccccaaggtcaacagcgttatccgggaggcaggcaatggctgtgaggcgattagccctgtcacctcccccctccacctcaagagctctctgcccaccaagccttccgtgtcttacaccattgccctggctcccccagcccgtgatctggagcagtatgtcaacaatgtcaacaatggccctactcgtccctctgaagctgagccccgtggagctgatagcgagaaagtcatgcatgaggtcagccccattctgaaggaaggtcgcaacaaagagtcccctggtgtgaagcgtctgaaggatatcgttctctaaaccagtctccaggaagaagagaaagaaaccacactggctagtgaagaagcaggagcttcttgttttaattgctcaccaatggaatacacagagagaaggcctagaggttagagcactagaatgcaaaagaggatttattttcttaagtttaggtagataagtcagctcttttgaatgttttacttatttttgcctgagttcctagctttacgcattactaggaatattttcttttacaggagggagaagggttttgagggagggggtggtgaggggaatgagcctgatgacactattactgtttacctgtcaaaccagggtggaaatttagagggatgcaagtacagtatgtctcattaagcagtctctgttgctgattatatgaagataaaattgttgtatatgctgatctgtatgttatgtacattttcacagtgattgaatcattgtaaaaagaaaaaagacaaaaaagaatcaccactgtctattttatgaagatgataaagcagctttattaaattattacagttatgtttcaaatggtgttatctgccacattgtttccttttatctggtggttctctgtttccccctttaaatgtgttttctctgcttcaaaaatttaatgcattttagtattaaaggctattatggaaaaagtattgagtgtttggtggaatgtgtttcagagagtgtttgtaggctcgcgggaagc

SEQ ID NO: 479601 - DNA, 1785 bp, Homo sapiens
gggagtgctagtgatttcctgtttgcaagatggcaagatgcagcatgccatcttgcaatttacatggcaaaaataatatggatattggctgtggagttactatggaggagcctccactggcctcagcatcagaaatgctttcccctttgggtgggctgcactgggatagggatgttcctgagtctactgggcttgggcatattgtacatgaatttaagaaaagaatgtcttcctcacttttgcctgactcaggaggactgaagaaccgccttctacaatgtggagggtcgccatgtgggaaagtgagtagacattctttggagctgcagagggcagatataagactaatggcagaagttacgaagaggaagacttggtttggcaaaggaaccaatcagagctgctcagaaaaaaaaatgggctgcctagtcaggtgatgaatgacctttgtgtccctgaaagtgtttaaatagagctcgtatggtgttaaagaagtaacatttattgaacacctaatatgtgttgtgtgctttacacatgtgatcttattcaatttgtgaaacaatcccatgaagtagatcgtctcatctatacttttacaactgaaaaactgagggttacgagattaagtaacttacccaagaccaaaccataagtatcccagcaacttatgtcaggggtagtggaggtaagagctccatggaggaggtagattttgtgttagggtctggtggggatccccttatgctccaaggcaatgaacttttcctgattgggagaaactatctaaaatgagagctatccacctatttattcattcattcagtgaatatttactgaactctcatcatatcctcaacactgttcaatgggctagggatgtagtagagaatatgacagttatggtaactgcccttgtgaagcttatagtctggttggctgactctaaaatctatttcataacttttacactgtattgccagagaaggttaaatttcccaatcataaatttactattttggcagctttcttacctatggaagttcaagtacagttatattcaattgaataaatatttatttcctaggcactgtgctaggcactgagatataatagtgaaaaaggaacacattgtctctgctttactgaactcacagcttaaaatggatgattaggcaagcaaattagcaatgataatacagtgtgatataaaatgtgctctgacagggatagtatatagcattctggttacataaagcagtattaacaaacccaaagttgtggggagggggtggtcagggaaagcttttggtcaaagtgacattttaaatgagatcagaaaggtgagtaaatcaagtcccagggataggtatgttatctaagatcccacaactagcaagtggtagaactggagaatttccaggtttatctgatgttaaaacccatattgcaaccataatgctgtctttttaccaccaaatcccagcagaaggagttcttgagatgatgtggaaccttctttcagtcagtaggtcaagggtactgctgaaagtgattattccctttctctgccccaatagagccaaggcagcatgtcacactagcaagggcacaggctttgcattcaaacagatctggtccaatctttgcggtataacttagaagctgtgtgagcttgggtaagttacttaacctttctgactgtcagttgccaaatctacaaaattaagatcataatgtctactttgcatggttgttgtaaggattaaatgcagcaagataagc

SEQ ID NO: 479602 - DNA, 636 bp, Homo sapiens
ggaaagttacttacaagttgctgaaacttacaagttccctttctcaggggagccctaagattttctgtgaagctgctgatgggctgcaacttgctctctgccccatctatgccccttttactgaatgtacaaggtcactttgtgacagattttgacttggtagcagcccaacctggaaggtttgtcaaagatcagatagttgtagacaaaataggtttcaagacaaaaactataagaagaaacaaacaaggtcactatataatgataaaggggtcaattcagcaagatgatataacaattttaaatatatatgcaccaaacactggagcacaaaggtgtattaaggaaatactatcagagctaaagaaagagataggccccaagacaataataactggagacttcaacaccctactttcaacattgggcagaacatctagagagaaaatcaacaaagaaacatcagacttaatctgcactatttaccacgtggatctaatagatatttacagaacatttcatccaagagctacagaatatacattcttttcctcaacacatggattattctcaaggatagaccatacgctatgtcacaaaacaagttctgaaacattcaaaaaattgaaataatat

SEQ ID NO: 479603 - DNA, 795 bp, Homo sapiens
ttcagccttcttcctaggggtatgtatgaacctctcaccttcctggggatcctgggtctgcagttaacagaagatgcctccatgagaggctggtggtcagccctggggtcagtaaccacaagaagccgtgggtcccagaaggctgcctggatctggttagcgacggacagttccaggagtgaagcagccagcaattggagtggctccagtggcagcagcaaacttcagcacggccctctggccagtattcctggaagatataacactgacatcagcagggttttcaatggcaacaatggcacgagctgccagcagaagcttctcccaggttcctgctgcaaggaacttaaggacatcctcctccttcatttgcaggatatcaagcgctccggacattgcgaaagtttccctttaagttacgatgggaatccagaacaacgccatatggacccctcttcaggcccctcttctgcacgtctgctggattttgctggaagtccactccagaccctgtttgtctgggtatcaccagcagaggctatagaacagcaaagattgctgcctgctccttcctctggaagcgtcatcccagaggggtacctgtctgatggcagatggagctctcctgtgtgaggtgtctgttgacctctcctgggaggtgtctcccagtcaggaggcacaggggtcagggacccacttaaggaggcagtctgtcccttagcagagcttgagcactgggctgggagatctgatggtcttcagaaccagcagagatattattcccagtgaggagga

SEQ ID NO: 479604 - DNA, 1278 bp, Homo sapiens
agacttccttttttatgaagttttggtcacgagttaatcagttcccaagatgagaataattggtgctgtcttggtgttacttgttcatcaattgtgtcatgattgtgactatagcttctcatggagaacatccgtctttggtcagtacgttaaaagcccccggtttcacagccccacaagccctctttgcaatgacctgggtccccttattttaaataatctacctgtaaagtgggttgcttggtccgaggctagcaagggcaattccactgcagaggaagtggcagagaggctttcagatgtccctggagactctgttcagggagttgatactggctcagtagctctggtggggggtgcctggaggccctacctgtcaggaccctcagctgcaggtctgttggagtttactggaggtccactccagaccctgtttgcctgggtatcagcagctgtggctgcagaacagtggatactggtgaaccgcaaatgcttctgcctgatcgttcctctggaagttttgtctcagaggagtgcccggccgtgtgaggtgtcagtccacccctactggggagggcctgccggttaggctacacgggggtttaactattgtctatttagaagagaaaaaccatatatgtgtacatatatatgtactgcatatgtatttcatatacatattcttattaaatattattttatgtatcacatcttgataaaagtaattttttttgttttctgttaagcatagtttccaatgtttaagacttcaagcttctgaacaaaatatcattcttcctcatgacatatgtatatggacaactcacatatatgtttcttaacagtaggatgtgcttaaatcattgttagagagttctttactgatcaatataaagtaggtcccattcctttctgccattctttatattttatccttgtttgcttatttcaaggtacttatcacaattttaaataactttattaactttctatgtactttatttgtcctccctctcacttccaccagaatgtaagctttatgaggcagggcttatgccagacatgttcactattgtattcttgtactcaaaacattgcttggtacatagttggagcctaataaatttcaataaaattaacaaaagttcttttaattcttaatgtactatgtcactgttccaatgagtctgtgagacatatgtatcccattttttctatttgttttattaacatgtaatagtcagagaagccaagtatcatacatgaccagtaaatcag

SEQ ID NO: 479605 - DNA, 1114 bp, Homo sapiens
tcaaagaggaggttgtgatttgggtgccagtggcaccagtgccaggagctgaagacggaacccggactgaggcacatcggctgcagtggcgagtgctggaggcaaggtgaggtgaactagagctgtccccaccgcccgaccgcccatagaggctgagctgtggccttctcagggctgagcggtgtggagcggcgtgggaaaagtgggtatggcagcgatttcccacccccaccccgtgcccccacccccgcaccaccgagctggaactagtcttggacaagatatgagacatgagtgttgaacatcagccagataagtgtgcaaagaagcacttcttatttctggtgattaagtacctcactccgcattttgccagaaggcaagtgattccggattcctgggtcagagaaaccaacgtgggaaaccaaagggtgatgtatctggcaacccctgttgggagtctgacacagtcaggaggcacaggatcagggacccgcttaatgaagtactctggctgcccctttgctgagggagtgcactgcactgggaggaatcccactcatctggactgcctggattcttcagtgcaaacagggaaacttggtagtcgtaggcagtttccagtggagtggctgctgcagagaatctgcacagctctgtgcttgggactgaaggccctggtggcatgggctcacaagggttatctcctgatctgtgggctgcacagattgatggataaagcatgatttcgaggtgaaggtgtttttctctggttttatgatttagtctattgctttttatttttatgtgtcttgcaaatgctattttataaccaattattttaagctgataacaacttaacactgtttgcataaacaaacacacagacacacaaaaagaaaactaatactctatgccttaaatttgtccccccactttttaactttgcattgtttctatttatatcttagtgtactgttgtgtcttgaaaagttattgtagttattattttttattggcttattgttaattctttcttcttaggataaaagtagtttacatactgcagttacagtgttataatagtctgtgtttttctgtgtacttactatta

SEQ ID NO: 479606 - DNA, 775 bp, Homo sapiens
atactactcaggtgatgggcgcaccaaaatctcacaaatcaccactaaaaaacttactcatgtttgcaacccacaacactggggagaggtggtgaggtgcagcagcttcagcagagtgctagcaggtgctggggtgcctgcctccctgtgggtgttcaccacagtgttggaggcaatgcagctgtgggggtcgtggggcccctacttgagactgtggttccaggggcccatggtgagagctggttggtccttgacagttcaactcactcgtactcctgaagctgttgtggttcaaaactcagagaagtttgatcgtctgaagcctttttctctcagctcatcaaagtcattctctgtccagctttgttacattgctggaccctcagctgcaggtctgttggagtttgctggaggtccactccagaccctgtttgcctgggtatcagcagcagaggctgcagaacagcgaatattgctgaacagcgattgttgctgcctgattgttcctctggaagtttcctctcagaggggtacccggccatgtgaggtgtcagtctgcccctgctggggagtgcctcccagttaggctactcgagggtcagaagataaactggtttacatatttaaatcacttgtgatgaattaataaagctcaagtgattttgaacacaacagatggtaagaataagtaaaataaaatattttttattcactatatgtacaatgtgtaatgcaatgttggcagtaagcaaatgtaaataatgaaaaaagaaac

SEQ ID NO: 479607 - DNA, 1216 bp, Homo sapiens
caccacttccctgggagcggaggttcctttggctccctgccactcccagaaaatcatgctgctcaccaatgaagacaaccctcatggcaatgacagtgttaaggcctgccaggccaggaccaaagccggtgatctacgagatataggcatcttccttgacttgatgcccctgaagaaacctgggggctttgacatatccttgaatccagttcactttgaggaatccagcaatctagaagacctgttgcagaaggttcgtgccaaggagaccaggaaatgggcactcagcaggttaaagctgaagctcaacaaagacatagtgatctctgtgggcatttacagtctcgtccagaaggctctcaagcctccttcaataaaactctatcggaaaacaaatgaaccagtgaaaaccaagtcccggaaatttaatattaataccggcagtttgcttctgcctagcgataccaagcggtctcagatctatgggagtcatcagattatactggagaaagaggaaacagaagagctaaaatggtttgatgaaccagctttgatgctcatggttttcaagcccttggtaatgctgaaggagcaccattacccgaggccctccttgttcacgtaccctgaggagtcgccggtgaatgggagttcaaccctgttcagtgctctgctcattaagtgtctggagaaggtggtcatagcattgtgcagatacacaccccgcaggaacatccccccttatttggtggctttggtgtcacaggaagaggagttggatgaccagaaaattcaggtgactactccaggtttccagctggtctttttaccctttgctgatgataaaaggaaggtgccctttactgaaaaagtcatggcaactccagagcaggtggacaacatgaaggctatcattcagaagctctgcttcacatacagaagtgacagctttgagaaccccgtgctgcagcagcacttcgggaacctggagcccttgatcttgtatttgatggaggaacaagcagtggaccttatattacccaaggttgaagaaatgaataaaagactgggctccatggtgaatgagtttaaggaacttgtctactcaccagattataatcctgaagggaaaattaccaagagaaaatgcaataatgaaggttccagaagcaaaaggcccaagcggagtattcagaagaggagctgaagacccaca

SEQ ID NO: 479608 - DNA, 1037 bp, Homo sapiens
agccatgatgtgctgcctgggtggagctgtgagaagaggccaccatcctccagacgctagaatgatagatccgccaacagcttgcactgtgcacctggaaatatggcagctccctggtgcttctccctcatcctacccttttaaaaatttcctgtgttgcccaagtgccaacttggaaaagcacctctttatcctggtgatgatgatgctgataaagataaggagatatgagaaaaagcttccacagttgctgtcttcccacttcatacaacttgggatagaggtcaaaaagggagtctttgaagcagtagaaaccttgggatcatccttgatttctctctttatcttagacttatcatcaaaaaacttttggctctgctttcaaatatatccagacactgactacttttcctctgcttcattgttacttcatggctccaatcaccatcttctcttcctggggctattgcaacaacctttgaactcatttccctgagttcaccctttgcccacttcagaaaatcttcaatgcagcacccgcaatgataaggttaaaacctaatacagattatgtcactgctctgttcttccaattagtattcagagtgaaactcaatgccctaaaaatggccaataaggctctatgtcttctttttctcttatttcatattctaataaatgctccccttttcactgccacttcagaaacactgactaaaatgctgacttacatgttgttttttagaggtttttggaaagtttcctttcactggcagcaataaggtacagttgtgattatttgacaatatctggagttattggcaagaaatgagagctgtaaagggaaatgaaaaagatacctatatttagtgaattatatcatgaatatcatcttaattgaaggaaacaaatattttagcataatataacatcaatataagtgattttgcatatgtaatatgtgttcttgacaaaggcatcaatcctaggtatatgtcaattttcagtcgtggctataataaagattaaagaatagc

SEQ ID NO: 479609 - DNA, 577 bp, Homo sapiens
tacaccatcaatgctaagccagtcaacatgcaaccctgcgttaatctccacctcctgttaacatttaccagcgagcactctagcctgaggtggtgtgtgaaactaagatcagattcaaggaatctccagaaaagtcaaaatgcacatccacagtattttaagaaaaagatccatattatcccgtggcaccaggaagccacacaagaactgcagcttgctgagctagggcatagagagtggcaggttcttcatgaaattccagaaggcattgttatcattggagatgacaactccatgtgtcctattgtccctgaagacctgccagtggaaaatgatgtggagatgaaagttggtgatattgatgatcctgaccctctgaatgctgctaaataccctaaaatgaacagaaaatttccacccaacaattacctagttgaaaatgaccataatgctgaggttgtaatactctgtctcagaatcatagggtaaaattctaggtatatatttcctgcatcattctacaactcttctgagtacgtggaaatccatgcccttgtatgctattttttttcattcc

SEQ ID NO: 479610 - DNA, 685 bp, Homo sapiens
acaagaaagaattcgaggtgaatccatctgcatatgttaaaccatccttgcaaccctggagtaaaactcacttgatcatggtgtattatcattttgatgagctgttggattccgttggtgcagggtgcaagctgaccttgattcaaccattccggagtctggaggacaatggccctcttctcacaactacagtaggcagtgccccaactttgcagactgtttttggcaagaaaagatcttctgtgggcggacacaagggtgccagccaggtggagtgtggtggttctggctctggtgaagggtccacagtggcaatgactgttagtcacttcagtggtacaatcttccagagttctctgctgagaaggccactggggtcatcactggcaaaaactaaggggaccactatcataaaaactgtggacagtctgtggctgccatcaggggctcttgaggttccccaaaacaaaagctgctggagtcagagtatgctactagaaaccacagtgatatctgttgtttagtttataatggtatgttaagttattttcatcatatttagttgtggtaaggacagaattgagtaaattggatcacttcattttgtgctggaatataaaatggatcattttaataaatttttgctgatattttccattatttttattttatttgtttaaaaagg

SEQ ID NO: 479611 - DNA, 467 bp, Homo sapiens
agtgggtgcagcacaccagcatggcacatgtacacgtatgggtgatagtcctggggccagtttcactgactcataagacaaagtattttattcttgactgtgggaagcttcaaaaagcacaaaaaggtgcatcactgaaacctgagagaactcacagacccactaaaggaagcagattggtcctgcaggacctgggagacaccccaaatactcagctgcagcaagacccacccaaggagagtctgagctcatacacgtctagctcggcccccaataatggtcctacccaccccgtaactaaagacaaaaggcatacgttcttgggagttctagggtcctgcccaccgcctgttcctccctatacaaccatagctgatactttctggaaagcgccacctcctggcaggaggccaaccagcacaaaaatagtgccttaaccaacaaagctaagaacttaagtccatttt

SEQ ID NO: 479612 - DNA, 2163 bp, Homo sapiens
aagccataatctttggtggctttcacatgatttcagagaatgtatggagatacctgggtgtccaggcagaagtctgcttcaggggcagaaccctcatgcagaacctctactagggcattgcagagggaaaatgtggggttggagcccccacattgcatccccactggggcactgcctaatggatctgtgagaagagggccactgtcctccagaccccagaatggtagaaccacagaaagcttgcaccatgcacctggaaaagttgcaggcacccaatgccagtctgtgaaaccagccaatgggtctgtatcctgcagagccacagtggggaagctgcccaagaccttggaagcccaccttttgcatcatcgtggcctggatgtgagacatgaagtcaaaggagattgttttaaatcttttagatttaataactgccctgctggattttaagttttcactgaaatcatctgtgttcagggactttctttaggggtggttataaattatgaatctaatttttatagtggttatagagctattcagattgtctatttttcttttttgcttgatatttggtgctttgtgtgttttaagcaattggttctttctaaattgctatattacttgtttaaaattatgaatacgtataagtatccctttatttttatcttaatgacacaagattttaatgatattctctatctaattttttgttattatatctatttgtgttttacaagataatttttctttcatataatgagctttttgtttttttttcaacttttattttagaatcagaggtacttcaatgctaagaatattagctctttttgttattgacctacagatcctgaagactctgttaatcatttcttcagtttattttctttctattgttcaaattggataaattcaattaatctctattcaagctcatcagttctatcttctactacctccgctctaccattgtgaccatactttgaggtttctgttttgttttggtttggttattatatttcaagttgtataattttctttttgttctgtcttacaacttttatttctgtgctagtattttctattttttcctatgggtttttaattgtttgtttaagtatttatatgatggctgcttgaaaaatttgtcagataattccaacatcaaattaatctactgtttacatttccatatgggatattttgccaaatgacaatgagtacggtaagttagacgtaaaaggtagtaaagaagtcaataggggtcttcttgaaatttttgacataatggtctatgagatgtagcacaacctttgtatacaagtagtgggggcttaatcactttcttactctcacaataatagcaataaacacttccaagctcttaaggagtagctttctcttctcttggaaagaaattgcatagtagagaaaacatgataagaggtgaacaggacttatagagggaggtgataaatagcaagaggcgacagatactacctgaacctttcttttatcatgtaatagaaaaatttcttgtatttatgtttgtattcttttatgtggctttgactcttgtttccttttttgattttattagaagaggtggactgaaaaaccaatggatgctgtcacaggcattagttaaaaacacaattgtaaaatatggcaacttgatatatactttttccattgctagggtcaatattctcatgaaaattaaaatgaagtatttaaaaataaattattttaaactttttaaagtttagtttacacttaaataaatataaaaacaaagatccaatcatattttaaattatttgttgggttttctttatttcattgccaatcagttgggttatgcaaaatagcctagaatgggcagtgtggtatttttattcatgtctataactgtcaaggttgtaaaaataggcgatttttagtaaaatcacaagctggagatggcaagttgatccaatagaatggaaacacactgtatatctgtgaagatactttgatttattgctcttagtcaagtttgaaagcatgacctcaagggaagtacgtccttaggtgtaagtacttcttgcaaaagattgatttagcatttacaattaaatatagttttaaaatgaattataagaaaggaatgtatcccat

SEQ ID NO: 479613 - DNA, 678 bp, Homo sapiens
tgattgtgaggcctccccaaccatgcataactgtgagtccattgcacccctttcttttgtacattgcccagtctcagctgtgactgaaagaggccaatgtacagcttgggctgcagcttcagggggtggatgctccaagccttggccacttacacatggtgttgagcctgcaggtgcacagaattcaagaattgagatttgggaaactccgcctagatttcagaagatgcatggaaatgactggatgcccaggcaaatgttctcctcatggagaatctctgctagggccgtgtggaagggaaatgtggggtcagagcccccacacagagtctctacttgggcactgcctagcggagctgtgagaagagggccactgtgctccagaccccagaatggtagacccactggcagtttgcactgtgttcctggaaaagccagaaacgttcaacaccagtctgtgaaagcagctgggaggaaggctgtaccctgcaaagccacaagggtggagcttcccaagatcatgggaacccaccttttgcatcagtgtgaccttgattatctaaagctgatgtactgtgctgccacagtagaacgtttatcatgatccagcccacagacatcttggttacactagtggttagcaaagtacttcatgatctttatgcctaaatgatgccc

SEQ ID NO: 479614 - DNA, 818 bp, Homo sapiens
tccccataaaccaacattctgtaagcatggggcagaagaaaaaaactgaaggaactagctcctcatccacttttaaattgaatagtgtctctaataaaagaaggttgatgaagctgtatcactcctacttctgctgctactgttactactactcctgctggagctactactattactattacattactattactgttgctgctgctgcttctaatactccactactactactactactactactacaagataatatcgcaataaaagacagacggaaagaaagaaagaaagaaagaaagaaagaaagaaagaaagaaagaaagaaagaaagaaagaaagaaagaaagaaagaaaggaaagaaggaaggagaaagaaagaaacaaagaaagaaaagaaagaaagagaaagaaagagagagaaagaaagattgatttagcctttaaaagaaaaaaaacatttaaaaaatacaacttgtttttacttgctaaagacattcttacaagtatagatctggacctaatttctataggttctcttactctcaggtatatatttttcccaaagtcagagagcagatctccaactactttataagcaaaattgtatgaagcaagacaacatatgttcagcaaatgctttagtacttgtggagagggagaaagtgtgcttctctcctggtaatttcaactatagttgaaaacttgctgtcttaccagatgtatgcttgaagaagggaacagtgcaagctttttgtcaactatatttcaactatagttgtaatggtttctaaatatatgatttaaaaattgttattgag

SEQ ID NO: 479615 - DNA, 786 bp, Homo sapiens
gaaaatcgtatattatacaagatggagaagtacttccaggatattatacagctgcaaattttaccctacaggcataaaagagttggtgattactcacaaacaccagtgttatattcaggctgtacagaaagcctagctctggcatcagctgctggggaggcctcaggaaatttacaatcatggcagaaggcaaagtgggagcaggtacttcacatagtgaaagcaggagcaagagagagagagagagtggggagtacttgccatacacatttaaatgaccaaatctcacaagaactcaatatcatgtcgacagcaccaagccatgagaggaatgcttccagcttttgcccattcaatgtggtattggcttataagggtggtaagggcagttccactgcagaaggagtggcagagaagctttcagttgcccctggaggctctgtccaggtagttgccaagttgctactggctcaacagctctggcagggcgtggctgcagaaagaggcaatgccactacccatggctggctgcagttccaagccagtggatcttattttattaggtcccatggaagtggggcctgcaggctgtcgctgctcagcttcctggattcagcctgttttctagggaaaccactgaacttattatattatattgcagttaagtaatatagagcagatcagaaagctcaaaagcaaatttgtacatgactgactttagtatatgttaaagttagcatttcaaattagtgcacaaaggaattgttattcattgggaaatttgac

SEQ ID NO: 479616 - DNA, 602 bp, Homo sapiens
aaccagtcccaatgagatgagccagtggttgcagccaagggtcttttgcttttctcctggggactgcactccagagaggtgtaggagagcaattgctcagtgcagtcagaccaggatggagaatctatgctgtgggcctaagccaggggttctctgcctggtaactaactgtggtggttgggggatgggtcagaccagtgggagatgcactggtctcctctccttgtgtaaaatgcagcttgttggagtggaagaacggaggaaggggtttcttttggagccacaagctgtgcagactgaggttaagggaaaggacttgcctatgagttgcagtctttatggcctagactgcctttcaagtatacttggagacacagacgttgtggccctggatgtcaaagtgtgtagcaagggcaccaaattaacaactatctacacagaaaaaccacctttgtcagaaccaaaaatcagttccccttgttaaagcctcaaaattataaagttaaagtttattattgacatcttatgtcaataataaacttggtctaaaacagcagatttgatgtactgattaatccctggttccttatttagttcatttc

SEQ ID NO: 479617 - DNA, 659 bp, Homo sapiens
tcttcacatcacagatattcttatatgcgataatgaatcttgacgaagactgcagtgctcaaaaggagatggtgctgtccagtagaaatgactcctctctgaacacacaaaaaagtggtaatgtatatcactgggaggtggaggaggcaaaacatagagaacatggaaagtatttctatcctgtcaggttagaaaatcaatgtgaagacaaccaagcacggagattggaccaagaaaatatccagaccagtgctttattagaggaaggagcactgaacctggctaccaggaaactcggttttgattccactttgctacaagttgccttgttctgctccttcttcatctgcaatatggacaacataatattggtaatatttctattgaccatgacttatgagaatcttaaaacacaaatatactcactttccactgaagggtttggcacctagtagggagatccttgaaacagtatccaattactcacaaatctcaacggagattgacattcatattaagaaaaaaacagaagataataaaaaaatatttttgtgtgtgatgttatgattataaaccctattaacttgagggttataagtttgtgtcctttgtcctttatcgggggaactcaccccttcgttcagggtccctgacttccc

SEQ ID NO: 479618 - DNA, 979 bp, Homo sapiens
gcagcttcatgcagccagacccagacaggtggcagacagcttgagctgggctctttatcatcaggtattagattatcataaggagtgtgcaacatagatgcctcgcacacgctgttcacaaaaggatttgagctcctgtgacaatctaaatccgtcatagatctgacaggaggcgttgctcagggagtaatgcccaatccccgctgctcacctcctgctgtgaggccgggtccctaaggggcacagaaatgctttctgaaccatgtcaccactgccggtgaataggaaaggcattggcaatttaagattgtttttcctaccccttcagtgcctctttcagtgatatgagagttatttaccgattacctacacaacaaaagtaccttcataaggaccaaaaatcaggtgcttttgttgtagacttattgaatggctttgaccaaaatgctggtagtgatatagacagcaaattccaggctgaggtggtctcagatagagatgaagaacttgtcaggaactggaataaagctcactcctgctatgcaaagggactggcagcattttgcccctgccctagagatctgtggaactttgaacttgagagagatgatttagggtatctggtagaagaaatttctaagcagaaaagcattaaagatgaagcagagcataaaaacttgaaaaatttgcagcctgacaatataatagaaaagaaaaacccactttccggagagaaattcaagcctgctgcagaaatttgcataagtaacaagaagccaaatgttaattgccaagacaatggggaaaatgtctccagggcaagtcaggggtcttcatggcagaccctcccattacaggcccagaggcctaggagggaaaaattgtttcatgggctggcccagggacccactgttctatgcagcctcaggacatgtcccggctacttcagcttcagttgtggctaaaaggggccaatgta

SEQ ID NO: 479619 - DNA, 812 bp, Homo sapiens
aggttaactttggaatgcccttcaccaagaggaggtgtctattcagatggtttctgggcttagaattttatctttggtttatacaagctatgtgggaggggccacagagctcccattccctctctggggtggccactcttccagaaccctcatgtgctcgtcagttgggaaggtctctgagctctgtccatttgagtttttgtagaagcttcattagcatggctggggaaggggaagcagtcatgtccttcttcacatggcagcagcaaggagaagtacagagtgaaggtggagaaaagccctttataaaaccattagatctttcaggaccctcagctgcaggtctgttggagttttctggtggtccactccagaccctgtttgcctgggtatcagcagcggaggctgcagaacagtgaatattgctgaacagcaaatgttgctgcctgattgttcctctggaagtttcatctcagaggggtacctggccgtgtgagggtttgagggttgaatttatctaaatttttaaggatgcatctcagaaggggtgaatcttggggtatggaagtctggttatccattttaaagagaagacaaaggagaactgtaggatgaaagaggtgtctccctgtccattcctacaatgacttatgaagacaaaatatttgatataagcacttattatctttaaacccattaatcagagctcttttatataaacatcatgaacacaacacatataaatacatagacaaacagaagatccagtagttgtaaaattttttatttgccagtttttaaatgtttcttaa

SEQ ID NO: 479620 - DNA, 1038 bp, Homo sapiens
cagccatgttgctcacacaaagccttgagtacacgggatcatgaatccaaaggaagatctgaaatctgaaaatcgggccagcatggaaagcacagaacaaatgaataagaagtgggaattcaggcagacgaaagttacattggagagtgaggatactggggtaaatagggttctgggtggaagagagagcatctacaaagacctgggacagagaaaaaattgcttgtccatggaattaaaagaatggcagtgtgtctggggtatagggaatgagggggagcttggaaagaggactaatcaaagaacatgttctctgaaaatgcagaaggaggtagactctagagcacttagaaaagaaggaaataacaagttgggatacaggctgccacagaaaagtaaacctctgctgacaaatagcaccattttaattgaagcaaaacatcgaaagaactaataaaagaaaaaaatctactttttattaataagtaagcaccatttattaaacaaaagatatttggacagattttctgacaggaaaattaatattgccaatgttacagaaacaatcacaagccctgtctcattcattaaataattagcaatagttaaaaaggcttttaaagggcaaaaataagatcaggtgaaaattgaaaatgacattttttttgtagaaaaagctttcaacaactgtggatttggtctaagggtatttgctaattgtgctgcgaattcaaccattagcatcactagcttttattcttatgtaggatcaggaacaccaagcaagctggaaatgatattcttttctacatgtaagcaaagccctaaagccatttccttaatccatctcctcctcatacttccaaaagacatttaccctgtacttgtttttaggactgccaaatgggatgttatactgatgcaatttgattgaagtgatgacaactacaagttgatagagtgaaacagtaatctttatcatcaagatatttgtaagagcattgttttaactaatgctgcaggtattttttcaatatc

SEQ ID NO: 479621 - DNA, 559 bp, Homo sapiens
gaaccactttggattttcccttctgctttgaatggaagggtatgcttttctttaaggagtcaagctcaacttgcagaactgataaaaccccgtggggagactgtcctcatacccttcccaatgctgtccctatacagggttttggacctgtgccacacatcagtggcattcccacatgcttctttatgaaactgcagctgagcttctacataaagggcatcaaaggcattcaggaaattgggaacactgaaccagtttttctccattttctttggtttggtaacagcagatccagaatcttaaagataacatgggtcagtagccttcctacacccacatcttcaagactttcagtggacaacccaacagtcacaaagctggagagaccactaacctcaaatacaggagccaatgacacattgccaacagatgaacacatacataagatgcatgcttggccctcattggtggttcaatgtttaacgagtgactctattaaaacaaaaattcataaatgattgatttgatttgtagcatctgccaattttcatgatataaa

SEQ ID NO: 479622 - DNA, 587 bp, Homo sapiens
tatagagatctactctgtgggcgagtcttctcgtcccagtggtgacattggtgggctgagtgtgcttgtccctggaccccggatgttgtactctggtgccagtgttagtaggaccacgttggctgattcttggtcctctaagtggattgctcagatgctaatagtgacagcagtaggcctgatgggtgtgcaggttcttaggcccctgggcagcaggtatggcaagggctatgacagtaccagtggcaggaaaactctctgggtcccgagaagttcatgcagcagctttcttttccaagcatcccgccctccaggaattctctcagggagctcactacatcatgaggccgttgtttctataccgacgagctcttggcgttgcacagccactttgtatgtggaaaccaaacctacctcttctcagtgctacacttggattgtatttttgcattccagagagctacagaataagttgtctctttcactgaatcttcaaaccctggaggcagctctcatgtgctctgttgtcttttttcaccctgctcctttaactattctgtacacaaaatgaattccagatttctcat

SEQ ID NO: 479623 - DNA, 860 bp, Homo sapiens
attagtgccagtgtgagtacttggatgtttcagttgaaggtgctgtatttacttgtcccttccattcctttcccagagctcaagcactgtgctgggagatctgctgctgtcttcagagctggcaggcaggaacatttaagtctgctgaagctgcagccacagctgcctcttcccccaggtgctctgtcccagggaaatgggagttttatctatcagcccctgactggggctgctgcctttctttcagagatgccctgcctagagaggaggaatatagagcggcagtctctctacagtggctttgccgtgctgcagtggacgcccctcccccaaccaagcttgagcaactcaggtcaacttcagactgctgtgctggcagcaagaatttcaagccagtggaccttagcttgttggtctccatgggggtgggatctgctgagcaaaacaacttggctccttggcttcagccctctttccaggggagtgaatggttctgtcttactggcattccaggtgccaatgcggtacaaaaagacactcctgcagctagctcagtgtctgcccaaatggccacccagttttgtgcttgaaacccagggccctggtggtgtaggcatccgagggaatctcctggtttgcaggttgcgaagaccatgggaaaagcatagtatctgggccggagtgcgctgttcctcacggcacggtccctcacggctttccttggcaaggggagggagttccccaagcccttgcactttctgggtgaggcgaagccccactctgcttctgctcgcccttggtgggctgcatccactgtccgaccagtcccaatgagatgaagcaggatcctttatctttga

SEQ ID NO: 479624 - DNA, 1111 bp, Homo sapiens
ctgggtcaaaccagtatactcaatatgcctcctatcaaaacagcacaagagttggagggcttggaagacaggaacatgtgggaaagtttggaatttcctagagacttgttaaatggttttgaccaaaatgctgatagtgatacggacaatgaagtccaagctgaggtggtctcagatggagatggggaacttgttgggaagtggaataaaggtgactcttgctatattttagcaaagcgactggaggcattttgcttctgccctagagatctgtggaactttgaacttgagagagatgacttagggtatctggcagaagaaatttccaaggcagtgcagaaagaaaatgtggggtcagagcccccacacagaatccccactggggtattgcctagtgaagctgtgagaagagggccacagtcctccagaccccagaatgctggatctaccaacagcttacaccatacacctggaaaagccacagacactcaataccagtccatgaaagcagctgggagggaggctgtaccctgcaaagccacaggggcagagttgcccaaggctatggaaatccacctcttacatcagcatgacctggatgtgagacacggagtcaaaggagatcattttggagctttaagatttgactgccctgctggattttggactcgcatggggtctgtagccccttcgttttggccaattccttccacttggaatgggtgtatttacccaatacctgtacccccattgtatctaggaagcccagaaacttgtactgggcaggaggtcaaaggggtaaatctaagagccgggcctgaagtggacatggaagtaagcaaaccctataagacgtacagattgagacaggttcatttccattgctaaagaagatgagtctaagacttagcttaaaaccagtcaatcattttacttccatatattgcagatgacactgctaatggttgtgttgcacacttgtgcaattctggctgaaaagtctaatctacggtctttagtaccaaataaacagattttaaagtgcctgtcacttgtctgaatctcaaagcacttaataatgaaagtttgattctctcacataggttggcat

SEQ ID NO: 479625 - DNA, 1074 bp, Homo sapiens
ttcctcctagttgcatccagagctcaaatgctgtgctgggagaaccactgctctcttcagagctgtcagacagggacgtttaagtctgcagaagttgtctgctgccttttgttcagttatgccctacccacagaggtggagtctcaaggcattttccttctaacaggcctgtctgctacaggtctgctagagtgtgctggaggcccactccagaccctatttgcctgggtatcaccagcagaggctgcagaacagcaaagattgctgcctgttccttcgtctggaagcttcatcacagaggggcaccctccagatgccagccgacgctgtcctgtacgaggtgtctgtccaaccctgctggaaggtgtctcccagtcaggaagcacaggggtcagggacccacttgaggaggcagagtgtcccttagcagagcttgagcactgtgctgggagatctgcttctctcttcagagccagcaggcaggagcatttaagtctgcggaagctgcacccacagccaccccttcccccaagtgctctgtcccagggagaggggagttttatctataaacccctgactgcggctgctgcctttctttctgagatgccctgcccagagaggaggaatctagagaggctacagtggctttgtcaagctgcggtgggctcagcccagtttgaacttcaaggcggctctgtttacactacgaggggaaaaccgcctatgcaagcctcagtcatggcggacgcccctcaccccaccaagctcaagcgtcccaggtcatctttagactgcaatgctggcagcaagaatttcaagccagtggatcctagcttgctggactccataggggtgggatccgctgagctagaccacttggctccctggcttcagccccctttccaggggagtaaatggttctgtctcgctggtgttccaagcaccactggggtatgaaaaaaaactcctgcagctagttcagtgtctgcccaaatggtcactcagttttgtgcttcaaacccagggccctggggggtgtagccagcagagggaatctcctggtctgtgggttgc

SEQ ID NO: 479626 - DNA, 944 bp, Homo sapiens
gcggctttgctaagtgggtggtcttatgagacaagggtggtcttatggcccagatctagccaaagtaccccttttccttgtccccaatgattggtccagggatgagcatatgattaaagtcaggctagccacagtatttctgttgaaattgctgcaaaacacctctggggtggctgacggtcacattctctcactcctgtgcctctatggggagtggggctacaagataataaaattagggttcagttcacttgctgaatcccagtgttcgtcctacctttatgagattgtacctagttcacctggattagactttcggatcttcccaaactctttagaactcataaacaactttttactttgtccacatacagctaatcaaataccgtcttacaaagatttgatatttgaagtcaattgtattttcctaatctccaagtgaaatttgagtgcaaatgacaaatagatcaacagtgaaaaagtatacagttcagtggctttactgttaataagaaaggcagctggtatgacaaattcaactttgtgtgataacctgaattgccacttgtgactaggctatgggcactcaaaagataagaccatataagcttgaccagatcctagtgtttcctcagaacttccccaagaggagctttccctttttgtgctgatacttttccttttcccgatttgtatgcacacagccaacgaagtttgatgttgaacacatgtaaaaaaaaaaacttagaagggaaaaagaaacagataacattttataataggaaaataatctatattctattttgctttgttttttaataaagctcagtaaaataccttcccaggtcttctcacagtttgtacagaaacaacaaggtcatgtccatatggcataattttttaaaagtaaactcaaataataaatcagagttcaattatatttt

SEQ ID NO: 479627 - DNA, 516 bp, Homo sapiens
tgcccctctgggatgaaaattccagaggaaggagcagataacagtctttgctgttctgcagcctccactggtgatacccaggtgaacagggtctggagtggatctccagcaaactccagcagaactgcagaagagaggcctcctcaaagatcaaaggtagataaatccatgaagatgaggaaaaaccagcgcaaaaactctgaaaattccaaacaccagaatgcctcttctcctccaaatgaacgcaacacctctccagccagggcacaaaactggacggaggatgagactgacgaattgacagaagtagactgcagaaggtgggcaataacaaacttctctgagctaaaggatcatgttctaacccaatgcaaggaagctaagaaccttgataaaaggttagaggaactgctaactagaataaccagtttagagatggacataaatgacctgatggagctgaaaaacacagcacaaaatctttatgaagcatacacaaggatcaatagctgaatc

SEQ ID NO: 479628 - DNA, 707 bp, Homo sapiens
ggtttatgcatctttggcgggaataccagagaagtgttattatgtgtttcaatgcatcctatcagatggcaccattagaaatgatgttaaccttggaataccttgagaaaaattccccagagagctttatgcatttgcatctgccatgtatcattacctgccgtgtattaccccagacaaaggttatgttgatttctcagatgataagtccctgggccatgcagtttggccagtcttctgtatggctgctgtggtttgctggaggtccattccagaccctagttgcttcgacttttcctgtacctggagatatcaccagtgaaggctgcaaaacagcaagtttggcagcctgcccgttcttctggaagctccatcccagggaaggcattgacctattgctggcctgcattctctggaaggctccaatgtgttactggtgcctggctggaatttcaggccagtgggtcttatcttgtgaggtgccatggggcccacagaatgatgctgcttggttccctggattctggcactaccctagggaagcaaaaatcaagtgagtactcctagtacctggttttaatttcatattgctgagagaagcattgaatagttagaaaaacagtcctgaatcactgacaacacccctcccacacccctggcagcagcctcatggtgcagagagcctctctggacactgagtgagggag

SEQ ID NO: 479629 - DNA, 932 bp, Homo sapiens
tccacttccttcagaggaaaacttgacaagcgagtaagacttggatcttttccgaagagcacaagcccgggcttcagaggatttggagaagttaaggctgcaaggccaaatcacagagggaagcaacatgattaaaacaattgcttttggtcgctatgaccttgatacctggtaccattctccatatcctgaagaatatgcacggctgggacgtctctatatgtgtgaattctgtttaaaatatatgaagagccaaatgatactctgccagcacatggccaaatgtgtgtggaaacacccacttggtgatgagatatatcgcaaaggttcagtctctgtgtttgaagtggatggcaagaaaaacaagatctactgccaaaacctgtgcctgctggccaaactttttctggaccacaagacattatattatgatgtggagcccttcctgttctatgttatgacagaggcggacaacactggctgtcacctgattggatatttttccaaggaaaagaattcattcctcaactacaacgtatcctgtatccttactatgcctcagtacatgagacagggctatggcaagatgcttattgatttcagttatttgctttccaaagttgaagaaaaagttggctccccagaatgtccactctcagatctggggcttataagctgttgcagttactggaaagaagtacttctccgctaactgcaaaaaaaatatcaactagaaactccttctgcctgaaatactttatctttgtgttggaggaaagttaaaatggctcttgaatctccttattcaaaggtgttatttcaatgtattgaccccttagtcttcagctttacttacatctagtgcattattgttaaaagatgattcattctttaatattaattaatatgggagtttgggttaagcaaatatc

SEQ ID NO: 479630 - DNA, 520 bp, Homo sapiens
ttgagttcctccccagaaaacaggtttttctgtggtgggcaaggccatggagctccgaagagattatgacctttgtcttcagctatcagggcgggtagacaaagactaccaggttgccagggaagccggagaaagctggcagtctcaggcttcaccctacttccacgcagcatgcaatcctaaaggctggtctcactcccactgtgcgtcccccaacagcaccaagtctatttccagacagctggtgaccagagctgagaacttgccccagaccacaagcctcctcattgagaaagcaaacagaatcacagtttttcagcatctcaggaagcctgtaggagttattcagttccttcaaagggtctgtggatgctcttggctttcccggtatgttcctgtggtagttcttggagccaaagttcacaatgtgagtctccacacactgctctgtccatctgagagggagctgcaaactagtcttgcctcctatctgttttagcctcttaaacaaaacaattat

SEQ ID NO: 479631 - DNA, 1136 bp, Homo sapiens
tttctcctccttaagcccagcttctgtgtcttccctccatccactctaggatgactaaaattaaaaagattgatcataccaagtgtggcaagtttcagtttaagcagggctttgaaagagcttcagagtttgacctccatgttagaaggggtaggtgtcagagaaacaagaaacagaaatggacagacagtagaagagaaagcagggataaagttaaagacatacctacagcaacaaggaaaagactgaaaaagacactaaaagacagattgacagtgccagatagaggagggaaggaggggagtaacaagcctgtggaagaattaggaggaggaggcctggagggtataagtggagacatgaaggagactgttgctattgtatgttctggaagggatgatgaggtttgcggcacagtggaaagaggaggtagatctgattggctgttgagtcactctggctcggtggaccaaaaagttcatggtttaaatctcagcctcagtaatgtactgagctgtggttagggtctaggcaaataaggccagatgacagctggagaagattgctaattaattaaacctggtctaaggtcaggccaccaactggcaggaacaagatctttttcagttggagaatacggatgagaagaataggaaagatctgaaatgtaagaactttttttgacttctctaacacctcttgttgtttatttgtcttagagcttaagcagttcccctataacagtatcagaattgactcttgaattattattcattgttaaattttgttaggaatgcatttgaaattcaagaacaagcacaggattgtgcacctagcaggctctcaataaagatttaacttacatgagagtaatgagataggaatggaagaattgcacatgtccactccacttgcacttagttgtagtcctaagacacagagcagcatggggtaagggatggtatactttggcacatctatcccagcactagctatttatattatgtatccttaagctgtgttcttactgacacttccacttaattagcaactgctaccagagaaaataaggcaatactgagtgttgtaaaaaatactaaatttacacttttctgcagctacaatcataagtcagt

SEQ ID NO: 479632 - DNA, 578 bp, Homo sapiens
caggtggagctgcctgccagtccggcgccgtacgctggcattcctcagcccttgggtggtcgatgggactgggcaccgtggagcagggggtggtgctcgtcggggaggctcgggccgcactggagcccatggagtgggtgggaggctcaggcatgatgggctgcaggtcccgagccctgccccgtgggaaggcagctaaggcccggcgagaaatcgagcgcagcgccggtgggccagcactgctgggggactcagtacaccctctgcagccactggcccgggtgctaagtcccccattgcccggggccagcagggctggctggctgctccgagtgcggggcccaccgagcccacgcccacccggaactccagctggcccgcaagcgccgcacgcagccccggttcccgctcatgcctctccctccacacctccctgcaagctgagggaagcactctcactctatggaagtgatgctttaagcagccctatggagagatacaggtttccttgaatggaaggctcctgccaacagctgtgtgagaatagcattgaatctggagattgcttcaggcagtac

SEQ ID NO: 479633 - DNA, 679 bp, Homo sapiens
tatatgttctgaaccagcattcaatatatgatgctgtttctccttatagctaggattcatgagtccaggaatcaagtgatggaaataggaatgtcaccacccactattatccctagtgacctactagcaaaatttttacttcctgttcccatgaccttatgttttgctggcttagaggtcttagttccaaagagagaaatgcttccaccaggagacaaaataataattccattgaactgcaagttaacactgccacccagccactttgtattcctcaagcctctcactcaacaggcaaggaaaggagtgactatgctggctgggatgattgatcctgattaccaaggtgaaattggagtactacaccacagtggagaacccagactaatacaagaaccaaatctacgtccaaggcaaggcaacgtagtaaagcaagaaatcatcagaacctggcttgggactgaagtggaagaagaagggctgttcattggcaagaatcaaatctgagtcttatatgggaggcacaagctgatgagagtaggttgggaaggaatatctattggcattttccctccagaaaaaatatttaagcctctgttgaaatattgttcttctttggcctgctattatgaattattattggttttctaatattgagccatccatgcattaatggtac

SEQ ID NO: 479634 - DNA, 1026 bp, Homo sapiens
tggcaccggctggtctatcaaaatgcagggtctgaaaaacacctcaaacaccaattttagatttcctactagtgatcttatctatagcagcaattgggaagggaagggagaagaagaggatgaggatgaagatctttctaaatataaattagatgaagatgaggatgaagatgatgctgatctctcaaaatataatattgacgtcagtgaagaaggcgatagtaataaaaagaaatctaatagaaaaagtcactcaatatctcaatcttcacattcactatcttcatcatgttcattctccctttcaaattcaaggtctaggtccaggttcccttcaagaagttctagttcacagtcaagatcttgtttcagttccagagaacatttaagatcctctgggttgaaatcaagatccagttccaggtcccacaggggctcactaaacaaccctgagcccagggccaacccttacagaacacattactttacccaagcaccacaggtcatcttctggatcattccattctggttcccattcaagttcaaaaaagaaataaggcattaaaatgtatatcttaatgaaatctaatacagtgcatgaagcacatttttaaggaagttggtgtttttgatgtgtaattttaatgacattattacctgatggcctatggtggcattaccacatttcattagctctattccatgccactatgatcttaagcaaaatgcttaagattgtctaacatctatgagttttaccatagtgatgttatcactaggagcaactggggtggttcagaatctcatggcctctggttgtataactcctaaaccataatttctaatcttgtggctaatttgccacttctcttgtctacctgtaagcttgcctcctcttacctaatttgttatttaaatgattatttttacattgttaagggttataccatttacattgtcttctgtgtttttaattttaacaagtcttagtagcaatacctaggcaaaatagatttcaagacaaaa

SEQ ID NO: 479635 - DNA, 825 bp, Homo sapiens
ggtttatgcatctttggcggggataccagagaagtgttattatgtgtttcaatgcatcctatcagatggcaccattagaaatgatgttaaccttggaataccttgagaaaaattccccagagagctttatgcatttgcatctgccatgtatcattacctgccgtgtattaccccagacaaaggttatgttgatttctcagatgataagtccctgggccatgcagtctctggaaggctccaatgtgttactggtgccggctggaatttcaggccagtgggtcttatcttgtgaggtgccatggggcccacagaatgatgctgcttggttccctggattctggcactaccctagggattctgaatatttacttcgcaagattggagtggaaagaaccactccaggcttcagaggcaaaaggaacctggcccagccaattgttctttagtatgttacttcatttgtatgattagtttaattattggatttcatcatctgtaaaatgaggttaaaaattatttcccactaacatttcagttaaaaccttttccagaggctaaaatatgtctgcatacattcagtatatttaacttacacctcagaatcaaatagggatattacagaagcgggactgtgaaaagaatttaggaaggtgatattgtgtaggttgaatttttaaaatagtaattttattagttttcaaaatgtaatgcataaaacatttttatttcaaatttaaatttctgttaagtgctggggaaataaatctaatcagaaaagaaaaaaactcataagaattgaaagtttactgtaaaactatcaagtgg

SEQ ID NO: 479636 - DNA, 1232 bp, Homo sapiens
tctctcgggtcctgcaggagcagtccacttccttcagaggaaaacttgacaagcgagtaagacttggatcttttccgaagagcacaagcccgggcttcagaggatttggagaagttaaggctgcaaggccaaatcacagagggaagcaacatgattaaaacaattgcttttggtcgctatgaccttgatacctggtaccattctccatatcctgaagaatatgcacggctgggacgtctctatatgtgtgaattctgtttaaaatatatgaagagccaaatgatactccgccagcacatggccaaatgtgtgtggaaacacccacttggtgatgagatatatcgcaaaggttcagtctctgtgtttgaagtggatggcaagaaaaacaagatctactgccaaaacctgtgcctgctggccaaactttttctggaccacaagacattatattatgatgtggagcccttcctgttctatgttatgacagaggcggacaacactggctgtcacctgattggatatttttccaaggaaaagaattcattcctcaactacaacgtatcctgtatccttactatgcctcagtacatgagacagggctatggcaagatgcttattgatttcagttatttgctttccaaagttgaagaaaaagttggctccccagaatgtccactctcagatctggggcttataagctgttgcagttactggaaagaagtacttctccgctaactgccccattataacctgctatcttcgggcaacttttgatgtatgacatgtcacccttcccaacttggtctcctccaacatgctgtcttcatgtggagccctcaccacaatccctgactccggtcatttgtgcctttctcttgtcatctctgtacactacttatattcactgtgggttgagggagctaattttaagcatgttcagtggcagctcccctccagtttcagtgtcactgttaaaatttatccaaaagcaacttcactaggggttttcttaagggaaaaaaaatatcaactagaaactccttctgcctgaaatactttatctttgtgttggaggaaagttaaaatggctcttgaatctccttattcaaaggtgttatttcaatgtattgaccccttagtcttcagctttacttacatctagtgcattattgttaaaagatgattcattctttaatattaattaatatgggagtttgggttaagcaaatatc

SEQ ID NO: 479637 - DNA, 3309 bp, Homo sapiens
cagggagacaaactaagtgaatactgcaataatccaggagacttgctgattggcatagcaagttcaagatgccaattgtgtatctcagtttagaacatggccaggcccatgatgccaactcacataagagtgtttatgtgagtccttatgtgttcagtgagtctcctgaggacagcagaaacttggaaacaggccctcaccagacaccagtctgctggcaccaagatcttggacttcccagtctccagaatgtaataaatgaatttctgttgttcgtaagccactcactctatggtattctgtcctggcaacctgaatggactaagacaggggtttccaacctctgggccacagaccagtactgggaaataggacaaaagtgtcagccatcttctcaggaaatgattatcagaaatgaaacaaaaccagcaaaaattcctggactggtcatttgccatatgagcaaacatagataagaaggaaagcccatcctcggattgccgatcatcataaaatatttttaaagagttgaaaatagcaaaattaatgcattttccgaaacagattgagatggtcagagatggtttgtttactaaaggtgcagagccactaattatctccagtggtttttagcagttgcagatacttagtttgtgtcacctagatgtggctatttgtcaatatactcacagagaaataagacttctttattgctgtggatggtcactacttacaaaaggcaatcagttaacaatcaaagagtgttttatgtattccatctcatttaatggaaatggcattgtttcctttgtgtttcttattcaaaattgcaaacatcagctttggatatgcatctgcaatacacaagataatttgcaccagataatgtggatgtttggttttatttagtcaaattggatctagtaattagtactgttgtaaaatcctgctacgtatggaaaacaatgtatgaggaggggttaaaatatgaggctgttgctttacccttggatctcttgctaatattttgtttgaagagtgatttttactaattttgcaaaattccttgcatgtttggtttaatataataagcacattttaagttgaaattaaaaaatattacaaaatcaaaattgatcacctgtggctatctccttacctctacattttagatgaattatgatgagcttatttgtagactaggatgccacagaactcctagttcttacccaaataagtccatgagataaatgtgaatcaaatggaatgatccaacttgaatcatgcacttatgccccaacttatttggaaaattggtaaatgtgttcataattgtatagcatattcaaagctgagaactcttaagatgacctagttacagaggagaaatttgaagcctacagaaatgatttacccatgataacaactagtttgggacagaactggaactaaaaccacaaattattttctgaattcggaatgttttctactatgttatatctctttaacttcatctgaagatatgggaagcagaaaattttctcttttctttgtactacttatacttttaagaaatacactcataaaaatattttctgaaaaatatgattaggagattactttcctacaattaagtatacaaactcattgcttgtgctgaggaaaataatgtgtgatgacaatttattactcaaatttgattataaacattatttcttcaattataataccattctttggtctaggggacacttttaaatgtctaattcaattttgttaattcaacttaaaattcagtatatgtcagtgtttatgtgtttccctcgtcaaccctattcaactccctttacttccttcctttgacatttcctgattgaagatcctagatgctgcagtgattaagggcttctgaattcacaggatggctaagatagataggcttatcacagattagcagtgaagccagctacacattcttaagattacacttatcacacagcattatgaattttcacatgcctacctctccaagtacattatggcatctagtttgttctcatatcctgttctgattagttattgctacataaaaaatatttcaaaacttaatggtttacaatgacctaaaacaataacaacatagtatttgaagtttatactcagggtatctgctgtttccaaaagtacaaatataatttgcattaagggtactgccttaatgagagattttctgtcatcctctgtgcttatgtggtaaagtcttaatttcacattcatgtgatgtgggcaaatgtaacttaagcctagttctcatctaatgtaatttattttctcggtatattaattaaatttgcagcaacaagaaataggaggacacctgatattaaaaagcaaaaaacacagaatgcatttgcctcattagcatgtgtttttccagcatggctatgcactgcttattaacacactgaaaactctaactgacctgaggtattagcaggtatctggagctatccggtcctgggtttcaaccctggttttgctccttacaagctgtgtgaatatgagcaacctattaatctctctgtgctccaatctatgtaataaggcgaatgaaagtaactataactattatggtattgaatgagaaactctgtgtaggcaagtatcacagcatttggtgtaagtgctgaaatcaacatgaaacaaaggagagaggacagtagcaggagggaatagcaaagtagagtaagggaattactctttcgccgagaattctgagatctcaaatgagtgacaacaattttctcatagtaaaatcttatgtaatattcaatgacatttcctcaatcaagagctttaacaaacaagcaaatgattttatttgataatgaagtcctctcctgttcttctgtgctgccttttcccagtacttttatactgctgagcaatccttcctatgaatctttttacttccagagttatgaatatctgctcaacctgcttctaaaataaacttttgtcaaacttaggatcatgctatgagaattaaaaggtgacagaattatactactatcacttttttgagtaatatttttgaattttagaatgtgccttccagaagcacaatgactgaagtcatttgtctattgataatttatattctgcctacttccccaagaaatttgtcatggtacaatatgccaagacagtgactctaattactggtgagaattttaggtttaactttactcattaattttttcctgaagctctttggatagattctccaggaaactgatgcaggcctgc

SEQ ID NO: 479638 - DNA, 1060 bp, Homo sapiens
agaactctctctcttctctctgtgaggacacagcaagaagatggcagtctgcaagccaggaagagagcccttaacagaacttgatcatgctgtcatcctgatcttggacatcccagcctccagaactgtaagaaataaattggagggggtgtgcctcgctgggggaaaacccacttgtctgagctacccagattcctcagaactaccaggaggaaaggctaagtctgctggtctgcagagactgtggccacccctccccctaggggctcaggcccaaggggatccaggttctgtctctaagcctctggttcgagttattggagttcctgcagggaagccctcacccaatgaggaaggatgggtcaggacatcattagacatcaatagagttgtcagacaccctatacggctgcatatggcagccacagccagccatggtgctggtagcccttcccctcgggagtttggtgggcttaagcagattccaactgagagactgttaagagtctgcacattccagggttgggacgctaggccctatggtgtgggttcgcagcttaaacttctgaagcaactaattgtggtttgggccttcaacacttggccacttctggccatgctttatgagatatgacaatacttgcattccactagagccagaaatattgagtgccattatgcatcatcaatttgatttggtgttatgacaataatgttttagtgatttagaagtgtaatacaaagttcccaataaaaagactgatcattgtagtgccttttcccagcctcactgccagctagaaaaacattgaagcttttcaaataaattctcttccagcctggaatgctttacctgggaaagttttataatctattatagagtttcaagagtaaatctaaaacaaccatgaaagtgcctttacattgcaaagaaagccttgggtaaacttttcatgtgcttccaagttccctttcctcaataaatcaggtaaggtctgtgaaagtttgcaaacatgtaaaggcaaactatattactttgatttcacttttgaatttaaaa

SEQ ID NO: 479639 - DNA, 4088 bp, Homo sapiens
ttaagattaggctcctcctatacctgccatgcataacggttcctctgatggatctggtccaagtaaattgaaaaccttctggaaaggattcaccattctagatgccattaagaacacacatgattcatgggaggaggtgaaaatatcaagagtaacggaagtttgcatgaagtttattctgaccctcatgggtgactttgaggggttcaagacttcagtgaaggaagtcactgcagatgtggtgcaaattgcaagcatatttgtggaagaaatttctaagcagcaaagcattcaagaggtgactcgggtgcttctgaaggcattcaattttataagggcagcagagcataaaagttcagaaaatgtgaagcctgacaatgcaatagaaaagaaaatcccattttctgaggagaaatccaagctggctgaaaacatttgtataagtaaggaggagctgaatgttaatcctcaagacaatggggaaaatgtctccagggcatctgctccaatcattgctgaaaggggtcaacatagagctcaggctgtggcttcaaagggtgcaaacctcaagccttggcagcttccatgtgatgttgagcttgtcagtgcacagcccccacacagagtccctattggggcatcacatagtggagctgttaaaagagggccaccatcctccagaacccagaatggtagatccactgacaacttgcaccgtgcacctggaaaagctgaagacactcagtgccagcccatgaaagcagctgggagggaggctataccctgcaaagccacaggggtggagctgcccaagaccatgggaccccacctcttgcatcagtgtgacctggattgccttgcatatttaaacagctgcttgctccttgcatcctttgggtgattttcatattcccttgaagtatttgggggcagaaatgggaaaggaggtagcagaggcagaagtgaaatataatgctacagggaaagcaaaatgccaatgcgtaatttggagacaagagaaaggagctatattttttaaagtaccctcaatgaaattaaaccatagggaaaatgagttatttcacaaacaaagtaactgccagtgcccattacttaaattggtgctaagaaatagtatgaaaaatgatcttttagcaaatactattctctaccaactttgaatgtatccaaacagtagtctggctgaatgtagtacattgcacagagactaaaaattaatttgacatcaaaagttattaacggctgaatccagctgtaggagttctgcctaggtgagattcattttaaaacccctctttgtcatctgtaaaggaggcaaatgtgtctggttgtagagttgtaggaagacaacataaattttgcagtttcaagactgcttcacaagacatgtgtaggtattcaagcatgcttttctcttgggaatactgcttaaaacaggcagtagaattatggtcatctcaaagactatttaaaagtttttttaaaaaagaagaattggtagaaagggagcctctgtctcctcccttacagtgcaaagaacaatatgcagtgtacagtaagggaagttctactatgatgctttctctgtctcacagtcctccttaagagaactgttatggtgtacttcataagctgcctgggcgctgttttggttaggatctaccatagaccaggaatgcattttccaagcacttatgcataacctggagaatattggaacagtgtgtgaccttgtgtttctcattttctttctttacccccttattagccagtgtcatgtgaagagttgggagtactctatggatgaacagataaaaagacaaattccaaaattgggcttttgaggggtttttgttagtttttgggtttttgtgtatgaagatcagaattctctacacctgttgagttgaattaaacttcataaacattgcagcctttcttgatgttttgcatcacttaattattatttttgtgactttaacttttttggtaaaggaaaaaaatctttacatgccacttcctttttcctttgtaacagttatttgcaggatgggcattggttggatttttcttgaattaatgaaatctgtattgctcatacttgaattgtaaaagtcataaaaataaccatgcttgcacatgaaccatgcaaatatagagttagatattattgttatccaaacatagatatgaatatatatgtgaagtcaatgtatacattatagagaagtctgtgcatataatgcttatagaaggcttctaaagactgtctgattactttattcatatactatttaatgctaacttcttcctagttatttttgctgggtcaaaaaagtatatatttcaatattcataaactttgtatcttcagcctaagaaataaaagtagcaagtatagattttattctatagtactttttttaactcataaacaattttcacatatctatgttagggaaaaatatgctgactaataatttacagttgtgattattttatgagtatgtagttccagattttataagggagaacatgcttttacacccatgtctgatctccttccaattccaaccaacacataaaattaaggctaatcacagaaagcacagttgcggagtcagagaattgcagaggtttgtgcaaagtacataaggcatgcagaaaggatttaagaatacaatcaataccaactgaagtggtattgagaataatctgacagagatggacacaggaaggttaatgtggcttcagtgaaacacttgagtcagataggaatacaagaaagatttcaggtacatctataattggaggaatcagggataagaaaataaatacaaacttaaaagtatgcctttttgacctaaagagaaatatgaagataaacaccaagtatcttttaatgaaaaatatacagtgaatcagtacccagttgtaaactagttttaggcttttcactgtttctctggacaatgatttgcttctatctggaagtattacctgcattaagtgacattgggtaaacaatacaaatactacagatttatgcccattcagttgctctttgctttgtgttgttgttgttgatatgttcgtgcaaatagaaggctttagaattccaaacaataaagttcccagtacttttttggatgtagggagcaataattcttatttggcagttcatttttaaaaatctgtccatatccagttcattccttcaccaattgcacacacttctgtgtgcaatcaactacatagatttgttttgtttcaatatccagtgattagggtttcattttttctgacaatttaaaatctgaattatttgtgccttctttttgtagatattgttttgtaatacatcacctaatttagccttaatatccattcccaatattgtcagagactgaccttaaggaacaatgtaaaacttctctaaattcagtgtattcatgcatttggccaaaagtttacttaaaaggcaaaccaacaaaaattttttactgtctctcaatattatataaaaatctttttcaaaagaaaaattcaaattttattttggcattagtgcattttaaatgctaaagttagtttttaataaaattttataaatctgtccagttttaattagttttaacacaagctctatgttgttcctagttttaaatgaactctgttgttctcacaatactagaagttctggaatcttacattttcttggtcttattaaaactgagaacacccatcctggaagaaaatgaagacagagaaatctggagatttattgcaatcaggctcttatacttttcaatcagtagcctctctagggctgatctcttctattcttgtgcgtttactgttgactcaggatgataaagtttgtcctttgagagttcaatattccttttcggaatgttttgtttttcttaaagggaattgtaaactgttccccataagcatttaaaaaaatggaaaatgccgtgtgtgagtagacttagttgtcctgtaactcttcctatttcatttgcctgtagcattttgggatctaaaaggttttgatatttata

SEQ ID NO: 479640 - DNA, 1462 bp, Homo sapiens
agtgggtgcagcacaccagcatggcacatgtatacatacggcggctggctcccctctggcctagggaaggtcccgaaatgccatccaagtatcaagtcctggaatcaggaactccaagtattcttttgatgctctacccttctgtggccatgcttgtacctaaggtgcaagacaaagtcacctttacttttccctctacttttctcaagcagatggagtttcttcatgcagccagcacagctgccatcaatatcacaacaatcatccatggtaatgattattctcgccactttgtaattgaagcagtagaagttatgtatattgtcattgacacagctagtaaaatgaaaaaagtcaggattcaaacacagatccctttcatttcaaatcccctgtgctttctccactacattataatgatgccctacttgtcatccaataacatgaatcatctcactcctctaaattatctttctttaatttcacctccctcatgacttaattctttgtttactagatcagtctcatttattaccatttcatttgtcaaccatgtttagtttatacctcttgctagatcttttaaaactattcttttactcaaacaaaatggaccaataaactcaccactctattatataccactacacatcacaccacaccaccagaagtgaatataataattggagaaccctgtacaaaaataacttgatacatcttctctgttctcattgtacaataactaaatcgccatattagaattttgtgtcatggaaaagaaaaaaatagtactgatcatctagtttttgtttgctgtaagaactacatgcaaatatgtagaagttgagaaatcagttgctccatatacacaattggacattgaattagctagtaaaattgttatgcatatttatatcatatactcaaaaaacttagttcctatgagattattgaaatttttgaagtgttgactcgagttcatgaaagtatttaacaccaatacagctattctacatgcttattaattttctgatctgcagtaaatattgaagcaaccatcttatttaaagcaatatctatatttctaatactaaagaaacagaattatcatatttatattactcaatataaaagttatttgattatattatgcataatttgtataggggatcttatttttaagacacatgaattactaagattctatttcaaaatgagaaaacaggtatttaatgataagagtgtcgatgtgacactcaaaggagatattcattggagtatctcagttttcaaattttcagattagggatgttcaatcagtaagtataatgcaaatattctaaaatttaaaaaaatctgaaatttgaaacactggtttcaagcatttttgataaggtatactcaacctgtatcagcctttctaatttatatactggctagaatctccagtataatgttgtct

SEQ ID NO: 479641 - DNA, 689 bp, Homo sapiens
tgaaggggtcagggaaatatcctgcctcactgttagccttaaatgacctggcacagttgaattcaggatgaccgagtgggagacagcagcaccagcggtggcacagacccttgacatcaagctttttgggaagtggagcactgatgatgtgcagatcaatgacatttccctgcaggattacattgcagtgacggagaagtatgccaagtacctgcctcacagttcagggtggtatgcccccaaacgcttccacaaagctcagtgcccaattgtggagcccctcactaactccatgatgatgcatggccgcaacaactgcaagaagttcatgactgtgcgcatcgtcaagtatgccttcgagatcatacacctgctcacaggcaagaaccctctgcaagtcctggtgcatcatcaacagtggtccctgggagggctccacacgcattgggcgagccaggactgtgagacgacaggctgtggacgtgtccccactgcgccatgtgaatcaggccatctggctgctgtgcacaggcacttaaatacaaagcgtattgtcatggatgggtgtgatcttctagaaattaaagccaaccagacaagtgctcccttgaatctgttacatggctgttcccttaaagccaatgtttctatctaaaaaatcggtaagagaaagagatagaagcatctta

SEQ ID NO: 479642 - DNA, 1154 bp, Homo sapiens
cagcaggcacacaaatgatttaccctgagttcgcgggcaaagcaattatattcttaatcaaatcaagatgaactcaggaaatagactacataatttcttgttaagaaaaacctatgaaaatacttggtcaacagtaaaaaatacactagtgatgatgataatgatgattgtgatgatgatggtgatgatggtgatgatgatgattgtgatgatgatcgtgatgatgatgatgataattgtgatgatgatggtggtgatggtgatgatgatgatggtaatgattgtgataatgttaatggtaatggtgatgatgatgatgatggtgatagcaatgatcatgatgatggtgataataatgatgatggtgatgtttgtgatgatggtagtaatgatggtgatggtgatcatgggtgatgataattgtgataatgatagtggtgatggtgataataatggtgatggcaataatgatgataatggtgatgatggtgatggtatgatggtgataatgatgatgattgtgatgatggtggtgatggtgatgatggctgatgatgatgattgtgatgatgataatggtgatggtaatgatgacggtgatgatggtgatggtggtgatgatgacggtgatggtgatgatgattgtgatgatgatgatggctatgtaaatgatgataatgattatggtgatgatggcgatgatagtgatggcaatgatggtgatgctgattgtgatgatggtgatggtgatggtgaggatgatgatggggatgaaggtaatgatggtgatggtgatggtgaggatgatgatggggatgaaggtaatgatggtgatggtaatgatgatagtgatggtggtgatggcaatgatgataatgatgattgtgatgatgatggtgatgataattattgtggtgatgacaatgatggtgatggtgataatgatgatagtgatggggatgatggtaattattatgatgatggcaataaggacagtgatgatgacaatgatgataatgtgatgaccaacagtcagacagcctatatttaggataaaagctgagctcacagattagcagacttccatagttaattctttacctgagggtgggtcacaaagcaaggtccctttctatgcaaggcagagggaagtc

SEQ ID NO: 479643 - DNA, 884 bp, Homo sapiens
cagagcagtgaagatgagacctggagctctggctgcaccatttacaaacttggggtcttggcaagggtggtggggaacgggtcccacataacagcccatgttgagagctgatgaacctgggcacctagccttgcaggaacaatggcaagcctttagcctgatcgggagtggcaataggcgcctcactggatcaggagcacagtggacaccctgccagatccagagggatggaagtcagcggcaggtctgcgacggcagcaaacagcagtggtgggaggggacccgaagaagaagagataatggagaggaagacataacagaaataacaatgaccaaatttacacaatttgtgctagacatcaaatcagcgacccaggaatcccagagaaaaaccaatccggataaatatgataacataaactgcagaaaagacaaaaacaccaaaacaccaaatgcagtcaaggatatagaacaacagaaactctcactcattgctggtggaaatgcaaaatggcacagccaagttggaagacaggttggcagtttcttacaaagctaaacatattcttcctatatgatccagtaatagtgttccttggtatttaaccaagtgaattgaaaagtaatgttcacacaaaaacctgcacatggatgtttttagcagctttatgcataattgccaaagcttggaagcaactaaggtgtctttcagaataactcatgtacagtgaatattattgcttttttttcacctatgatggagtaacaaggaaaaaatttaccctctgtatttgtgtcctattgctgctgtaacaaataaccacaaacttagtggcttaaaacaatgcacattcatcatgtcacggttctggaaatcagaagtc

SEQ ID NO: 479644 - DNA, 689 bp, Homo sapiens
accccttgcacttcctgggtgaggcaatgcctcagcctgcttcggctcaccctccgtgggctgcacccattgtccaaccagtcccagtaactgtaaaacagcctcagacaggtccttcaggaggtattccagaagaaagtatcattatcataagacatgacagatccatgtgtattgctcctgaagactttccagtggtacaagatgtacagataagtatcaaagccagagaagcctgcatagataggggccagatgaccgacatagggaaaaatgagtatcaaaaaccaaaagttgaccaccaatttaaatttctcaaggactgcaataaaattaccattaaaagcacaatattccagagcaaaatgaagccatgtgtatttgcatgtgtgtgtgtgagtggaggtggaggagttggggaaaagaaagggggaattggtagtgaccatgatggcccagagaagagtgatggagctaatgtcttgatgcgagtttctttggattcatcttatttggtgtcctttgagcttgctggttatgaatttctatttcattccccaagtttgtgacgttttcagtcatttcttacttgaataagctttctgtgtctcctctcttccttgatctctagaaatgaatatattggtccattacatggtgctctataagtctcttaagcaatcttcact

SEQ ID NO: 479645 - DNA, 984 bp, Homo sapiens
tctcctgtcttctgtgttgctcacgctgggagctcttccctttgacttcagctatgagtgggagcaccctgaaaccctcaccagaagaagatgctggcaccatgcttcttgtacagcctgtagaactgcaactcttgggctcctggagtccaatttctgttctgatggaggagtacacctcttggggccaaagtcctgtcataaaatccattagtgatctttcttcgccccatccagaggggagccaatcaggttaccagaggctcaagaatctgagaatgaatagcagtgaagtacctcctgatcctcaaaggtgtccagtctttcggaacgcagattcaaccacggcagtcaagtcactgcattctcttccctgcaagaagcaaactctggggcatatgttgttccaagagaaaagcacattttgtatttttacagagggacaggacagggtaaccctagctgcagatccccggcccagccctctagcagcccaggagctgcaaggggagatggagttagccctaaggggactgcagagagccagggagtgggcatactgagggtggaggttggatcttgcacctttttgtgtgactcctgatacctgccagattggctaggctggctgtgatctggatgggtggaggttggatcacgcacctttttgtgtgactcctgatacctgccagattggctaggctggctgtgatctggatgggtggagtcagccacatgtcttgcttagtgcccacccagctgcagcaagaagtggctgtgtatgtcagcatataaaactccaagtcaaaaggtcaaactgtgcacttgatctctcaagttgcctgcttggccctcttccaagtgtactttactccctttcattcctgctgtaaagctttttaataaacttttaccactgctaaaaaaaaaaaaaaagagagagagagagagaagtggctgcagactaagcggacttcgaagtgg

SEQ ID NO: 479646 - DNA, 550 bp, Homo sapiens
tgtgaatgaatgaatgtgtgtgtgagtgaatgtgtgagtttcatggctccccacatgcctttagaggatagaggctgtgttatacagttaataaatcccagcgaggccaggcagccccctcccctcctccaatcccaggatcagacttcttatcctagaccattcagtgccactcaagcaactcctccctttcagtggaatcctggtaccctaaagggccagcacagagccctatctgaaggttcccagcagaaagagcaagtgggagcagaaacacaggccacattaccttcactaagccctgtgctctggcacagagatgcagaccagaggaaagaatacttctactttatctgcccagatgagccactttacgaagtaataaagctcctgtatgaacctgaccagggtacagtcactaaggcctctgtttgtgaatttgaaaaggagtggaaggaacaggttaagccttgaaactctatttcacctcagaaacagagagaaatctgactcttattcttgtgggaggcctcacagctctcattctccc

SEQ ID NO: 479647 - DNA, 822 bp, Homo sapiens
gtcctgtctagacagggtcagcccagccctgtctgaggggcaagactgccctgcagaattcaagtttgacagctccccttggcctaaagtctcctatgggagcaagtcaagcttagggggatgactgtccctggctccactgggacagtggttctccacttcagatgctcccgcaccaaacactctgggctccacatcagctggcttgctgcccctactacttctctaagcagctttccctgccaactcaagtgtctgtggtggttgaggggtctcctcctgccagggttccagaggcccatggcaagagtgggtttctccttgccagttcaactcatccagtcccctggagccattgagggccaagaacaagtcctgatgtgcagtagccccgtgcaggattcccaactttctcccccttcaccccagcttttgtgtcttccctctgtccactgttgttgccttctctctgaagatctgttaggagcacaccagtcttctaggttccacagtgagagctgttccacctggctgcatctagttggccatcttgccctcactcagcttgggaattcttgtgtgagggtaaggtaaccatatgagttaaagttcatttagctcatgtgtgagtgaatatatgagcatatttgtgtgtgagagtaaatgtgagcataatcatgtgagtgtgtgagcaaggtttgtgagtaaacatgagagagagtgcatgtatgtgagcctgtttgcagcattagagacttgtacagtttgtgaaggaaagtacttgagagttcagctgctgaataaatatctggaaagttgtgt

SEQ ID NO: 479648 - DNA, 1491 bp, Homo sapiens
cggtattctgtgagattgttttggtttgatagaagaacatggactacctggtagtgccagacagggctattaatgacccagacccttcaaaaatgcaggtttgggtcaccccacaagataaagagccacaaccagctgaagtgcttgctaaaggcaaagggaatacagaaggggtagcagaagaagggggttataaagaccagctaggaccatgtgacaaggtacatgtgcacaatgtgcagtctctggcattgctagaaaatcactgctttcaccatctttcagcagcacaggacaggtccattttaaattatggcacagagaaaaccagaatggaccctccttgcagacagccaaaaacaaaagaagggtctgatccagtcatacttaatttcttctcccaaagctcaccaagctcttcaatcatccttcctaaggaaggaaagttgggagagagattaggagcgttactctgaaatcagtttccttcaacagtgaagcaagcaaaattttcttaaaaagaaaatctaagagtttatattaataaggtaaaaaattcaattaatatttctgaaaaaaatacattgaattttaaaaattattgttgcttaatatctgacaccggtgccttttcatgtaaaaaatgtgaattccatattaaaatatcaagtgtatttcaatgaaatgttataaaataaaatgatattttctttaaaaatatttgaggacttggtccatttcacttaaattattaaatttgtgtgcataatggtgttgataatattttattatccttaacaaccatagggttagtagtgatgtctcctgttttatttctgttattgataatttgtgacttttctttctctctccccttttcttggttaccctggttaatgtcttatcaaatctattaatcttttcaaagaaacacctttagattttactaatttattctatttttccctgtttttagctttgtggatttctgctctagtatttattttctttctactgctcattttagatttaatctgctctactttctctagattcctaaggtgaaaagttaggttactgattttagtagtgggaatggggtagaaatgtgtatactttgtcttatccagaaatggaaaacttattaacttttaacagctttcatttatgaatgtttaaaatgttttatgatgttactatactgtggtacctagttatattttctaaaatatatgcatcattattgttgtttgtcgttgcctgagtgtccacaaaacagagcctgatacaagagtttgcatgcaaatagtttatttgccaagtggttttaggaaaatagttcagagataggtcctcttgtctcactcaataagtcacttctaatactgctacttcatttgaccttctcaccaattcctcagtactctggcaagaaagtttgagtgggctgtcatggtcaaggcttaaagatgacaccctagcagcgttatt

SEQ ID NO: 479649 - DNA, 642 bp, Homo sapiens
tctgccagtgctggagctatgatgcaggccctcaggaggtacctggaggctgtactgcaagcaggtggggctagactggggccccaagagaggccagtaggccaagggatgctcaggttggactggcctcgtctgatgggcaagaccaccctgcagcattcagatgccagccacaaatggggtacccagactaccaacatttctatccagctaactacaaattcaggagtttccacatcccatcctctcagatttgataatttgctagaactattcacaggattcaggaaaacactttacttatatttactgatttattataaagagtacaattcaggaacagccaaatggaatagatgcataagagccgtgaccaaggaaactgcaaagaagctggaaacctatcagaaagtgcctcctcgcatctagacattctaatctcttcattagaaaaaaaaaacagttatattgctaactttggagaaatattaatggggaattttcagagtgaaaatatatttgcccactctgaaaaaaaaaaaaagtaaaggggtgggaggtatatcagctaccatgccacaattatctggattatttgtttcctacttttttttcttaaacagatgaactgagctgtggcct

SEQ ID NO: 479650 - DNA, 475 bp, Homo sapiens
caattaaggaatgtttttgtatctcttcagtgcctctttcagcgatatgaggttaaaacctggtcccccagtggtgtgtgggggcattggctatggtaggcaggagcagagtgagcccaaggcccctggcagaatgctcaagtgggggaagcagtggttgcactgtggccctgctgttggggaggggatgtggggacgcagggactattgggccccagagcaggatgcagtctgctgggggcttgtttctcaaaatggtgccttgctgcagctgcttaagacttgggaagaagatgggaaaatgtggggaagtttggaacttcccggagacttgttgaatgcctttgaccaaaatgctgatagtgataaggacaatgaagtccaggctgaggttgtctcaaatggagatgaggaacttgttgggaactgaagtagaggtcactcttgctatgttttagcaaagagattggtgaca

SEQ ID NO: 479651 - DNA, 653 bp, Homo sapiens
tctgcagcttcattcttgaagtcaccatttgtccctgtatcaattgcaacagaagcaaagttagctgcaaagatgcttgcttttggttaccagagtttcctcctctgtactcaaaccaaactaacgagcccaacgggtagtaaattaaacatagaaaatacagtatttgcaggaagcaaaacctgtgtatacagagggccaacttttcatatatgtgggttctacagagcagtgactgtgggacttgaatatgcaagaatttgggaatatgtgggggtcctggaaccaatccttggagatactgagggacaactgtatttatgccagtttcatggcattactggcctgcatcttgtcaaggagaataagaagcctagatattatgtactcggatgtttgactaaggcaaagtatccattctggcctgaaagtcagttcttcctctttatcctccttcctttcttttcctccctcttccttactctctcccatccccctactttaaaaataagacaatacagcaaagtccgataatgaactacaaatggtttaggagggaacaaccattttaacttttttcaaaatgctttctgggatattaactcttactgcttttcctaaaactatgtaggcagtatagagttgtagcagtt

SEQ ID NO: 479652 - DNA, 534 bp, Homo sapiens
ctgagatgcaaactctagaaactctagtggaaaatattaataaatgtcactaaataaatttaaaaattctacacagaacaaatatataaaaggggaaattctgggaaatattttgcaatacatgacagataaaagtttgataatttattatgaatcagttcaaggggtacatgtgcagttttattatatgggtaaattctgtgttgtgggggttcagtgtacagataattttgtgacccagaaagatgctacccacatggatttcccagaatttagtgaagagagtcagaatggagaaagtgaaggagctttgggcttggtgataaaaagacaagtttctggaaagatcaagggagagcaaagctttattgagaatgtgactcagtgtgatacaagcttctggcatatacccaaggaaaagtatcaatgtgctaatctccacagcaaatcatgagataatggacatcttgcaaaagaatataaggtgacttgaggattataaagaactactgcagaaaggagggggaaagcaaa

SEQ ID NO: 479653 - DNA, 568 bp, Homo sapiens
ggttactattgctctgtagtataatttgaagtcagtcattatatgcctttgcctgtttgtaatcctcagagcctctcagctcaggcactggcccagggagaaacaaccaatgaaggaagaagtagcagcctagtggataagcagagagccagaggagtcccaagcagctgtgaatctttaaatttaggagttctgggcaaagatgtccttgcattattttcgttcctaaatgagcagaacagaacttcctctccagtgctgggctttgtgaagaacttcagcttgtggctgcaccacaactcatgcagtggcacccacaacatgtaccaggaatacctggactcagccactgggggtgctgtcacccagtactacagagaaatgggtgcccagcaatgtggttgggcccactggatccagattgtgaagatacagtcattgcctattcagtgcaatcgtcatcagcccacccagagttaatcacattacctctcataagcccatagaatcttagactcactgagagtataaaagcacatgttaatgcctagtgttccattattggaac

SEQ ID NO: 479654 - DNA, 664 bp, Homo sapiens
ttccacttaagggctcgctgattttgggaagcccgctctcgcccctaaagccagctgagtggccctctgcatgtacagctcccagtgcctctctctgtcatagcgctggtcctaccatactgtcatgaatgtgactgtatatggagatgaggaaatttgggcacataagagacagcaggggcatgcaggcacagagggcagcaagagggcagccatctacaagccaaggagagcagcctcagaggaaaccaactctgccagcaccttgatcttggacatctaccctccagaactggaagccaagaccctgggactggttgataggactctggtttcattctgggaactgcatcattacccacagatgtgtgaagcaatggcttgtttgaaaattggaatcctagcccagtggagtcagtcccctctctgggcccccacagcccagttatggttattaataactggtggttctctcatccctagttccagcagcccagcaggacctcatcctcttacagtctgctgcccttttgctacagctggccaagcagatgatcctttagcttgcatttctagctatctctggggttttttgtgcccagcccttgacgtggctctgccagcctttgtgattctaggggagaggaaaggtggatgaatcagg

SEQ ID NO: 479655 - DNA, 971 bp, Homo sapiens
ccatggacatctttgatatgtttttttggaggaggaggaaggatgcacagagaaaggagaggtaaaaatgttgtacatcagctctcagtaaccctagaagacttatataatagtgcaacaagaaaactggctctgcaaaagaatgcaatttgtgacaaatgtgaagatagaggaggtaagaaaggaggagtagagtactgtcccaattgccgaggtactggaatgcaaataagaattcatcagataggacctggaaaggttcagcaaattcagtctgtgtgcgtggagtgccagggccatggggagcagatcagtcctaaagatagatgtgaaagctgcaatggaaggaagatacttcgagagaagaagattctagaatttcatattgacaaaggcatgaaatatggccagaagataacattccatggtgaaggataccaagaaccaggactggagggagaagatattatcattgtgttagatcagaaggacgatgctgtttttactcgacaaggagaagaccttttcatgtgtcagattgtcaagcatggagatatcaagtgtgtaataaatgaaggaatgccaatttatcctaggccatatgaaaagggtcgcctaatcattgaattcaaggtaaacttgcctgagaatgactttctctctcctgataaactgtctttgctggaaaaactcctacccaagaggaaggaagtggaagaaactgatgagatggatcaagtagaactggtggactttgatccaaatcaggaaagatggcaccattacaatggagaagcatatgaggatgatgaacatcatcccagaggtggtgttcgcatttataggccaaaccttgtaattgacttcagctatgtatgtggacaagcttagactgaaatgctaggtatgtgtattggcttcagtgtatgacccttcattgttaagctatgaaagtaaaactctgtatttaa

SEQ ID NO: 479656 - DNA, 880 bp, Homo sapiens
tgcccgcatcagtcaaggatgagacagagctgaccatgcaccagtctgtggagagcgacatccatgggctccacaagatcattgatgacaccaatgtcactcagctgcagctagaggcagaggtcaaggctctcaaggaggagttgctcttcatgaagaagaaccacgaagaggaagtaaaaggcctacaatcccagattgccagctctgggttgtccatggagctggctcgggagaaccaagaggagctggacaagtacgggtctcagcagactgaggagagcaccacaatggtcaccacacagtccgccgaggttggagctgctgagatggcgctcacggaactgagacatacagtccagtccttggagattgacctggactcaatgagaaatctgaaggcaagcttggagagcagcctgaggaaagtggaggcccgctatgccctacagatggagcagatcaacgggatcctgctccacctggagtcggagctggcacagatccgggcagagggacagtgccaggcccaggagtacaaggccctgctgaacatcaaggtcaagctggaggctaagatcgccacctactgccacctgctggaagatggcaaggacttcaatcttggtgatgccctggacaccagcaattccatgcaaaccattcaaaagaccaccatctgccggatagtggatcataaagtgatgtcagacattaagccagcagaagcaggaagaagatgtaagggaaaatctttgtgaccttgggttaggcaaagaacttttggatataccaccaaaagcttgatccataaaaaagaaaaattggtaaattggactttattaaaaggtaaaacttttgctctgtgagagatactgtt

SEQ ID NO: 479657 - DNA, 750 bp, Homo sapiens
gaaaaagatgcactgtgttgatcttgtggctctatgtacctcctagaaggaattacagcagagccagccacacccctagatcatagaaggtgcatgcagccacatacttggtgtgataccagccttccccttactcaaattcacctgccctccagctgtgtttgccggaaattctcctttgggttaaagcccaatctccagaaggtcccgaccccatcttctgtttctctggctgcctttcaccagacagggaagaaaaaaaaatcagctttgaaaggaaaaacaggaaatcagatcttgatttcagaagatttcaactgcttccacaaattgaatttcccacctggagtcaaattctctatttataacaaagatatcatctgcccagaaatctgtccttgtccaccatgcctagacagattgatcttgccaaagcacaactggtaccatgacattctcctgctcaggagcctcagtgactgcccaatacctgcagcagaaaatccacattcttctgctagtgtccatctctcactactcccttcagagaactgctcaccccagccaggtgcaaggaagggatcatgccccacaggttacatcaaagatctaaacaactctatgaagtgtttttatcctcaattgtagatgaggaaactgaggcacagagaagcaaaacttgcctaagggtcctactggcatgttttcaacctactacctgcagcttatctcttcatcatagtcttaaca

SEQ ID NO: 479658 - DNA, 1310 bp, Homo sapiens
ggccgaataggaagagctccagtctacagctcccagagtgagcgacgcagaagaggggagatttctgcatttccaactgaggtaccgggttcatctcactagggagtgtcagaaagtgggtgcaggacagtgggtgcagcacactgagcatgagccaaagcagggcgaggcatcgcctcacctgggaagcacaaggggtcagtgaattccctttcctagtcaaagaaaggggtgacagacggtacctggaaaatcgggtcactaccaccctaatactgtgcttttccaatggtcttagcaaacggcacaccaggagattatatcccatgcatggcttggagggtcctacgcccacgaagcctcactcactgctagaacaccagtctgaaatcaaactgcaaggtggcagcaaggctgggggaggggtgcccgccattgccaaggcttgagtaggcaaacaaagtggccaggaagcttgaactgggtggagtccaccgcagctcaaggagacctgcctgcatctgtagactccacctctgggggcagggcactgcaaaacaaaatgcagcagaaacctctgcagacttaaatgtccctgtctggcagctttgaagagagtagtggttctcccagcacgcagctggagatctaagaatggacagactgcctcctcaagtgggtccctgacccctgagtagcctaactgggaggcaccctccagtaggggcagactgacacctcacatgcccgggtactcctctgagacaaaacttccagaggaacgaccaggcagcaacatttgctgttcaccaatatccactgttctgcagcctccgctgctgatacccaggcaaacagggtctggagtggacctccagaaaattccaacagacttgcagctgagggtcctgactgttagaaggaaaactaacaaacagaaaggatatccacaccaaaaccccatctgtacatcaccatcatcaaagaccaaagcaatggaacaaagctggacggagaatgactttgacgagttgagagaagaaggcttcagacgatcaaactactccgagctaaaggaggaagttcgaacccatggcaaagaagttaaaaaccttgaaaaaaacttagatgaacagctaactagaataaccaatgcagagaagtccttaaaggagctgatggagctgaaaaccacggaacgagaactacatgacaaatgcacaagcctcagtagccgatgcgatcaactggaagaaagggtatcagtgatggaagatcaaatgaatgaaatgaagtgacaagagaagttt

SEQ ID NO: 479659 - DNA, 1196 bp, Homo sapiens
tctgagacggcaatgcctgtgtggtcatgctgccaggttgccacagaatggctgactttgtatgtgcccagattaaaaatgatatcctgctctcagtcccacatctgggaaaatgcctgcaacttttcctggtgtctttcccttgcagagtctctaagcctctcctcaacttacctccaggtcttgggagaaacaaagtgttctcccttggtcttggttgctcagattcccagtggaaagaatgaacattcctcctacttggcagttaatattttcgactttcagaacacttttggaatacggcttgactttaaaacttttaccattaaaatatttacaacgcatgtaataggctcagaagaaagccataatcaggatatctctaaccctggcatagttcatgccttgggatatttgaccaagatgggaagaaccagagaggaaaatggatataatcatagaggggtggaccagtaaagaaatgtggcccctcgtctgtgccagttccttacctgaaaccagagaaggctagattgcagttggtgttttagctgtggataaaactttaacccagagttcctgggactcttaatgtttgctgagaatgatgatttccacatggacacaggaagggtaatatcacactccggggcctgttgtggggtggggggaggggggagggaaagcattaggagatatacctaatgtaaatgacgagttaatgggtgcagcacaccaacatggcacatgtatacatatgtaacaaacctgcacattgtgcacatgtaccctaaaacttaaagtataataataataaaataaatcaatctatgtttctattttaacaccaaataattatgttaacaaagaccacagacagcagttgcttttgcttatccttaatcacttccctaagtataaagattttggtaattcaactttaaggctatctattcctattgtgaaaaaggaccccctccccacatattcccatgtgtcaatgagggaacataaggctgatgtggtaaagactatgatgacctggtacatttcaagatgttttatggtacttaaaaccaaagggatctgaaaagggagcctggtgatagaggaggtttaaaccaaaaagactctgggttgaacgtgaccagtaattgctcaacctgcctggtttgtcaaagatcagatggttgtag

SEQ ID NO: 479660 - DNA, 536 bp, Homo sapiens
aaggttattctccctctctcgcctctcgccaagtttatgcactcttcccctgtggaccatctctttcgacaaatccagcaaaaccccacccccatcctggaaaatttcttcttcaatcgggccagccaattttccatttctccttgcctacggagctcatgcaaacttccctacgctagccggctggccctgtgcaaccttcactaccacctcccgccaaccccctccgcacctactttactgttagtggtcctcaatgccaactgccaggtgcttccaaccagctgggtacggcaggcagcaacacggggtggccccttggtggaaggacaccacctggtcaagtctttcctttctggttggatccctggcacctccagtctggcctttagcatggcactagcccccggaccctgggccttagctgaccagcagggctgtccatggatgagaccatttgatcaagccacgggacccttcacttacattggggtgttaaggagccagcagtcagagtgaggggagctcattcagga

SEQ ID NO: 479661 - DNA, 722 bp, Homo sapiens
gtttaccagtgaaattgagtaggagtggttggtggagatctgatggtttaaaagtgtgttgcactttcctgcttgctctttctctctctcctgctccgccatggtaagatgtgcttgctttcccttcgccttctgccatgattgtgagtttcctgaggcctcccagtcatgcttcctgttaagcctgtggagctgtgagtcaattaaatgtcttttcttcataaattacctagtctcaggtagatctttacagcagtgtgaaaacagactaatacagtccaatgtttttgcaggaaattatagcagttacctacttctagagatgaaagagaaaggttatcaacttcctgtcttatttccttgtccacatggagaaagaacgatcaattttaatacagtaagagtctaccaaaaatgttttacttccttaagaatgaggagcagggaaaaatatgaaccatgggtcaaaattgtaagaaggcagatttcaggctatataaaccttcaactttagagggtaatgttaaactgtttttcaaagtggttgcagaaattattactttcagactcaatgtgtaagtcatatggtgaatatacatcatctctaacattaggtttgtcagactttttaattttttgttagtgtaatatgtatgaattggtatctcattgcagtattgatttgcatttttcacaatcaccattgatattaaactctcttc

SEQ ID NO: 479662 - DNA, 3140 bp, Homo sapiens
cagcagcggctgcgttagaggcgggtggcggcgcgggtgtttacgtcaggtcgcagggtgtcgctggcagcatggcggactacctcatcagcggcggcacccgctaccagcccgaggatgggctcaccgcacagcagctctttgccagcgctgacgacctcacctacaacgatttcctgattctcgcaggattcatagacttcctagctggtgaggtggaactgacctcagccctgacccggaagatcacgctgaagacgccactgatctcctttcccacggacactgtgatagaggccgacatggccatcgcgatggctctgatgggaggtattggtttcattcaccacaactgcaccccagagttccaggccaacaaggtgcagaaggtcaagaagtttgaacagggcttcatcacagaccctgtggtactgagccccttgcacactgtgggtgatgtgctggaggccaagatgcggcatggcttctctggcatccccattactgagaccggcaccatcggcagcaagctggtgggcatcctcacctcccgagacatcgacttccttgctgagaaggaccacacaccctcctcagtgagcaagaaagggaagctgcctgttgtcaatgatcatgatgagctggtggccatcatcgcccgcacggacctgaagaagaaccgagactaccctctggcctccaaggattcccacaagcagctgctgtgcggggcagttgtgggcacctgtgaagatgacaaattccgcctgggcctgctcacccaggcgggcgtcgatgtcatagtcttggactcgtcccaagggaactcggtgtatcagattgccatggtgcgttacatcaaacagaagtacccccacctccaggtgattgggaggaatgtggtgacagcagcccaggccaagaacctgattgacgctggtgtggatgggctgcacgtgggcatgggctgcggctccatctgcatcaccctggaaatgatggcctgtggtcggacccacggcactgctgtgtacaaggtggccgagtatgcctggcgttttggtgtgcccatcatagctgatggtggcatccagaccgtggggcacgtggtcaaggccctggcccttggagcctccacagtgatgatgggctccctgctggccaccaccacggaggcctccggtgaatacttcttctcagacggggtgccgctcaagaagtatcagggcatgggctctgtggatgccatggagaagagcagtagcagccagaaacgatacttcagcgaggcggataaggtgaagttctcgcagggtatcttgggctccatccaggacaaagggtccattcagaagttcgtgccctacctcatagcgggcatccagcacagttgccaggatatcggggcccgaagcctggctgtccttcggtccatgatgtactcaggagagctcaagtttgagaaggggaccgtgtcggcccagatcgagggtggcgttcatggcctgcactcttacgagaggtggctgtactgaggagagtggtggaggccgaggtggttgaaggggcgtgccccgctttccccctttgggcacagcctccctccttaactgagtgatccacagatttacactatgggttccccagctcctttccagggagagaggacgggaggccctgagggtactgttgcccctcgctgggcatctcccacaaagtcaggaccgctccctgggccaggctgccctgggaagcccagcccagccagccaggctctcaggccctgcgcctgcctcaggtctttcttgctgcagcctgctccagcccggcccccaccccaggggcaggccgcccctcctggcttctcctgtaggacacctccctgccccccagctccccaagaaatggcactctcctggccctgcctctggcccttcccaggctgctgccccctcagccatgtggcacttctgagctcctgacctaggccagcgggaggtctctgcccgcttctccggcactgggctccaattgagtcctgctcctcaggccactcccctgtccctggccctggggaggacactgccctggtcatggccacctgcccatcgttcctgactcaccaccgtccccaggtgtgccattcctgccctctcctcagctgcagtttaaggctttaactttgcacactttgggatcacagttgcgacattgtgggtattaaataattggaataaatcaagcagatctcaacgcctccaaaaaaaaaaaatctagaataggcaaattcatagagacaaagccaaatagaagttactaaagagacaaagccgaataaaacttaccaaaggctagggagaggggagaatggggagttaatgcttaatgggtaccgagtttctgtttgggtttatgaagttttggaagcaggtagtgtgaaggttgcacaacattgtgaatgtacttaatgcaattgaattgtatgctgaaaatggttaaaatggcaaattttctgtggtatatatgttttactacaatttcaaaaaattaataatttaatataccaaatgccagagacttgtaccgtttaaatgggtgaattataccttaataaagctgttaaaaataaaattgtaaaacataattgtacagtttagttacctttgttgtaaatcaaatttccatatacgcaaagatttgtttctggaccctctattatgccatgctggtttatttttatttcaattattttcagttgtatatactgtcagtttataagtcttaatacagagtagagcaagtctcaatcttcaagcatgtcacagttcttgggactttgaattccacaaactttcagtatggaatttccataaacttttaatttgtcaagttccacaaacagacaaataaaaacaccttttcagattttgattatgattgcattgaatctgaagatcaatttgggaagtatttatatctctatagtattgaaccttccaattctggaacatggtatatttctctctctctcttttttttttttttttgtttatttttgaatatttctctcagtaatgtttaatagttttctgcaggacagcttgtgctttttttaaaaaaagtcattcctgagtagttga

SEQ ID NO: 479663 - DNA, 698 bp, Homo sapiens
ttacagactgaagtctggttgtcttccatttgagccttcattcttttctggcctacacaccagagcctatttttatttcatcgatgatgctgaagagagtgtttctaattcaggcatggagccatccctattggagtcaacaggtgtccagcacgcacgacaacatgttcatcaacaaacatgttcaccaaaaagctgcactatgggtaatggcctcaagctggcttttatcccagtgcccacccatagcagaacgcgagaagaaactgcggtgtccacacaatgagatattacacagcagcaatgagaataaacaatctacagctacacataacaacccagagggatctcataaacataatattgagtggaagaagccagatagaaaaacgcacagtggcgggggactgtggctcacgcctgtaatctcagcacttttggaggccaaggcgggcagatcacctgaggcattacatttggtttataattatgtcaattccaaagtcaaatctatactctgagaatactcaaatagaacttccatttgtttccctcatgcctgttcttttcttttcccaaagctattttttaaagcctttattatttcattttttaaacaaagaagatatgcatatatactttaagtcaaactgtgcaccttccttcaccttgtttttcagttaatgattaataatcag

SEQ ID NO: 479664 - DNA, 535 bp, Homo sapiens
aacaaccctctccagcccaggacatgccagcgcttaagtgtcttaccctcatggcttcaagatggctctaacagctcaagacactcggtcctaatcccatgttcaatgacaggaaacggggtggaaaaggtcagagtatttttcctcatgcaactttctcatcagagaaaaaatatccttccccaaatttatctaacagaatcctacttttatctcattggcaatatctggggcacatagctgcccttagtggcaaaggagactgggaaagtatccgttttttcagcttctatagtggaaaggcagccagggagaggcagcaggaatttgtgacataccacaaaactgccccaaccccttgggaacttgatttccattcacttgtggagatgagtcccctgcacttgccagacacccatgccaagtgggcagtggggcaaaaaatggagggtcattccatgaatgcgggcacaactgaaagatttccaggctttagatatcggtacattttataaggtcatgaaactaaatcttc

SEQ ID NO: 479665 - DNA, 730 bp, Homo sapiens
caggtcttcaatacgtaatcatcacatcaggatccctgaggaatcgccacactgacttccacaatggttgaactagttaacagtcccaccaacagtgggaccctgcattctttgggcccctcatcattactcaaggcccctagatctactggccccctcagtcctcctagtccctcaaccaccaccaactcctcctctcctagcttagctcccccattcctgctcacaggagccagccaactgttactggaaaggggtcccgatccagatcccaagagtgggttcctggatctcacacaagaaggaattggggaagggaagccggaagttgttcatcatgggtggggaagagaatctacaaatggcaaaagtcacacagatatcaaactagaaaagactcattccctaatcctggaattgaagctgggccaccgttgtaaaatggtgaagcctttgatgctgagctacagcattgggcagtttccattgcccttcccagaaggagcttagagcagccaattttgaacttgcaaaggcttttaacttctcaagtgttttctgcattctctcccagcggatctgattcctgttctgaagaattgaagttgagcatcgttagttaaattcagctgctgcctgactgtataccacagcaaaggctttggaaacatttttcagttaaaacaataatgactttcttggagtgtaatcccagtggaggctgttctac

SEQ ID NO: 479666 - DNA, 1852 bp, Homo sapiens
ccaggcctgtgataagaggggatctgtgcctgcttatgttgaaggaaaggaaagagaaaagttatgcttcattgcttgaaatatttggtgatgggacaaagaggtctcctttctgtcgtcattaccatttctccatatgaaactgataacagaaggctgaagctgaaaaatgaactcttagaagcaaaacgtagaagtgggaaaactcaacaagaggccagcagagtttgtgttcactgtcacagaaacctgggcctaatctttgaccggggagacccttgtcaggcttgctcactgagggtatgcagggagtgtcgagttgcaggccccaatggcagctggaagtgcactgtctgtgacaaaatcgctaggcagctaaggattataactggtgagtggttttttgaagaaaaggcaaaacgtttcaagcaagtcaatgttctcggcactgatgttgtccgacagtccattttaagaagaagtccaggagctgaagaagtacagagccaagagcaaacccgccaggatgcagaaaagtcagacacttcacctgttgctgggaagaaggccagccatgatgggcccaagagaaagggcaagttcagatcggcaaccagaggagaaatcataactcccaaaactgacactgggcggagctatagcttggacttagacggtcaacattttcggagtttaaaatcacctcctggttcagacaggggaagcactggctcatcagatctcaatgaccaggaacctggtcctaggaccccgaagagcagtcggagcaatggtgtgaccccaggcactcagagttcaccagccccaagcacacgaactgtgacctcagtcatcagtagagagtatggttttgaaaattccatggatttggctgctattgaagatcagagtcgatctgagttagatttgagtgagtcatttacagaagactcagaggatactgtaagcataagaagcaagtctgtccctggggctttagacaaggtgatgatgagttgagagtaaagagaggatatacaatcatctcttcctgttagtcttcacagtcaacacataaaaaccgaaagaataacttagaaaatataatgggtaatcatgttaatgagtgaaggttatgtctaagaaaacacatgttggagatttcaatttctggctaaagtcttatcacttaatctaaacctgggaaatgagagatcctaacattttccttagccaaatattattagaaatatctgattacatatttatatcaacattgctatatctcaagttaccaccaataaattcacttctaaactgagacaaaattatgtgaaaattaatgtttcagtgaactcatttctagaatgagaaggttaaattagattattgtaaaggttatttcccagtctaatattctgatattcagatttctgtaattgctataataaaatacggactccttggaagaaatagaacacaaatgtaaaatggtattgatagtttttccaaagcacactaggaaacttagagttctaaaatgaaataatattttctatagtacaaaaaactgggaaaatactttaaaatctacctccaaaagagagatgggcagtgagattaaattatttcaaagtttactcatgttcaacctttaaagaattactaattccaacattattaaactattaaactattcgtgatcttagaaaaccattgaaatcttttcattcattgtatgcagccagtataatcttgacactcagacttgatttttaaaatagtttgaaaaataaaactacaagtcaaactagtttacgaatatacatgcaaaactttaaatataatatca

SEQ ID NO: 479667 - DNA, 2424 bp, Homo sapiens
cctctttgtctttcagcaagacacagttgtcgatgttctgagattccacccctggaagcccacagcttcttgctgacccaagttataagcaagagtgggctgggcggttccaaccaagaccaccctcctgatgtggctcgcattggctggtgtcgtttatgtgcacagccacatccccacgtttccccagacctgtcctgctcctcttcaagacccttaatattaatccagagagagaagtcgggctgctgaacagcctaggcaagttgggaagctggcaggctctagacacgaaggagcccctgaataacaaccgacccactcctgggcctgtggtgggggtcagcaagaccctgcagaagcataactcaacagtgacccagcaccaggcccacacctacttaggcatgtcactaaagccatatgatgactgctttgggctcctaaagcatccaacagaacagagtcccagagtcagtgtcccatcctcccctctgctggctcctgggacacaagaagggacacaggagctgtcggatctggcagcctctggagacagtaaatgaccagtctttgcctgtgcctgttctgcagcaatgagcagccaccacacccgctgctgccaccactgccattatgtatgtgtgcactgagcacttaccacatgccaaactctccagagccttgattccacagcgaagaagacatcactggcagagaagatggccaactaaacaagcgcttatgtgtggacagctcccagcacccacccccaatctgtggctggcacaggacctgcacatctcccgggggcagccatcatgggacattgatgcctgggggagggacaagctgatggagtcactgttctgcagctgggggaagagaagggtgagttgccttagctagatggaaagttgaaagtatctctgattggttgctttctgcaaccaataggagtgtaactttgtaacttcactttagcctctgatcagttgctttccacaaccaatcagatggactccaagtgaagtcttcttttgcatagaagtgtaactttgtaacttcactttagcctctgattggttgctttccacaaccaatcagatgcttgcatagggtgtaacctgtataacttcacttcagcttgtgattacaggccactacttcatttacatagggtgcacaacaagtaaccaatgagaaacctctagagggtatttaaatcccagaaaattctgtaaaggggctcttgagcccctgtggtcggcctgctcccactttgtggggtgttctttcgttttcaataaatctctgcttttgttgcttcattctatccttgctttgtttgtgtgttttgtccaattctttgttcaaaacaccaagaacgtggacaccctccaccagtaacacagccatcaccaccattcatctccagaactcttttcatcttgtaaaactgaaactgtgtgcctgttaaacactaactcccgattcccccatcccctgcccccattccctggcaactgccagtctactttctgcctctatgattttgactcctcttagtactttatagagacaggctgtcttttaaggaagatttttggaaactgacacgccatgcttccatatgtcccattggccagaacttagtcacatgacaacaggtagctgggaaattagtctttttcctggtggccactagggaagatattcagggacaggtagcaaagacaaatagctcagtcttacccaactatgggggttcttcaatgtaaatgctctgtaaagagctcttaggcaaagaaaagaactaaaaattaaagagccttatttttaattttagctattgatttttttttttttgcctatggctgattctttcaactctgaatgcaaagcatttgtacatatttcccctctctttctctccattgccttcttttgttacatctttgattgaatatatatatatatatactctgttacttgcagccaaaggcatttctcactgatacaggttctttgatcttccatccttccactaccaaactccttctgagagagggccacacaagctgggccctgcttttcagatgtctagtccctcttaatcccttgccaccaacctactccttcaccaggtcatagtcactttatttttttaaaacccaatggctgttgttcatatcttccttgtccactttgagtttagagttttttactgaaactcgttttccctttggtttctaggaccttggattgtatagctgactttctgtcttctgactactacttctacattttgtatacggggagcctcttcattttgcctcctcattgtaggtactttccctgcccaaagccttaacctcagtccttttatgattcaccatcactactaccacccacatcatctcc

SEQ ID NO: 479668 - DNA, 3596 bp, Homo sapiens
gcacgttgctggggaacgtgctgcttccacgtttccagcaataacaaggcacatttgctgctgcaggttcattaacgaggcctgcgggaatgaggattggcttgtccaccgtgttcactggacggtaggaaaaaagaaaagtcagaaaagggagagcgatgttcaagttcatgctcaactgtggctacttctctgaacccaagaggccaccagcccctagctgccttggccattgctggggtggggtgtgctaagatgtagcttttctttatttctccccaactgcagcattaactgggatcttgagcccccgtttctgctgatggtcgacaacttaaacttgccaagtcaaggttttctggagggcaggctcttggaggttctgcaatgggaatgcaccttccctgcaactccacggctcttggtggagaccaaggcagactgttccactccagtgggctgcgtgttctgacacaggtgagcaggggcttctggaagcacacgggagaggcacctaccccaatagggcctgctgtgtcggcttgggttgacgccttttctagaggaggtgacatctgagcaggatggtgaatgacgagtaggagttgaccagaataggagggggtggtgaagaggctggagcatgagggaagtggacatcaggaaatgcctagattttggtgtgtggcggtgggcgggtacggggctaagaatatataccaggtggctgtggaaagagagagcactgagctgccatttaagaatttggctaccctgaagctgccatgttggagagagatgcccaagaacttctggaactgcttcttggtgcccggtggtcttggtgaccttgagcacgttgaagcgtaccatcttgctcaggggccagcactcgcccactgtgatgatgtcgctgatctggatgtccctgaagcagggggacaggtttacggacatgttcttgtggtgcttctcaaggtggttgtacttgcaggtgtagtggagatagtctcggcagatgacagtcctctgcatcttcatcttggtcaccatgccaaagaggatccgccctcgaatggaggcattaccagtgaaggggcatttcttgtcaatgtaggtgccctcaatcgcctcttcaggtgtcttgaagcccagattgatgttctgtagtactgcaggagcttcttgccagtttctcccagcaggagcttcttcttgttttgaaagatggtcggctgcttttggtaggctcactccgtctgtaattcatactcagatctaagccgggggttatttcaatttatatgctctagaaggcctcccagggcctgcagaattcatcctctaaaccagaatcacccctctcacaccccagacacctttcagcgaggatcattctccaagacccaaggggctattgtctttacacgaggctagtggcttgtttcaggaagaacagtttgagagttggtcgccttcccacatgaaactgaatcatatttgtatgtaccaccaaagctgcttttacattcaatttcctcatgtgtggaaccagcggtgggttcttaattgactgcctgagggcaggctttaggaggctttgtgattatgtgtaaagttctgtggaaaagaattctctcccctcccctcccttcctcttctctctttcccccttctctcctttcctcttttcccttctcctctgcctgcttttccatccctctccccttctcctctccttccccaccctcctcttcccccctttccattttgttccccttctccattctctcccttttttcttcccccctctcccctgcccttttctgtctcctctcctttctccccttccctttttctctcttccccctcctctccctctcccgcccctcccccacatactgttttgctgtcctcagggtgacggtgacttaggccagccctggggatgggtgggagagcagctgagaatccaaaggcaggagagtgcacaaaaaagagatatggcactccccacccccagcttaatagcactcatcatgatatgtaattatgcatttgtttgtgtatctatttgtttaatgagggcagagacaatgtctattttgttcaccactaaatccctgcacatcactcaacccagagcttaacatgtggtagatgctcaacgtaaattctgttgaaggaatgaatgtaacatcattagagctttctaatctttcaccctttggggtggttcaaaaacatgaccccaaagtttcctgacactccttccaatgagaagcggggtccttctctccttgaatctggatacgctggtgacagcttcaactaagagaatgaaagggctaggtcataaaaggccacacagcttctgccctgaagccctgaatagctgtcatgtaagaactctgactaccctcagccggccatgctgagaggaggcccaattaatatgaagggacaacacataggtgcagagatccatagtcccaactgagcccagtctccaagtcatttcagcctaagtaccagatgtgtgaatgaagaagcttctggatgattccagcccccagctcttttcaagtcttctcaactgagaccccagacattgtggagcagagagatccacaatgctttggcccgtccaaattcctgacttatggaaacttcgagcataataaaaccgttgttaagctgctaaattttggagtaatttgttatgcagaaataattggaagaccttgattgtgagtttattaattctgcatttatttgaaagtcatttatcaagttcctactatgtgccaggtgatggttacacagtagcaaacaagggaaagatccctaccttccgggaacttacaatctaggggctgctgttgtaactgtatcttgcaaaagcctacatgttgctttttaacaataatgagtaggtttttctgaaaccacttccagatggtgtggggggaggggtgcttccggagccttctgtgttttgtagtagtcgccttcccagatttattgagtagctcagctgaaccaaggtctgagcattcaattaggtcttgttattcatccgttcaccaaatatttagtgagccatgtgccaggcacatttctagctgctgatacagctgtgaacaagacagatgaagcccttgcccttcgtggagctcacattttaataaatagtttggaggcggacaaagagaaaataaacagagaaacacgaacctggagcatttggctcacaacttagagttgactcatcttcagtttgacgtccctcctgctacgagttcctggctaactgacatctcttctcctcaagcagatgctaactttgagccctaccactgctgcacttttactctggctcctgtggatggctttgtgggctttgttaggttgccctagaatccattagaatggctaaaattaaaaagacagaggcaagggtgctcgggaacaggaactctcatgcattgccagtaggagtggaaaatggccactctggagaagagtttctgataaacctaaatacctatgtacctgtgaccaagcaattccactcttgggcattgaaataaaaa

SEQ ID NO: 479669 - DNA, 1104 bp, Homo sapiens
ggcttccgcatgctggagaggtggtgtatggggttgcggcttggcctgttttctgaaacctgcaaggtagcaccctgaaggtagcttgtaaccctccactctcacaccaagtgaacaaggtggagaacatatgaccttttatgatccacccaaaaatcttgcagtatcactctaccaaattctattggccgaaacagtcacaagctggcttagattcaacctaggaggggaatcagacgccccttctccactggtgggctatcaagctcatgatacagaagagcagttaaaccctgtgctaactcacagagatctgctttgtatagactttaaaggacttgatgagaaaggtgaaggactatttcaccagcctctggacttagtaattgagtttctggcactactttttgcttcaacagcctctaacgggcccatctggtggctagcatctgaggcgtactgtattccctccattcctttccacccagagagccagttaaacatttaccagcattatcactggttagatcccacagcgcgcagctgagggggcactgccaatgaccgcatcctctccccaagggggctgagactgcaccttcgtcgtgaacaggtgcagatcccctgcagatgtcaccttctttgtgaggcctttaccaacctcgaactcccctgtgtgctcccacccacccactgggtcctccactgaagcatctgtcacttacttgtttagctacagtttcccccttagggcatttcttcaacaaatatttactgaccacccatcatgtgcctggcacaagcacagggatgtgatgatgggcatgggagcttggcttctaccctcacgggacaaccagtctgcagggaagcctggtaattaaataggcaatggcaagaaactgacatgtacagtcccagagattgtttagggcaccacagggacacatggcaaagacaaccaatctcttctgggatgggggtgtccggtagggcttcctggaaaaagtaactttttaccttgaagcttctaaggtgatttcattacgtggggagttcatttcgtggggaggggctgggaaggtggggaagaaaacgacattc

SEQ ID NO: 479670 - DNA, 963 bp, Homo sapiens
ttacatcctgataaacccatcgttaaaaatattcacactgcctggcccatgttacatggatggatggatggatggatggatggatggatggatggtcagatgatggatgcatagatggatggtttggataatggatggatgaatgaatgcatgcatgggtgtatgatcagatgatggatggatggatggatggatagatggatggatggataaatggatgattggatgtttagagagtggatggatgcatacatgcatgcatgggtggatggatggatggatatcacctgccccaccccggagagtatcctcactggcccagaccctcccactggcagcatcaagagatgcaaggggaattttcaggagctgctgatggctgcattgctaatgtggctgagaagagtacctgcaaatgtcgagccacttatttctgttcattgatttcaatttgctgtgcagtcatctcctgggctcccattggcccaagcactcagagccctcttcaaggcactgctgagaggagctctggagttcctggggcaggccagtccttcatcgcagggcacagcccagagctccacggaagcaacttcaaccttcatgacggcagggaccttgtcatgcctttcttgtccagccccatatccccagaacccagaatggcgattgatcgggatccccagaagcagatcctgagatggaaattcacgtgcgagtatttgattaagggcatgctcccagtgggagatccagcagacaccagcacaggctctgcccacagcaaccagcaggcgagcaagaggctaacacaaatgcacaggcatatttaaagctgtcagtcttgttacttcttctgacttcccattgaccacaagtcacatagctcagcagtattaatgacacagtgaagttcactctgcctcctctgtcaggtgtacctgcaaagtcacattggcatgg

SEQ ID NO: 479671 - DNA, 913 bp, Homo sapiens
gacaccttcccacatgcctagactgcaaaagggaggcagagggaccctcgactcatcactgctgaaggttcctgagctggggaacatgaagctggccccatcctccttcagagaatgtcctgttggagcaggcaaagccacatggcacgcagtgggtctgtgcttggtgacctgcaggaagcaggaacgggttcaacaggggatcctgtccacggacttttgctggacacaggctcagtcacgtgggctgcattacagcgacctttacaccagcatccagaaatcagctgcagctctttcacattggaggattgaagtgaaatttatgtgcgatgtgtgggtggaagtgaagcagcagccattcctatactctcacagttgggaggaaggctggcaggcgctgtcacagctcacacgtgttgtcactgatctgtggactcaccttgctggtgtgggtggcagcagggcccacagcccctccagtgcctgccagagctcctccttcggcttctcggagttctggggctggcgtgtgtgtggctacatggtggatggcactggcctagcctgcagaacgggaaagcagaagaatggaagagtggagcgttgatagtcactacatttttcttttctgtaaaatacggaacttgaaccatattatctttaatgtttctttctatcgtaatactcagcattttattgacctcatttagtggtctccctctaaagcatacctttagagcctcccctgcccattcaaggtattttcctaaacaaagactatttcctccctgaaaggaactccattaccagacactcagataatcacctcactctgctacactgctatttaaggaggagggtagaggcagagctgcacatcagggaattcacacggggggctacttggcag

SEQ ID NO: 479672 - DNA, 4515 bp, Homo sapiens
gccccccgcgttagtgaagaatgactcaggggaagcaaaacgggtcccatttcaaaagttttcatggacccagagggttccttctctttcctctcttgctacttcatcagttgatatttgtgattaacctgctccatgaaatatgggagctcttactctggaatgcaggagaagattttagcagattatatccccctcgagtgggggatgaaggggtctgctcaaagtcatcacagtgcctttcacccttgattctacaaggacaaatttcaggcatccaaaatctctccaacatggccaggaaaaattgcaggaacacggtggtgtgcttctactgggatggctgttatggggatgttaggagcgggcgtttttgtgtctattgtgacaccccctccacaccatcttttaaaacttccactgtggcttttcttggcttaggccttgctcttcctgccacgagtttgaaattgctgcatgaagatccacctggctttaggaagctgcagtgctgtgtagcacatttattcccagtcaacgcttcgagcaactggagcacagagtttaaatgactttccctaagctgctgtaggaatgtggagcggaacaagcaaggggaccgtggacctggattctccactttgggaggccgcctgctgactccagtctcccgttccccttcccttccacctgcccgtcccacaccacaccccaccaccccctgccacctgcagctctagtgggtaacaggaggtcagagattctccttccccagtgcctcttcatgtctgggctgttcctggtgacagggaagaggcatcttgctaaatcccacaccatccgtccacaagtctggcaattttcacaagagacctagtggtctcagcccacttttcagcaacatttaatagcacaagactgttgtgcagcctcaaactactgggaagagaagtgtttgcaaatctgtggtttggagaaagctgcactcaaaacaacaattcagatcttaatttacagcccgcagattttcagggaagaggatttctggtaagatagaaattattggggctttatcccaaagtctagttcatttcctgacttttaactcttttgctgctgtctcttcaagccactgccttggctggcaaaaacaatgcacaaatgattgaggtcattcattaattcaacaaacatctacgaaacaaagtccatttatgggcattgttctaggtgtaggtgctgagaatgacaaatgaataagacttgggtccctgaccttgaggaatggtgagcctgctggggagagatgaccattatcaacacaggtgcatgctatatagcatgacagggacaacaaaagaagtagggagggggaccgttggctgcaaactagtttaaggaccaaattccagccctaagactcactttccttggcctgcagagcattaaaaaaatgtatccaacatttaaacatggaaagaactgacaaaataagtcatgatttctggcttctcttgaaacatttgaagatcaggcaattctgggcctgtgtttggagacaacagtagcacaactgatgccgagtagcggctgccccctttcgatgggactcgcaatctccagctggacgcagtgcccagacgcccaggacgtgcctgtataccctttctcactagttgtaggcatttgagtgtgcaactcttggctttgagaacagtggaagggcagagatgggatcagctacttcactggcttgggtgaattgggtgtctttgtgttgctgtcagggcaagcgaaaccgacatggccacaggcttctctgtgatctggtctctttttttctgactgtgtttccagtagcagctcctggccaccctaagcttctgtctcatacaacgacttgcacttatgggaatgggccctgctgttttatgcctctgggctgtgcagtccgctctggtaactgctagccaaatgtgcatagtttggtttaaattaaaatgaatagaaattaactaaaattaaaaatttcacttctcagataccctagccacattttaagtgcttactagtaccattttggatggtaaagatatagtacattttcatcatcgtagaaagttctagtggacagcactgctttgcggttttgcttaaactgctgctctcctttggatgaaatctaacacctggactttgagcaaccgtccttttaagagactgtttaagcatcccctttacttgaagcctttggagacatttccttctgggtgaacttgtctgcatccacctctctgtccctgatatttttccttcacacaatcacacagcacaaagaacacctagattttgtatctgcgagcttcttgtgtgtgggaactgtgtcattcatggcttgtttgtaccagaacttagcccagaggtagttctgttggcacatgatagatgctcagtaaatgtttggggcagggttgctggggctcagactcagtggcccccaaaggaacacatgatgttccagacctgtcagtgaagcgaggatgccggagaactctttttacaagctcagcctcgggtagcatgcacattcacggcaatttccagctcgagcgagctgttactgcaaacctctaagaagtcagtgtctcgcaacatcgagcaatgagcagccagccttgtggggatgaactcggagctcttgtttatcaactcgtcttttttttttccccttcccttctctgtttcctagtctgtctcatgggctcattcctgccaacccgttgaccctcactccccagcaaacacaggtaatctatatcatccgtgtttacacctcaaggtatctgggcttttcaggccaaagaattatgacagatagtaccgaatagaaacatctattaaaaataagaattcataattaaaaatgatgggaagtggtaggatgtgccctgtaaccctgcttcatgggagcaagggttgagttattttctttgtgggaaggaattccagtgttgggttccagaactgtgtcagagaagggtgacagtgatggtggctgtgacataaagccagagaaagcttgaaaggtgtgtgtgtgtgttggggtgggggggtggggatgagctctgtatgcttgggcagactttggggctcttcatcttgaaactgcaattttctcaaatttggctagagataaaaggtaatagacatttctgttaaaatgcaatatatgttgtctttgattgggttccctggaaatggactttgagatggagatatgtatgctgaaggatcttttttattaaacagctttattgaaatatgatttacatactacagaatttatctgttttaacatacagttcaaagatttttagtaaatttactgagtcatgcaaccatcactacaatccaactttagaacatttccattgctccaagaagatccctcatgcccattagcagtcactacccattttcaatcccagccccatgcaaacattaatctactttctgtttctatacacttgccttttctgggtgcttcatgtaaatggaattataaggtatgtaatctttgtgtctggattcgtttattaggcatgatgttgtagcatgtattattagtacttcatgcctttttatagctgaataatactccattctgtgaatataccacattttgtttatccatccatctgttgatggacgtttggatagtttccactttttggctattgtgaatagtactgctaagaacattcatgtacaagtctttgtgtagttgtatgttctcattcctcaggggtatatacctagctgtggaattgctggatcatatgataaatttatgtttagctttttaagaaactgccagattgttttccaaagtaagtgcaccattttacattcccactagcaattccagttcctccatatactcactaatgcttgttactgtctatctttttgattctagccatcctagtgggtgtgaagtggtatctcactgtggttttaatttacatttccctggtgactaaatgatgttgagcatcttatgtgccttttggccatttgtatatattctttgatgaaatagctattcaaattttgtgcccatctttaaaaattgggttgtctcctcattattgaattgtaagggtttaaatgtatatatttctagatacaagacctctatcagatacgtgatttgcaaatattttctcccagtttgtggcttgtcttttcactttcttagtgatgtcttttgaagtgcaaaagttttaaaatttgatataatccaatgtattagtttttcattttatggattgtacctttggtgtcataactaagaactttacctaatccaaggtcacaaagattttctcatgctttcttcaaaagttttataattttgcccttaaatttaggtctatgattcattttgagctaatttttgtgtgtagtgaaggataaggatctaaattcatgtttttgcatatggctatccaa

SEQ ID NO: 479673 - DNA, 446 bp, Homo sapiens
gggcaagccagtgcccactcatgcagggaagccttccctatgcttttgccttctgtcccctgccgctgctaccaagagtaatgtgcgcatctaccaagaacctaagccagccagcacgtgtaatcagccttcgcctacgagaggtcaaagatgaaagctatggacaaagttgtggggaagtggctagggacacaagcttccacattcccggtctgactcctttcccttcagctggtccctcttgtctctctcccagccaccttgcctccatgcccttccctccacatttggtatcctctgctgactttgaggcccagctggaggctgcactgagcagcatccctaggcatagatactgcacagtttcccctgccctgactgacagctggctggctctgcttccccaatgccaaggatggctgtgacaacctggtgggcagacacac

SEQ ID NO: 479674 - DNA, 766 bp, Homo sapiens
tcttctcctgccgtgagcccgccccacctctcagcctttgtgtggtcagttttcctctgcctagaattgatttgagatggtcacctcctcctgccagtggggccggtggtcattactgatggaattgcaattggtccccctaccaccttgtcccagttcccagcccctgggtgcagttaccatgtgtcagtcactaagtgctttacctatgctaactcagccctcacaacaacctgtgagagatgttgcttttaaccactctgacctgctgcctcttcaatgtgttgctgacatatcactgatcttccaggtccagggtgctttgaattccgcctatgtccccagtgcttcaagtcgggatctaaattcctcctcctgccagactgaacttagaatctaccagggagataccaaatttataaagaggctttccacgaataaaccgactcaggtgtctgcaaggggtcaatattggctagagccagggtggtccatctggacaggttgtggagagggaggaggaggaggtcatggcaatgcttctggggtgaaccacaatggtgcagctttgcttcttgccctctggtgggaggggctgggggacagccaccatccccagctctggatgctgcctgctctcacctgaacccctgagagtaggtcctggcatctgtctatggccttctggctatctgtctcctcagcagctctcttctctcccttgatcatcccctctgtttctgtttctctgaatcactcactctcc

SEQ ID NO: 479675 - DNA, 619 bp, Homo sapiens
agacccgactatcaggattataattgacctactgctgctctgaaatccgtcagctcattgaagccatgccccccaccagctgctctcagccaaacattgcacttccaatgagaatgcctgtttcctcacaacatcaccaatggagtatgttgtcaaaccttgagattcgttttgcccctgaatggctctttatatcgctgggcaaatcaggcttcaactgcctgagagcagtcatccaactaagaaatgtagatattggaaatgaaagccttcagggagctagaaagcatgaacatggcgaagagattgaagaggttatgggtagagcactggcggcaactactttaatgagtgactacccattccacactcacaggaggtcagcaccgtacaaaagagacatgcctaaagctgataataaaagactaaatagtaccctaaatctaagtttagatagccatctagagttgaggccagctgctccactgcaaagaatatgaactggaaattaaaaaaaaaaaacagaccctacccttcccttctcttagtatatactatgggagaactcagggagagtccgtgactctatatctgtaaagtaagccgttgtgacccttca

SEQ ID NO: 479676 - DNA, 539 bp, Homo sapiens
ttgcccagcagagcagagagagagaaagtggaaagactaacatggaagacaaaagtatagggagaggatatagagaatgggagcatgtaaccctatgttggtcgagagccattgctatgcctggtttcaagcacggactcagtcaacactgggttctgaagattttactggggacgaggaagtccatgcatcaaccatacgcttcattccaggaatggccccctgatatttcatgtcttgaggctagtcaggtcactaaaagatcacaaggacaacagtttttcactgagaactgggctaggaataggaaaattggcaataggccagttgtccctagaataaatcagagatgttcccttaaatatgagtttctgaaaagacagtggaacccctgtggcctctccaacaacctgggtcaggtcttgggcaattggttcaccgctggacctgctgcagggtaacgtgaaggtcatgcttctcattgctgaaggacaagctgcacaaaggggtcgtttcagaagtaaaactaattaactacc

SEQ ID NO: 479677 - DNA, 546 bp, Homo sapiens
ctgcaatagttatcatcatgcctaatgcccctggattcctgcagactgttacacgactctgttgactctgagtcaccggcacctgctgctgaaacagaaatctacctggaaaactgtcgctcacctaacagagttgagaaggatgttatgtcttatgttcttaagcacttcaaaaaaaaggcatttcacttccttctggtttccatggtttctgatgagaaatttgctgatattcaaattgttattatcatgtcattggatatggacaaccccagaaggttatcaaggaaactacctcttggtcacagtggttcacttcagctgaggcaatccctgaagaagcttagagctaagggctgtctgccatcagtgctcctagcaccggagacaacaagaacctcattgaagagggatctggacagtgcaccagagtggccagaacacctggatgtgcagtgagagagctaggcagcctaagcagtaggaagtacctaagatagtaggcaactaatcactcattcatgtactcattcacaaatatttatc

SEQ ID NO: 479678 - DNA, 980 bp, Homo sapiens
ttctctctccactacttctggcggcttctccctttctcctgtgttatttcatggaccagcaccttcagatgcgcccccaagctctgactgaggaattggcagcttcttctgacacaagtgagctcagcggctctccccacatcgcagaggtgatgaattgccttggagtcatcatgcctctctcttttgagtggggtccagaacaggagaaggctctgcaacaggtccaggctgctgtgcaagctgctctgccacttgggccatatgacccagtagatccaatggtgcttgaggtgtcagtggcagatagggttgctgtttggagcctttggcaggctcccataggtgaatcacagcggaggtctctaggattttggagcaaggccctgccatcttctgcaaataactactctccttttgagagacagttcttggcctgttactgggatttggtggaaactgaacgtttgactatgggtcatcaagtcaccatgagacctgaactgcctatcatgaactgggtgctttctgacccatctagccacaaagtgggtcatgcacagcagcattccatcatcaaatggaagtggtatataagtgatcgggctcaagcaggtcctgaaagcacaagtttgcagaatgaaaaagttctcaagctctttttcacaactatgtgaatatacttaacactactgaacagtatacttaacaatggttaaggtggtaaaattatgctatgtggtttttactacaatattttttaaaagacatattttactaaagattaatgaggtatacttgacaaataaaagttgtatatatttaaggaagccttccagaaagcttactcatgccccttccaagtcaatacctgccccttgtaattactactgtaacttctatgactattgattagttttatctgtccttgaatttcatattaatggaataatataataatgtctactctttttcatact

SEQ ID NO: 479679 - DNA, 499 bp, Homo sapiens
tccaccactccctggctttggacagcttcagtcattggctatgagatgctggggctggggcactttggactggggactcagttcctgttagttgaggacaatcctccagagaaggctgcagctgagcaggaatgtccacatgtgctcacgagcccgagaagtctgtacctgcagatgagtgatgagctcgtgaatgtacctgctcctccaacagcagttgcctccagaatgagtccagtgactcctcatctcctgtactatgattgggcactgagtcacactcccaaccccaccctggccctctatggcactccccaactggcgttcctgcaagctttccaaaccagggtacagagacctgtagtgggtgtctatacagggcagttggttcatgtggccaggtctacttggggatgtgaatggaagtttacttcttctgggaactttgattgttaatattgttggatttatcactctttagtgaaacaagttacttcct

SEQ ID NO: 479680 - DNA, 2126 bp, Homo sapiens
tctggctttgttctgcgatgttcagatgtgtccggagtttcttccttctggtgggttcatggtctcgctgacttcaggagtgaagctgcagaccttcgtggtgagtgttgcagctcttaaaggtggtgcgtctggagttgttcattccttccggtgggttcgtgttctcaatggcctcaggagtgaagctgcagaccttcgcggtgcctctgaaggagtgaagagcctacctggctgccttctgccactgagtaaaggatcaggaagcacagggtctgggcagttctctgccattaagtggaggaaactgctggccccactgatgatactgctggctggtgtagggtgtgggtggattgtccaactcaggacccactattgctcctgctatgaatacattgggtttgctgctattgttgggtgtggggcaggagatggattgagctctaatgctacaacctgacagcatcatacacagaataaaggatactgtatctcacctttgaggaaaatgaagataatatgaacagaactgtgttacatggctcaaacatatccctataattactaagaaggttattgatgtcaaagatgcatgattagtttaaatacaattgtttaataagggaaaaggatatttccaaattaataatttgttttatataaaatacagttttaaatatgtatatataattttattagaaaattaaatattctaagtagatctttcactcttctatttctttagaagtttatgaattcaaaatgaccaaaaactgttcttaaagattttttttcatttggataattggaggttatgttatatttgatatggacttatgtatagtgattttggtacttcagatgcccagaaagtgacagttgtgaacccatcacccagatttataaaatattaggttcttgtcacatttaccatataattcataaaagaaatagagcgcacagtgaaagtcctttgtgtacctcacttccatcgcattccctcattccttcccctagatatgggttatgtatcatttccatgcacgtctaatgagattaccacatagatatatacctgaaaacaatacatggaattaattgctctgtgaggttttaaaattacgtaaatggtaccatgctatacatataattttgcattactgatatatttggactaatttttatcagattatttcatgttttctgcttttgttatccttccaaccctctgatggattggaaaaaattcccttttgtttcctcccactgctagtttagaagatatatgctgcatttctattttttttttactaattatccttacattttcaacatgaaaatttaattataaatgttttatcaaagtctaaaagtatttaatatctttattcttctcccccaaacctttagctaccacctgataaccttctcatgttacttgttgtctagaattttagttccatccttttttaaccacacagtttatagctcttactttttaaatggtcacttgttaattaattttatcaacctatattattattatgtatttctttgctcatcgtgatttctggtagcccactcctctctgaattcacttttttacttattgaaacatatactttaattgttcatttagtgaacatcaatgggtcttttatatttgaaaatacctttatttgtcttcatctgtaaatgatattttagctgaaaatgaaaatctaggttgacaatgatttttcccttagcagtttgaagatttcactgtctctggcatctattgtagatgagaaatctgctttaagtttactactgtttttttttgaagataatttatctttttcattctagtagcttttaaaattttctctttatccataatgttctaaaatttcaatacaatttgtctaaaatttggatttatttttattcataccatttagagttggtgtgtcttttaatctgagtacttactaaccttatataattgccataatcctggaaaattctgttcctttgttttaaactccaattagttgtatgttgaagccttctctcagtcttgcttttaactggtctttcattttataactaggaatacaatgtactctttgtactctttt

SEQ ID NO: 479681 - DNA, 614 bp, Homo sapiens
aagagcgagggagggctgctagcacgttgtcacctcgcaataggttggtgcaaaagtaatggcggttttcaccattaaaaaagaatacaccttgcagaggaaagaggtctggggacatgagttcagttggaggaccctggttggggaacccaggaaacaggcagttgtaaaagatctaaagccagctgctggatgctatcactgggccgtgggaaaagaggaaacagtgagggttggacagccactgggagcacacagtttggcaactcacacagagctgtgcaccccagtcagctgtggaattagaagtatgaccgacaggatgtgtgacagggcacaagacatatgtactacaggatgtaagtttgccaaagtgcaagagaacaaggagatactatactatcactgggaagccaaaaatgaagggaacttggaaaaaagtcctcagaaaataagctggcatagaattattcaaactgacagaagtgaggaggcttaaaagaagagttgaggagggttacggggagttggatgggggatactgtcagaaaaaagggaagaaatctttctggatagtcagcatcctgagcattagagtgcacttgatacctgaa

SEQ ID NO: 479682 - DNA, 662 bp, Homo sapiens
agtcacctgagggaatctcctggtctatgggtaagagttcaacatcattttttgaatatgaatatccaggtttcccagcatgctttgttgaaaagactgtctttacctcactaaatggtctaagcatccttgtcaaaactcatttgaccataccatctcataaagaaagcaaagatttatttctgggatacctattctgtttcattggtctatatatctatcttataccagtaccacactgctttgattactatagctttgtacaccttgactctattagcccacttccttctggcctccaagtttctgatgaaaaatctgctcacagtattactgaggattccttgtatctgatgaatcacttctctcttgttgctttcaagattccccttttgtctttgtctttcaaaagtttgattataacgtgtctcattgaatcacggtaacttggggactgtatttcatttttttagagtatatagaaatggtagtttttaaatttcatcttacaaatgttcattgctaatatgtggaaacatgattgactttctatttcatcaatgtattcttaacctctcctaaaatcactcattttttaaggagttctgaattgttttgttttgttttttattctttcaggttttttatgtaaaccacaatgt

SEQ ID NO: 479683 - DNA, 577 bp, Homo sapiens
attggtgtttgtcaaggatttggagagggagtgggaagagtgttggcagtatgtatgaaaaaaaaaaagtagtctccctggaagccagtgagggaggagggaagcaggatagacaaaggggagaagccaagcaagggttgatttcaggccacgtcctcacagcctcagctgatgcagaagtggagctctgggtttttcttcttttgtaccagtcagtcattgataagggcccccttggaagacataaattcccaggcacttctgactccccgtggcagcaagcaaagaagctccaggaacccctgggcaatctccagagtctttactgtgtgtcatcagaaacaagagcccatataagccaggaaggggctagtaaaaaagatcataggtctagagggagtaccgagagcacacaagatgggtacaaaaaatacactggaatgatatttaacaaatttgtgattttcattgagaggtaggagagggaacaggcttttatctttctataatattttatttatttatttattttgaaaaggtgatgcccaaatcataaatacaaaaaatagccaattcc

SEQ ID NO: 479684 - DNA, 597 bp, Homo sapiens
aacattctctctctctctctctctctctctctccctctctctcccgacactgtggtgggagtgacccgattttccaggtgccatctgtcaccccttcccttggctaggaaaggaagttccctgaccccttgtacttcccgggtgaagcgatgcctcgccctgctttggctcatactcggtgggctgcacccactgtcctgcccccactgtccgacgagccccatgcttccaaatgtggactacaaaaagttcctgagtatttttacaagagcaaattcgatgtcattgatggtgtaagatcttctgcaagaaatcagtggcttagacacctgctgttactgcatcctcctagaattgagtatcagaaatgccaaaagcgtttcagcatttcaacttcccaagtgctgctagtttctgaaatatcttgcaaatggccgccccagctcttgctggtgtgtgcacgtgcacacacaggcacactcacgtgctttcctacaccaggtgctgctccaacaaaactcaatcctcatcccagcttaagtctggagggctgagatgattgttttaaggaggctgttgccaggacagaattttcca

SEQ ID NO: 479685 - DNA, 1436 bp, Homo sapiens
ttcaaggaaccagagtcagctgtcttcttacccctcacacattagaaaagcatttgaaatgctccgaagtggactccttggagcagatactttcaacctggtccatagagtcctagagtggcagctctcagggagtggttcccagacacagcagcatcagcatcatcagaacctgttagaagtgcaagttctcaggcccaaggctatggctgccatagataattattcttccaatggatttgggcaaagtaaattgaaaaccttctggaaaggattcaccattctagatgttcttaagaacatttgtgacacacgggaggaggtaaaaatatcaatactaacaggagtttggaagaagttgattccagccctcatggatgactttgaggggttcaagacttcagtggaggaagtcactgcagatgtgatggaaatagcaagagaactggaattagacctggagcctgaagatgatttgaatgtgggatacagcttagggtgttagtggctttaggctaaggtttgttacatatgtatacatgtgccacgttggtgtactgcacccattaactcgtcatttagcattagcagcccttcagggaagaagcagttattctgagaaggtttgggaactgaagatgaccaattcccaaaccttacagaaaactagtgctaagacagcaggtttagcactggttgtacaaggttgaaacactagatgctgaattttccctcagtcagtctaatttctaggcaaataatctggtccctcatgaaatttgttgtggcaatcaaagatgtctccagacattgcaaaatgtcccccctggggtcggggagaaagaaggggggcaatgtaaaagaagtccaaggctgttttggtggctgcacaatataactaatatcttaggttctgtctatgttttgtgactgtatcatccttaatgtgcagctgttaatcttgaggttacgtcctggtgggaagagggctgctgcagctccagccatgtttcaggcaagaaaaaggagatggatgaataattatgtattcaaattgctgcaaaatgaaggtgacatttttgtagactattttcccagtttatcaatgatcttaatggtgaaaaaatgcaatccaggggaagaaactgtcagagtaggagagacaagaatatttcaacctagattttgtccattgcatgccctagaatcagaaattccctttgttctattaatacagggaagaaaaaaatatgcattgaacaagaagtcacctttacagttttcagatccagggaacgaggggaaggtcaagtggagcaaacacactggttatggtttggtaggttgcaggaaacctgtgttgatgaaaagaatcaaactctgtaaaatatttgaagagatttattctgagccaaatatgagtgaccgtggcctgc

SEQ ID NO: 479686 - DNA, 759 bp, Homo sapiens
tgccttttcttcccatatcttttggtttaaaattgtgtgggacttccccatttgctctctctctctctctctctctctttctctctctctctctctctctctctttctctctctctctctctctctctttctctctctctctctctctctctctctcctctgttagcagtggtcagatattatgagaatattatgtctgccctggggatttgaaattggtatcggcaatttggaaagggtacagaatgtgataaaggtcttaggaaataggtgcaccgagcaagggttaaaggtccaacactggacgtgccccattaaaacccagtactgggcaggcccctatgaccccagactccaggctttacctgagattgagcttcccaaggtctgtcacaggaaccaactaggatcctgcagccccaggcatcagatgagctgcactaccaccaggctgacaccagtagccccaggctcagtataccaaaacctgtgggacagagaaaaagtagttctgagagggaagtgtataccaataattgcttacattaaaaatgaagaaatagtttactacgaatttaaagggtacatgaatatttgggaaatttgactataaccactgtagggataagtcagctattctgattagtaggaaggagtcacattctcagtgctacaaaattgtcctactttaagttattcactgtgggaggaagatacctttcttccaaggttgaataatacatatagtctgtgctgcct

SEQ ID NO: 479687 - DNA, 643 bp, Homo sapiens
caaggcatgaacgtcccatggctccaccccgttctcctggtgcacaggcgggtcagagattatctggggaccctccaccttatctgccacctgcatctatcactttgagggaaccctcatgccttttcttcccatgcctgacagcattctccaacctggcggggagctctggagcaacaattgcttatcatactgtcctgatttgggccaaaatggtcaggcctttatgcctgccactgacccagccaccagatgtgggctgccctcagaagtatgcgactttgataaagcatggctgcggaggctttgggaaacctacaatcatggcagaagaggaagtaaacaggtccttctcgacatggcagcagcagggagaagtgtcaagcaaaagggggaaagccccttatgaaaccttcagatctcgtgagaacgcactatcacgagaaaagcagcatggggataaccaccccatgattcaattacttcccacaggatccctcccacaacacgtgaggattatgggaactacaattcaagttccttgaggtataaagttaggttgtttatttgagatctttctgcttttttaagttttagggtacatgtgcacaatgtgcagattagttacatatgtatacatgtg

SEQ ID NO: 479688 - DNA, 643 bp, Homo sapiens
taggtgtgtagtaggctataccatttaggtttgtggctctaatgttcaggctcaattggagtcccgagggtattttaacacctaaagcctctgactataaatgtgtccctcgggtattctcagttatttcagggaagtgtcagttgctcattgtacaagaagcaattatccccacgcagaaaatagttcaaagaaagaaaggaagaaacctagttagtgaaacaaaggaccgaaagaagaaagcttacaaggaaatgaaaattaaaaagtacattgcaaaaagtgcaatgatatatatttactatttattttatattcaaaagataaatacagatatagtggcatatagttatagtcatctatctctacatttgcatccatatttttatcccacccacatatgcgtacatatccagatccacatttctgtccttatctgtgtctatttcgcttttatacaaatgatatactcactgactcataaagtcataagtaatatggtacacatgttattcatgaatatgcctgacaaatagtaggacatgtgtacttattgttcttatgcccatgggccaatcagtcttatgtccatgtccatatgtcttacgtccatgggccaatcagtccatgaaaaacaaaataa

SEQ ID NO: 479689 - DNA, 3273 bp, Homo sapiens
accggaagcagtgccgtggagaacagacctgacggggcgaggccagaggacgctatggcaggcctgaggtacagtgtaaaagtctatgtcctgaacgaagacgaggaatggaacaatctaggcaccggtcaggtctcatccacctatgacgagcagttccagggcatgtcgctgcttgttcggtcagattcagatgggtcggtcatcctgcggtcacagatacctccagacaggccctatgggaaataccaagagacactaattgtttggtatgaagctgagaaccagggtttggtgctaaaattccaggacccagccggctgccaggatatttggaaagaaatttgccaagctcaaggtaaggatccgtctatccaaaccacagtgaacatttcagatgaaccagaggaagactttaatgaaatgtcagtaattagtaatatggttgtgctgcctgactgtgaactcaatacacttgatcaaattgctgacatagttacctcagttttctcgtcacctgttacggatagggaaagactggctgagatcttgaaaaatgaggcttatattccaaaactactgcaactgttccacacttgtgaaaatctagagaatactgaaggtttacaccatttgtatgaaattattaagggaattttgttcctcaacgaggcatgtctgtttgagataatgttttctgacgagtgtatcatggatgtggtgggatgccttgagtatgaccctgctttggatcagccaaaaaggcatagggacttcttgaccaacgatgcgaagttcaaggaagttataccaataactaactctgaacttaggcaaaaaatacatcagacatacagattacagtacatttatgacattcttttgcctgtgccttccatatttgaagataattttctttctacacttacaacttttattttctccaacaaggctgagatagcattacagcctcaaagcaaggatgcactatttgaaacgttgatacagttgggagttcttcctgctcttaaaatcgtaatgatcagggatgatttgcaagtaaggtcagctgctgcagttatatgtgcttatctagtggagtacagtccatccaggatccgagaatttataatttcagaagctcacgtgtgcaaagatagtgaccttttcattaatgtaataattaaacaaatgatctgtgatactgatcctgagttaggaggtgctgttcatttgatggtagttctgcatactctacttgatccacgcaacatgctgacaacacctgagaaaagtgaaagaagtgaatttctacatttcttctacaaacattgcatgcataaatttacagcaccacttttggctgccacctcagaacacaactgtgaggaggatgatatagctggatatgacaaaagcaaaaattgccccaatgataatcaaacagcacaactgcttgctttgatattagagctacttacattttgtatacaacatcatacattctacataagaagctatatcttgaacaaagacttgctaagaaaggccttgatattgatgaattcaaagcatactcacctgattttgtgtgttcttcgctttatgagaaggatgatttgccttaatgatgaagcttataataattacatcatcaagggaaatctttttgagccagttgtaaatgctcttctagataatggaactcggtacaatatgttgaattcagctattcttgagctatttgaatacataagagtggaaaatatcaagcctcttgtttcacatatagttgaaaagttttataacacacttgaatcgattgaatatgttcagacattcaaaggattgaagattaaatatgaaaaagagagagacagacaaagtcaaatacaaaagaatttacattctgtactgcaaaatatagtagttttcagaggtaccatagaagaaattgggctggaagaagaaatatgttttatggaagatgcaggagaagtagttatgccaccactggaagatgacgatgaatttatggagaccaaaagaacccaagaaggagaagcagttatgccaccactggaagatgacgataaatttacggagaccaaaagaacccaccaagaaggagaagcagttatgccaccactggaagatgacgatgaatttatggagactaaaagaaaccaagaacatgaaggcaaggtagactctcccaaaagaacatcttctggtgacttcaaattctcttcatcttattctgcttgtgctgctattggaacaggtagcccaagtggtagcagtgtggttcgtttagtggatcatccagatgatgaagaagaaaaagaggaagatgaagaagaaaaagaggaagataaagaagatgaaacatcccccaagaagaaacctcatcttagctcctaaaatctatatggggcaccctcaaaatgtggctcaacaaaaattctataaacgtccataagctaaaaagactgattccacaagctttttcatgtgaacttataatgataaatcacagatataacgagttaagagggtttaattctgtaaaaacaaaatttctcataatcttaaaaaaaaacagtaaccagaacctgggtgataaactttttagcaagaaagtcttaatttgtgtcacgatttgggggaggaaaccatctttgggaaggaaagtcttagtttggaatggggaagaaccaggtcgataatgttaatgtagttttgttctagaggtatatattagaaataataacagttcagttaaaagcctacaaattacttgtataatggtactagccatggtattctttccttcagttacctttttaacacaaaagtttatgtttatatgaaaaacaaagttaactataaaaaatgttagtctcttcagacatttctataaagatataacaaaatttaagcttataagtaattggaaggaagtagctttcagagtgtactttcattcattaaaaaagcaagctggatttacaatgtgtggttatttgtttttattaaaacaatagaaatgtattctctcactgttctggaggctggaagtccaaaatcaaggtgtcagcaaggccatgacccctcagacactggatagcatccttccttgccttttcctagcttccttccatgggtggccatggattcttggaggtgattggcttgtaggtgtattagtccaaactttgcctgtgtggtcacatggcattcttcttgtgtctatgtggttgtttatataac

SEQ ID NO: 479690 - DNA, 1602 bp, Homo sapiens
aaatacactgcctttctagaagaagaggagcagaaacctaactgttgacaagggtatgtcatggctaattcgaaaaaccctgttgaaattgaaattatggtgttcagttcaacgctaaatatgccagatgttggagataacaaggtgaataaatcaatggcttgctcttctctgataaaggcggttgagttctgtgaagtagtgagaggtatccaaagaagacagtgccattatctctaccctcaaagagctaacgatgtctggaaccaaaggagaagaagtgacagcaaacatgaccacagaagaaaagtcttcaaatgttcccaacagatagaaatgataaatgctctgagtcagtggtccccaacgtttttggcaccagagaacggttttgtagaagacaatttttctacggactgggtagaggggtggtttcaagatgaaactcttccatctctgatcatcaagcattaaattctcataaggagcacacaacctacatcctttgcgtgtgcagttcacaatagggttcacgcttctatgagaatctaatgctgccactgatctgacagaaggcggagctcaggcagtaatgctccctggccactcacctcctgctgtgtggcctggttcctaacaggccacagacaggtaccagtacatgacccagagattgaggactcctgttgtaggtgatggacacccccaaataccctgacttgatcattacacagtctatgcatataacaaaatatcttgtgtagcctatacatatgtatcaattattatgtgtccacgaaaataaaataaaatctttgcacagagggaaaatgactgtataaatgaagtaaaatatatttatcaaagttctggatcacattgttatttttagaataaaatgtacttaagcaattaggggggaaaacctgttcagtgaataaagttgaatgaggaaaaatacaaacagatattcaaaacttcaaaataagtgtataaaacaattattttaaccacattactgattaattcgcgtgtgaattatattatgagccaagaaaagcctgtatcattttagtagaatattctaacagtaagtgactctatctcttaaaaatactgagcacacatggatatttgaaaggatatttttgaagctgcttaaaattaatggacattaaactccctcatgctttgtttcatcaataaaactgtggagctcattaacaaaaaccagaaacttagctctctgaatcaggaaatttataaagtgtagccactagtgcatatctatgagtttctgagttaactaaaaattaaatattattgaaaaaaagaaaagcaagctcttcataaattattaatttatacttttactagtcttcatattagaatgattcaggttttctcacctgatatataacttctatcccctcctattttaccttagttaaatggtttaattttaaaataagcattttccttcatttattatgttcctgtccatatagaaacctgttctataattttatcatatttttaataatttcctttttcagatgtgtttatgccctttgctcattttttaatggggtcattaataat

SEQ ID NO: 479691 - DNA, 1247 bp, Homo sapiens
agcagggaaatgaggggactgaaatgaggggtcacgggatcacctgcctttttggctgctgcacctgaacagagtcatcatgcctcgaggtcagaagagtaaactccgtgccagggaaaaacgccgtcaggcccgaggagggctggaagatttgatagatgctctggacattttagaagaggaggaagaatctcccccctctgcctctgcttgtttgaaggatgttttccagagttcacttgatggggcatccaacaatccccatggacttcgggaagcccaatccaccagcacatctgctacagctgcttcacacacaagacatcccgaaggagtcaacgaccaaatggaagaaaggccaatatgcacacaagatctagaagccactgatagctttcccagaggccctgtagatgagaaagtaattatattggtgcattacttgctgtacaagtaccaaatgaaagagcccattacaaaggcagatatgctgagaaatgtaacccaaatgtccaagagccagttccctgtaatcctgagcagagcttctgagcacctggagctgatctttggtcttgacctgaaggaagtggagcctaataagcacatctatgtccttgtcaacaaactagatctaggctgtgatgcaaagctgagtgatgaaacaggcgtgcccaagactggcctgctgatgactgtcctgggtattatcttcacaaatggcaattgtgtcgctgaggaggaagtctggaaagtgtttaacacgatggggttatatgacggaattgagcacttcatgtttggggagcccaggaagctccttaccaaagatttggtgaaagaaaattacctggagtaccagcaagtgcccaacagtgatcctccacgctatcaattcctatggggcccaagagcccatgctgaaaccagcaagatgaaagttcttgagtttttggccaaggtaaatgatacagctcccagtgaattctcaaactggtatacagaggctttacaagatgaggaagagagagccagagccagagttgcaccaaggctcgcgttagtgccacagccggtgcacgttccaaggttaagtccagcaagtcctcccaactgcagtaaagtctgagggagattcttcatttgtgtttgaaaagaaatgcacattctgagctgtgggaggtcagggtgggactggagacaacacagtgaataatatgtttgtgttaatgttctatgtgatggct

SEQ ID NO: 479692 - DNA, 925 bp, Homo sapiens
tgcagttcctgctgcgcaagtacaacatgaaggagcccataacaaagcataacatgctaaagtatgtcatcaaaaaggacaaggcacacttccatgagatcctcaagaaaacctctgaggtcatggtgctggcctttggcattgatgtgaaggaagtccatccaaccaggcactactatacccttatcagcaaattgaatcgcacctgtgaggcaaggctgagtggtgaggagatcatgcccaagactggcctcctgatgactatcctgtgtgtgatctttatgaagggcaactgtgccactgaggaagatatcttgcaggtgcttaataaagaaccactatttctatggggagcccaagaagctcatcacccaaaatttcgtgtaaaggaaagacacctggagcaccggcaggtactcaacagtgatcctgtgcggtatgaatttctgcggggtcccagagcccatgcagaaaccagtaagatgagaatccttgagtttttggccaagatccatgatactgtccccagttcctttccatctttgtatgaagaagctttgcgagatgaagaagagagagtccgaggcagatttgcagctatgcttcctactagtgccagggccagtgcacgttccagggtcaattccagcagcttcacccctagagaagtctgaagcactttcctcactttgaagagaacactcaatcttttaattagtgggggaccctggcggtgttagagggaacatagtacgtattatatctgtattcctgttctacgtgagtaacttgtacacttatcttttgttttcgttgaaagttttcaaatgttatttattttataaaaaggttaattagctttagaatctagctgtatgaataatattggttacatatttaatgttgtttatgacactttagagtt

SEQ ID NO: 479693 - DNA, 779 bp, Homo sapiens
tctgtttcaactctagcttgtaggcagcaggagcagagactttggcaacgacaatggctgaaagcctttcacttgttattgggaactccaccccagagaaatgcggagccactgctaattggaatgatcagctggggatggagtggcacattacaggtctaagcgaggagtccctacattgtgaagagcaggggagtgggaagctcatgggtgagacactctggcctcctgtctgcaggacagctgcagcatgctggaggtgcaagcaaagtaatcagggtctttactccccagcccaagggcagcaagggcatgtaccatggcaatggtcaaggcagaggggctgccaagtacatcaagggcaggtgtcaatacaacggcaatggcagagagcctgttggttgtctctgggaattctaccccaaagaaacacagagcttccagtgactgaagtaatcagaaggactgtcactgtgccccttgttataatggatgagacaaaatggatagaaaataaagaatgatagctattctgaagaattctggcacttcatatgattgatcccaaaagcaacctggagtgtgttgtttagaacaagattataaatatctttcatcttcacattttttatactagaaaagatgtttaaggaatcctagtcatgataggatattgtatgtcacttccaaaaatgtgtgaacatacttacttttacaaatatgtttatgtgttcaaaataattatcttcccttttctcagtaaagattaacagccttga

SEQ ID NO: 479694 - DNA, 1887 bp, Homo sapiens
ctgggtagaatgagttacttcctgtcttactgcaaagctcatggcggcgcgctgctcaccggctaccaggccctgcgcgccgagggcttcctgtgcgacgtgacactggagaccgagggcagcgaattcccggcgcacaggtcgctcctggcgtgctccagtgactacttcagggccctgttcaagagccacacccaggaatcccgggcgcgcgtgatccacctgcacgtgccatcggcagccggcctgcagcgcctgctggacttcatctacactgcctggctgtcgctttccatggacactgtagaggacactctggaggccgccagctacctgcaggtcactgaggccctggggctctgtgggcgctacttggagcgccagctggctccagagaactgctgcttcgccgccaacgtggcagcgcgctttggcctggctcacacgctggacgcggccgagcgctgcatcgtgagccacttgcaggagctgctggcgcggggcgcgggccccgcgggactcctggagctcaaccctacatcgctgagggctgtactgggtgcccccgacgtggcgcgggtgcccgaggcccggctactgggcctggcgttagcttggttgcggcaggagcccacaactgagcgcctggcacactgtacagagttgctggagcgtgtccgctttggcctggttcccgccgacgtactgcggcgcgtgtactcgggctctggcctcgtgctgcccgcccgggtcaagggcctcatcatccaggccctcaactaccacacgacgccctcccgccagccgctcatgcagggcgagcagaccagcatccggagcccccagacccgcatcttgttggtgggggggcgcagggcacgggaggtggtgattgaggaggtcgcggccccgcagagggcagctaggggccaggtcgccgccccagagcccgaggaagaagaggaagagttggaggaagaggaggaggaggaggagtgggagctcacccagaacgtggtggccttcgatgtgtacaatcaccgctggcgcagccttacgcagctacccacaccactgctggggcacagcgtgtgcaccgcgggcaacttcctgtttgtcctgggtggggagagcccttccggcagtgcatcctctcccctggccgacgactcgcgggtggtcacggcccaagtgcaccgttacgacccgcgcttccacgcttggacggaagtgcccgccatgcgggaagcgcgggcccacttctggtgcggcgcggtgggcgagaggctcctggccgtcgggggcctgggtgcgggcggtgaggtgctggcctcggtggagatgtacgacctgcgtcgggaccgctggacggcggctggggcactaccgcgggctctgcacgggcggacgagcagcctccgggacttatacgtcctgggccctgaggagcaggtttggagcaagaaggcacccatgggcaccgcacgtttcgggcaccacatggcagtgctgcgcggcgctgtgtttgcttttctggggcgatacgagcccttctctgagatcgagcgctacgaccccggcgccgaccagtggactcggttgcggccgctgccctacgaccgcttctgctatgggctggccgtggtcgaggagacagcgttgctgctgggcggcctcaagtggcgggactcgcgccaggtgcctacccgcaacgtagtgggctacgacctcgacctggaccgttgggaggacatcggctgcgcgttgccctgggcctggagcggcctgcggtgcgcagtgctgcagctggccgagggtggggacgacgagagggagggagaggttggagaggcgctagatttggtgctgggctgaatgggtcagtcc

SEQ ID NO: 479695 - DNA, 579 bp, Homo sapiens
ggctttaccaaaatgaccctgaagacaaagcgcaatcaaaacaatggctactgaaagggggaagtggtccagtcaaagcaaaaggagacccggggtggctctggaccctaagaataaactgcttcttttccacagaagtgaccatgtctgggatggaaatgcagggaaagacaaagatgaactttttacattttacaaacaaaaaggcaattcatttcatttagttgtgcaagagatgagattcaggaaggtgcacatcaaaatgctagagcaagaatccctcaccttgattattgaaaaatcaattagctcttataatcacttgggagctgtttgccagtcttgctccctctttcaaaaagcacccaacacaacaagaaatgatgtatggtggtcttcctgcattctgatactgtcagtaggaatgggatggagtcatttgggaagttgtgatatccttttaaatggagacgtctatcaaggaagagagttgatagttcagtatgggacagctttctaaaggtcaccctgtttaacatgcgtgagttgtaatagctgggaattaaggtggcctgaagc

SEQ ID NO: 479696 - DNA, 774 bp, Homo sapiens
gtctagatatcccttcaactctaagctacacagtagagaaacccgggaccgggatcatggcagctgagacttggaacgtggccgaagcagaggccccgcagccccagaagcgctactaccggcaatgtgctcaatccaaccccatggcagaccacacgctgcgctatcctgtgaagccagaggaaatggactggtctgagctatacccagagttcttcgctccactcactcaaaatcagagccacgatgacccaaaggataagaaagaaaagagagctcaggcccaagcggagtctgcagacataggctgtggctatggtggcctgttagtggaactatcaccactgttcccagacacactgattctgggtctggagatccaggtgaaggtctcagactatgtacaagaccggatttgggccctacgcgccatcctggagataaagcacaagcgccaaatcatcagtcccactctgctagcaaaatatgcctacgtgctgagagttggggggttggtatatacgataacccatgtgctggagctacacgactggatgtgcactcattttgaagagcacccgctgtttgagcgtatgcctgtggaggacctgagtgaagactccattgtgggacatctaggtacctcaactgaggaggggaagaaagttctacgtaatggagggaagaatttcccagccatctttcgaagaatacaagatcccgtcctccaggcagtgaccccccaaaccagcctgcctggtcactgactgctta

SEQ ID NO: 479697 - DNA, 1042 bp, Homo sapiens
caaacatggtatctcactggggacatttttggcagccacaactgaagtgggaggagccgtgtgctcctggcattgagtgggtagaggccagggctgctgctgaacatcctacagtgcacaggacagctccctccccactcctacctcccgggacaatgaacatttcggcccaaaatatcagtacaatagtgctgaagacctgtgaagatgttgctttacgtgacaaaagagattttgcagatgtgattagattagggatcctaagatcgtggggagatgatcctgggtggccccagtgggcccagtgtcgtcacaaggatcattataaaagggaggcaggagggtcagagtcagagaagattggcaatggaagcagagatcagagagggagatttgaagctgctacactgctggccttgaagatggaggatagggccataagcgaacaaatgcaagtggcctctagaagctggaagaggccaggaaacagaatctctccactagcctatggaaggaacacagccctgctggcacttgattttagcccattcacacccagtttagacttctaccctccagaaaaggaaaaggatgaatatgtgttgttttaagccgctaagtacagcagccattggaaacgaacagagccttggctcattgattcatccgattcctatttacggagccctccgtctgcaccaggcagaatgcaaggcccgagggtcagccacgctcgggagtgactgtgtccctctgctgagtccctcttacagtccatggggaagacagtcatgaaacaggtcttcccaatcaagagtggggaatccctgatgagagaagtgttgagtgatgtggaaaaataccgctaggggttgaattatgtactcccaaattcatatgttgaagtctcaactccccagtacctcagaatgtgactatatttggagataagttctttaaagaagtggttatgttttcacatcaggccgctagggtggggccctagtcccatctgactggtgtccctatgaaaaaaaaaaaa

SEQ ID NO: 479698 - DNA, 1551 bp, Homo sapiens
ctgggagactggggttcctggcatttagtggggaacgaggtagcctgtgctggttccatgcacacatctgaccaaagatcgcagggctcggttcagagacacagactgtgtgttcttcacagcagaaagcagtagctctgcaagctcctgggttggtccccaccatcccgattcccatgggccacgcagagggccaggtgctcgcctgcagctgtgcaggttgcgccgcaggaggggagccctgaattgggagctggagctttccttgaggtgacttcatgacctgccgtcctcccctccatagacatgacctggaatgtcactcgctgcccaggggctgagggaaaagctctcttgggctgtaacgctggaagaagacctagctgaaatcacggatggaagccgggctgggtatcctttggcattcacgccccggggctccatgtcctgtgagaggggatctggctcccggggtctatggcaagaccatcgtccccagaacgtgcagaagcaggccgagctgaaggggagggcagagaatcggattccccagggcacagtgaagctggtaccacgcacccacgaggacgcccctaccatagacttccaggctgctccaaagctcgctcagcgcccactgcccctgggccgccacccccgcctccgggaggaagggccccaggccggtagctctgcagccgcgggcgcagtcagagccgctctgctctcacagcgctgcggtgccgcggggccctgtcccagctgcctccttccgcgggctcagctgtctccacgaaaacccacgactgttccgagtggcatctggaacagtgagtcctttccgttggattggcccagatgcatcagaggaatcgctctctatggcggctatagctttatgaaatggacttcttcaacaataagacttgaaaggggagatgatccgtggagccatgggctgcagaatgcatgttgtgctcgcaggcctgaaaacaatgtgaatctccctggagctctccctcagagctcttgggtgaccaggtgccttgtcaatgggtagtagcatttgaaaaggaatcttttttctgagcagtacttctcaacagtgggcttaaaacactcggtaaaccagtaaaccatgctctagacagacgtgctgtcatccgggctttgttccatttctagagcacaggcagagtagatttagcatcattcttaagggccttaggatttttggaacggcaaatgagtgtcggcttcaatttaaagtcaccagctgcattagcccctgacaagaggcagcctgtcctttgaagctgtgaagcctctccagggtggtgattgctgaaggctgggttggctatggcaatttcttaaaataacacagcaaggaagtttgctgcatcaattggctctacctttcacaaaagatttctctgtagcatgcgatgctttttgatagcattttactcacattagaacttctttcaaaagtagagtcaatcttttcaagccctgttactggtttatcaactaggttgacataatatt

SEQ ID NO: 479699 - DNA, 2599 bp, Homo sapiens
gttcacggtggtatggctgtagattgttcacgatgtttctggccctgagcagtacaaggttggtgtactttctggagttcaatgatcgcattcacgaagttccttccatccaataccctcttctacctccaggaagattccagatacctgacctagcattacatttccaaaataatgggatgatttatccagagtactcccgaataaatagcgtgaatgttcccggtcctgcttgcaagcataagctaccagtgagcttgtttcaggctgtgagaatgaagaaggacagccggaagcaatggtgttcttctcagctggatcccgatgtgtcgaatggctgggccattgagtgcttcaacaatacgcagcttaagcggaacaaagcattcaggaagttccttctatccaacaatgaaacaggccccaacctgggcccaatcgcatctactctgtacttcagagaccagacaagattgggagcgttcacggtgctggaacccgatgtggtccgtgtgcagcctgacactcgaaactcattcatcttcctttctaagtcctttcacatggagtccaacccttgggcagaaccccagattttcttcagtacttcacatgttctctcgttggcctgttccagatccctcttcatgttgcagcacaccaaggctttggattcctccagcactattcgattacatgagacaagcttcttgatctgagccaccaatttcctgagtgaaggtccaggacccaaacagctgggagagaaggccgttgccaaatgccttctgtgtgatcagtttcaacccactgagcatcgtctcgcttgcagctggtcgtcccatgatttcggaaacgtaatggtaaatcagctgtctggaatctgctcagaggtagaagaggttgttggaaaccaagtcttttgattagcctaaaccatatcataaaggggcaatacggatgcttctagtcgaatggctgggatagtgactgcttcaataatattcagtttgagtgaaatgatagccttcacgaagttcctcccatccaagtactgaagaggccgtaccctgggcgcaatctcgtgtactctgtacttcagtgaccagatgagattggagcgttcactgtgctatggccgtagattatgtacgacgtttctggtagcttctcttctgccattttaatgctttctctttttgtatcatattcagggtcgtatggtcatagattattcatgatgtttcagataacttcttttacttcagtaacaggttttttgaacggagtaatagtattcacaaagttccttgtgtccatgcactatacagggcagatactgcttagcttctgatatccgaagaaatcgtgcctatttcgggtggtatggccagggattattcacgaagtttctgttagcttctgcctatttaacactttctttttttctgtcactttcagagtgatatggccatagattattcacgacgtttctgataggttctcccattttaatgctttctctttttctgtcatctgtcaaacactgcataaaataaataaagtcaagtccacaacagaagacactgttaaaggcgctgagcagtacaagcttgctgtaatcagcagtggttgtcagagctggtagacttttttcattacagctgtatttactgagttattccctgttgatctagtgaataagatgtgggtgaagccatcttttgtcccggccacaataactctgtatccttaggcactttctgtttgcctcacactgaaatgcaatcgtttgttaaaaggctgttctcttctgttgtcaataaatttccttttgctgacagttactgctgtaacagatgtctgtatgttggttgtcccactggctgttaatgcatccatgaatgtagatgtagctttcctgttaacgagtaggcctgtggccatggctgcacttacggggccatgcacctgaggcactagcaggtgtatccaggcttgctccccatcctggcctgctcagtaccagggcccaataaagctttgtctggcttttccgctgccactttgggtactaccattcctcctgaccctgctctgtggggtccagttttttggagctctcactctgaaagccattcactgcgtcctgcttaatggggctcttaggcatgaggatcttgatacctgacttcactaggtccattttcatctggctgcagagagacggagctgtgttcttcctgaactgctggctggcagcaaacagctggctgtttttggattcgtgatctctcccaatcactggtgccttaggagaggacttagaaaagctgctgtttgtggatctggagatttgtttcctagcattgttgggagaggacctgtttgttctggtcaatgtgctctctttctgcctttccgtgtggtgtctgttgaagtcgtggatgtattcctgacagttcacgaggtgctgctctggttcccaagtgtcgtcctcgctgttgtagccttttcactgaaccaaatactctgtcttccctttttaatttttccttttgtcaacaatcttttcaatctaacctgccttagttggcat

SEQ ID NO: 479700 - DNA, 4510 bp, Homo sapiens
gttcacggtggtatggctgtagattgttcacgatgtttctggccctgagcagtacaaggttggtgtactttctggagttcaatgatcgcattcacgaagttccttccatccaataccctcttctacctccaggaagattccagatacctgacctagcattacatttccgaaataatgggatgatttatccagagtactcccgaataaatagcgtgaatgttcccggtcctgcttgcaagcataagctaccagtgagcttgtttcaggctgtgagaatgaagaaggacagccggaagcaatggtgttcttctcagctggatcccgatgtgtcgaatggctgggccattgagtgcttcaacaatacgcagcttaagctgaacaaagcattcaggaagttccttctatccaacaatgaaacaggcccgaacctgggcccaattgcatctactctgtacttcagagaccaggcaagattgggagccctaaaccataacacaaggaggcaatacggatgctcctggtcgaatggctgggccattgagtgcttcaacaatacgcagcttaagcggaacaaagcattcaggaagttccttctatccaacaatgaaacaggccccaacctgggcccaatcgcatctactctgtacttcagagaccagacaatattgggagcgttcacggtggccctgagcagtacaaggttggtgtactttctggagttcaatgatcgcattcacgaagttccttccatccaataccctcttctacctccaggaagattccagatacctgacctagcattacatttccgaaataatgggatgatttatccagagtactcccgaataaatagcgtgaatgttcccggtcctgcttgcaagcataagctaccagtgagcttgtttcaggctgtgagaatgaagaaggacagccggaagcaatggtgttcttctcagctggatcccgatgtggtcagtgtgcagcctgacactcgaaacctaaaccatatcacaaagaggcaatacggatgctcctggtcgaatggctgggccattgagtgcttcaacaatacgcagcttaagcggaacaaagcattcaggaagttccttctatccaacaatgaaacaggccccaacctgggcccagtcgcatctactctgtacttcagagaccagacaagattgggagcgttcacggtgtcgaatggctgggccattgagtgcttcaacaatacgcagcttaagcggaacaaagcattcaggaagttccttctatccaacaatgaaacaggcccgaacctgggcccaatcgcatctactctgtacttcagagaccagacaagattgggagcgttcatggtggccctgagcagtacaaggttggtgtactttctggagttcaatgatcgcattcacgaagttccttccatccaataccctcttctacctccaggaagattccagatacctgacctagcattacatttccaaaataatgggatgatttatccagagtactcccgaataaatagcgtgaatgttcccggtcctgcttgcaagcataagctaccagtgagcttgtttcaggctgtgagaatgaagaaggacagccggaagcaatggtgttcttctcagctggatcccgatgtgtcgaatggctgggccattgagtgcttcaacaatacgcagcttaagcggaacaaagcattcaggaagttccttctatccaacaatgaaacaggccccaacctgggcccaatcgcatctactctgtacttcagagaccagacaagattgggagcgttcacggtgagtgatatggccatagattattcacgacgtttctgataggttctcccattttaatgctttctctttttctgtcatctgtcaaacactgcataaaataaataaagtcaagtccacaacagaagacactgttaaaggcgctgagcagtacaagcttgctgtaatcagcagtggttgtcagagctggtagacttttttcattacagctgtatttactgagttattccctgttgatctagtgaataagatgtgggtgaagccatcttttgtcccggccacaataactctgtatccttaggcactttctgtttgcctcacactgaaatgcaatcgtttgttaaaaggctgttctcttctgttgtcaataaatttccttttgctgacagttactgctgtaacagatgtctgtatgttggttgtcccactggctgttaatgcatccatgaatgtagatgtagctttcctgttaacgagtaggcctgtggccatggctgcacttacggggccatgcacctgaggcactagcaggtgtatccaggcttgctccccatcctggcctgctcagtaccagggcccaataaagctttgtctggcttttccgctgccactttgggtactaccattcctcctgaccctgctctgtggggtccagttttttggagctctcactctgaaagccattcactgcgtcctgcttaatggggctcttaggcatgaggatcttgatacctgacttcactaggtccattttcatctggctgcagagagacggagctgtgttcttcctgaactgctggctggcagcaaacagctggctgtttttggattcgtgatctctcccaatcactggtgccttaggagaggacttagaaaagctgctgtttgtggatctggagatttgtttcctagcattgttgggagaggacctgtttgttctggtcaatgtaagcttgctgtaatcagcagtggttgtcagagctggtagacttttttcattacagctgtatttactgagttattccctgttgatctagtgaataagatgtgggtgaagccatcttttgtcccggccacaataactctgtatccttaggcactttctgtttgcctcacactgaaatgcaatcgtttgttaaaaggctgttctcttctgttgtcaataaatttccttttgctgacagttactgctgtaacagatgtctgtatgttggttgtcccactggctgttaatgcatccatgaatgtagatgtagctttcctgttaacgagtaggcctgtggccatggctgcacttacggggccatgcacctgaggcactagcaggtgtatccaggcttgctccccatcctggcctgctcagtaccagggcccaataaagctttgtctggcttttccgctgccactttgggtactaccattcctcctgaccctgctctgtggggtccagttttttggagctctcactctgaaagccattcactgcgtcctgcttaatggggctcttaggcatgaggatcttgatacctgacttcactaggtccattttcatctggctgcagagagacggagctgtgttcttcctgaactgctggctggcagcaaacagctggctgtttttggattcgtgatctctcccaatcactggtgccttaggagaggacttagaaaagctgctgtttgtggatctggagatttgtttcctagcattgttgggagaggacctgtttgttctggtcaatgtgctctctttctgcctttccgtgtggtgtctgttgaagtcgtggatgtattcctgacagttcacgaggtgctgctctggttcccaagtgtcgtcctcgctgttgtagccttttcactgaaccaaatactctgtcttccctttttaatttttccttttgtcaacaatcttttcaatctaacctgccttagttggcatagaccaatgtaattcagttcgctcctcctcaaatttaaacaattcattctagcacagggcttagcaaatgataggtgcttaggaagtgtttgttgacagaatagttgtgatctcagttctggctccatgcctctagctcagcggttctcaactgagggtattttgaccctcgtccctcagagaatactcgacaatatctgtagacatcgctgattgtcacagctgtggggagtaggggaggtactactggcatatagaggatggagtcaaggatgctgcttaacatcctacatgcgcaggacagccctcacagcaaatagtaagctggcccccagtgtctgcagtgccaagggtgagaaatcctgtcctggctggtctccatgcaagccatacctgaggggtcccacccctgctgcctcctctggtcacgaggttggaggttcctgtagctcaggccagtgcagcatcttccattcccttgacccctttataagagttttcctgtggctcctcgggtgaggtttggggtatcagttagtgctctcaacaatggccacctgcatgcgcggggagtgacggggttggccctgagcacaggtggagagctgggctgtgggtgatttgaatgagccctgcatgctctgaaggtctgggttgcctcaaagctctacctggtttttcagagaaattgttctcccgttcacagaagccttcctctgctacccagcttgtaacagcctgcccatcccctcatcccttgtctgag

SEQ ID NO: 479701 - DNA, 1832 bp, Homo sapiens
tttggttccaaatggtggtgacttcagagagttgatgatctcagaatgcttttgaatttgcacagcgaagccttcaagtcctgccttggcagtttcaacagaagcataaaggattcaaggaaccacagacatgatggtggagacatttgtggtggtgattttcctggcaaagccctgggggagccggctggcttggaagaaaccacatttggaaggctctgtgttggagaaatactgagctatgtcaccgatttctcggatatgggaaacagaacacacaagctctgctttttacaacttggatttgtatgtgggttctcagacagctctccaaacctacttaagagggagatggcttctgtgtttcgactagcagactcatttgttggtgatggcattaatgacccatcttcagaggatgagcagaaagcctacgttctcaccatcactgtgtacaattggacttgtccgaagctgcagcctggactggcccatggctgtcagaatcatttaggctgctgcggagatggctatggtgttggtgcttttgccatagacatcaccattcgtgcattgctttgtacattgataatacgaagcagcatcaccggcatctttgagaagcttctggaaggtgtgagggacttgtagaagaatataactagaaaaaggaatgttataggagaagatacattggctctaagatgaaaaatataattaatatgcaaaatattcacagtcaatgtttggatcctttaaagaccatgaataaaaaattatttaatttgatccactgaataatctgctggaagggctgagaccttggcgaaaatttgttcatagtagagttgagtctttttctgggtaatctgtgtttggtgtatacatgtatgtgtgcattccagttacaatggctgtgtaacaaatcatcccaaaatatagtggcttaagagaaaacaaaggcagtcatttcttatctctcagggattgtgagggtcaagtatttggaagtgacttagtggggtggttctggttctgagtgtctcaggaggttgcagtcagccatcagcccaggctgtgttcatctgaaggcttgactgggactggaggatctgcttccaagtgcctccacagtggctccctctgtgactggcaggctgttctatttatgtggacctctcctcctgctgctcgagtgtcctcacaacatggcagccagcgttttcagagtgggtgatccaaaagccaaggtgaaagtgttgatgccttttaggacttagccttggaaatcaaacactgttgtttctactggatgtgtgagaccagtcctggttgatgtgggagtggacaactcaagggcatgaattccagttggtgaagatcattgagggccacattggaggctggctaccctcatgtgtaggcgtcagtcatatgctgttacctacatttgagaacgtgcttagtaaatatactgatttccccacaatctagtgggcaggacatacataagcatatggcacaaaagaattaaggttttaaaaaagtgagttcagaaaccacccattcaggaatcatgaatgtgatcagcttttgaacaaaagagtggttttaaagccatgtccttgtgtaatggataaaagatttaaaaactttgtagatgcaatcatacttaggctttgaattacgctcctccccttcgcttggctacaagtcatgtatactcgagcacctaacaactaactataatggtaattcaagtaaacaggtcacatttacctaaatgtattggatacagagcacatttgtatgtgctatggtttgatagtgaa

SEQ ID NO: 479702 - DNA, 697 bp, Homo sapiens
cgcaagcataaaagaaagaaatctcaccctcacaagtattaatacacaacaggatgaaagaaacacacactttggggaagcttgcagaaacaaagtactaagcatgatgattaaggatacaagccggggacaagagtgggaaggagacagagcgtgggatgctggtgagaacattgggtcacagcaccagccctgcctggactgtgtttatctgggtcattttcattatgagaagaagaaattacagcgacccttgaacaacacaggtctgaattgcactagtccacttatacgtaatttttcttcagcctctgtcacccctgagacaagaccagcgcctcctcttcctcctcctcttcagcccactcaacaagaagatgacgagggtgaagaccttcgggatgatccacatccacttcgtgaatacaaagtatattttctcttccttaggattttcttcatgacaatttcttttctctggtttactgtatttcctttaacatcttcctgggaagaacatcgagcttacagtcagaaagtctggtgtgagtcctgtttctgccactccacggccaacacagacgtaccacagtttctttaccacccatctgtcaaggaacactaggagctgtttgtagtttgggaccattatgaataaagctgctatgaatattcgatgcaggtcttaggaactaac

SEQ ID NO: 479703 - DNA, 1327 bp, Homo sapiens
ctcacatgtgtgggtgtgcacatgcatgcagtaatgactgagagccatgtgtccataaatacagagcccgttgtgagaaggggcaagtatgaataaaggtttagatcagtgtcagtgaagatttttggttaagaaccagataattcatagttttatgtttgtgggccaccctttctctgttgaaatgtctcaattctgccattacagcaaaaacttggcaattgcaccgaacaaggggagagtggttgatgattctgatgagctgcaaaattttacggaattccagagagaacctgaaaagtggtatctaaactcagaagaagaccgtgtgaatgatgctctatttaaaaatgttttaaaaatagcaggcaattttgaccctcttggaggatttgctactactggacgtcctcctgggatattcagggcctacatgagggtggagggcaggaggagggtgaggattgaaaaactatcaactgggtactatgctgactacctggatgatgaaatcatctggacagcaaatccccgtgacacacaatttacccgtgtaacatacctgcacatgtacccctgaacctaaaaatttggaaagaaaaaaaagacaatatgggttaatattttcttcctacgatttctccctctggatggttccaccatctcacctgctgcttaaggtggaaatgtggtgtctctgttcctctccgtctcagtgtctctctgaggcattccagcccctccatgcccaccgcccatggccgtgcctgggtttagcctttcccttcctgggatattgccagggtatcttgtgttttccatgcctcagggcctatcctgtccagtccctccatgctggtcaggtcagagtgacatctgtcacatgcacacctgatgatgaaattcctttatctaatcagtctttaatgacttgtcattctctcagcagtgtttcccaacccagatccctttcagaaccctgaaccctggacttccgagatcatcaccgacatctgagaactgctgcttatgatctttccttttggaaactcaccaccacctttgacactttaaactcctttaggtttgacctagcatttcccatggacttggctgatcttgcctcttctgcatgtcagctggccccaacttgctctttggccttcttttctgtaactcccctgattatatttttggttgatggtgatttggaaatttaatttcctgaaaatgtcatgttcccttctgcccttggactttcacccattgtttttacctctgaatgaaatgctcttcattctccttggctcctggaaaattccctctc

SEQ ID NO: 479704 - DNA, 907 bp, Homo sapiens
tccaagtaccccctagaggttttccattggccacttggtgttcaccttatgtaaatgaagtggtggcttgcaatcagtctgattgcagagagcaaccagcgctgggggctctgggtagcaataacctcctctctgtgcagaagtcccacattacatgcaactgctttgttgacatttcgtatccacaactgtgaagaaaaacactttggaaactgtcatgaagatagtaccttagagaagggggactacaaaatgacggctgatgacgggggctcattccaggccaactggggccaggccaaaggaaggcaagggcagacgaggcataggtggcatcggcagcctgagcagtggtggctccagaagagcccatctccaacagggctctggaacacggatgacatgatagggcccatccaagattatgcctacccaagcaagaacttccaggccaaattcttccaaatttcctgacccatagaaaccatgagaaataataaatgattattgtttttctaacccactaagttttagaataacatgttactgatacagaagcctgagcgacagagcaagactcccgtctcaaaaaaaaagtatatatatatatatacacttatatatatatacttttatatatatacacatatatatatacttttatatatatacacttatatatatacttttatatatatacttatatatatacttttatatatacttatatatacttttatatgtatatacttatacttttatatgtatatttatacttttatatatatttatatatacttttatatatacttatatatgtattgtatacttttatatatatatttttaaagacatcagcaacattgtctgattttacttatttatttgttattatatattttttcat

SEQ ID NO: 479705 - DNA, 2729 bp, Homo sapiens
cttaaaagggctaggaatttctttttcggggagctcggctcttaagactaaatgacttcagacactgaaggcttaacacagtgactggcatatcatagggatgcccaatacataccagctgtgaggcttatcaccactgttcttcctggcatggccctgtaagctcatcttcggctgaagagaagctagcacttgcaaacattccatctggcaatctgagagaagctactgagagaatcctgagacatccccagccacctaccactgctcctgttccaagcaaagaagatctgctcactccggaaaaagaaaatgagtgagactcaaaattcaacaagccagaaagcaatggatgaggataacaaagccgcaagccaaacaatgccgaatacacaagacaagaactacgaggatgaattgactcaagtagctctagctctggttgaggatgtcatcaattatgctgttaagattgtggaagaggagcgaaaccctttgaaaaacatcaagtggatgactcacggtgaattcactgtggaaaagggtcttaaacaaattgacgaatatttttcgaagtgtgtttctaaaaaatgctgggcacatggcgtagagtttgtagagaggaaagacttaattcacagcttcctctacatctactatgtacactggagtatctcaactgctgacctacccgtagcacgaatctctgctggtacctacttcaccatgaaggtctccaaaaccaaaccaccggatgcacccattgttgtttcttatgtaggtgaccaccaagcattagttcacagaccaggaatggttcgctttcgagaaaactggcagaagaatcttactgatgccaaatatagtttcatggagtcattccccttcttattcaatcgtgtctgatacttacaggatgtcttaggattgtttttctcatcaggatacattaaaaatacaatacagcacgtcaaaccacagaatatttattgagtaataaacttgtggcacacaatccagctgtatttttttgcattcattcattttccattctgcaacctccatcacattagcagagtaaccagtaagttgttttctattttctaaagtatttttttctatcactatatgtatcacttctgagtcttacaggtatagagctgagtttagagagttgctaaaattcacctattggaccaaactaaggttggtacttggctgtttgttccccatctgagcctaagtctccagctcagacacatctctttatgggcacaactgggaacaacaaaatggcaacagttctacagctcataatataaccagtctgaagggttcccctactcacagaccccttcatttactgggagttaagcctcactgctaaataatatattttgaaactggaaaactgggcatgctgccttccacaatacaccactatactcatgattgcaggagggtggcttggggactaggggcaatgacacgggaaggatacaatcattgcccttacttatctttgatcttcttcccatcctcacactgaataatcacttgttcctaccttccctgtgaacctctcttgcctggctgcaaaattttaagacaccaaagacaaaattacattatgctctgagtgattacttacaagtacatcagaatatttacttacatagaaaagcactggaaaggaggaacacaaaatatgaaagacaattgatatggtactgaaatttttcttttttaactgttagatatttgtgcaataaataaaaaaggagggaaaaccacatcagagcaataggcaaggaggtggcaaactagataagtctccttggagaacaaaaaatatatttaaaatacaatagccctactacaactgatttatggctcaggtgactaaacacaatttgaagcagtaacaacactcataagctgaaaataaaatacttttagcccttttattcttcttgcctctttcccaaagaatatgccaatgaagctgttcttgatgtcacaatattcatatatcgcagaatttctgcatttaaactaccttgcctactgaaaataagataatcatttcatctctaggaaccagtaaccaaaaaaaaaatgtccttagagaatacatttttatttgtttgtttatttagagacggagtctcattctgtctcccaggccggagtgcagtggcttgatctcggctcactgcaacctccacctcccaggttcaagcaattctcctgcctcagcctcccgagtagctgggactacaggcacgtgccaccatgcccggctacattttttgtatttttagtagagatggggtttcaccatgttagccaggatggtcttgatctcctgacctcatggtccgcccacctcggcctcccaaagtgctgggattataggtgtgagccaccacgcccagctgagaataaaatttttaagtgggtattacaaaattcaggttttattattcagggaagtagatggattgagactcaaaactttgggaactagtttcttttaacttttgaaaactacagatttattaggctaggcagcaactacaattaggtataaataaacagaaatcatttcaaattcaggggtcattaatgctgctacatgctgactcttattttcagtagttgcgggttaaaagtagacatttcctggaacatatatttaatagtatttaagactgttaatactgttt

SEQ ID NO: 479706 - DNA, 744 bp, Homo sapiens
tgggcggtcgatgggactgggcgccgtggagcagggggtggtgctcgtcggggaggctggggccgcacaggagcccatggagtgggtgggaggctcaggcatggcgggctgcaggtcccgagccctgccccgcgggaaggcagctaaggcccagcgagaaatccagcacagcgccggtgggccggcactgctgggggacccagtacaccctccacagccactggccactggcctgggtgctaagtccctcattgcccggggccggcagggccggccggctgctccgagtgcggggcccgccaagcccacgcccacccagaactccagctggcccgcaagcgctgcgcgcagccccggttcctgctcgcgcctctccctccacacctccctgcaagctgagggacctggttctggtcttggccagcccagaaaggggctccctcagtgcagcggcgggcggaaggactcctcaagtgccgccaaagtgggaacccaagcagaggaggcgccgagagcaagcgagggctctgaggactgccagcacgctgcggctgcctttgcaatctttgaactggaaacagatattattcatgctgatagggaagagagttgcctgcttagtggtgacgaaaattaatagtccaagcattcttccatcctgcattttccatgctggcattttgacttaaaaaaaaatattgctgcagctgtttgcatattctggaagtgtgtgtgcctgtgtgc

SEQ ID NO: 479707 - DNA, 577 bp, Homo sapiens
ctctctctctttacctcccaccatccacttaagatgtgacttgctcctccttgccttctgccatgattgtgaggcctccccagccatgtggaactaaacatgaaattgaaaaaatgttcacacaaaaaagcaccttcataagaaccaaaaaatcaggccacaagcactgcaatccttgggcaattcctattgctttgctgggcttggagcaagtggactggatgggaatgcaatctagtaagacaccagctggggtagccaagggagtgcttgtgctacccctctcccaaccccaaggggcccagcttgcaactctgggagagactccatccctctgcttgaggagaggagaggtaaaggccgtactccaccttgggcatttagtgagactcagaggtgtactggattcaaatgtgacccagcacattcttagctgtggtggctatgggaagagactcatgctttagaaaaaagaaagggaaaagtaaggagatatggtcctgcagcttaggtaccagctcagctacagtcaggtagaacatcaagtaggctctggggtccctgattctaggccttg

SEQ ID NO: 479708 - DNA, 1485 bp, Homo sapiens
aggtgaccacaagaaaccaaagggcaagatgtctgcttatgccttctttgcgcagacatgcagagaagaacataagaagaaaaacccagaggtccctgtcaattttgtagaattttccaagaagtgctctgagaagcggaagaccatgtctgggaaagagaagaccaaatttgatgaaatggcaaaggtggataaagtacactatgatcaggaaatgaaggataatggaccagttgagggaggcaagaagaaggaccctaatgccctcaaaaggccactgtctggattcttcctgttctgttcagaattccaccccaagatcaaatccacaaatcctggcatctctattggagacatggcaaaaaagctgggtgagatgtggattaactatagtgacagggaaaagcagccttacatcactaaggcagcagacctgaaggagaagtatgagaaggatgttgctgactataagtctaaaggaaagtttgatagtgcaaagggtcccactaaaattgcctggaaaaaggtgaaagagaaagacaaagaagatgaggaggaagaagaggaggaggaagagaagaaggaggagggggaataaaaaaactgtttatctgtcatcttatgaatgccttagagtaggggagtgtcataattgacatatctcttatttgagaagtgtctgttgccctcattaagtttaattacaaaatttgattatgatcatattgtagtctctcgaagtgctctagaaattgtcagtggtttacatgaagtggttggatgtccggagcatcctgaaactgtatcaaagttgtacatatttcaaacagtttaaaaatgaaaagtcactctggtattctccctactctgtgtacattgcagttggagtgacaaggcatttaaagatgtttctggcagtttttttatttttaaggtggtattaagtctatggttattggctagaaatgctgagttatcaactgcatatatctataatttgtaaaaaagaaaaaacaaccccgacaaactcttcatgctccttgcttggcattgaggctgtgggggaagacgccttttggaggggctgtagctcagggtgtgctgctggaaggagacatgcagaatatcagagagtcttgcatacacattcataagaccacttctctaaaacttcccactgttcctaagtaaccacccggaaccaacaggatggcacttcaaccactcaaagccttttcaaagggtcccgctcaaagccttttcaaagggtctctgatattacctatcactgaaatgaagcaaagcttaaaggactcctgactctttcagcctccttcttctcatcttttaccaagagtgtcttgtgaccctaaaattcagagttagcagtggtcaaggctagtgaaggtctttgaagtctttcttatgaggccagaaaaaggaaaatataaaatgaggcttctaactagatctgtaaacaactta

SEQ ID NO: 479709 - DNA, 535 bp, Homo sapiens
gcttttttcagagggtctgtgggtcctctcggctttcctggttttctgctttttcatattaatgagaactcatctgagatggtggaaggacaggctctgaccacaaatggtcagagaaatggaaagcaatggttgacttcagcaagaatatgtggggaaactccatgtggctggggaagcctcacaatcatggtgggaggcaaggaggagcaagtcccgtcttacatggatggcagcaggcaaagagagaatgaggaagatgcaaaagcagaaacccctgataaaaccatcagatctcgtgagacttattcactgccacgagaacagtatagaggaaactgcccccatgattcaattatctcccactgggtccctcccaaaacatacgggaattatgggagtacaattcaacatgagatttgggtgggtacacagagccaaaccatatcattctgcccctggcccctgccaaaaaaccaatcctgccttcccaacagtcccccaaagtcttaactcatttcagtgttaacttaac

SEQ ID NO: 479710 - DNA, 463 bp, Homo sapiens
gcttgcatcactgtggcctagataatgttgaataccggccccttatctcttctggcttatagggtttctgctgagaagtctgctgctcgtatgaagggcttccctttggctgctgtggtttgctggaaacctaccccagaccctgttcacctgggtccttcccacacctggaggtgtcaccagtggaggctgcagaacagcaaagctgacagcctgctccttcctcgggcaactctgttccagtggggcaccaacctgatgccagtgggaatgctcctgtctggcctagtaaggcagtctggtcacagtgtaccacagctgctgtactgtgctgtggggaattcctcctgggtacaaaccacccagtctcccctgcactggcaggggaaaatggcagactggagttgcagtggtggctgccgcccctcccgcaaggagctcagtcctcttaggcaataggcag

SEQ ID NO: 479711 - DNA, 556 bp, Homo sapiens
cgtgcttttttctgtttgacctggaaagtagctagcaactcaacaaggagaaaggacagctaggtattatgaagataccatgctgtgagctgcctcaggggagacctaagtggcaagaaactaaggaagacccacagccaacggtcaaagaggaactgatacctgaaaacaacaatgatggtcaatccaccaacagcttgcaccatgcacctggaaaagccatagacactcaatgccagcccatgaaagcaaacaggactagggctgtaccttgcaaagccagaggggcagagctgctcaagaccataggaacctacctcttgcatcagtgtgacctggatgaatcacatagaatcaggattctcacagaatgttttcattgtaaatgtacctattacaaaatcaggggactttattttccttgccaactgtttttgcaagctctcaaatgtgctggtacttctattgctccattactaacataatagattttaaaaatatttttatttgcatttttcagagtgctccaaagaatctatatagttcattaagttag

SEQ ID NO: 479712 - DNA, 725 bp, Homo sapiens
tctacagaccaggtaactcctcaaatgaagcaagcttccttgtggtgggttagaacatgctccgttagctcagagaagtttgttattaccaaccttctgaagcctacttctgttagctcgtcaaagtcattctccatccagctttcttgggttgctgatgaggagctgcgatcctttggaggaagaggcactctggtttttaaaattttcaaattttcttctctggtttcttcccatctttgtggttttatctacctttggtctttgatgttggtgacctaccaatggggttttggcgtggatgtcctttttgttgatgttgatgctattcctttctgtttgttagttttccttctaacagtcaggtccctcagctgcaggtctgttggagtttgctggaggtccactccagaccctgtttgcctgggtatcaccattggaggctgtagaacagcaaatattgcagaacagcaaatattactgcctgttccttcctctggaagcttcgtcccagagaggcacccacccgtatgaggtgtcagtcggtccctactcagaggtgtctcccagttaggctacacgggggtcagggacccacttgaggaggcagtctgtccgttctcagagctcaaacaccatgctgggagaaccactgctctcttcagagctgtcagacagggacgtttaagtctgcagaaatttctgctgccttttgttcagctgtg

SEQ ID NO: 479713 - DNA, 738 bp, Homo sapiens
agaaaggggctcccacagtgcagcggcgggcagaagggctcctcaagtgctgccaaagtgggagcccaggcagaggaggcaccgagagtgagcgagggctgtgagtactgccagcacgctgtcacctctcagtatgcttgttctgggtcttagccagtctattgtagatccaaatcttactcagaaatgttcggatctcctcttctgcagtgcagttacctttcatgaagcttatacccaggagcatcatcaagataccacttttaggcaatgctttatcaccactcagactcctgttgctggggacatccagttcactgaaaagagcattgacatgactgctggggtcaacttcttcaattcaaggccaaagaccagctccatgcactcagagattctcctgaggatctcagggaaatggtccttgcactttttgttaataacgttcagcaatgctgcttttgtcatgggatctttaattttacacttctccagcagaaattgtattaccaaacttcccttcctgaatagaaggtctctgtgtgagctccagtggtggctcttgctggagaggttcttggcttttcctcattttggttcttggcatgttcatcagatcttgtgcatgaaacatctacagaataagtgatgatgaagggggctctctgagactcctggggaatgtcagtagcaagagagctctgaagagcactctccaaaacaggagaaaaggaggag

SEQ ID NO: 479714 - DNA, 905 bp, Homo sapiens
gagaaactgtaaatatgaaacctcataataagacatcactggcttgtacaacgcgaaaatttatagatattctcaaatcggctcctggaggtgttcttagcttaagccaggtagcagcaaaactggcagtgcacagacgaagaatatatgacatcatcagtgtcttacaaggagtcaaactaattgaaaaaacatctaagaaccatattcagtggattggacctgattttaattctggagcaacacccgaagaaaagaagctagaggaggaagtttccaaattatcagcaacagaagatgccttggataagttaattgaagattgttctcagcaactgtgtgagttaacaaatgacaaagaattgggaaaactagcatatgtgacgcttgaagacattcacaacttggaacgcttccaggaacagaccgtttttgtcgctaaattgccagtagaaatcacactggaaattccaatttctgaagactctttctcattacgtttaagtaacaacgacggacctgttgacgcctatttgtgtctatcgaagaaggattacgaagctaactacacgtctgagagtgccgggacttcatctgagagcactgggacttcatctgagagcagacatccagaacaccctgaagaagaagaaaatcctcagcaaggtgaagaattgcttgacatgagcaactgataacatttgagaattcagggattatgtcatatatcacaaaagaaattgccttacactggttcatgtttgcagttactgttgtatattggatccaaatgtgatgtctttgtatatatctgtgtgtattaatacttttattttatcatttgtaccatatttttactgtacattttctatatttagatatgtttaaatacacaaatatttacc

SEQ ID NO: 479715 - DNA, 894 bp, Homo sapiens
cctgcagcagagaggcctgactgttagaaggaaaactaacaaacagaaaggaacggtatcaacatcaacaaaaaggacgtccactcagagaccccatctgaaggtcaccaacatcaaagaccaaaggtagataaatccacgaagatgtggagaaaccagcgcaaaaaggctgaaaattccaaaaaccagaacacctcttctcctccaaaggatcacaactcctcaccatcaagggaacaaaactggacggagaatgaaaggtgggtaataacaaactcctccaagctaaaggagcacgttctaacccaacgcaaggaagctaaggaccttgaaaaagggttcgatgaattgctaactaggataaccagtttagagaagaacatggatgacctgatggagctgaaaaaaacagcacgagaacttcgtgaagcatacacaagtatcaatagccgaatcaatcaagtggaagaaaggatatcagagattgaagatcaactcaatgaaataaagcgagaagacaagattagagaaaaaagggtgaaaagaaacgaacaaagtctccaagaaatatgggactatgtgaaaagaccaaacctacgtttgattggtgtacctgaaggtgacggggagaatggaaccaagttggaagacactcttcaggatattatccaagagaacttccccaacctagcaagacaggccaacattcaaattcgggaaatacagagaacaccacaaagatattcctcaagaagagcaaacccaagacacataatcgtcagattcaccaaggttgaaatgaaggaaaaaaatgttaaagcacagccagagagaaaggccgggttacccacaaagggaatcccatcagactaacagcggatctctctgaagaaa

SEQ ID NO: 479716 - DNA, 639 bp, Homo sapiens
ctggtttgatttgagtcttttctggttttttcttgaaaacaaacctcaacaaatttaaataatgaaaatcatacagagtgtgttcttggaccataatggaatcaaactaaaaattcgtaacagaaaggtagctgaaaaagaaccaagcacttggaaagtaaataacagtttcccgtataatccagatgtcaaaagggatgttgtggagcccaaaggatttggtgcgggaacatctgtagtggagcatagctccagtgctagcagatggtgccaaaccagtagagtgctgcagcagaggggacccacagtcaagcaccagcctacccaagcccttccccaactgtggcctccctcatgccactttgcctgcatgcactcacccagggtgaataaagagccactaggaccactaacactccagctgtgcaagaacatcaccatctctttccagaaagttttcaaactgaaactctgtactcattagagaataacttcccatttcctctcctctcactcagatgctggcaaacacaaatcaactttctgtctttatgaatttgactacactagattttccagtttatttgcatagaggtgtttatagtattctctgatggtagtttgtatttctgtaggatc

SEQ ID NO: 479717 - DNA, 1533 bp, Homo sapiens
cctctgtctaagcagtcccaatgatatgagccaggacttccaggactatgttgaaagcagtggtaaaattgcacatccttgtcatgttccagatcttagaggaaaggctttcactatttccccattcagtaagaagctagctgtggaggacctacagccttttaccagggtaactctgcactggggaaaggggaatgatcagaccttttggggactagtggacactagctctgagctgacattgactccaaatgacccaaaacatcattacggtcctccaattaaagtaggggcttatggaggtcaggtaattaatggagtttttgctcatatccaacttagagtgaatccaatgggtcattggactcgtcctctggtcattttcccagtgccagaacgtaaaatcagcatagacatactgagcagctggcagaaccacattggctccctgattggcagataccacatcaaggacttgaaagatgcaggggttgtgattcccaccacatcctcattcaactctcctatttggcccatgcagaagacagatggatcttggagaatgacagtgggttatcgtaagcttaaccaagtggtgactccaattgcagctgctgtaccagatgtggtttcaatgcttgagcaaattaacccgtcacctgccagccctttcatcacccaatgggtccatgaacaaagtggctatggtgacagggatggaggttacacatgggctcagcaacatagacttccactcaccaagaatgacctggctatggccaccccgagtgcccaatttcccagcagcgagaccaacactgagcccttgacatggcgtcatcctcgtggtgatcagccagctacttggtggagggttgattatattgcacctcttccatcatggaaagggcagcggtttttcttcaccagaatagacacttactccggatataagtttatctatcctgcacccaatgcttctgccaaaaataccatctggtgtctcttagtattaccatgtcctgtgattaaggtcaatgggaaacaacaacagcccaatcctagcaggactacaaatggcccagacccctcaggaatggtttgggtcactccaccaagtaaaaaaccacgaactgctgaggtgcttgctgaagacaaaggaaatacagaatgggtggtagaagaaagtagtcatcaatatcagctatgaccgtgtaaccagttgcagaaatgaggactgtaattatcatgactattttctccttattttgttacgaacgtgtttgtacatgtatatacttattctaagaaaataccttcatttaatttcctttctttttctgttatcatgtgacataagatttattgacttcctatcagaatttaagtgttgttaactttatgtaatagcattcaggttaaggactggtgtgtttccagttgtacaaagaatagctgtattatgttaggcataattatgacctttttaatgtatttatttgaagattatgtatgatttcaggaggtgtgtat

SEQ ID NO: 479718 - DNA, 676 bp, Homo sapiens
tagcaacttcaaagattgaaggaaaatcagcccacaaagatgagaaagagcaattgccagaagtttgacatttcaaaaagccagagtgtcttctttcctccaaacgaccacactagttccccagcagtgtttcttaaagagatggaaatgactgaaatgacagaaatagcattcagaatattgataggaacaaagatcatcaagattcaggagaacattgaaacccaattcaagaaagctaagaatcacaataaaatgatacaggagctgacagacaaaatagccaattctccaagatcagatgaaagaaaaaatctgttaaaggcagctggagagaaacgccaggcccctcttctgcaggtctgctgcagtttgctggaggtccactccagaccctatttgcctgggtatcaccagtggaggctgcaaaacagcaaagattgctgcctgcttcttcctctggaagcttcgccccagaggagcaccagcctgatgccagctggagctctcctgtatgaggtgtctgatgacccctgttgggagagtctttctctctgtctgagccacctacagcagggactggaatgacacaaccactcctgtggccaccatcactaggactggactggatcagacctgaaatcagcatagcaccaggtcttactcaaggcctgcc

SEQ ID NO: 479719 - DNA, 1444 bp, Homo sapiens
cagggtagtatttttccacctttcttgttcaggatctgttttctcaacatgctgatccactttaagtaatgtaatgatgtgtgagaatgtgggacacattgagaaccaaggccaagactggacagggccatataactgggcttcaaccatggctgggactaagaataagacaagagcccaggccaaaactgaaaaaaaggctgctatacaagctaaagctggagcagagagggaggctactggtgttgttaggcctgtagccaagaccagggccaaagcaaaagccaagacagggtctaagacagatgcagtagcagagatgaaggcagtgtctaagaacaaggttgttgctgagacgaaggaaggagctctgtcagagcctaagactctgggcaaagccatgggagatttcactcccaaggctgggaatgagtccaccagctccacatgtaaaaatgaggctggtactgatgcctggttctgggctggggaagaggccactatcaattcctggttctggaatggagaagaggctggtaatagtttcagcactaagaatgataaacctgaaattggtgcccaggtctgtgctgaggagttggaacctgcggctggggccgattgcaaacctaggtcaggggctgaggaggaggaggaagagaatgttattgggaactggttttgggaaggagatgatactagttttgaccctaatcctaaacctgtgagcaggatagttaagcctcagcctgtgtatgaaattaatgaaaaaaataggcccaaggactggtctgaggtaactatctggcccaatgcccctgctgtaactccagctgtgttaggatttagatcccaggcaccatctgaggcaagccctccttcatatattgttctggcctccgctgaagaaaatgcctgttctttgcctgtggcaacagcttgccgcccttctaggaacactcgctcatgctcacagcctatccctgagtgtcgttttgattctgacccctgcatccagaccatagatgagattagacgtcaaatcaggatcagggaggtaaatgggattaagccatttgcttgtccttgcaaaatggaatgctatatggattctgaggaatttgaaaaacttgttagcttacttaagtcaactactgatcctcttattcataaaatagcacggattgcaatgggtgtccataatgttcacccatttgcccaagagtttattaacgaagtcaagggaagtcgcagatcttggatggccgttacatatattattggcaatgcaaagagtcggtttacatccagacaccatactctcttttaaaaatgactgcatcaaataagtcttgtgaaaagcaaagaaaataataaaattgtgtttttatcttaaactagtaacagaagcaatcagttgctgaatggtctgtcactttatatt

SEQ ID NO: 479720 - DNA, 626 bp, Homo sapiens
gatcaaagttttgcctgagcatggactacagttctgacaattttctgcatctccacgtaggatgtgcaggcttccccttccccttctgccatgattgtaagcttcctgagaccatccaggctatgcttcccatacaggctgtggaactgaagctgccaaatagttcctatgatgatgtttctctaagaatgatgttttggacagcttcaaaccctctgctccctcccttggctgttggttttcacagtgattatatagctgttgagttttatgacaactttggacctgaagaaaaagtggtggaaatagaacaagcatcccttcaagtttacctgggaccccagagcactttggcctgtagtggtgtggattgccgagagactcaagttctccgccctgggatgggtgaatcccctctagctaggtctggtccagatgctccctctgtgagtgggcactggctgagcccagcacggctttgctctctggtatggcagggtagcactgagttcaatgtgaagttccccagtcactgccttcttcttctcccaagtgtacagactctctgggctgcacagctgctgccaggatacgggggaggggtggcatcggcgatttaagactga

SEQ ID NO: 479721 - DNA, 1377 bp, Homo sapiens
gaggagtcgtctcagggtagcacctgcggcggggggtggcgggggagggggatactcagcccatctacccggcacactcctcagagagctgacaccgggtgctccatgtccatgttcttgaaggggatcagccatttattttcacttctaaacaaacagcgatagcacagaatctcaccttatgtgagttctcataagatctgatggtttaaaagtgtggcactttcctctctctctctctctctctctctctctctctctctctctctctctgtctccctcctgccactatcattactgcttctctctctctctctctctctctctctctctctctctctctctctctctctctctctcccccctctctcttctctctcctctctctctctctctctctctctctcctctctctctctcctctctctctctctctctccacaatgtttcatacactctatgatgttcacacttttacgggatctttggggtgtcacttttctggccggaaacctctgtggcctgtggcacctttgcttgagtttttcttgggcccactgggctcattccacccactcgacctggcaggctgcgctcagctcatgctaccggcctggatcacacgcctgccatgggagactgcatggagcagcgaggggtgtgtgagcaagtgtgttgtccaaccactgcacagtcagaaatgccggctgctgcagcgggtggggagctccaggtgccagcatgggtgccagctctccactgggctgccacttgaccaggtgcgccacggcttccacagttggcaccagggaacgctgtggtgccttgaagcttggagacgccaggaactgcagtgcctcaaagacagagtcacagccctggctcagcaagtcaacccgacaagtgttcagctatcagcagagagggtagctcctctctgcagctggtcatcccatcatctgcacagctctcagcagagaggaggccctagagagtgggtggctcctctctgcaggcaggtcatcccatcatctccccattgtctcttcatcatctctgcagctctcagcagagaggaggccctagagtgggttgctcctctccgcagctggtcgtcccaacgtctgctcagctctggcttatcccagggcttttatgggcctcggaggggaggaagtgcatgccaattgctccatgggtggccatgggcgggcccagaaagggcaccacaagttcccactccagtccgaaggactggcagcccgaccccagcccaagtctggtcccgctctggtccatgggactggcagcccagactttgggcaccgacgagcataggagggaagtcaaggggtggctgagggcagctcagtgctg

SEQ ID NO: 479722 - DNA, 882 bp, Homo sapiens
aatggtaatgaacatttttgtttttcctacagctttgctctcacagacaatgctgaagaaattggctcccgtgaacctggagcctggaaagcatgcagggaaggctggcaggctggagacccaatgaagagctgcagttcaagtctgaaggcattttgctggcagaattccctcttcctcaaggcagcacaggggtaacaggagggtgggatcataaggagtgctgcatggaggggaattctgagatcattaatggaatgatgccattaaggcctcatgagcagacaactaggatgaatggaatccatgtttgcaaagatcagcagcagttatgcagtagggctgagggcaggagctataggcaggaaccctggggagagtgtgccaaggcccaaggaaaagaacagagcagttgtggatggactctcctggctgtggctgccgtatgctcctttctgtcctaatcaaagtttcccctccacactccacacaattagcacataaatgaacaatgtcaagaataaaagaaagtcatcactgcagatctacataaaattatagcatgatgacatgcatagctttatgttaatgactttaactaaaatgaaacggatattaaactgcatctgcattatgatttctcttatataaaaagtgtgcatatatatttatgtgcacatatatatttattcaattatttatgactgaattgttctcaatgattctaaaaaatggctatgtcaatttacatgctcggaagcaatgtatgtgagtactcttgtctcctccctccaacttcagaaataatcttgggaagcatacactttgcctcaccatttaaacttccaagattgtctcctaatggaccatttgcagatgatg

SEQ ID NO: 479723 - DNA, 841 bp, Homo sapiens
caaccacagctaaatcgtggcacaggggtgcaagggtgataaagacagacgatgccacactcttctcaggctttgaggccatggcttcagctcctggtgtggctgggatccaattctcctggaaggtccgaaggcccggaagttcaggccagctccacttgtcagcccgcgcccgggggctgccatccgatgccctcatccataggattcgaccaccttgacttgagaaccctgacaaatacaccctataatgccaaatatacttgcagccccactgaggagtcgggcaaggtacaaaattaccccattaaaaaccactgctttaggtcacaagctttgataaaagtacgtggtaaatgctattactcttctttgtctgaaaaacaaaacaataatgaacataaagaaacaggctcacagtgtgcatctctcatacctcatatatgctctctctttctttaaggaaaaatgctggtcattataaaatttcagcattgctatgcagcattaactatatatctattaactatagctctatccccactatcaccattatgtagcacagagaggaagggtttgggaatggacacccatatgctagtgttggttttatttctgtttacatttttagtctctttccatcatctgtaacacaaggttttgataaagacaaaatgaggaatatatgtaaagcaaatgcaacattgttggagcaaaacagttggtagatcctatttataaaattattagtacaaatgctagatttgacctgttatggtagagtaggaaaactgtttgactgacaaccaagaaacctggatcctggttgagtactgtcact

SEQ ID NO: 479724 - DNA, 913 bp, Homo sapiens
aaaatccattattattttctggagatctggctgtttaaaagtatatggcacctccccactcttccttcagctccagccatgtaagacaaacctgcttccccttcacgttccaggatgattccaagtttcctaaggcctcctcagaagctgagcagatgccagcatcatgctttctgtacagcctgcagaaccatgagccaattaaacctctcataaattacccatcaggaccctcagctgcagtaaactcttttggagtttactggaggtccaatccagaccatgcttgcctgggtatcagccgtggtggctgcagaacagcggatattggtgaactgcaaatgctgctgcctgatcgttcctctggaagttttgtctcagaggagtacttggccgtatctcaagctgcatgctgggagaaccactactctcttcaaagctgtctgacagggacatttaagtctgcagagattattgctcctttgtttgtctgtgccctgcccccagagatggagactgcagagggagtcatcaatgtggaaaaggcatagatatggaatatgcaatgtttttctcttaaatttgtgttggttgactatgggaagccaggaaaattatcttttaaaatgaaaataaaaattcattcttttttaagcccacaaataaagtcacgccatgcactttctgggggaccatgaataaaacatcaattattttctaaaaatcaacattgttttcttttccaaatacaataatactgttagggctttaggctatcattgggaagcctagttatcatcattgctaagacaagttcatttctttgttaaatgcttgctagtctgactgtgaaggtaatcattactttttagccacttttcctgcagttatcttgtaatagaatgtttgtgct

SEQ ID NO: 479725 - DNA, 745 bp, Homo sapiens
actgcagttacaatggctttcatccaaaagacagatattaatgaattctggcaagaaaggggaacccttgtatactatcttgtgagaactcactcgctatcaggagaacagtatggggaaatggcccccatgataaaattatctccacttggtcccaacgttgactcatggggagtattacaattcaagatgagatttgagtggggacatagagccaaaccatatcattctgctgctggccccttcaaaatctcatgtcctcacatttcaaagcacaattgtgcccttccaacagtaacagtgatgcagaagatgggctcccacagacatgggcagctccacccctgtgactttgcagggtacagcccccatcatggctgctttcatgggctggcattgtctgtggcttttccaggtgcacgatgcaagctgatggtgaatctatcattctgggatgtggaggatggtggccctcttctcacagcttcattaggctataccccagtgtgcactctctgcctctgggcctgtgatgggaaggcctgctgggaagacctctgacatgccctgaagacattttccccattgtattgacgattaacatgtgactcctcattactgatgcaaatttctgcagcaggcttgaatttctctccagaaaatgggtttttctttttcattcatcatcaggctgtgaattttctgaaatgttatgttctgcttcccttttaaacataagttacaa

SEQ ID NO: 479726 - DNA, 673 bp, Homo sapiens
tccactgacagcttgcactgttcatctagaaaagccaccgacactcaatgacaacctgtgaaagctgccaggaggagggtttttcctgcaaagccacagggatggagctgcccaaggctgtaggagcctacctcttgcatcagtgtgacctggatatgaaacatggggtcaaaggagatcattgtggaattttaaggtttaatgactgcctcgttaggtttcagacttgcatgggagtccccactggggtaatgcctagtagagctgtgagaagaaggccaccatcctccagacctcagaatggtagatttacaagcatcttgcaccctgtacttgtgaaagctgcagagagtcaatgccatcccatgagagtcgctacaggggctaaatcctgcaaagccacaagggcggagctgcccaagaccttgggagcctacccttcacactacagtgccctagatgtgggacataaagtcaaagctttaagatttaatgactgccctgctggatagttcattcctatttattattgaatagcattcaatacctccaatttcactcacctactaaaggatatcctggttgcttccagtttttggtaataaagaataaaaatactactaataggttttattttcagttttttttgtagacttaagttttcaattacctt

SEQ ID NO: 479727 - DNA, 1000 bp, Homo sapiens
tatacctaatgctaaatgatgagttaatgggtgcagcacaccaacatggcacacgtatacatatcttttggactcttggacttacaccagtggtttgccaggggttcttggtcctctgtccacaggctgaaggctgcactgtcagcttccctacttttgaggttttgggacttggactggcttccttgctcctcagcttgcagatggcctattgtgggacttcaccatgtgatcctccacgccaaagatttggtgtggcggcagcccgcggtgagagagacacggatcggaccaagagaaaaaaagctgtagactttattgagcagactgatagtataaagcttccacagcgtggaaggggtcccaagcgggtagccggtgttagattttttgattaccttttaaactttttaaggcgggaaatacgtgtggcgggaagatgttaccagagcaaaaaacaaagacaattaacatgtcttagatctcgaggaaaacaggaattgtaactcaagttttatttactttataaccttgtagcggcatggcaaaggagacaggacctcacgggattttacaaattgtgtttacaaggaattggaattgggagcataaataaggtcagctgatcacagaaaataatgggcttttaacattctgtttagttttacgggagggggaagggagagagggagagaggacacaaggaagcttacagcaaaagttttgctatttatagctttcttggggaagaaaacacatgcacaaattctgatgttaggaatattttaagcatatatcttcaatattatttatccaggaccaaaggttggatgatggtgccttttacttttttcatttggggaggtcataatttccttaatgtccttgatgcttatggatgtttgtcagtgtttgggcattgatgaattgtgtatttactgtaatcttctaagtctgggcttggaaaggctttccaggtattcaaagaaacttgaatgtt

SEQ ID NO: 479728 - DNA, 1282 bp, Homo sapiens
acatgctctccctagtggtttgagctgcggggtgaccaagcaggccacacccttgtcgcatgcgtcctgcaaggggaatctgggaactctcccgtttcaactggggccccatccgggatattcgtcagaaggtgcctagtgaatttgggtccagtgaagtccaggtccccttctctctacaggacttaaagcaatgtaacggggatcttggtaagttttcagataaccctgccagatatatagaggctttccacaatttcacccaaatatttgaactctcctggggagatgttatgttacttttgaatcaaaccctgacagacgctgagaatcaggccactctgcaagcagcagagagatttggggataagctttgcatcacatatagcatcagggaagggggcaaacattatccaactggaagagaagcagtatcaagggatgaccctaaatgggatcccagtgacaagacagaaaactggaagaggagacactttcaggtgtgcataatggagggcttacgtaggactagaaccaagcctctcaattatactaagttgtccatgatcgaccatggatttgatgacaataccactgccttcccggaaatgttaagagagcccttgttaaagtacacctctttatctcctgatccactcaatggacagataatcctaaaggacaaatatattactcagggagcccctgatatcaggaagaagctgcaaaaacaggttctgggaccagatagtgctttagagaacctcctgaaagtagccacttcagtcttttataatagagatagggaggcccaggagagagagaggaaatacagaaaagagacagaggctttaatggccaccagcaagcccacaaatcccagaattcccagggtgcacctaattgctacagatgtggcaagccaggtggagaccaatattaacccagaaatttgggcaactcaagggaagattggcggaaccaccactgccataccagtccaggtccatcttaaggatcccacctcctttcctaaccagaaacaatatgccctgaaaccagagaatgggccacctcttggggatacatcctgcagtcctcaggatggctacaatcggaggacaataagcttcatctaccagctgccaaccaatggaaagtacttaaaagccttcactaggccttccacctaggtaaggataaaacctatcaactggcccagagattgttctcagaaagctcattggtcatcactggagttttgctagagcaccaatttatc

SEQ ID NO: 479729 - DNA, 1906 bp, Homo sapiens
gcctcttggttccaatgagccggaccggaactatgtgatcccggaagttccgggtcctttggccctatatgatcccggaagttccggggcttttggacctctgtgattccggaagttccggggcgttccggggcgttctggggcctttggagcgtgggataagcagtaatggcggaggctgcagctcccggaacaacagccacaacatcgggagcaggagcagcagcggcggaggcggcggaaacggcggcagcagtctccccgactccgatccccacagtcaccgccccgtccccgagggcgggcggaggggtcggcggcagcgacggcagcgacggtagtggcggcaggggcgacagtggcgcgtatgacggcagcggtgcgtgcggcggcagcgacgcgtgcgatggcagcggcgacagcagcggcgacagctggactaaacaggtcacttgtagatattttaagtatgggatttgtaaggaaggagataactgtcgctactcgcatgacctctctgaccgtctgtgtggtgtagtgtgcaagtattttcagcgagggtgctgtgtttatggagaccgctgcagatgtgaacatagcaagccattgaaacaggaagaagcaactgctacagagctaactacaaagtcatcccttgctgcttcctcaagtctctcatcaatagttggaccacttgttgaaatgaatacaaacgaagctgagtcaagaaattcaaattttgcaactgtagtagcaggttcagaggactgggcgaatgccattgagtttgttcctgggcaaccctactgtggccgtactgtgccttcctgcactgaagcacccctgcagggctcagtgaccaaggaagaatcagaggaagagcaaaccgccgtggaaacaaagaagcagctgtgcccctatgctgcagtgggacagtgccgatatggggagaactgtgtgtatctccacggagatttatgtgacatgtgtgggctgcaggtcctgcatccgatggatgctgcccagagatcacagcatatacaagcgtgcattgaagcccatgagaaagacatggagttctcatttgctgtgcagcgcagcaaggacaaggtgtgtgggatctgcatggaggtggtctatgagaaagccaaccccaacgagcaccgcttcgggatcctctccaactgcaaccacaccttctgtctcaagtgcattcgcaagtggaggagtgctaaggaatttgagagcaggatcgtcaagtcctgcccacaatgccgaatcacatctaactttgtcattccaagtgagtactgggtggaggagaaagaagagaagcagaaactcattcagaaatacaaggaggcaatgagcaacaaggcatgcaagtattttgatgaaggacgtgggagctgcccatttggagagaactgtttttacaagcatatgtaccctgatggccgtagagaggagccacagagacagcaagtgggaacatcaagcagaaacccaggccaacaaaggaaccacttctgggaattctttgaggaaggagcgaacagcaacccctttgacgatgaagaagaggctgtcacctttgagctgggtgagatgttgcttatgctttaggctgcaggactgacttaccagtcagtcttccaagaagccttccctgactgtctatcccagcccccattagatgtcccaccttatacatagttttatcatagcacttagcattcatattgtaattgtccttcacgtattttgtcccttgccctttattgtgagaaaccatttctttgtatctccagtacctcattcagtgcctgaaacatggtaggtgccgaattgtactttacctttacattattgcacttcatcagcgttgctccacaaatgccagaaa

SEQ ID NO: 479730 - DNA, 736 bp, Homo sapiens
gtgttttgaggaaaacaatttattgtctagcttcaactcgtgagaactcactcgctatcacaaaaacagcatgagggtaaccatccccatgattcaattacctcccaccgggtccttcccaagacacgtggggattatgggaactacaattgaagatgaaatttgggtggggcacagcaaatcatattggcgtccttttaagagaataacacttgcttttcctgtcctcaaagaaacggttgtcgtcatcatcggaaattttgtctctgactttcaaaaatgcatttttaaatgcctggaggggctggcatctagctctcctttcagactgtgggaactgtgttatccctatgacagacctacagccaaggaaaataaaatgcagtcagcccttcagcaagaaatgtctggagaccatgtctataaggaagaagacatgaaacatgttataatgaaacaatgttattcaaggacctgctgtacaccatttcacttgaagttgcagtttccaagaatgtatcagtgaggttaaaagccctggttctgtatagtgggaaataatttctacagactaagatctgggcactagatatgctcattgctatcaagatctcatttcttttcttctagtatcccctgccctttttaaaacagaggtttttttttttaagcagttttagattcagagcaaatgtaaagggaggtacaaatatttcccatactcccttcccccata

SEQ ID NO: 479731 - DNA, 596 bp, Homo sapiens
agacttggatagggaagaacacaatgggactaagtcttattctttttcgtataacctttgcttatcataggtcctggatgtttccaaggcaactgcaagctcagttggaagcaacaagtaacttagatggcaagttcccaatggaattggaagtgaccaccacagacaaggacagcatgaaacagaaaacaagctgccacgcagctgtgaccatttcaataggctctcagccacgatttgccttcacctctgaggggacacaattcacctttaccaggctactcatggggcatctcagcagtcctgctgtcccacacaatttcacaggtaaaatcttagccacatctatctttctcaaggaacacaggtatgacatcaaactgatgacatcctcctctgacgggattcacttgacatacttatttaggccgtacaaacacaaaggaactctcgaaaaggggatggaccattgcctcacacatagtactaggccctgctatctcagttaaattcctgtcgttgtcgggaaacaaacattgactctcttagtgcccacaacgttaaagaaagcccaacatcttttagtcatttttggg

SEQ ID NO: 479732 - DNA, 2919 bp, Homo sapiens
tttttaaacaagagctgctcgtagctttgcatgaagcatgatgctgtcacctgctcggtctctggggaggcctcaggaaacttacgatcatggtggaaggcgaagggggagcaatgtttctgttgctgaccactaaatatattgacttattggggataataagaaataaatacatgaaaagtgatatgacaattgaaaatcccagtacagaaaatgtcacaaaagtggcagattcagtgaaaaatgaaccatgtgagaaatatgctattattgaaaagggacatggatgcagctgcaggtcattatccttagcaaataacccaggaacagaaaaccaaatactacatgttcttacttataagtgggagctaaatgatgagaacacatggagacatggtggggaacagtacacactagggcctgttggagagaggagggcttcaacttatgttgttccttccacctggaataccctgcatgaaacttgttcttactttatttggtttgttgaaatcctaccaagtctttaaagccccacctagatttctctttaatgaactcttttctttgccctttaactctctgtgacacttttactgctgtcttctattgtttctgcctttcttttgtaatgtcttaaataagacatttccccaagatgtttaaagcaacaatacttaacctttgtacaaccctttcatctctagagtcttttgcaatgggtactgaatgaagtcagaaatcttcttgcaaaggatcattggtgactacaagcctgaagatgaggctttaattgctatcagtgtttaagatttagcaggacttggtgtcccttttagacccaggagtcaaaaccctgtaactcaatgtcacaagtacttcaaaagcacatacagaaaggtacataaatgtaataaccttaattaaatttttttaatttccgtttttttcctaagcaaaccaaaacttaataataatggcgtaggaattgtttcaataaactgtaaaatctgttaggccagttaccaaaaggcaaaagaaaagaccttctgtactacacagaatattatgttggtagaaaacattttctttacacctttaataaaacttctttagcatcagggccgcaacaaacagaacttgaggaaaaaaacttatatgagctgaatatgagttggagagaattactgtttcatgccctttaaaaggggagaaaaaactgaaaacggtgagaggcactaacagttgaactttgggttaaaaaaattaaaatctcttgtaatttattaagagtaagtcaatcccttatgaaaatttcattgttctaaccaattatttagtgtataagtgttttttttaacacctgtaatttccctttaattacagacaagttgatcatataaaagtttcttttaaataaatcctcctattgtgatttaaacagactgttcatgacacacttgaactttctggtttgtcctgaacatccctctttcttaaacaatcagtcactttattctagaactaaatttaccgtacaagattctttctcatataaaattatttctctttaagctttcttaccaaaaaacctctttgtttttataactttatttacatctttcttatttcctcgttccctttaccttgttttatacatgacctttaaataagctttgaattagacaaaaattgttcaccttttaaaaaaaacatttttttgaaagaatgttttcctacaatagatttttattggaaaatacccaaataatgaaatatctattatttaatataactttagattgtaaattatgatgcatttgtctaccacactttagattgtaaattatgatgaatttgtctaccagtacttattccattacatttacctaattattttattttaattgtttgcctagattatttatgaaaactgcgatagtcatcatttaaagctacagaaccactgttgcaaaattataactgagacagtgaaaaagctctgatctaactcactccatcttgcttctaacttccaagctgtcctttttcattcctgggcataggccaaactaactttgggaggaactcagtttatagtttagctttgaaacaaagacagcaatagtcctttgccaaaacaaaccttactgcctatggactagaccacttaaaatcacaagattagaagttatggttatcttactaaattcaagatatagctattttcatgaaacctatattaatgtcttatttattaaaaattacataagcaaagatcattctgtcttggttgggtttatagttttataaccctatgccaaattttgaaaccttatagtatttgtcaggaataagtgtgaaattgcttgattaataaatgcaaacaaaaatgtatactggcaattcttaagacatttctaatattactttagcaataattttaaagctagcttatttattaaagattttacttgttacgtaaacatgaaaaagcatttgactagtcttttctttttttcctgataaagtatttgattcaagcacttttatattcttaagccaattaattagagctcttttatatattttcagtagtgaaacactgtgtatacaacacataaatacatagatgtattaggcatgtcaatagaagtacatcttatagggtcataaagacccttttttctcctatcttagactttcaaattgatgataacctgtttcacaagcctaggcagttgtcagctaaatagccttaaatttgcaaattaaaggaaacaactcaggtgaaaatcaaatagcaaaatttacatcataaggtacggagagaaaaagtatgatgtgctagagggaaattaaaactgatttaattgccaactaaaattataaaaatgatagaaattataaaggcctttt

SEQ ID NO: 479733 - DNA, 612 bp, Homo sapiens
ccaggtccctccttggacacctggggattataattcaaaataagatttaggttgaatggcttttttctgcttctctggacacgtgggccgaacacgggagccccaaatggtgcccttggccctgaagtctgcattgtcttacaagtccatcagctgtacggggatggtgtgtatgtatggaggatttgctatgaagggaggatcttcaattttggaggatgaaggaaccacaagaagtggaacctcaaatggaaggtctaaatttcctttgtttgaacttagattttcttccaagagagctttaacatttgaaaatcttgcatcttggaatggaataactcctttaataggcttcaaacagaaaattgcacaattagtcctcttgagggtagacagtgatatacccccaagcccgaagcagggtggtcagcagtggaaaaggggagtggtttctgctgagaggtctgctgttagtgtgatgggcttccttttgtaggtgatctgccctttctctctagctgtctttaacattttttttttcatttcaaccttggagaatctgatgattatgtgtcttggggatgatcttcttatgaagtatctttctggggt

SEQ ID NO: 479734 - DNA, 567 bp, Homo sapiens
cgaatagaattcagaatatggataggaacaaagatcatcaagatgcaggaatactttcctgtcacactgatttacctgctacacataattattcttattgggcttatgtgccttttcctccacttattcgacctctcacctggatagatgctcctgcagaaatctacactaacgatagtgtgtggatgcctagagccacagatgaccgttgccctgctcaaccaggagaagaaggcactgcatttaatgttaccatgggttataaatacccctctctgtgcctcggagatgcacctggttgtatccatctagaaactcaagtctgggctgcttatcttccagagagatcagctacagaggaaccaggacatttggtctctggcctctccctttctcctttaaaacaaatgaaagggggaacaggctgttatttggcttggagatcgggtaatgagtctcgaacatcgcatgcaaatgcagtgtgattggaacacttcggatttctgtatcaccccatattcctataacgagactgatcattcatgggaagtggtcaaaggacacctt

SEQ ID NO: 479735 - DNA, 700 bp, Homo sapiens
tcaaccaataactggcgagctttgatgtgtttagacacataaatgcttaccattgtgtcacaattgcctactgtattcagcacagtaacatgctgtacaggtctacaaagacgtacttcccaaagacctgttaattttatcaatgaaatggacatgttaacctggaatttaaagcagtatgaactagggaccctacttaaatttccaggaaaatcgtctccgtatctttacctctctgtagttgcaggggaaacagtttatgtgagagagtcagaaggaaatctttggcgtcagacagacctgggttccttcccactctaccacttattagcatgtgtgacatccagccaggtttctggtggccatacagacgagaaggtctttaggtcacagctgtatgtggattttggtgacccaagtaggaatcctggtaccaccacttgctacattggaaggcttggagtcaaggatggatttgatgaatcgcaggccctggaacctggtggggagaatgaagcaaatggcacatccgatggaaataatgcaaaaagcaaccagaggagaagtcagaatgaaaggtggtaacaggaaggtgaactggtttgggaccccagaattgaaaggacaacacagatgcagagcattcatgtcccctcacccaacagaaaaaggttaccaggcccggtgtttctgtatccct

SEQ ID NO: 479736 - DNA, 483 bp, Homo sapiens
tttattccttctttattattcctttatgtggacctgagtaagcgccagtgtctgttgttcccctcaatatgtctatgtgttctcatcatttagctcccacttataatcttccagcagaggcctcagatactgtggagcagagtggaacacagataagctgtccccagaaaatcctgcccaaattgaagattccactgtgcaacccacaaggattggaagatcccactcatgaacccatgccactagggcctagcgtcccaaccctggaacacgcagacgtgcaaactcttaacagcttctcagctgaaatctgcttaagcctactgaacttcctggtggagaagcaaccagcaccatggctgtggctgcctgctcccaacacactggctgtggcagtcagcttccagagtgcctcttcaggcttgactctgacccatcctttctcagtgggcggggcttccctgcaggaagtccagtaactct

SEQ ID NO: 479737 - DNA, 569 bp, Homo sapiens
gcctaatgctaagacaatgaagaagtttgctgacacctgtcataaaccatacaataattttatgtggtcaaatctaaaaaccttagcacagaaaattagcagcggcattagattctcacaggaatgtgaacctattgtgaactgcatatatgagggatctaggttgcatgctccttatgagaatctaatacctgatgatctgaggtggaacagttgcatcctgaaaccatcactcctcctccccctgtttgtggaaaaattgtgttccctgaaactggtctttggcgccaaaaaggttggggaccactggatattaggaaaccaaaagaagaaaaatactcaatgtgggccaaaatatggaaaaacagagtctcatgagcttttggtgggtgtgaaaactgaagaggaattggtagcatctctcactcccacaactgtgccatatgaaaaatccctccctgctggctcacagactccttaaggacatcttaggatgattccttaactttgctttttggatattaaaaatctgtccatttcatttacccttcagaacttttctctttccc

SEQ ID NO: 479738 - DNA, 621 bp, Homo sapiens
atgtactcaatgtttggctcccacttcttgtctagcagtctaaagccttgttcgacaatgccttctctctccagggctcccctggtccttccattgcctccacctgctagtcagcaccaggataattcgattacatacagcagtggttctccaaacatgggtcctggaccagcagcatccacatcacctaagaacttattaaaagtgtacattcttgaaccccaccccagacctactgatttagaaattgtggggctgggacccagtaatctgtgttcaacatgccctccaggtgacctcctcctgcctctaagtcaacaggctaagaagggagttacagtgctggttggggtgattgacctggactatcaagatgaaatcagactactactacacaatggagtattaccataccctgtgattaagatcaatgagaaactacaacaacccaatccaggcaggactacaggtggtccagacccttcaggaatgaaggtttgggtcactccaccaggtgaaaaaccatgaccagctgaggtgcttgctgaaagcaaggaaatacagaatgggtagtagaataagcactccatgagcctttttgtgggctggttcttacttgtc

SEQ ID NO: 479739 - DNA, 886 bp, Homo sapiens
agcaaacggcacaccaggagattatatcccacgcttggctcggagggtcctagcccacagagcctcactcattgctagcacagcagtctgagatcaaactgcaaggcagtagcgaggcttggggaggggcgcccaccattgctggggcttgagtaggtaaacaaagcggccaggaagctcgaactgggtggagcccaccgcagctcaaggaagcctgcctgcctctgtagactccacctcagggggcagggcatagacaaacaaaaggcagcagaaacctctgcagacttaaatgtccctgtctgacagctttgaagagagtagtggttctcccagcacgcagccggagatctgagaacggacagactgcctcctcaagtgagttcctgacccacgagtagcctaactgggaggcaccccccaggaggggcagactgacacctcacatggctgggtactcctctgagacaaaacttacagcggaacgatcaggcagcaacatttgctgttcaccaaaatctgctgttctgcagcctccgctgctgatacccagccaaacaggatctggagtggacctccagcaaactccaacagacctgcagctgaaggtcctgactgttagaaggaaaactaacaaacagaaaggacatccacaccaaaaccccatctgtatgtcaccatcatcagagatcaaagtgatggaagatcaaatgaatgaaatgaagcaagaagagaagtttagagaaaaaagaataaaaagaaatgaacaaagcctccaagaaatatgggactatgtgaaaagaccaaatctaagtgatggggagaagggaaccaagttggaaaacatctgcaggatactatccaggagaacttccccaatctagca

SEQ ID NO: 479740 - DNA, 654 bp, Homo sapiens
aaaggcataagaaagttcatattaatgcaaggtgctcggatgtgtttggctacaacaatttctgacaaagcaacagaatttggcgatgctgatgctctaagaatgattgaatggataaacaactcatacagcttgtcggatctaaggtctcactgggaagcacaaaggaagcaggcagcagaaggagacatcaaatggtgcagcctgcagttcccagcagtgactctcaatgggactgcatgcattaccatggttcctgcaggaactactgcccagctgattgtcagtggaagtgtggacacaggctatcctcatttctcctacccttatctggtttcccagcagcagatggtgatggtagtcacgtttttccagctgtccacactacagaggaggacccaagtttgtctgtacactcccttccctcattttgaggagtctgagggctgaaatgttatgcaagagaaagatctggtttgatactttggatccctctaaaattctgtaatttttatctttaatgaaaattgctaaatagtacaagcttggatagtggcaaattaataaattcaagcactctataaataactaaagtattaataagcatctctctaaaagtttgggcagaaaattatcttaatcttacattattat

SEQ ID NO: 479741 - DNA, 524 bp, Homo sapiens
tcggggctggcatgtctctggttgggaagggctttggaatgtttctgaactactctttcttccttggtggttttataactcacaaggtgaatggtgataccctgaaagatcaacaggaataccctcaggaatctgacaatgcagaatacagggatacagagagccaactatacattatgctggctacctgtaccaggagtactcttgaaggaagaggacaggaggctcccactggacacatgggatccaacatcacacttctaaaaggagatagtcaaagtctttatccattggtccctggatcagacctcatcaaagcacccggccatagtcagaatccaagaatgaaacaatggccaagttcagggtggaaccaaaggtcctacacttaaacaggtccttgataactgagtgtaactagtattaattattggtaaagaacaggtgagataacatcagttataataagctttattttactgggttttggatttttaaaaaatttttattttaagttcaggggt

SEQ ID NO: 479742 - DNA, 1307 bp, Homo sapiens
tcatctatgcacagtgaatagacacaatggtgagggctcctgaaagatggcaagctacctctaaagtgaaaagtttgtggtggagtgtctccaaattaaaaagaggggaacacgggtacagaggtaggcagggtaaaaggattttaaaataatactgcttaggagttgtatattttaagataactactataccttgtctacccttgatcctaatcctcaataactgcatgttcgtgcaaaatacaatttctactctataagaagaagagtagcctgttaggaaaagcatattcttaggggaagacatgaagacatctctttcataaatgcaattttacttggtgggtcttttggcatcactatatgctatttcaacctccttatcactgggacaggtattgatgaactcgtccctactatatgcattagttaggtatctccagatgccagtcatctcttttggaatatcaaagttgtgatattttttggccaccaccttgacaatatgcagtttggggagcaggctgcaatcagctaatgtcatttcattgccatccagaaatttatgtgtagaaaacttaatgtcctctatactattttcatcaatttcatcagggagaggagaattcagatatttatccagtttctgcagggttttcaggagatccttctccagtgcttcattagcctctcgccttcaattcttgataaatgcagagaatttggcaaagatgtccattccagcagtatttgattctgggtgttttggtgaaagctttaagtacttgggagggcataagacttcttcaagaaattcctcaatcttacttacatccgttttgacttcactgttgaaacttacaaacggtgggtgggtcctgggagctaagttctgtaggtctgcaggcttccatttcaggtcaacagttgtgacactaaatacaactcctttgagtcaacgaatcatgaagaacctctgggaaaaggggcagtttcctatgctttcaccatcactgccagctttgacgaggagctcaatgaggggctctttgtcctcctccttcagcccgttcaacggcatcgacaacgccatggccggctcggctgcgctccgcaaacggcgacggctgctgctgctgctgctcctcctgctccaaggctgctccgactgccggctcccgccgcagtgctctctggacatacttatgtgctaagcactgttctaggcactatatgtgtattaattcctcgttctaggcactatatgtgtattaattcctttaatccttataataaacctgtaagtt

SEQ ID NO: 479743 - DNA, 557 bp, Homo sapiens
tagtgcgcatggcctgtttgtcacctgtaaatgaagggttagctcaccaacaggctctgcccactgcccacaaatacaccttcctggggcctcttctgaaatcatcgttctttacattgcatccaaactctccattgctgcctccaaatcctagtgaatgtctgctagacattcacatcagctttgctgaagtctggattgtcaatgcgctggtcagctactttccagaaggcttggcatttaatggctggaaaattgcccatcaggtgccaggagacaggaaacttgtagctccttacctcctggatgaaagcagcgatggtgatgacatcattactgttaattacccctttgcaaaatctgcttgaatggcgaagaggtgggtgtgtctatgtgggtatttaatgtgatgattaaaatatattaatgatagttttcacttctctagcatcgtacatcttaggatcttctttaaaagtgcttccacaggctttaattaggcattttaaagtaaattccagacatcatttcactataaatactttgtgttttttcct

SEQ ID NO: 479744 - DNA, 602 bp, Homo sapiens
aaatactttatagatactatggtgatactatctaagaggcaccagctccagccagagagctgggcagcagctgccagccaggatgaagagcctctgaccccgaaggcaatgggcagagctgggccaccaggaccatggggcaaacatgccactctccctccaggtgccaaccaaggagccctggggctgactgtccctgtcaatgtcatccctgccaatgatcacatcccagcagcaacctgggctggaccgaggcccccctttatgaatggattaatgttgttacttcaggagtggggaagcagaaatgttcccaggctcctgatggtggcagccaggcctagtgacatggtgaaagcggacccggagagtggctggcgtcagccattcccaggccatgctctctgctacgctcccatcaggcagccataaaagaaatgaagctattttaagcctgcatccaaatgcaagcaactgagctggaactgcttgcaggatgccgtctgttaacagccatggctgaagactgaaacctgcaggatgggcaccaggagcctgggtcgtgctcctttacagggccaggagctgtccctctgcaacac

SEQ ID NO: 479745 - DNA, 656 bp, Homo sapiens
gaattttcttttgtaatacagcatggcccctatgcagaaaacctcaaatcagtctcctcagtcttttataaccaagagcaggataaggacagggctaaggagaaagaaaaatgcagggacaagaagcaggctcaactgttggctgctttgcaagcccccagcctccattccaggctgccctaaggatactcctccagataactgccatcagtgcagaagcccaggccactggaaggcaaactggccctatggcatgaatgacgaaaaacccccgcatggcttgccccctctgccacaagctcggccactggaaatgggactgccctggagggccaaagggacaagtcagaaagccctgatgtccaagtcagaaagtccatgtcataaatggtctgtgcaagtagtgagaaggttcgcaaaggagaagttatgaaaggaattttctatgtgtttaagttggttataactgaaagggaattatttaggatagtctaacattggtcccctatgttaaaaacaagattttcttaagatattaatctggtcttaataaaactgtaagaagttaaagcttcacagaataatatctcagttcaacttttgctgtgccctgctgctttcagctttttcttcccggagaatgccaaagataataa

SEQ ID NO: 479746 - DNA, 754 bp, Homo sapiens
tgctagcaaggttgcggagacaaagaaaaatatatacacttcattcacaatgacagtggtggcagcattatgtagcgggataggggccttgctgctgtctgtatgtttatttgcaccagaaatggtgttagcacaggggtggtgtgccggctggcacaggaccgtgtgtgctttcatgcatgtattcaaattggcagcagctgctgctaagtttggggtctccatgctcataaaggctctgatggcaatgaaggtgcatcaggggagtggggttgtgtgcactaatatcaacagctatgacatagtggggtgcacatacatgtgcacaagcagggaaggggtggtgaggtctacctgcatgcatactcactggcaaagcaatggtgagggtggctgtgggcaagtgcctgcaggcaaagaagctcaggggaggatgtggtggggagacagaatgtatgggctggtgcacatccatgggagtgctctactgggctctccatcagtcaagtatggctctccagcacacaagctataacgtgggcccccaagacgcatcctatctgggcatctgaggcagcactgcaagcagataaaggttaaaatgattattttaattttcattaaattaatgaagaaatatatacagagaattaacgtttagcaaatattaaattattcattctaaaaaataatgcattcttttatatattttggtcttattatatttccttcagtaaagtttttgagttgtctt

SEQ ID NO: 479747 - DNA, 990 bp, Homo sapiens
ggcctgtagctgctttattttgaccaatttctcccatttggaatgggggagtgagtgtcccttcccgtgctccgctgcagacatgcctgcaccaaaccctctgtgtcctgcaccagattttaagtgctgcccataccccttctctaagcagctctccctgccaactcaagcgtccatggtggtgaagaagtctccttctgcagggattccagaggcttgtgctcaactcacctgttcctccagagtcaatggggaccagaaacatgccctggtgcatttctgcctgtgtcattttcagtttcatctccctttaatgcagcttccttgtcttccctctgtccattctcaggaccttccctctgaagatcttttaggaaggcaccagtcagtcccttggtggcagttgttccacctggctgcatctagttggctaactgtcccagctcccacaaagaagcattttagaggtcacggaacaactgtagattttcccattgattgctaagattacttctcaagtcacttttagagttcaacacaattatggaaagtgaggatgacctagatattaaaatattattatttaccctatggtgtgtcttcagtgcaaatttgtaaacattttaaggcaaagaatatctcaagcttaacttttttaatattaaatttttattttggaataattttagatatgcagaaaagttacaaagatagacttctcatatattttttacccaatagcccccaatgtttacatcttatataatcatgccacttttgttaaaagtagtaagtactggcatcctatcatttcatgtgtatttcaacaatctttttactaatattttttattccactaattgccttatcaatcaatgaataccagtgtacattccaagtaatctttcagaaattatcactttcctttgttccttccttctttcgtttatgtacttaagacacattttaaatgtctatatgctaggatac

SEQ ID NO: 479748 - DNA, 629 bp, Homo sapiens
ggtaccatttgacagttaccaggggtgggagggggttggggagatgaagtttattacagaatgtcttctgtattcacacctgtggagaaaggaaaagaagaaggattggcccaagaaaaagtttggcttttactcagtcccaataaagggctcagctgacccagtgggaatatttcaaactgagatgatacagcaatattttcacagcagaggacaaggcttggggctgaagtttgtcagacagcagcgctttcagccactgagggaaataaatcgttcagccctgaaaggagaaaatggtttggaaatgattgataatggacacagaatgggatcaaaggacaaacaagaacttttagacaagttacataaagaatgtattcatattaattttgttgatcaaatcatgttcatctaatgcttgtgtttatgttaaaatatgtaaataaaatatctaacagatgggagaatagcctgcaagaggtatgcaaaaccttggaaaatataaattatttatattttattattaaataatttattattacaaaacatatttataaaagagcattaattgaaaatttatgtctgtactaataatttttaatgataattaatggagaaacttgatt

SEQ ID NO: 479749 - DNA, 1075 bp, Homo sapiens
acaagatcagacatagaaatgtctttgtcttttgtataatcagcgggctcccaggaaaaagtttcttctccttttgtgggcatgaacacagtgggctccagcagattctgttgggcacttttcttttttttggactggactgctgatgatcagcttctaaatagatgcaaggactggtgtggcttccttctgcttgctggaagggctcccaatgggtcattagggatgagggtttctgagaagcaaactgcagtgactgttatttttcttctgaatctagccacccagcagagggctctcagctgtggataccagcacctgctccagtggaggcagcaggaaagtgaagtagactatgctacaagcctctcagctgagaaaacaagccgactcacagttctttggctgtccgtggagcctgtagcagcaattcacctttttcaaagggtctgtggatcctctaggctttcctggtatgttcctgcagtagtttttgaagttcacgatggacaccaacagtgccgccttcaatctgtggccgaaggcctgagagcccctggcaaaccactgatggaggtgagttcccccagactccaggtgggtccacagagtgaagaaaatgaagtaggacatgaagaaaacactaagaagaaaccacaaagccataaaagtcataagtaaaaaaagtcatgaataagtagataaaaagatttacagttgtaaagtaaagtagttgattagtagtggcaaatgagtaaaaaataaataaaactttattgctgaagatataagagaaatccccaagataatcaagcaactagatgtgctttaaacactgatgaatttccaaatttccatttatttaaggcctaatttctagtcttcccatgaggccttaccttatgtatttacctaagcttctgtgaagcattgcactggatttaaaataattgcttttctttttatttccgtgtatgtcttaaaaaatttttaatgaagattttggatttcacatgtaatattccaactttgccagctaatacacaaagaactggcttctagcttgtctttcaga

SEQ ID NO: 479750 - DNA, 596 bp, Homo sapiens
tctaccagcatgccagcgtctatcatgtgctgttttgccagcgtgctcgcctcaatgatgttgctggcctcacagaatgaaaagacagccttcaatctctgggattctttccgctgcctggtctactctaccattaatacttatgattgcattttgaagttattgtgtgtttttcagctttatcaagatgtactgatctgttgccagccagaaagcacatgtaggagatggctggagaccctgtttgggagttctcactcagacaggaggaatgggattagggactcacttaaagaagcagtctggctgcttttttgtaaagcagctgtgctgttttggggataccttcagcccctgatagttttaggcttcccaaggcccacagctacaaataaaattaaaaacctagtaattaaccaaagaagtaaaaaatctctacaataaaaactataaaaaactgattaaagaaactgaagagggtacataaaaaatgaaaagatacattatggtcatggattggaagaatcagtactgctaacatattcatactatccaaagcaatctacagattcagtgtaatccctatcaaaatatca

SEQ ID NO: 479751 - DNA, 968 bp, Homo sapiens
actcagccagactcaggaagacaatggggacaacctgcctacaaataggagctacccactctggctgtaatacaaacagggctgaaacacgcccctcgtccaccacattgcaggtgatgagaaggagagaagagagaaggagagaagagagaaggagagaagaggtgcagcccttcagggagcccagacttagaagctcccaaagccagggctatgacatcctctttggggctctgtggttcatggcgccaccatgtttcctagtgcccacagtggaagctgcttgtggtacacctgatccaactgcagcagggagccagcacctgtgccagtgcctggagctgcctgccccaccacagcagctggtgtgcctggctgtgcacagtagccagattccatgcttgctcattcacacatctcttaccactccatgcctggctcacccttggcaagcacgggatccgggctggtagcatgagccgaccacagcctgccaggccaagtgggcggaatgagcccagtgggcctgagcaaaactcaggcaaaggtgccaccagccccagaggcttctggctggaaaagtgacaccccaaggatcccgtgacaatttccttcctagtttgctgagggtttttatcatgaaagggtgttaaatattgttacatgttttttctgcatctatcaaggtgattatgtgatttttatctttcattctagtaatgtggtgtattgcatttattgacttgcatatattgacccactcttgcatcccagggataaatcccacttggtcatggtgtataatccttttaatgtgctgttgaataatgtttgatagcattttgttgcagattcttgcatcagtatttatcgtggatatttttctgtggtttttcttctcttgtagtatcattctctggctttggtattaggaaatgtgttgaaacatctataaactccaacctgaa

SEQ ID NO: 479752 - DNA, 1724 bp, Homo sapiens
agctcctttagataaaccataactaggctgggcgtggtggctcacacctcttcagccatattttactttcagttccttggaggggtgatgactaatctgctgaccatctcccacgcagcaccctctgcctgaaatgctctcagtctttcctgcttctcctcctggattatatcctcaagatggggctggttggtcaccagaaaaaccaactgattggaaattttaccccagccacagacttctgggaagctgcaggtctgttggattttgttggaggtccactccagaccctgtttgcctgggtatcaccagcggaggctgcagaacagcaaatattgcagaacggcaaatgttgctgcctgatccttcctctggaagcttcgtttcagaggggcacccggccttatgaggtgtcagttggcccctactgggaggtgcctcccagtcaggctacttgggatgttagctttgcaggtcttcatattgaggatgatgaacctttgattttaaagacaaattgtgataaaagaatcctatactgctataaaactgatggcgcctatcaaagcattgagaatttacattttgtaaaatacccatgagggcaacttaggacctaactagtaaagaaggaggttctgtatttcgtaaacttcctccaggataatttcaaacgatgccattgcgatatgaatatttgaagcctttggtgccattctgttccaagtgtgttctaaagcaagcagaaaccctccaaaaggatcagaagaaatactcttctgtattagaattatttatctttagagatagttgccagaaattgctttctatagctaactactaatttttttcagtcttgcaagtttttagcctgatgagttgcaaaatgatcagaaatttaaaacttattgatatttgagttgtgttttcatttatgtgactatccttttgcaattttctatatagccacagaagacagggttccatatgaaaccaaaccctctagaggactaatattattctcagattaatgaatgcttcttcttttgataaagcccccaaagaggaaaaatagaaagaatgtttgcaaagataaaggatcattgaaagtatattgaaatggattttataagccttacataaaagactatttaaagatttatctcttctagatttttagtgagagtacaggtatgcaatattttagagaaaataaaatattctggttagtcaaagttctgattcctagaacttgaacaagacatagaatatcttaatttaaggaatcaggattcaggaagataataataatgctgtttttttttcaaaccacaaatggtcaataaataatgctgcttttaaatggagtctaataagaaatatcattgagttttttatgtgttaatcactttagagtgtttgtgtaataatcattctagtatgctaatcattatctgttttaattcaatattacacatattgtaaacttggttctgtagaaaagtataatttaacttgcctttgtacttgtgaaaaataagatggactaattgatagaaatttacaagtcataaaatggttgctaagtaaacttattacatgaaatgaaaaaagaagggaaaatgctgacaatagagctgcatagaaattaaaataacagatatattaaaattgaatagattttagtgaattactttaatcttttttcagttttccaggtagcc

SEQ ID NO: 479753 - DNA, 1361 bp, Homo sapiens
accactactctctcctgctccccacttcactctcccatggcattgcagtgcatggatcccagctccgtgagtggaaagcacacgccggagggcgctgctgttgccactgcatacccaagagcccactcggaccctccagcagagggcgcagtgctgcctctgctgtgcaccgctgtgccgcctccgctgtgcaccgctgtgcaccgctgttactgggcttcatttgctgagagttccccttccgcagtcagccaattaattgaaggcccgaatagaacaaaaaggctgactcccaatagagaattctactgcctgtcagtctttaaactgcaacatcagttcttccttgttctgcagcaccctgctgaccttcagactcaaactggcatatcgactctgcagatttttgacttgccagcctccataatcaggctgaagtggctgactgtgtgcactgtcacatgtgagaaagtacatgtaagagtgggcgtgcaggtgtgggtgtggaaggaagcttgtatggaagcctctggaaccagaggaacttttagttgactcactgaagtagtgttgtggcaactgtgggcatttttgggaaatggttaagtggaagttaaatcatgaatacatgtagcctgggcatagtggggtgtatttatgtgatttagagtcacttttgtgtgcagttaagttattgcttgtcattctggtgtaggactagcttctgagaatattcctatcacccagtgagtcaacctacctggtggtgtgacaagaaattgtagtggtaaaagttctatctcaatacaaacttgtgtactgccccaaaatcaaaagtatgtgagtagcaaagagaaaataaagcatggaatatatgaagcccaaagctagtgtgtagcaaaatccttccaattacttaaatgtgtaaaactgtaagcaggagatttgcttttcattttcaactactcagaatggaaattctctcccatcagaaacaaactatacactttacaattttatttgtcagtgatttcataccaattattgaaaaagaaaccataaaattcataatatgctactacaatgaagacattgacaactaactggttaatgagagctgtcaattcaagaacatttaagattagtcattgtgcaagaacccttgaaatgcccccaaatattatagcttacatatcaagaaacttgatagaagtcttcccaaatttgacagttgtaaaaagcttgtatgaccttactggtaatgagttgcacaactgaaagatatttttctaagtcatggagaggcaattaaagagtataaagccaaaggattgtggcccccccgccaaaaaaaaggtgtt

SEQ ID NO: 479754 - DNA, 793 bp, Homo sapiens
atagaccacaggtgactcaagccatgccagaaccaagcagcccatgcctggctgtggcgattcagaagcaacgaggggagctatccagagggtcagtgctgaaggtctgggcagaagacctgcgagacccagatgacttggacttcagcaacctggcttttgatgcccggattgcaagaataaatgccctaaaggagagcacatatgcaatgcctgatgggttccttgcagcccaaaatgatgccaatgagctgctctgtctcgtcagggcaaccaaggagaagagggaggagtcacgccctgaagcgtacgaccttacactttctcagtacaagcaactgttatccattgagtccagacagttgggaagtgcctgtaggaaaatggcgatggctgagaaaagcccggaggagatgctcctagctatgacttccagctttcaagtgctctgttgcctaacagaagcttgcatgcgattagttaaagtcgtgaactcagaaacacagcggcaggaaattgtagggaagatcgatgaagtggtcataaattacatttgtctactgaaagctgccgaagcagccactggaaagaaccctggggaccctaatgttggactctcggcgcgacactcaaccaccatggccgctctcattgattaaataagaattacatttctgtgactaaatctcagtttgaaaagaaaaaaaatttatttttgaaaccaagcctgtatatgtcggccattcgtgttgttatgaaggattgctctatattttagaaggatttttctatt

SEQ ID NO: 479755 - DNA, 709 bp, Homo sapiens
gtaggtagcattggaaaaggcaacattcagttggtgtatccgggctgctaatgcagccaccatcttcaatgttgtcagttgctgtggcagaagggaaaagagagccctggagagtcgtggggcttcaatcagtgctcagcctggaaatgacactcgtcacttccatattcagtgggccatattcagtgaatatggtgtcagccaaagacaagatcaacccctctcacataaatacaaatccatattcaatcacagtacaagccagttctagaccttatgtctggtatttaccaggggttgcaaatatttggaaacatgacattgacaaggagtatgcaggcctgcggggaaaaaaaaaatggaagaacttggggttaacagaacctaaaatctatgaggcgaaccctcgaagggctggggcccaggcctctgaggaagtagctctcactcaatcagctggtgctggtacctttaagggtcgaaaaataatgcagctatagaaaacagccaaaacactaggcccattttcctgatatgatcaaatttatgtctgaattacaaattgccaaaaaaactttataaattctttttcattttgccatacagtgctttataaatttatgaaaaatatacaatgttaaacagtttaatatttttctaagttcataattatgactcatttttctaagttgaacagaaacagtagaaa

SEQ ID NO: 479756 - DNA, 845 bp, Homo sapiens
agcagcgtctctggcctctccccattagataccagtagtatatcccaagttatgacaaccaaactgtcttcagattttgtggaattcttgttcccagatagtctgagtttaatgagaaatggctaccccgcaccactacctatccaactgggcaaacaaggaaccacggtatcatcgaaaccattttctttcctacccatgcccacccttccattgattttaattcttgcaaacgtggtttcactgtttgttatgttattctgtgtgttttctatccttgaaatatttcatgaaaatataacaaaagaagcaaatggcattggtaaattggggaacggaaggatattcaaagtgggaacagactatagccataccaccctgaatgtgcccgatctcatcaaagtagaaatagaaaggggtcttgtgaaaacgcagattctgatactacaggacttgggtgaggcccaagaatcagcatttctcacacgctgctcacagctgccagaggatgctgatgctgctgatgctgctggtctgtggcccatgctttgaagagcacattctgtggccaggcatgggtgaggtgcttggcttttcaaaatctcctggaattctcacaaaatccagcaaggctggtattatctggctacttgcatttttttctttttactatattttctatgcatgtgcatggatataagatatatgttcctacatatatcttcagatatattgttattttagcagctgtcactcagaaagaaagctgtcattgttaagaaaaatcttggattaattaaaatgaagttattatttttgcaggtcaaagatgatcaaatatcagc

SEQ ID NO: 479757 - DNA, 678 bp, Homo sapiens
tttctccgtgggccacaagaatctgtctgtgtggtcaacgggcagaatgctaagatcatggcattgagagagactccaagcctggggaaagagcctagaatgccacccactgtgatgaaaacagccagcactcacaatagtgaggggccattcgatatgggtgcacctatccacagtgccttcagcaaatttgctgcaaaaacagtttttgtggggtttgtagcaaaattatatgataagaaggacacgaaccgaattccttttttaaaggactatgctggtttttgtagcccctggctgtgtagtgacaacaaatgcatgctaaggggcagtccctgccatgaaactgacactttctcctgccttctcaaccgccagccctcacctgtggggagctacccccacgactcttgtcctcttcttttgcctttaagtgaaacccacctgccttgtgagcccttgagctaaacagctggaatatggactcataagtctgggattgctggggagtgtgggcccattgagaattttgtagaagaccacattagaagagcatggatcctacatcttggccttctttgcgtcgagaaagcaaatctttgtgggggaactgaagttaagctttgagtatggaagatggaccctgagggtacatttttggaaccttacctagaagcc

SEQ ID NO: 479758 - DNA, 632 bp, Homo sapiens
acacctacttaaggcgctacccacccaccactcctgttctctctgcttggactgcagaaacgccttcacgtgtcagcattggcttgaagatccagccaatggccaagatgttaataaccatgctgccacaagatggcgcccaccacccaatatctcgggcttcctgatcagactcgacgcgtgcttgtgacacagcctcaggatgtcctgacgacatgtgcccaaggtggttggggcacagcttggttttacacatttttgggagacatgagacatcagtcaatctctgtaagaagtacattgattcttccagaaaggggggacaactcgaagcagggagggggcttccaggtcacaggtgagctctctgtgacagggatcctttgttctggattgatggcttgcgtttcttctttgctacctggaggcactggagagttgcaagagtgcaagtccaagctatggcctatggaattcatgcacctgctcactctcagctgcactgtctgcagtgtgaattgctcagctggagagggtgtgagtaaccagctccctcaagccccaacaattctgaacacttagttttataactaatctatacaaagcatggctatgagcttatcggtaattct

SEQ ID NO: 479759 - DNA, 2559 bp, Homo sapiens
tctctacaacaacatgattgcaaaaatccaagaagatgattttaataacctcaaccaattacaaattcttgacctaagtggaaattgccctcgttgttataatgccccatttccttgtgcgccgtgtaaaaataattctcccctacagatccctgtaaatgcttttgatgcgctgacagaattaaaagttttacgtctacacagtaactctcttcagcatgtgcccccaagatggtttaagaacatcaacaaactccaggaactggatctgtcccaaaacttcttggccaaagaaattggggatgctaaatttctgcattttctccccagcctcatccaattggatctgtctttcaattttgaacttcaggtctatcgtgcatctatgaatctatcacaagcattttcttcactgaaaagcctgaaaattctgcggatcagaggatatgtctttaaagagttgaaaagctttaacctctcgccattacataatcttcaaaatcttgaagttcttgatcttggcactaactttataaaaattgctaacctcagcatgtttaaacaatttaaaagactgaaagtcatagatctttcagtgaataaaatatcaccttcaggagattcaagtgaagttggcttctgctcaaatgccagaacttctgtagaaagttatgaaccccaggtcctggaacaattacattatttcagatatgataagtatgcaaggagttgcagattcaaaaacaaagaggcttctttcatgtctgttaatgaaagctgctacaagtatgggcagaccttggatctaagtaaaaatagtatattttttgtcaagtcctctgattttcagcatctttctttcctcaaatgcctgaatctgtcaggaaatctcattagccaaactcttaatggcagtgaattccaacctttagcagagctgagatatttggacttctccaacaaccggcttgatttactccattcaacagcatttgaagagcttcacaaactggaagttctggatataagcagtaatagccattattttcaatcagaaggaattactcatatgctaaactttaccaagaacctaaaggttctgcagaaactgatgatgaacgacaatgacatctcttcctccaccagcaggaccatggagagtgagtctcttagaactctggaattcagaggaaatcacttagatgttttatggagagaaggtgataacagatacttacaattattcaagaatctgctaaaattagaggaattagacatctctaaaaattccctaagtttcttgccttctggagtttttgatggtatgcctccaaatctaaagaatctctctttggccaaaaatgggctcaaatctttcagttggaagaaactccagtgtctaaagaacctggaaactttggacctcagccacaaccaactgaccactgtccctgagagattatccaactgttccagaagcctcaagaatctgattcttaagaataatcaaatcaggagtctgacgaagtattttctacaagatgccttccagttgcgatatctggatctcagctcaaataaaatccagatgatccaaaagaccagcttcccagaaaatgtcctcaacaatctgaagatgttgcttttgcatcataatcggtttctgtgcacctgtgatgctgtgtggtttgtctggtgggttaaccatacggaggtgactattccttacctggccacagatgtgacttgtgtggggccaggagcacacaagggccaaagtgtgatctccctggatctgtacacctgtgagttagatctgactaacctgattctgttctcactttccatatctgtatctctctttctcatggtgatgatgacagcaagtcacctctatttctgggatgtgtggtatatttaccatttctgtaaggccaagataaaggggtatcagcgtctaatatcaccagactgttgctatgatgcttttattgtgtatgacactaaagacccagctgtgaccgagtgggttttggctgagctggtggccaaactggaagacccaagagagaaacattttaatttatgtctcgaggaaagggactggttaccagggcagccagttctggaaaacctttcccagagcatacagcttagcaaaaagacagtgtttgtgatgacagacaagtatgcaaagactgaaaattttaagatagcattttacttgtcccatcagaggctcatggatgaaaaagttgatgtgattatcttgatatttcttgagaagccctttcagaagtccaagttcctccagctccggaaaaggctctgtgggagttctgtccttgagtggccaacaaacccgcaagctcacccatacttctggcagtgtctaaagaacgccctggccacagacaatcatgtggcctatagtcaggtgttcaaggaaacgcaacgttagatggttttgatggtaaaccctaaaggaggactccaagagtgtgtatttatttatagttttatcagagatgacaattatttgaatgccaattatatgga

SEQ ID NO: 479760 - DNA, 2983 bp, Homo sapiens
ccagagtcatcatgtctcctgagcagaggaatcagcactgcgagcctgaggaaagccttgaggccgaaggagacgaggctttgggcctggtgggtgtgcaggctcccttggctgaggaacaggaggctgcctccttctcctctcctctgacagtgggcaccctggaggggctgcctgctgctgggtcacctggttctccccagagtcctcagggaacctctacctcccccactaccattgacaacactctatggagccaatctaatgagggctccagcagccaagaggaggctccaggcacctcaccagacccagcagacctgaagaccttgttccaagaagcacttgatgggaaggaagtggataccactggccactcctacatccttgtcacttccctgggcctctcctatgacggcctgctgggtgatgatcagagcaagcccaatgcaggcctccagataatggtcctgtgcacgattataatggagggcaactgcacccctgaagaggtcatatgggaaaccctgagtgtgatggggctgtatgctgggaagaagcacagtgtctatgggaagcccaggaagctgctcacccaagactgggtgcaggaaaactacctggagtaccaccagcaggatgcctgggtctgcagcgatggtttgggtggctgcagctgcacccaggggagtgaggctcctgtctgctccatgaagcgggaggcctgtatccaaagctgcgacttgggtagctgcagctgcacccaggggagtgaggctcctgtctgctccatgaagcgggaggcctgtatccaaagctgcgacttgggtggctgtggctgcacccggggagctcccaccccaccaactcggaaggggcagggctcccacttgtccctgcctcatgctggttccaaggagtgtgcagccctggctgcacctccctgttgtagttcatatgatggtagcatccactccagactggccactgctgccttcagtgagacatactgggaaaccttccatattgctttgtgacttataacaatataccatggcattggaatagatattttcttggcaaatgtaagaaattatcaataagattgatggggccataaaataaaaggaaaagtctgctaattctagcctttttatccattttcatctgttgttctataaaaattgaaacatatacatataactggatttgcttcgctttttgaaggttgtaggagaaattacaacttaaacaaaagacctgctcactgagtctttctttccacaacttttatgagcatctcctctttggaaggctctgggttagtagtggagttactagaataagccagagaaacccctacccttagagtagtagagtctaggagttgcattcatgtaattaaggtggcgagatgtcctctaagatgcagaggaaaagtaagagaggggtgagggtgtggggctccaggaaaatccttgtttgcaaagtgcctaatggcacttgcacaagtcttcagaaattcctcccagaaatgaagaggattgctgtagtaataaattataatacagttgacctttgaacaacatgggtttgaactatgtgggttcacttatacacagactttttaaataaatatattggaaatttttttggagtttgcaacaatttgaaaaaactcacaaactgcatagcctagagatataaaaaaagagttatgtcatgaatgaataaaatatatgtggatactaggatattttgttatttagtactataaaatatatgaagtctattgtaaaaggttttatcaaaatttatgtacacaaaaagttacagaccgtacatggtattattcacagtcaagataaatgtaaacaaatgttgagatgtagtattaaatcataactgcataaaattaactgtagcataagctgtgctactgtaataatttcatagccacctcctgttgctattgcagtaagctcaagtgttcttctatctgcttgaaaagccatgggacgctaattatctccatgtgaggagtttgtctctccagtaaattgcgtatagcagtaaaaagtgatctctcatggttctcacgtattttccatcatgtttagtccaatactttaaaacttgaataacaccattggatctatacaatgtgccactagtgatgctggaattcctgccaagaagcagagaaaagaaataacattataagaaaagttgaattgcttaacatgtaccgtagattggatttgcagctgtagttgcccactgtttcaagattaatgaaatctgcataagaaccattgtaaaaacaaaagaaaaaagaaaaagaaaaagaaattcatgaagctgtttctgcaactacatcagcaggtgtgaaaaccttgcacattttgtgaaacacctttttatcccatatggcaaatgcagcctttatgtggtgcagaattgccacaagaaaggcatacctatagattctaatatgaatccagaaaaatccaagttattatatgataacttaacgcaaaagatccgtgtagaatataaagctggagaatataatgccagcaaaggatggttcaataattttattatgtatatacatatatatttaaatatatacataataaaatgaaatatatatatgtatacacattatatataaactgggccaactgaggccagatattggggagtatgggcaagtttgggcaaagcacaggtatatatatatatatatatatatatatatatatatatatatccatatatatatacccactgggatagaggcagtggtttgataatcttagaaagagatttggcttgaaaaatgtcaagataacaggaaaagcagcttctactaaccaagaggtagcagacaagttcccagacgtcattaagaaaattattgagaagaaaacatatctgcctgtacaggtttttaatgcagatgaaaataccctactcc

SEQ ID NO: 479761 - DNA, 5301 bp, Homo sapiens
tcagtgtcgggttgggaagacgtgctcagtaaatatttgtgtgctgtaacctatgttaggtgctttagatgctggcggtctcagcatggggtgaagaagggcttgtacacttaagatgccttacagtactgtgcagtgctgtactgcgggggccaactctggggacctatgccttggctgcttagtgcagccattgctttggagagatgggagagaacatggcactaaggcagaatatggctatatttactttgaagagcatgtctttgtcatagaaatagtcactgtcatggtttggtgggtcccaaggcatgggtcatggctccagatcccctttccagccttttggatcttggagaaaaccaccctgtggctggaggcgaagtatgctggcagcaatactgctctgttactctttgctacactgagttgtttgggtaaagagaaacataaatctagcctgcgtgcacatccaggcacagtacctttccttgaacttattcatgatacagattcctttgctcacgtttccctgctgaccttctccccacctgttgccctgctacactcccctcgctaagatagtaaaaataatgatcagtaaatactgaggtaactcagaggctagcgctggtgcgggtcctccgtatgctgagtgccggtcccctgggcccactgttctttctctatactttgtttctgtgtcttatttcttttctcagtctcgtcccacctgacgagaaatacccacaggtgtggaggggctggcccctttcagtatctcagaagggacaaagtacacaaaggcatggggtcatgatagtgcctggtatgttcaggtagtgaagaggtccatgtggtatgagcactgcagatgatatgtgtcgtatgaattaaaaatacatagttactgcaaatagtttttacaggttattgtttttaagaaagcagtatctaatgcacgagtgtactgtcagtactgtcaatgaactacttaccactcaagtgactgcttatctgttgttctgtcctctcaagccacctacagtcagaaaatggtcttgattttactgatgttgctgttaataatagctgtgacttcttgagtacccaccacatgccaggcccaatgtaggggctttgcatccattatccatgatctttacaacaaccctgcaaaattaggtatcagccttattttaaagtcttgacagcttgtgacttccctgaagttgcataggcaggaagaatctaagtcaacattcgaatccacgtcagtctcatgaagcctgtgctctttcctgcgtgccatgccatagttctagttaagtgacaactcctttcctccatgacattgtagatccagtatgctaaggaaccctctatttacaaattgtaagtgattaaacaaaacaaacctgttagtggcgcttatacatccaaatgagtgttgttattcaaagaggttacttggggaaagagaatgtatacacctattccattgttcatactccttgttactcatctggaattccctttaaagtcagtttacatatcacataagaagatccatctcattgctttatgatcatctatcattttcaaccaaaatagttccacctagtttgatcacacatcttattcactaaccttggctctgactgactgtttgccatttccaaaatttgaatccaccctcagtgaaaatttagcaccatttgggatagtcagaagatcagactgcaggttctcaaggtgcttccaagaagaaagcttcaaagatgatttgagtaatgaagtaccattggaattactgcattgcctcccaaggggactggttaaaggagagaaatctcatttgaatgtataatttccagttttaaaagtatcattcctattacttgataattacacacacattgttcttagctgtgttctttgagggccaggatttggaggtgctgaattacgtgctgaatgagtggatgttgggtacaaatagacatctaccactgggaagtctttgttgtacaggagagaccgtggattgaaggagttttagatagtttcctaggactccagaagttaagctttttaatatggagcttgagttttctaatcattttgcctgatatgtcatgcctgtacaagatgactggaatttaagacaaaagcctcgaactctggagatagatgctttataagtggagactcatactttgtcagctccaacctaatagtgacaacaatgattgctaaatgagattattacctacaatgtggcagaacttttgtctttcataatactgctaaagctagaatgggtaaaatgtatcatttacacagtgctttcacatacccttgtcttaatgaatcagtatatgaggaatcagatgaggagacagacctgggggaaaataactcacccaagaccacaccgctgatgaatggcagttgaggaacttaaatgcagatcttcctactggcctgggctctgcttttatttggcttttgtgcttttttgtatctactggttaaatgctcttaaacattttttatcttaataaaaccagctaaagtctccactaaaagactttaaatttggttaataaggtgtaagaggggcagttcccttgatagtttgtgagtatgtcaggttgtcatttggagccattctgtcaagctttagactgggatgtgccatccaaagtttgtgtgtgtgtatgtgcttgtgcgtgtgtacgtgcatgcaggcatgtgttaatgcgcgtgtatgtgctccagtgaagccagcagcttccactggaaaaaaactgataggtctaaaaagagtccagctgcattcttatgatatgcagaaaacagatactagaacttttacattcagagtcatcattcctttgctaagtatattctctctctccctcccttcttccttttctccctccctattctcccaaccctgcaaagtggagagagggaatttgagcctgagcagaaagctccatgtaaatttcagagaggatactagctttggcccaggtagcactacttagtgattcatcgtatactaacactacagattcaaatgagagtggaataaatccattctaaaggtgtaactggaaaagtgaattttaagaagtagtgattaatgttaaaccagaacctcccatttctcccaggtttgtggagaattaagcagtctatttttatacttggaatctggtctgaatgtttcttgaaaagtaactcaaagtagtttaggctatgaccataagttatttttgtaaatacattttcttatcactgtattattgcatattattgtgtattcttttgcaaatcaggcttgatatttccttttggctatgcagtcaccttttagactttgcttgcaaatatattgatatagttaagatactattctttctttccccaactaggagtgtgtatgaattacatcttttgaacttactgattgtattactttgttttacttgatcaactttgtagtttaatttttttaaaaagctagctgttgggattactgatcagtttcatttttatatctatatttctacttttagttttattattttcatgttttggctttttccccaaatttcttagaaactcagtttactagttttcttttgcctctttttttttttctttgttttctacttttacttaaacattttaaatgaacacattttctcttgagttttgttttggcagctgcccaggtatttttatgtttcaattgtattttagtaactctactaaactgcttaacaaatcagtattgaaaatgatccattttttgtcagtgtttttatgaattgtataaaatgtctacctctggtctctactgattacaatctaccttacacactcatatgtatcttctgtcactcttgttgagaaaatctgcagtggccccatattacctattaataaattccaaggactttaccttgatattcacattcccctaccatgttaccacagccaacttctggcttattccccccagtaccctttctcctgtctctgcagcaccctacccaccacgatttatagaaagtattctgtgtgttccagtctgctggaattggagaggggaggataaagaggggatgagcaatgggtacaataatacagttagatagaaataataaatctagtgtttggtagcacaagagggcaaatatagttaataatgtatatttgcaaataactaaaagagtggaattgaaatgtgcctaacacaagtaagtgatcagtgcttgaggtgatggatatcccagttactctgatttgatcattacacattgtatgcttgcatcacagtatcacgtgtaccccataaataggcacaactgttttgtatccataataaataaaaataatttttaaaaaattggaaaacatcttattccctttgtctggaattccttattcccaacttgttgcccagattccacttctcttcccatctctctcagggaaattaatcttccaagtcccctagtttaccatatgtagttacttgttgatacatcatctccctctgttcctattagtctgagcatcttgagcgaacgcattgttgctcctttttatgtatctcacacatttcaggcactcaaatatttttaacaattgtaaattagatgtgtgtttattgtgtattgctgccccatgatcctttttttctccctggaaaaactatatatatgtaaagcaagtatgttttcttgttctgctacgtaattatcttcatataagcttgctgttttttaaattttctcgttctgctacttaattctcttcatataaccttgctgttttttaaatctactcttgtgttcatttccgtattttccttaggaactttgtctgttttatctgtcatgatttaagagtagcatgaggaagcccacaattaaaatatttctgtgtatccttaaaaaagaaaaattgtaaaattatttccatattccatggtcatgttaggtttttgttatttaggttttccttattagtccttttagcattttaatactttcggctttgaaatctaatttatctaattttaaagatagtaaattgttgctcttgtcttcatccaggcgtgctaaacctctgtcatctgatttctgatagttggttcgacttttgactttggttccaagcgtaactcttgaatgtaacaggtttactttcttaatctaggaagcaacctttctttttacagagctgtggtaggcagaataatgacgcccccaagtatgt

SEQ ID NO: 479762 - DNA, 1613 bp, Homo sapiens
tccctgagacagcagctggggaatgaggaaagtcaaagattggatgccgagaaggaaagcagagcctttgggggcaggggagagggagcagaaggagaaacgtgtgtggagtttaaagccatgttgattgcagtgggcatccacttgctcttgttgatgtttgaagttctggtctgtgacagaatcgagagaggaagccatttctggctcctggtcttcatgccgctgttctttgtttccccggtgtctgttgcagcttgcgtttggggctttcgacatgacaggtcactagaggagagccgagtggcctatgcacagctgggtctgctatgcagcaggaaggctaagttggagacagatgtgagaactaaccatgaaggaggagggggaaaaggagacagaaggaattaccagaacactccagagggctccaagactgtatggtgggatctagatggccaggaggaggggagcaaaaaggaaagagtcatccacagtatcagtaggatgccagttgaagtgtttttgctgcctcccggttatcggtgactttgatgaaagctgtcttctggtggtcatgggggtggaggccagatcacaaggaagctgggaatggtagatgagatagtaggggcttgcatattcattactgtctcgcagagagaaacctgaggctaagaggggtcttggatcaaaggatggggtgggtttatctggtttcggggcttttgtttttaatgagaaggagtcatttctgtgctgctaggagggatcaatggaataggtggggttaaagatacagtacggaatctacagttgatggcttgatgtgacaaggtcctcaaggagcctgaaaggaaggggtggggtccaagggcaaaaccgaggtatgagaagaaggatgcacaaggatggtttcgagtagacagtattgttggtagggacatgaaggaagtttagtggtctattgcagctagcctgtgttcccagtgaacctggaaacaaggttctcatctgtgctcaggcctcaggccagaaagggcaaggcagcagaggggcaaggcagcaggctgagccccatttccccttgccataatactgctgtgcccctctggtaccgaaaatcaggagtttccagtgcaatataatattatacaagttacactgtattataatgtgtattgtcttttagtgtgttaaccaaattactgcagtattaaatgcaaattatactttgtttaactgattcttctcttcatttttagttagaaatcctgtgttctgtcaacattctccagtttatattcattgccttaagactggacaagatcatccactggccctggcttgtatgtaacttttaaaatccttaaataaacttcttttttattataaaagtaattcatattcactgtacaaagcttggaaaagacggacaagcagaagtaatagcctaatagtcacccataatcccaccatggggagataacatggttagtgtttttatgtctgtgttttatacaaacagtttggatataactgtgtgcaccattttgtatcctgatttttttgttttaatgttgtatcataaacattttatcatgttaataaaa

SEQ ID NO: 479763 - DNA, 631 bp, Homo sapiens
ccgccgtggcgagtgacaacagtccagtgacccagccggccggcgagtggtcagagggcagccaggctcacgtcactccggtggccgctgtccctgggcctgcagcgctgcccttcctctatgtccctggatctcccactcagatgaattcttacgggcctgtggtggcccttcccacagcgtcccgtagtacccttgccatggacaccacaggacttcctgcacctggcatgctgcccttttgccatctctggggcgtgcagagagccccaacacccacacaccagaacccagaggtatccctgcctgtgatttttaatttgacagtaggtggcagagtcctgggagacgtgggaagaggccataagagaatgcagacatgggaatggattaatccagagtccagccatggtctgcaggtggatctccctgtctcggcctgctcacttacaaatgggtgctcatttacaaatcggtgtgaatcacatttcatcatttgtgagctccttagtttccaagaagtacagttttctcatgtgtttcttggactttatgcatatgcctccagagtttgaatcatgcaaagatgctgccacttaaaaacctctttcctacaaacttacacccctcc

SEQ ID NO: 479764 - DNA, 1496 bp, Homo sapiens
gggacaggctaaccaggaggacaggagccccaagaggccccagagcagcactgacgaagacctgtaagtcagcctttgttagaacctccaaggttcggttctcagctgaagtctctcacacactccctctctccccaggcctgtgggtctccatcgcccagctcctgcccacgctcctgactgctgccctgaccagagtcatcatgtctctcgagcagaggagtccgcactgcaagcctgatgaagaccttgaagcccaaggagaggacttgggcctgatgggtgcacaggaacccacaggcgaggaggaggagactacctcctcctctgacagcaaggaggaggaggtgtctgctgctgggtcatcaagtcctccccagagtcctcagggaggcgcttcctcctccatttccgtctactacactttatggagccaattcgatgagggctccagcagtcaagaagaggaagagccaagctcctcggtcgacccagctcagctggagttcatgttccaagaagcactgaaattgaaggtggctgagttggttcatttcctgctccacaaatatcgagtcaaggagccggtcacaaaggcagaaatgctggagagcgtcatcaaaaattacaagcgctactttcctgtgatcttcggcaaagcctccgagttcatgcaggtgatctttggcactgatgtgaaggaggtggaccccgccggccactcctacatccttgtcactgctcttggcctctcgtgcgatagcatgctgggtgatggtcatagcatgcccaaggccgccctcctgatcattgtcctgggtgtgatcctaaccaaagacaactgcgcccctgaagaggagcacatgttctacggggagcccaggaagctgctcacccaagattgggtgcaggaaaactacctggagtaccggcaggtgcccggcagtgatcctgcgcactacgagttcctgtggggttccaaggcccacgctgaaaccagctatgagaaggagcgcctacaaatgctcatccacatctttgatcttctctttcctgggcacaagggacgaatacataatcagcacttctgtctggcatcagcacgttcccgtgtcacagtgcccttccccggtcactatcatgtttcctcccttctgactctgcgacctgacctgctgcttgctcttcactgttgcctccccctggaggctgggcagacccccctgcccttcctgcaacatggagcattcctagcccttgaagtagtcccctggttctcgcacggctcgcccttagtccagtcccacagccgcaaccattctggacggtgactttagacacttggtcctccctccctgggagaattctactctgtgtattcccagtgggctgtgagaagagtccaatttgacccataagctcctggttgggttgcagcccccaggattgagagagtattttcgcagtcagttgcatatttgtagtaggattttatt

SEQ ID NO: 479765 - DNA, 3624 bp, Homo sapiens
actcaggacaccttggactccagatcactggggacctccgcccttggaggtcccacgcacgatggctgcatgtggtgcatccctgcctatgccttggagacaacaaagaggagagggctttggttctcagcggacaggccggccaggaggtcagaagccccaggaggccccagaggagcaccgaaggagaagatctatctgtgggttcctccccatcgcccagctgctgcccgcactccagcctgctgccctgaccagagtcatcatgtcttctgagcagaggagtcagcactgcaagcctgaggatggccttgaggcccaaggacaggaggctctgggcctggtgggtgtgcaggctcccgccaccgaggagcacgaggctgcctcctccttcactctgattgaaggcaccctggaggaggtgcctgctgctgggtcccccacaacaacactctatggagccaatccagtgagggcaccagcagccgggaagaggaggggccaaccacctagacacaccccgctcacctggcgtccttgttccaatgggaaggtggctgagttggttcgcttcctgctgcacaagtatcgagtcaaggagctgctgaggaagctgctcacccaagattgggtgcaggaaaactacctgcaataccgccaggtgcccagcagtgatcccccgtgctaccagttcctgtggggtccaagggccctcattgaaaccagctatgtgaaagtcctggagtatgcagccagggtcagtactaaagagagcatttcctacccatccctgcatgaagaggctttgggagaggaggaagagggagtctgagcagaagttgcagccagggccagtggggcagattgggggagggcctgggccagtgcacgttccacacatccaccaccttccctgtcctgttacatgaggcccattcttcactctgtgtttgaagagagcagtcaatgttctcagtagcggggagtgtgttgggtgtgagggaatacaaggtggaccatctctcagttcctgttctcttgggcgatttggaggtttatctttgtttccttttgcagtcgttcaaatgttccttttaatggatggtgtaatgaacttcaacattcatttcatgtatgacagtaggcagacttactgttttttatatagttaaaaaacatggagcatccctatcccctgcagaacccccctagctttcccacggctcaccttcggtcctgtcccacagccacagccacctggtcctccctccctgggagttctatacacattctttattttcccaatgggctgtgaatagactatactttgcccataatctcctgactcttgggaaacagccctgaaggtggagagtagatttttaagccactcacatatttgcagtaggattttaatgggcttcttatctgaagctgggaactgaacaggcaaacaaatagatagtgctcagaaattccattccttcgtaagaggtagaagaggagcacccatcctctaaagctgaattcttacaaacactgggctcctcccggggtatgagaaatgcgtccttgatggacatgccacctggaatttgaaaagaatgatgaatcactcttccactgcctcctgtctggcatctgcacccagggacatactggctttcagtgtgactagtggcacctgcacaggtgtttaggcaagaacagttatgtggagagaagcagatatgtcacgtaagattctgcccctgcatcaggtggaaggaggaaatccgcagcctcctgagatgatagatggcattgcaaagggaagtgcggtaaatgctatggagtatggaaggtgaaatctccctgctaacttttgcaggatcttcttcaatttgatgggttaatgcatttgaaagcatctgctacgtggtagacacttgcaaattcagagaatttcaaggcaaaactggtcttctcagaaccgtctataagaaatgaagagtgtagttatcataacaaattagagtttgtatgtagcttcttctacttctggctgcgttcatagccgttgtttctccacaactatattgttcaaatttctcatattgccatgggacattttagctagtctgatctattgaaaaaaataacacttggtttcatcaattgcatttattgtttccagaagtttctgaagtttcaatttcattaatttttctcttcctgtctatatcatcccaatccttttgttttcctcaggtttaatttacttttatttttctaattatttaacatcaatgattagatgttttatttgagccatttgttactttcttacataagcactcaaggagataaaaattaggcactacgttagctgatttccacatattttaaaacatcatattaccatttttatttatcagaatatattttctcattttccttaataattttttaaacaaagaagagtaaaaatgtgttgtttatttaaaattacatggagactttacaaatatgtcctttgttatatttttattttattctggatctttaaaatttccactttgtacaatttcaattattaaattgaaatgtataatttgaaatgaatacattttcgtattaaaacgtatattttgtacaacttcaattattttaaatttgttaagagttgttttacggtctatcttggtaaaaattccacatacacttgaaaacaatatttattctgctgttgttctgtgacgtgttcagtaaaagccagtcagctcaagttggttctttgtgttattcgggttggtctataaccttgcagagtttctgtgtacttcaatcatttactcagagaggagttttgcaatctccaaatgcaagtgtagatttgactatttattctttcaattctatcagatgtttcatgtattttaaaacaatgcttttaggtgaactaacaggattatgatgtattttttgttaattgactcttttatcattgcataatgtccctatttatccagggtaattttccttcccataaagtttttaaaagtttacttttctgtttttccagctttctttttaattttcaattttattatttaaatggacaaacagtgtttttttccttttctgtccaattctgtgggttttgctcatgtatagattcatggaaccaccatcacaatcttcatacaaacaattccgtcaccctcctctccaagagaaaccccttttacttgctatacacttatagttatacccacatgtctacaactaacagtgggaacctctcatctgtactcactatttcagttttctctttcaagaatgtcacatgaatagaaaaaatagaatatgtacctggttgagactggctctttccacacagcaagacatctttgagtttgatacaccttgttgtgcataccagtagttcatgccttttattgcagagtagttatttcatagtttggatgcacaaaaacttcattgtccatttatccacaaaaatatatttgtgtaattttcaggttttctcaaatatgactagagctgctgtaaacattcatgtagtaatgtcttttaaaatttttttttgttattttcaaatatatgttactgtagctcatt

SEQ ID NO: 479766 - DNA, 1791 bp, Homo sapiens
taggttcagaaatgccatacaaaagtcaagtgctggaattggggaccccaaaagcctgtttggtgctctaccctcctgttggcatcctggtacctgaaaccaggaagtctcaagaggctcatccaaagcccttaatgtacctgggtgttgtggctgtttattcaggtcccaccacccagagaatctctctgcaccacgtattccagctggaggtggcgtcagcaattctggactgctttttctatcttttcagtgcctcattcagtgatgtcaagttaaaaccagaaacgatgggtgttcaccagatttttggttcttatgaagggacatggatggagctggaaacacttatgctcagcaaactaatgcaggaacagaaaaccaagaaccacatattctcacttataagtgggagctaaacaatgagaaaacatggacacatgtgggggaacaaaacataccggggcctgttgcagaagcaggcagggtgagggagagcatcgggaagaacagctaatggatgctgggcttaatacctaggtgatgggttgatctgtgcagcacatcaccgtggcacatgtttacctatgtcacaaacctgcacatcctgcacctgtacccctgaacttaaaagttgaagaagaaaaaataaatttgcatatagtaatttttaggatacactgttagggtcaatacatttcatacggttttaacgtatggctcatcttaccctacaaggaatattggaaaattgtctgggggcaaaagagcctgacctttgtgctgtcatgttgacaagtcttgtgaggaaagcggccctggaaaggcacgtgcctctgtgcaaattactttccagcagaggtaattcccatagaggctaatagttaaaggctttgtgccaagcctcactccacacagctagaggaaagaagtgcctcatttatttaggaaaatctgggtgaatcatcaaggcattcaccacagttttcacatttgcttatggttgttttgccctcagtgttttcatgttcatgtattggcctcaggattcctgcaccagatgaatgatataaaattgaatccatatgcccatttggtgcataccttgaacattgctttaacttttacacagaatatgtttttgtttgtttgcttgtttctagaagttccaggaaaagaaacaaatttcatgtagcttctttacaccaaggagaaaaatctttcccatttttttcaattgaagggtcagcttgttcagggtcccagatttgtgctatttcaaagataaatccctgatttaccttgatgaaagccagatatcttatctccacataggtattagcccctatcacctaagtctataccatattcagtagaatttcccttgatcgcttagagatttttttttctgtcatctgaggatttgcctttctttccagcagatatatttttaagcattttgatcacatagaagaaacatttgtaaatattttagcatgcagtgttgtccacattgactctgtccacagttttttgaaacaaaattctccaaaatgtttccaattctctatagcatggtaaaatgttacattaacttttcttccttctttttgtcaataaagccatgctgacaatttaactatgtgcctggagctagaatataaaatttataacatcaggtctttatcttaggtttttaatcaattttggatccttttgtagagaagctcgatattctcaactaaatatcgtaatagtatatttgaatctaatcgtgtaaactattgtggt

SEQ ID NO: 479767 - DNA, 1348 bp, Homo sapiens
ctggagactatttttctaagtgaagtaacccagaaaaggaaaaccaaacatcgcggagatggcactcaaattacaagaagcaatccttctcattcttctgtccactttccaaaagcaggggagccttaccccatggctctcaccaccacaggccaatggagagtacttccagactaccactgatgttctcttaaagcccaagggctcttcaagccccagagcacttaagtccacggtggtgaggcatgcaggaactcaagttctgaccactgggatctgcagttcccctctggctagagctggtttaaatgctccctccatgggtgcgtgtcagctgagtttggtctggttttctttcctgcttcaacgggacagcagtgagttaagtgcctcacaactcctatactctccttccccaccccagccccctgcccccagcacggagaactgttctctgcgccatgcctccaatgctggtggatcagggagtggtagtattggcaattcaagactgtttttctacgtcttcagtgcctctttcagtgatatgaagttaaaaccaggagcttgcctttccttggcgccggctgtgaccaattattattttagagagacagtttaacaactgcctgaccattatctaatggttgactgacattcctggggggccctcttctgtcttgcttatgtgtatctaactacctactttaatactgtcgtaacattttaaaacagataaagatgttacacatatatattttttaacttaataaagtgatggaacataagagctatttgatcattctttcctcaagaagttaactattaataatattgcagcttattacatcttgattatgatttgtaggttgagctttaggggtcctgcataaatatcaaaatatattgcacaataaagaaaatgtgcatttctctgtttcatcaatttggcatatctcctttcatttataaaatgaggcattactattgaagccatgaggggatttttctacaattatatgatcatgacattttatttcagatcagtaactatttatttagtaacccaaacattgctaggtgctgtgatacaaaattctggggagtacaaagatagtcttataaatgctgtgttgtttcataattcgttttgaacccagtggaaaataataataatgcaaataatgtattcattttgattatagtattaaatagctatatgaccacaggaaaaaaaggacaataaatctacagatgtttccagtgttaagattacaataatatagagttgttaacacgaatggatgttaaattttattgaaagccttttctgcatccattgagcacc

SEQ ID NO: 479768 - DNA, 501 bp, Homo sapiens
agcttgtttctttcattactacagctgtaaaattcatccgtggtccgtatgctttgttcaaggaaacacaagcatagcattactgccatattcaatttgataaatggtgatgtctacaaagtaacaaacagcttaaaccgtagatataccagaaaaagggatgattcaggtcccagatgggatagattacttcctaaatacaatgggggtacaggctttggtgaaattcacctgtttcaaatgagaaaaattggcccaaacaaaggagctacaggccccatgcaagtccaaaatcgctgtcaaattttaaagttccaaaatgatctgctttcactccatgtctcacatctggttcatgctgatgcaagagatgggttccatgatcttaggcagctctgcccctgtggctttgcagggtacagcttccctccaagctgctttcaagggctggtgttgactgtctgcagcttttccaggtgcatggtgtaagctgtctatgga

SEQ ID NO: 479769 - DNA, 770 bp, Homo sapiens
tttctaagtcatttgcttataaaagtcatgagatcatttatgctccagccatggctaaatggggccaaggtacagcttaggctgtggcttcagagggtgaaagacccacacctgggcagcttcaacatggtgttgagcctgcaggtgcacagaagtcaattaattgaggtttgggaacctccacctagatttcagaggatgtatggaaaggcctggatatccaggcagaaatttgctgcaaaggtggaaccctcatggagaacctctgctaggacagttcagaaggaaaatgtgggtttggagcccccaaacagagtccccactggggcactgcctagtggagctgtgaaaagaggcccaccatcctccagaccccagaatggtagatcctcggtcagcttgcaccatgtgcctggaaaagccatagacactcagtgccggcctgtgaaagcagccagaaggggggatgtatcgtgcaaagccacagaggcagaactgcccaaggccatggcctcttgcatcagtgtgatctggttcatctgtgccacaatgcagaggtcacaatttataccgtcgtaaaaatacaagattttcaagcagccgtttatgtttcaatattaatgtatatttagaaacagcttttatgatttaataaaatgttaaaatttattttatagcactgttacctagttgtgcatacttcgacattgcttttctattttggaaatggtagcacctagatttaggtgaaactggttagcatcattgct

SEQ ID NO: 479770 - DNA, 2784 bp, Homo sapiens
aggcattcaggcatttccatacatcttctgaaatctagccatggctggagtggctggaactcagtgcctaggctgcacagagcatgggaatgctggaccaggtccacaaaatcactttttcctcctaggccgccaggcctgtgatgggaggggcagtgcggaagggaaatgtggttttgcagcctctacacatagtccctactgggcactgcctagtggagctgtgagaagagagccaccatcctccagaccccagaatggtagatccactgacagcttgcaccatgcacctggaaaagctgcagacactaaatgccagcgcatgcaagcagccaggagggaggctataccctgcaaagctacagtggcagagctgccaaagaccacaggaacccacttcttgcatcagtgtaatttggatgtgagacttggagtcaaaagagatcattttggagctttaaaatttgactaccccactggattttggacttgcatgggccctatgtagtcctttcagccactagaaaaaatattttgggttaactgatgacatcttataaactcatataattttatgttataggaaattagattgagaaattactgatggttgtacattataaatttaactctcaaaaataaaaaaattaagcattgcaattatatagtgaaaaataaccatggaatacaaagcagttattaaactcaggttttcaagatgaaaaagttctaggaatctattacacaacaatgtgaatatactgagacctacttaactgtacatgtaaaaataattaagatagtaaatttgatgctgtattttttaccataattgtgtatattatattattttaatatattattaagactagattatatttcatgtattatgtaatatatattaaatctgttaaagatattggaaaactaaaaacacaagaaaaactattttgactgaacacagcttggagtaaactcaggtaagctctttcccatttgagtcaaaaatttcaaaacaagtcatgtagaataaattataaaagacattaaattttaataataataaattaacctttttaaggcattttcattcttctgcacttaagaatgcatgtttccaaggtctgagtttatactactatgactagtaaatataaacatccacatgtatttatagcataatgatctttcttaagccaagaaaatacatattaaaaccataaactttatgtaggttgccaaaattctttaaattatataattatttttaatgtattttagttttgcttaaaagagggagtgatttatatttttgatgtttttaactaagtaatggcaatatggaacttttccacagaaactccataaatatcatagtaatttgttggtaatactatttgtttccataaaattgaaaatgtactacagacatgggtgagtgctgttttccaaaacatatgtaaataattttttagataaactttcacactgttagcagtggaaggatgagttattttctttgaatgtatgccctgtagtaggatggctgtgtcaaaccatagttctattttaagttctttgagaaatcaccaaactgctttccacagtggttgaactactttgcattcccatcagcagtgtataagcattcccttttctctgtagcctcatcagtatcatgtttgatgcttttttgaaaggagttttaaattatggtttctaattgtttattaatatttaaatgtggagttgatttttatattggccttttagaataccaacttgttaaatcaatgtattggttctagtagatatctgtgaattcccatacaatcaaattttttcaaataatggaagtgtttctacctcccaatccaatcagggcattctttatttctttctcttgcactggttaggatatccagtacaatgttaaaggtattcagagaggatatccttgatattttattgaacttaggtagaaaatattgacactttaatcactgagtatcatgctacttgtagatttttcatacaaatacttaatcaatttgggaaagtccccatctatttgtagttggctgagaaatttttatcataaaaaagagatgaattttgtcaaatactttttgtgcatcttctgaaatggtaatacgatattttccttaattctatcaatgtgatgtatctccttgagtgtttttcaaatgtgaaaccaaccttacattctcaagataaatcccacatgaccgtgatgtagtgctatttttaaaattattactggatttgatttgatactatttaattttttgtatccatgttcacaagggatattggtctgtagttttcttatgatgttttcaactggttttagaaacaaggtaatgctgccttcataaaatgaggtgagaaatgtttcttgattttctatgttctgaaagggtttaactatgatcgatattatgtcttccttaaatatttgataaacttcaccagtgaaaccatcagaacacaaatttatattgaaaatatttttaataaaatttgattttattaattgatgtaaggcttaaaagtggaggcagacttgataatttgtgtctctcaattatttcttccatttaatgtaggttgtcaaaattatctgcataaacttattcataataagtccttttcaatgtctgaaagtctgtagtgatatgccacccttcatttcttatattggttgattaaattttcattctgcttttcctgaagttactaacaagtattttgaacactttt

SEQ ID NO: 479771 - DNA, 546 bp, Homo sapiens
tctgtaaaatatttgaagagatttattctgagtcaaatatgagtggccatggcccatgacacagccctcaatattcagatacgtccagagtttcttccttctggtgggttcgtggtctcgctggcctcaggagtgaagctgcagaccttcacgatgagtgttacagctattaaggcagtgcatctggagttgtccattcctcctggtgggttcatggtcttgttgtcctcaggagtgaagctgccctcaggagtgaagctgcagacctttgtgtccccacctgattcaggagcccagctggcttcacctaatggatcccacacaggggccgtgggcagagctgccggccagtcccgcaccgtgcgcctgcactcctcagcccttgggaggttgatgggactgggcaccatggagcagggggcagcacctgtgggggaggcttgggccgtgcgggaacccaccgcaggggggctcgggcatggctggctgccaggtcccaagccctgccctgcaggaaggtggcagaggccccacgagcattagagc

SEQ ID NO: 479772 - DNA, 533 bp, Homo sapiens
actaaatgcaatgctcaatcctgaattgattcatgaattaaaaaaatcatattttaaagatattattgggaaaatcagtgaaatttttataaactttggtcttcaatctcagatattctttcttccacttgatcgatttggctatcgatactttgtagccagcaggcagggacgtttaagtctgctgaagctgcgcccacagccgccccttaccccaggtgctctgtcccagggagatgggagttttatctataagccactgactggggctgctgcctttctttcagagatgccctgtccagagaggaggaatctagagagacagtctggctacagcagctttgctgagctgtggttgcctcctctcagttcaaacttccaggcagctttgattacactggttacatttaatcagaactatggtccgtcataaaagagcctgtatttaccaaattaatgcataatattcacaagaaaccaccaataataaacaaattaaaaaatactgttgagggatggctggcaggatggcc

SEQ ID NO: 479773 - DNA, 489 bp, Homo sapiens
cagcaattagttagtgagaaagatgacagtggtagccacaggggattggttacacagaggaggagtaactagcttggaagcagcagggaaagggagcttagcagcagttgtggtcaatgctactccacttgttctggggctccaaccaagagagatgtcagatgggacagatccactgctgtggcagtggcagaggggctgtcagttggctctgggagctcctacccacagcaactcagagccactaccagtgggtatgctcagcaatggttggggtggctgttctgcattcctgagccaggggacctacctggtgaagagggggcatgggggctcccagggaagagagactggactcctctatgtatgctggctgcactgtactggaggtgccagtgtaatgactattgtctttgttcttttcccagcttgaaggcaattaaggcagtactactgcagctgcaatggtggaggggctgtggattgaat

SEQ ID NO: 479774 - DNA, 613 bp, Homo sapiens
aaaaccacacaagaaaccactggaatggatttaagtgtattacatacagtgttctttgacatgtatatatctatttctataaatagtgttttactaaacattggacttcacaacctgctaaaaatcccagaatggttgatatgctggcagcttgcactgtgcttctggaaaagctgcagagcctataagaagcagctgtgggggctgaacctggaaattcacaagtgtggggctgtccaaggccttgggagcacaccctttgcaccagtatgccctgtattctctcgttccaccttacgagaaacacccacaggtgtggaggggcaaaccacccctacaggtgggtcacttccaaaatggccacgggccacttccaagatggtagcaagcctcgtgttctctgacatggggttcttggcctcacggattccaacgaaagaaatcttgggccatgcaaatgaacccgggcacttagcagtgcaggaacaatggcgagcctttagcccaatcggaagcagcaatgggcgcctcactggatcaggagcacagtgaacaccctgcctgatctgtacggatggaagtcggtggtggctgggctcaaggtttagcttat

SEQ ID NO: 479775 - DNA, 609 bp, Homo sapiens
ttaccatttccccatggtggggaagtgtctcctggttccatgtcatttccggaaaaatgtcagggaagacaaatatacttcatctattgataaaccatctattattttagagaagtgcatttgtgaaaataaggacatgtctgagctagacaatcattttgaagaaattggggataacatcagaagaagcaatgccaaaagtaccatatactccttcactgttctcaactatatttttatcagtatcgtgtatcccgcagatatgctcaaggccctaattagccagtatctagttaataatggtcatttcatcaaaggattatgctgctttttatatctaggaaaaatagggagaaacacaatctattcagtcaaaattttaaggacaattttcacagaaaatagtgtgattatcactgagaacctacgcgctcctgagagagcacaaactaatatacaacaacatctggcaagttttacatctcacttggctttaatttaatactgtctaacaacaagaaaaatggaaggaaggctttctaggtatttgaagaaacttgggccccaaactcaataatgctgtggttcttgcacattcacagtgatacc

SEQ ID NO: 479776 - DNA, 632 bp, Homo sapiens
ctctaccagaaaatgaaaggaattgaaattaagagaagggagagattgaagtgtagcaccaagattgaaaggagaaagaggttgagggatagggaaaaattgagagctgatgggattgctggaaaagactccttcatgactaacaagcagccatctgaacttttgattcagagaaatcttgatcactttttgcttccacaagatttcacactggcccattacattgatgacattatgctgattggatccagtgagcaagaagtagcaaacacactggacttattggtgaggcagacagtgcccaacgaagctaagggagcagggacattccatgccatagggatagtgccatccagtagagcctgtggaggcaatttctgcatggcagagtgtcagcataggcagagccctggcagaaagccccatcatggccataggtcaggcactgcaaacagccatgacataggcattgccccgctgagccttcctgatgtagtctgcatgctcatcacctctgaatcccatgttgaaatgtgatccctaatgtaggagatagggcatagtggggaaggtttgggtcatggagatcagtgattttcaatcttagctacacgttagaaatacttatatag

SEQ ID NO: 479777 - DNA, 1710 bp, Homo sapiens
gcgtagcctagggacatgatgctgtgcatcccagatgcttcagctccagccatggctaaagggggccaaggtatagctcgggccattgcttcagccccaagccttggcagcttccacgtggtgttgatcctgcaggtgtgcagaagacaagaattgaggacagtgaggaagaaaaatgtagggttggagcccccacacagagtccccactggggcactgcctagtggagctgtgagaaggggtccaccatcctccagaccccagaatggtagacccactgacagcttgcactgtgcacctgaaaaagctgcagacactcaacaccagaccatgaaagcagctaggaagggggctgtggaagggacttgccttgtctcagatgaaactctggacttggacgtttgggttaatgctggaatgagttaagactttggaggactgttggaaaagcatgtttgtgttttaaattgcaagaacacgagattgggaggggccagggatgaaataatatagtttgtctgcgtctccacccaaatatcatcttgaattgtagtttccataatccccacgtgttatgggagaaacttggtgagagataattttagagttgtatctttggacagaatttagcctgcagcctttctctgtactgtgttagagaaattagacttttcaacatgggaattcaagttagcaaaatttaaaaaagaaataaatagaaagagagagagggaaatataaagaaataaagaacagtatactgatctccatacatttggagattataactctatttcaagcaattatgataatttttagcatttacatgactgcctttgtattatagaaactgttagattatgatgattgtataggccagatttatatttgcagcaaaagcaaaacaaggatactacaaaaatgatcacaacttgaaataatttgttaatttgttacttgttagtcatgctgtggtaaggcttttctttaacattggtgtactttatttgtgaatttcatttataggatcagtaagcatagcctaaggtccattgaatcttaatgaaaaatgaggcactttcagtaattaactgcaatattacatcaattccattttaaaggtttcagggaaaggtacgttttataatttcccaataaaaatataaatatttagcagttctgattatcagaaaatgtatacttaaatccagcttaattctttccacaataattggtattttcttgttcatctgtgtttggtaaaaagtagtggttgtgtaagtgtagttatatttaaatatctgttatttttaaattgtgaagcattcagaagagtaatacaaaattatctacaactctgtaatgtaaacatagtactttacctctgatttgaaaatatggacaatttagagaaagagaatcatttaacaaaatacaggcaagtttaaaatagcattattctggacacatgaatatgtttgaaattcaaagataaaggagatatttgcagctagggttaatggagcaaaatgtttagctttagaggatcagactttaatgtttattttagcctaatttgattcttgatgcttgtaggggtgatgactctctaagagatccttagttatgagagtctttgcgttctggttttccctaatgctgattgtagtagttatattcttggtgtgtgggtaagtttactatctccta

SEQ ID NO: 479778 - DNA, 561 bp, Homo sapiens
ttttatcatgagactgcactatgaaagtcctagatgtcatcatcttccagcagaaggctgtttttgtctacaatgaaaatctgttgtttaaagaaacagcttccccatccccagtagtggcaagatcccctccaagacccatgctgccatcagcctttccacctttgtctgaggagataaaccctgcactaactgaggcaacagtgatggcctctcctgaggcagctgtgaggcaagataatgttgattctcctcaatacccaccccgaacacccttgtgtgcttctagacctataactagattgaagtcccagtgggcccatagagaggaagggatcaaaaggcttgtagaaattgggatggaggagtggattagtcactttagacctactcatcccagctgggagggtccagaagatatatccttgaacaatgctttgtgaaatggatttgtgaaggcagcacctgcatctttgaagagctctgtatgaattgctcttctctgtatgacagatctaacagtgggaaccacagtcacttaactacaaaatttaaatgcaa

SEQ ID NO: 479779 - DNA, 891 bp, Homo sapiens
ggtgtaggtaaagtttgtttatgctttccacgacctccccctgtgctgtaggaatggtttgtaattggggtttgcttatcgcagcaaggtaatgagcagaggttgtgagagctgggagagctcagaagaagataggaggatgagagaaaatttaaaactccctagagactggttaagtggttgcaaccaaaatgctgataaagatatggacaataaagtccaaggtgatgaagtctcagatggagatgaagaagatattgggaataaaaacaaagccactgtgctgcactgtggggaattcctcctggatccaaatcatccagtctccctgttaccagcaggggaaaaagtggcagactggcactgtggtgatggctgccgcccctcctgcaaggagctcagtcgtcttaggcagcaggcagctgcagtgttgacagccaactctttcccccagggacttggtagtcttaggcagtctccagccaaaaagtttaactggcaagaatttcggtattgattggaaaatacctttcgtaaattttataaatacatgttcttttttcactctaggactttttgggctagaattctaaaggtagtaaataacttacagaagaccagtatttctaataaaatgttattttttacctgctttatatgataaatagatacctagattcccttgagctatgtgcattttatactcagtctagaccttattaaatgatataaaaatgataatttaaataatttatttctagttatctcagttacataataaatatattaaaagtatgaaactgctcatttataatataatcatgctggtcttttgtgagaatattttatataaactcatataattttatatagtgatacaacatcagtatc

SEQ ID NO: 479780 - DNA, 477 bp, Homo sapiens
tgtgtccccagaatttagcctctaaataagggcgactatgttgtccagagaccacatgttgaaactcctggtggcagtactttttcttcatcttcagtatccaaatggcagaaattttggagttcatgccatagttagctctaagaattatcctgagcaagccaaaagccatcgcaagctccaaactgactgctctaggctccttctgggaagagcaataaaaactgccaaatgctgtagcgtggtagctaaggctttgtcttttcccaatggtgacatgagttcaggaccctggctggataccacattcaaacacccatggagccaccttcctgccctgacagctagcaacaggccaagacccacagagcgatccactgcctctttgtcagcagtgaagagttacagaagactgacctttgtccattttctccaaataattggggtcttaggatcatgagtgggaaaatgctacaa

SEQ ID NO: 479781 - DNA, 1093 bp, Homo sapiens
ttatgaaattaatgtgtctggagttggttcctgctggtgggtttgtggtctccctgacttcaagaatgaagccgcagaccttcgcgtgtgtaaggggacccgagtgggttgccactgctggccggggtggccagtttttattcccttatttgtcccctcccatgatcctgctgattggtgcattttacagagcactgactggtgcattttacagagcactgattggtgtattttacaatcctgttgctagctacagagtgctgattgcttgtcaattctactgctttccccagcgtctgcataataaggcagacaactcaacacaggagttgatctgtgatcaacacattcaagtgatcacgtctccttccttggcagaatactccttgattctttccctggggaaaagtcagattcctgttgattgtcctcagctcaaggagaagggtttcatctttatttatagcacttgtgaagtgcccacaggacacagcaaggtcagagtcctagctaagacctaagacctatccatagtatatagaaataaggcaacctttgcatcctcgagaaacttatattctaaagtatggattgagtcaatggcctttgaaatggagattgtctttgcgggggggggggggggggtcctcaaatatgtgagcaaaccaatcccagaatctcattttgagaatctgttttatgggaccacttttggggtaaattactgtatcggtaaggatctcagaaatctgacattacacttaaactagtttctcagaaatttaatattaaaactaatttcaaaaatatgaatacagtttggagaaaccaagagggaagtgattaccaccattaagaatgaaaagaataagagtggttttcataccatatttacaatgttagaatattctgtgtttttttcatgtacttaatattacctgtgatttttgtaccttcaggtgattatgttttgctcattaacattcttttctttctgattaatgtactgccattagcatttcttgtaggacaggtctggtgataatgaaatacctcagctttgatttttctgggaaagtcttcatttctcctt

SEQ ID NO: 479782 - DNA, 2792 bp, Homo sapiens
caacgagctgccttgctcaagctgctgcggtatgcttggggtcccagtttttccagtacctggagttcgttataacaatgtgaaaaagaactactacagaaaattggtatcatcagagaagtggggctttgctctaaagatacctgaaaatgtggaaatgaccattaaactgggtaatgggcagagaatggtacatccaccaacagcttgcaccatgcacctggaaaagctgcaggcactcaatgcagtctgtgaaatcagccctggggactgtaccctgcagagcaacaggggtggagctacccaaggccagggggcccaacccttgcatcagtgtggccttgatgtgagacatggagtaaaagaaaattattttgaagctttaagatttaatgactttaatctttatattacacactacctaccatatacgggaaattatagttatccaatgttgagcaacaacaggtccaatctcaggtcacatggggctttggatgaagattgaagataacataaaatgaggctgaaatgacaaacagggttaaaatcatacaagaatttaaaggccaagttaaatatatctgtctttatttcaatagcagcaggaaagtcttgaataagtttagcaagggaatacatcatgcacatgggaaagagaagacaaaatgaaattggtgtttgttgttaaaacatttttttctgaggaagatcatatgtcatatatctcagacattttcttcacggtaaataaattgcactagaaatataactagcattcttaaaatgcatttttagcaatttgttaaagtatagcatacacatagaaaaattcataaaaatatcacatcaatgaattatcacagtaaagcacatctatgtaataaacataaaaaaaataggttgctaccaacatccaaaatagcccttcagctttcttcagaaccaaaatatcttccctcttctacaaaggtagctagtatactggcttctaaaattatagcatagttttgtcttttttaaaagcttttgagctttatatcaatggaaatataagtatgtattatttgtgtctagcttcttttgatcattgtgatcaaaagaattgatcacaattcttttcattcatttatgtccttttcattcatttatattgttacatgtaattatttattatactttctgtatatttttccatgaaataaatataccaaaatttatgtataaattttactgttggacgtttggaatgtttatagtttgagctgcatagttttgcaatgaatgttctttaacatatatattagtttgtataatcataaatctttttggggtatatacctaaaaataagatagaatggtcattggctatgcatgcattttaatttggtagataatgatgaacagttttccaaagtggttatgtaaatgcatacatccactgttcatacattagagtttcagttgctttacatctttgcttatattgctattattttttaatttgccattcaatcaagagggtcaatccactggaaaaaatgtaacagttttaacatgtatcccccaaataacagagtttccaaatatacagccatattttatagaataaaaatgaaagtagataaatccatcatcacggtgggaaattttaaaacatcacactcagtaactgatagaacaagaaaataataaaaacatttcatctccagatgattcaattaacagaatttacaaaagtgacccaatttgcaaattgaaatagttgtaaataactgtttaataacagatgttttcaaatgtacgttatacttctacccaaactgaccacatgtaaggctattaaaaatatctaaagaaattttaaagtattgaaatcattcaaggtatattttatggctacagtggaattaagcctaaaaatcaataatgcaataaaaaagttcaactatttagaaatttagcaaaatacatcaaagaaatttatcaaattagaaatcataatgaaaagtaaaacattttgatttgtaaactaatgatcatacagcatatcaaaacttgtggaatgcagcaagtctgtgcagagaagaaaatatatattcaaaaatttataaataagaaaagatggtaagtcaaaaatcaataaccaaatatttatatcaagaagtgagtaaaaggacatcttattgtataccaaaaatgtagaagttagaaaataaaaagagtatttattaaatacaaaataaacaatagaagttagtttattaacaaagccaaaagtggattttttgaaagattaacatttgatagacatttaaccaaattgagcaaaatgaaaatacataaataattaaagacacaaatttgaaataccagggataaaaaggtgctatcacaagatattttacaaattttataaagatttttaaatagcataatgaaaaattttaaagtacaaataaaattttgcataaaattgaataattcctagaaaaacacaaattatcagaattgacacaagataaaataaaaatatataaatagcactgtatctattaaagtcagtaaactggcaaataaatgtttccccacaaaatatctttggtgccagatgtattcacttctgaatttttccaaacttttaataaaatgtgacactaattgtacacaactttcttggagaaacaaaaaaggggagaaggaaagagagagaggttggatatagagagtaatggggtcagtgtaattttgtgaataacaaataacaggaagggaaacttaggggtaatcac

SEQ ID NO: 479783 - DNA, 692 bp, Homo sapiens
gcctctcttaaggatctttgacaaaagcctagtttggctagtatggtattcaaagcctgcaaatcctgtgatccccagaaaggcacaaagttgctttcaggtgattgggataggtattctaaggatgacctgtatttattctgggagagcttacatactttgggggtcaagattatccccaggttttggacatcttgtcttagaagctgtgccttggccttggacaccttgtaccctctgtctgtgaggaaatttagtgtctggactagatgttggattcccaactctcttgtgggggagcagattaacaggtcttctacatactgtaggagatgccctccccactcaagcattagatcctgcaaagctctagtcaaggcttgcccaaacaaatgggaactatctctaaaaccttgtgaaagcactgtccaggtgagctattgactccttccttttttatttgtccactaaaatgcaaatagagtttggaagaatgagtctaggggatacaaaagaaagtgtctttgaggtctaagactgaaaaccactaagcatctggaggtacttctacaattacttaagggttggggaccactgggtttgttgagactactgcttcatttataatttgcagatcctggactagcttgttttctctcttgctcattttaacagatgatttgtttccccag

SEQ ID NO: 479784 - DNA, 862 bp, Homo sapiens
aaccatcacctgaatagtgtacatcgtagccattgattttctcacaaacgtatgtaggcttaaataatgaagtatttagaaaaatacaggcagatgtgggaaggtttgaaacttcctagagacttgttgaatggctttgaccaaaatgctgataatgatatggacaatgaagtccaggatgaggtggtctcagatggaggtgaagaagttgttggggactgtaaaatacacaaaaatgtggaagcaactttggaactgggtaacagacagagaatggaacagcttggagggcttagaaaaagacaggaagatgtggaaggtttggaacttcctagagtcttgttgaatggttttgaccaaaatgctgatagtgatatgagtaatgaagtccagactgaggtggttttgggtgaagaagagggcaatctgcagccactgtgggagttgagggacagttacctcaccactgatgtaatgtaccagagtggagaaaagctgcctctactgcacagaatagtttgtgcaagaagtggggcacagcagacatcagtaagccccacccagatcccatgcacttggcaagttaatactgatagactcgccccagtatccaaaaagaaggaaataatcttaccagataccatcccagttaccctgggttccgtggactcactggatgtgggggtgaaggatcccgggcaccctcagtcttccattgtcagtgccagcagtgaagagatttcctcctgtaatggtgagggggcctcattatgagcctcacccaaacaggagggtgtcctctctggttggggggaggttatcttagggttggaatgtttctggttggagatgtaatttgtgg

SEQ ID NO: 479785 - DNA, 674 bp, Homo sapiens
ggtgggcactgtcattaggctggtcccccacttctgacatggaatgcaacaatatggaaatctgagtgatgccaaaccaagctactgtcagctggtgagtgaaagaagcgtaaaggattcattccacattcatgctcagatgacagagaatgaagaatatagcagtagtggtggagatggaggcagtgaagaggacttttctacaaacaccaaagctgtgagcagaaagactatctgcacagttgaccaaaagggaaggaaaattgaatcaaatgaagattattgtccaatcacaatgtcagatgcctggcaagccctcaagggtccaagcactggggaaagcagcaatgaaggcctgactagtgtattcagcaccagtggaagccctacagatggaccctggattagtcatgtcccttacagtaaatcagctcatattcttatgtatgaggtctattttgctgcttaagctcatcagattaatataccactttcaacttctactcctaaacagaaattgcttcttaaaagtactgttctactttagtgatgtacagttatctaactaacacaagacattcaaacaaaatgtgccttaaaaaatttaataattttccattattttaaaagaaatgcaacagtgtgtccttaggctttattaacttgtgcttcac

SEQ ID NO: 479786 - DNA, 1534 bp, Homo sapiens
tttctctcttttttttttttttttttttttttttcagatggaaccatacagggtaacttcctgacattgccatggtatttgtaaactgttatggcactggtgggagtgtagcagaggacgaccagaggaccatggaacatggggaacttttgctccccaaacggggaaacatgagagccaatgggactgctgaaaatgatccctttgtgaccaacaagcagctacctgaatttttggttaagtattgctgcaatggggacacagagacacagacagcgaaagatggccatgtaaagacaaaggcagagattggagtgatgcatccactggccaataaacaccaagaaaataagcctattgattttactcaatcaacactgcagataaaggagcacccacacacagatatgagaaagaaccaatgcaagaactctaataactcaaatggccagagtgttgtatgtccttcaaatgactgcaccagttctttaacaagagttcttaaccaggctaaactggctggaatgacaaatagaattcagagtatggatagaaacaaagatcattgagatttataaggacagcaaaacttgacccaaggaaaataataatcataataaaacaatccaagtgtattttataacacattctaatgaactcttttgggttatactattttttaaaaaaaattaagagaagttttttgttgttgttctttctctttgctttactcaggctattttctgtgcttctgctcctttgtgaacatatgctgcttcattctgactgaaaagtttaaatgaagcaccttaaagaaggggcatgaagaatataaagaaaattgtgtataaagactaaatgtctttttcgggtgctttttaaaagaattttatttaaaatcattctaccaatgacatttttttcaggtatttaaaagatatagaattattttcagtattaaaggacactatctgtatttgtaactatgataaaagggtcatctcttgtggttaataacaccaattatcttttaaatacattatagaaaattaaaaatatatcatcaccaatttgcctataaatgtttttctttattcaatagtggtgtttattaattggtacaaatctttttattttcagagcaataaaagcatgaaaaactttatttttaaaagaatctttcataataaacctcagctacaccattactaacaactttgacaaatatactttattataaacctgtaaatgcctaatactgtgcaattaaaataattttgtatcattattcttgctagcaaaatagcttttcattttttgttcaacatgagaaaaataatgagggaggtgacttctcctcagtgccaggtgggtccttaggtgctgttcaggagtcagagactagagccaaaaacctgtcctgtgacttatccttcagcgtagtgggctgccatctggccccagacaactccagaaatgaagtctaagagtaaaggcctgaaatttgggaccccaggtgtctgcttggtgctat

SEQ ID NO: 479787 - DNA, 1496 bp, Homo sapiens
agtggagctgtgagaagaagaccaccgtcctgaccccacaatggtagatccactgacagcttgcattgtgagcctggaaaagccacagacactcaaccccagctcacgaaagcagccaggaggggtagaactgcacaagactgtggaaacccacctcttgcttcagcatgacctggatgtgagacagggagtcgaaggagataatttgggacctttaagatttgactgccccactggattatggacttgcatggggccttgtgcttttgtcgactttgtagatcagttggcggtagtattttggtcaaagccattcgacaagtctctaggaagttccaaactttcccacatcttcctgtcttctgagccctccaagtctctaggaaatttcaaacttttccacgtatttctgtcttcttctgagtcctccaaactattccaacctctgcttgttacccggttccaaagtcacttccacattttggggtatctttacagcagttccccactacctggtaccaatttactgtattagtctgttctcgtgtgctaataaagacatacctgagctggggtaatttataaagggtagaagtttaactgactcacagttccacatggctagagaggcctcacaatcatagtggaaagtgaatgaagaacaaaatcatatcttgcatggcagcaggcaagagggcatgtgcaggggaactcccttctataaaactgtcagatctcatgagacttattcattatcataagaaaagcatgaaaaagaccttcccccattattcaattaccccctcaccaggtccctctcatgacacatgggaattaagggagctacatttcaagataagatttgggtagggatacagccaaactatatgagtgtatatatttatggggtatatgagatgtttggatacaagcattcaatgaataatattcacatcatagaaaatggggtatccacccctcaagcatttatcccttgtgttacaaacaatccaattatactcttagttatcttaaaatgtacaattaaattattattgactatagtcaccctgttgtgctatcaaatgcttggacttgctcattcattctattatttgaacacattacccagccccaccagtacccctcctagcctctcttaacaatccttatactgtctatatccctaagtttgttttgattttttgatcctacaaataagtgagaacatgtgatgcttgtctttctgtaactggcttatgtcaggctaaaataggtgttccttattagcaaatccggacttccaggaaatacactattaaatgaggttgagatgaggttttctatgcattatggtatgaatcttgcctttgtgccagtgatttatggcataacgaatgtatgtttgttggttgaatttactagccaagcctgcatagtgtgtttgcctaatagttgccaatttccactggctcctaggctgaaagaaataataa

SEQ ID NO: 479788 - DNA, 893 bp, Homo sapiens
cagggggtgcctaggagggtggagaaaatgaaaaagcagcttaaaatacagggttggaaagatgcctgggggaaaatatatcttattcttatgcaaatgaattcctccaacagggaaagaaacttaattggtgtttcttccctggggcttggatggagctggaccccttgggcaggggaggggaagacactgtggacacatggcagggaatgctggccagcctgccaggtggggactttgagccttgtgccccagcccgagctgggaggggagggagaagggagccgtcacttgtccatccatcctgaaaaaaagaagaaaagaagaaaaaaaaaagaagaaaagctgggttggaccaaggctgacatttctaatccccatcagcgatgggtgtgggtggggggcacggtttcctctaccttcagaagaagtccaaggacaaaaaggctcaaaaagaaaaggaaaaatgattttctgttctgcattgactcacgtttcctcacatccacgtacaggccaccaaaatgatgcaggatctttgctccttacctaagctaaaacccaaattcttctcccacaaccagaaaaaaattaggcatggggacacgttgagagaatagaggctataacaagaattagttagaggggtgtccatatagtttacatataaataaacatatttattattttatttttcagctgtattgaggtatagtagacaaaaattgtgtatagtcatgatgaagaacatgatattttgatatacatatacatcgtgatgtaattaccataaccaagctaattaacatatccattacctcacagttacctattttggtgagaatacttatgatctactcttttagcaaatcaccagtatataatatattatg

SEQ ID NO: 479789 - DNA, 555 bp, Homo sapiens
ttaggaactgggccgcggcaggccagggaacattactgcctgagctgtgcctcaggtagcgcactccttatgagaatctaatgtcgatctgagatggagcagtttcatccccaagccatcacttgctacccccaggtccatggaaaaattgtcctccatgaaaccagtccctggtgccaaaaaggggaaacttggggaaccaaaggccccattcaaccagtgggagtggagcaaataaagtttcccaaaaagaaattactgccaaaatgcaaagcggagatgccctggtgccaggaggcccctgggtggaggctgccttcttctgccagaggctccacttggcaaatcgtcagtcatagagattatagctcaaaagggacgttagtgttgtgggtccctcaaaacactaacaattttgcacctatggttctccatgattggaagtccctgcccctgccccaaacaatcacaggacaagaaacagactacaatgcatcaatttataatacttattcacaagtaaaagcaacataaacagtatgctgaattgcctcc

SEQ ID NO: 479790 - DNA, 571 bp, Homo sapiens
agtgcagcccaggaggtattgtcatggaagacatccctcttaaatcatctcccagagggtggcatctgatgaggtgggacccactgagtcaggcaccagagggaatctcctggtttgctggtggcaaagtccatgggaaaagcgcagtatctgggccagagtgcactgttccttcctcccatgcagtctctcatggcttccagtggctaggaacaggaaatccccagactccttgcacttcccacagtatcaagaacttggaaaagtatgatgaaagaactctttttggtgaaggaagtcaacttaaaaaagaaatcactgttttccaaagtaaaactgtgtcagagactgttcgaataccagaaatcaatcacactaaaacaagtgtaaagattcacttttctcctgaaaatgatccttgcacctacttttgatcaggtacacctgtaaatcttaaaaagcctataaagaaatacctaactagtacgttggacccaagacacaaaaaatctcacatactacaatagtaactgaagtactaaatgtttactcaacttagaaaattgcaatc

SEQ ID NO: 479791 - DNA, 600 bp, Homo sapiens
ctgaagagagattcaacatggctgaatctcaaaatcattacgtggaggacaagaagacggacgcaagagttacgtactgcatgattccattgatgcagaattcaagaatagccaaacgcagccatgttgagggatctctattttctcaatggtcacaccccaagcaaaccgttgtcctggatcacctagcagaaggaaaagaatacctataccagataaagtcagagttcaccagtaaggacataccgttctatgaaacagtttgcaggaaagatgctgccctgacgatgcagcctgagagtggagtgtctgtgataaagatgtacttaaataaagagaatgggaagcggccaagggaaaatagcaaagctgatcaaaggtttgctttgattaagggaattttccacctacgtgtttcttgagtgaaaatgagttgcattattgacttgcatcccatttgtattttgttatattattcacgaatgtaaacaaatattaatgcattctcatcaaatgcttgctcttttatggacatgtacaatgttcatatatggttagcactgccaaacttttagcaaataaaaatacaggatgcctatc

SEQ ID NO: 479792 - DNA, 798 bp, Homo sapiens
cattggtggaatgttacctttgctgtagctttctggctttgtcaaaatagtagaggggcagacaatgactcccccagagcaaaccaggggagagaaaaagcagaaagtacaggagaagttggagaaatcacttaagcatgaatccacagaagacaaggaagaggaaatgaagtccagtgcgtcgaggtcagggcctttgacaaacaccagcccttccacttacccctggtatcagagccattggccaatttacacagaaattattaatagccccaaatatcagaaagatcctgtttgccagatcctgcagcggaggctgcagaacagcaaagattgctgcctgttccttcctctgcaaacttcatcccagaggggcacctgccagatgccagctggagctctcctgtatgaggtgtcttttgacacctgctgggaggtgtctccccatcaggaggcatggggagctggcaggcaggaacgtttcagtctgctgaagctgcgtccactgccaccccttctaccaggtgctctgtcccagggagatgggagttttatctataagccccggaaaggggctgctgcctttctttcagagatgccctgcccagagaggaggactctagagaggcagtctggctacagcagctttgccaagctgtggtgggctccgtccagtttgaacttcccagtggctttgtttacactgtgaggggaaaaccacctactcaagcctcagtaatgacagatgcccctcctcccaccaagctggagcatcccaggtctacttcagactgctat

SEQ ID NO: 479793 - DNA, 1437 bp, Homo sapiens
caccaccacaacaaatacgtacatgcacaagcccacaggtggtgtctcctgtttacaggaagcagcagtactgccacatcagagaacagtgactatgaaagctaagaagaaggcttcatccagtgacagtagtgaggacagcagcaaggaggaggaagaagctcaagggcctccagagagcagcagcagtgaagcatccagtgatgatgaggaggacgacaaaaagaaaaagtctgtccagaagggagttaagccccaagccaagacagccaaagctcctcttaagaaggctaagagctctgattctgattctgattctgactcaagctctgaggatgaggcaccaaagaaacagaaaccaaagacatctgtagcagctaaagctcgggctaaagtcccagccacaccaggtactccagctcaagcagcacctaaagtagccaatggcaaagcagctagctgcaacagtagcagcagcagcagcagcagcagcagtgctgactcaaaggaagagatggcagcagccatccccaagaagactatccctaaagttcagtgcccccgtcctgctcccccatcaaagaagtccttgggaacccagtctcccaagaaagctgtggagaagaaacagccttccgaaagcagtgaagacagcagcgacgagtctgattcaacaaagaaagcagcagagagctcttcagacagctcatattccaacagttctgaggatgatgaagctctttccaagctagccagtaccagcaagaattcctcagataagccagctgccactaccaagtcacctgcagcggagccagctgcaactctcaagcaacctgcaagcagtggccaggagcctctaatgagaaaggctgacagcaactccagtgagaaagagagcagttccagtgaggaggagaagacaaagatgactgtggccccccctaagcccaaggtaactgacaaagcagctccatatctgcctgccaagcaggctcctgagaggggtaaggacagcagctctcattcagacagctccaacagtgaggaggaggaggaggaagagaagacatctaaatccctagttaagaagaagttgcagaaggcagcaggagggacagccccttccaagccagcctccacaaagaaaggaaaggtcaagagcagcagcaattcttcctctgatgactccagtgaggaagaggaagcgaagcccaagggcaaggactctccaagaccacaagtccccaaggccagtggcacctctgcactgactgcccagaatggaaaagcagctaagaacagcaaggaggaggaagaggaggaagacaaaaagaaaaaggcagcagtggtagttcccaagctgggttcaggaaagaagtggaagcagctgagactgccaaagaggcagagactcctccagccaagaaaataaag

SEQ ID NO: 479794 - DNA, 612 bp, Homo sapiens
gccaccggcggcttcgaaagcttcgcagccggaagccgccgattacttcattggagggaaaatgaatcgttcctcaaatgtaccacgtaaaggtattctgaaatcaggtacaagatccttacaaaaagtttgcagagtacatttcgcaaatgcacgaaatgcaagatcattactatccaaccagtaccctgatcagtcagcagtcatccacatcaagtatcgcagttttttcgatgaggcccctgcattttctggcggcagaaataacagctggcgcaaattaaatcttgaaaatattcccaggacaatgctaatgtatgacatagttcattattcagagtctggagtgatctcaaaccgtctacgaaatgaaatgaagtttctgttacagagaccagtaacgcaagagatccataagcaccagctacggattgtttctgaaattaggaatgactcattaaaacctggggctagaaccataggaatcagcagatagctcccgagtaaatatggtctgcatctctcatggatttgtgctttcctatcatttctggcctcccaggaatgtccatagtttcttgccactaccctacacattaaaatattaaaact

SEQ ID NO: 479795 - DNA, 525 bp, Homo sapiens
gaaagaactgtcatatctcataagacttatttactaccaggagaacagtatgaaggaaaccaccctcatgattcagttatctcccacctggtccttcccacaacacgtgggaattatgggagctacaattcaagatgagatttggatggggagacagctaaaccatgactttttcgacctcctcactcttgtacacctcacaagcattggaggcctaatgcaccttgtattagtccgttttcacactgctgatgaagacctacctgagactgggcaatttacaaaagaaagaggtttaattggacttacagttccacgtggctggggaagcctcacaatcgtggcagaaggcaaggaagaccaagtcacgtcttacatggatggcagcaggcagagagagagagagagcttgtgcagaaaaactcccccttataataaccatcagatctcgtgagacttactatcacaagaacagcatgggaaagatatttcccatgggaaacacctgtccccatgattcaatta

SEQ ID NO: 479796 - DNA, 1270 bp, Homo sapiens
ttcagtcacagctttatgatgttacttgtggttaagaaaactgtggatatggttaagacatcagaattttatagatactcccgacagctccgttacgaagttgaccaagcattgaattactttcagaatgttcaccagcagcctttgttggatatgaagtcaagccgcatccgttctgcaaaaccgcaaactacagtatttcgaggaatgattggacatagcatggttaacagtaaaatacttctcttaaagaaaccaagagtctggtgggagctagaaggcccacaagtacctctgcgacctgactgccttgctatcgtcaataattttgtgttcctgttaggcggggaagagctgggcccggatggtgaattccatgcttcttccaaagtattcaggtatgacccgagacagaactcctggctgcagatggcagatatgtctgtaccacgctctgaatttgctgtaggtgttattgggaagtttatttacgccgtagcaggcagaaccagagatgagactttctattcaactgagagatatgacatcaccaacgataaatgggaatttgtggatccttatccagttaacaaatatggacatgaggggacagtgctcaataacaaattgtttatcaccggtggaatcacctcatcttccacctccaagcaagtgtgcgtgtttgaccccagcaaagaagggaccatagaacaacggaccaggagaactcaagtggttaccaactgttgggagaataagagcaagatgaattacgcgagatgctttcacaagatgatttcttacaatggcaagctttatgtcttcggtggtgtctgtgtgatcttgagggcctctttcgaatctcagggatgcccttctacagaagtatacaacccagagactgatcagtggaccatcttggcatccatgccgattggtagaatgagaatcggagtggtatatgacaagttctggccctgcagcatgcaagcacttttaaagagcatttaggtaataccagactcctaaatcaaggccccttaaaagggaaattgcatgggtaaatgcagagtggaaaagcatatggaatgctttgggaatgatgaattcctcactgacagagctatgagagcagatgtcaagcaaaaacaaaatcatattcatgaatattctgtggatctgcagattactttgttaaaagaggataagaaaaaataggattttacagccccccattgaaatgcctcacaacttttcactaaaatatccc

SEQ ID NO: 479797 - DNA, 1159 bp, Homo sapiens
tgtaggctggaagattggtaaagatggacttaaaactaaaagactgtgaattttggtatagtctccatggccaggtcccagggctgctggactgggacatgaggaatgagttatttctgccttgtaccacagaccagtgctctttagctgagcaaatccttgccaaatacagagtcggagtaatgaagcccccagaaatgcctcagaagaggagacccagtcctgatggagatggtcctccctgtgaacccaatctgtggatgtgggtggaccccaatatcctgtgcccccttggcagccaggaggccccaaagcccagtggaaaagaggatctgacaaacatttctcctttccctcagcccccacaaaaagacgaagggtctaactgctcagaggacaaagtggtagagtctctgccatcttcctccagtgagcagtctcctttacagaagcagggtatccattcccccagtgactttgagctcacagaagaggaggctgaggaaccagacgacaactccctccagtcccctgaaatgaaatgttaccagagccagaaactatggcaaatcaacaaccaagagaagtcctggcaaaggccccctctcaattgtagccaccttattgccctagcattaagaaacaacccccactgtggcctcagtgtgcaggagatctacaatttcacccgacagcatttcccctttttctggacagctccggatggctggaagagcaccattcattacaacctctgcttcctggacagctttgagaaggtgccagacagccttaaggatgaagataatgcaagacctcgctcttgcctttggaagctcactaaggaggggcaccgccgcttttgggaggagactcgtgtcttagcctttgctcaaagggagagaatccaagagtgcatgagtcagccagagttgttgacctctctctttgatctttgaaatgccattgctcccttttggaacactgccttccttactgtgcctacttatcccctgacattcattaatctctaaacttacccagcctggttggtgccaagtctgtctttagctactgttacaataatggtgttaagtaaagttagaggtgggtacaggggagacagaacttaaatccaggtggagagtcatggaaagtc

SEQ ID NO: 479798 - DNA, 619 bp, Homo sapiens
gtgggtgctgttggagacttacttatgatcagaaatatctatgtattctgtatatttacattattgacatgtattgataacaaaactttttatttgtacacatgcagccatggtcccaggagcccagtgatgaggagcctcaacaacaagaaccaccaactgaaagttgggatcctacacctggtcaggagagagatcagggtgcagctgagattcaaggtgctgggaagggaaagaaagaatgtctatggtggggaggaggcctatgtgtgcatcatgccttacgtcatgaccagtaacaggaggaaagaaaacattaggaaaggatctcaaacacttgctgaaatgcctgacctggaaactgatctccaggagctgtctgagtcaaagactggggatgaatgcagagatggtcctgatgtccaggagaaaattctgctaaatttagagcaatttaaaatgccagaaggaggagcctgttgaagcagcctcaaccgtattcttaggaaggttatagtctttcctttgtctagaattaatttcttttttttattattgtactataagttctagggtacacgtgcacaatgtgaaggtttgatacataggtatacatgtg

SEQ ID NO: 479799 - DNA, 713 bp, Homo sapiens
aactgggaacactgcgggttggtgaccatggccctgaggtctgtagaacgcctggcagaggtgtacagtgaggagggcccagtgctgtgtggcaacttctcaactccactgtggagatttgaatgggtggggctctgcgttccaacaaaacttgattttaggggggaaacgggcctagcaaatgggtgggtgacaaaagagcccagtgatgaggaacctcagcaagaggaaccaccaactgaaagtcgggatcctacacctgtacctgacctggaaactgatctccaggagctgtctcagtcaaagactggggatgaatgcagagatggtcccgatgacaaggggaagattctgccaaaatcagagcaatttaaaatgccagaaggagtgatagatgaaaccgaatctgaccatgtaagattttattttaccaacgggaatactttcaagtgtaaaaagagagactcttcatattgatatcaggatgataggtgaaaatcttggacaaatggttaccatacctgaaagaacacagaagggaagaagagttgggggaaggtgagagctaccttcctgtttctgctgttttctaaatacccccatattctggggtagtgtatcctgaaccccatcactcaaaacttagcactgattttatatttctgtatgatatattccaagttttcaacacgacatacaaaatttcccctttt

SEQ ID NO: 479800 - DNA, 749 bp, Homo sapiens
ctggataccacacctgacccccatgactatctctctgatccacctgacattcactccatttccccatatttccttctttcctgttcctcaccctggtcacacttggtttaacgacggcagttccaccaggcctaatcgccattcaccagcaaaggcaggccatgctatagtattttccacatctatcatcgaggctactgctctgcccccctccactacctctcagcaagccgaactcattgccttaattcaggccctcactcttgcaaagggactacatggcaacgcttatgctgataaggtagctaaagaagcagctagcgttccaacttctgtccctcatggccagtttttctccttctcattggtcactcctatttactctccaaatgaatttctggttattgcatctatcagaggcccccctgaggaagtgaaaaaggtcgaatcagacctcaaaggcaaattctttccaaatattgccatctggggaaaagttgttctacgtaagatctaagattaacacaataaacacttctttatgccatagatgatgagcatgaggatgataataaaagaagcaagcatttattgcacatttgctatgtgccaaatgctggtgtgaaacactttatgtgcctcatcctgtttaatccatacaacaaccctaactatttttatttaatgaaaatcttattcttaactgctgaatccatgaccattatttatgttcattggctcaaatagca

SEQ ID NO: 479801 - DNA, 884 bp, Homo sapiens
attcatatgatcaacagctgtttctcaagggtagatcatatgaaatctttaactttcctgctggcattcacctgtgcaagctcccagcttgcttgtctatgtctgcagctcgactttacagacttctctttgttagaaaatgacttgaggctgcttttcattaaaaagaaaagccttactgaggactcccatacccttaatatctgcctaaatgatttcttcttaactcctatatcatcagcaaggtacttctttcaaagagtctgcgaatcctttcagtattcctggtatgtttttgcagtagttcttggagcaaaagttcatgatgtgagtctccacacaatggagactcagaccaagtgggagctgttttcaagtttttgtgcagaggtgctcctagtagtctctgagggtgttttgtatttttgcagggttgatgataatgtctcctttatcatttctgattgcacttatttggtttttctctcttttactttttattagtctagatagaagtttaccaatcttaataaagaaccaatttttgggttcattgatctttttttgtctatgtgtctgtttttatgccagtatcatgctgttttgtttaccataaatctgtagtataatttcaagtcaggtaatgtgattcctccagttttgctcttttttgctgaggatagctttggctattctgggtctttcatctttccacataaattttaggaaagtttttttttctatttctgtaaagaatgtcattgttattttgagaaagatgcatggaacgcatggattgctttgggtagtatggacatttcaacaactttgtttcttccaatccatgggcatggaatatcttatcattatttggcaaataattt

SEQ ID NO: 479802 - DNA, 482 bp, Homo sapiens
tttccatttcctgaaaggcgccatggcagtgcagctcctggtcagactgatagagcagtgtgtggagactcacttcgtgaacttttgctcccaagaactaccacaggaacacaccaggaaagccaagaaaatccagagatcctttgaaggaactggattaccgctgcaaactcctgagacactgaaaaactgtgagcctgcttgctctctcaacagggaggttcgtggtctggggcgagttctcagccctggtcaccggctgcctcgaaatagactcagtgtcccgcacttccctggctacctgtatgactcagcagaagcagccataatcccccgggaatataacaccattagacagggaaccacaccccagcccctacagcagccacagcaagcccggcccaaggataggctgagctcagacatgcctatctctgcccccacctggtggtctttctctacctgctagctgaaggcaaagg

SEQ ID NO: 479803 - DNA, 1981 bp, Homo sapiens
tttacagatattatagtctaccttgcatcccagggatgaagcccccttgatcatggtggataagctttttgatgtactgctgcattcggtttgtcagtattttattgaggattttgcatcgatgttctcaggaccatcagctgctggtctgttggaggttgctggaggtccactccagaccctctttgcctgggtatcagcagtggaggctgcagaacagcggatactggtgagcagcaaatgttgctgcctgatcattcctctggaagttttgtctcagaggagtacccagccattctggatgaaggggtgggttgcccctccacacctgtgggtgtttctcataaggtggaacaagagacttggaaaagaaaaagacacagagacaaagtatagagaaagaaataaggggacctggggaaccagcgttcagcatatggaggatcccgccagcctctgagtccccttagtatttattgatcattcgtgggtgtttctccgagagggggatgtgtcagggtcacaagacaatagtggggagagggtcagcagacaaacacgtgaacaaaggtctttgcatcatagacaaggattttttctaattctttgaaaaatgacattagtgtttgatagaaattatgttgaatatgtagattgctttgggcagtatggtcattttcataatactgattcttccaatctatgaccatggattgtatttccatttgtttgtgtcatctatgttttcttttatcagtgttttgtagttcttccagtcgagatattttaccttctttgttaagtatatttttagatattttatttttttcagctgttttaatgtgtagaaagatgtaaaataagaactgatttcttgatttgattatcagcttggccattattggtatatagcagtgctactgaattgtgcatattgatttttattacctttaatgaattcatttatcaaatttaggagtcttctggaggagtcttttgggttttcaaggtataagatcatatcattggcaaaaaaagatagttcaacttcttcatttcctatttggatgcctttattcttttgcctgattgctctggctaaaactaccagtactaagttgaatagaaatgttcaaagtgggcttccttgtcttgtcccagttctgaaggggaatactttcaacttttccatattcggtataatgttgtctgtgggtttgtcatatatgacctttatgatttgaggtacattctttctatgtctagtttattgaagatccaagtcattaggggatgctggattttatcagttgctttttctgcatctactaggatgatcataggctttttgtttttaatcctgtttttgtggttaatcacatttattgacttcgatgtgtggaaacatccctgcatctatagcatgaaacccacttaatcatggtgaattatttttttaatgtgatactggatttggtttgctagcattctgttgaggatttttgcaactatcttcatcaggcatattagtctgtagtttttgtgtgtgtgtgtcctttcctggcttggttttaacgtggtacttgcttcatagtatgagtcagagaggattctctccttgaccttttggaattgtttcagtagaattggcaccagttctttgaacatctggtagaattcagctgtggatacatctgttcctgtgctttttcttggggggggggggagggatttttttttattactgattcaatctcattacttattattggtctatgcaagatttctatgtctccctgattcaagcttgggagtttgtatgtttccagtaatttctccattttctttagattttctagcttgtgttcatagatgtgttcatagtagtgtcagatgatcggttgtatttccctggtattagttgtaatgtttttatttttatttttgattataattatttgaatattctcttttttgtgaa

SEQ ID NO: 479804 - DNA, 670 bp, Homo sapiens
gcgcttaagacaaactaaaaggatgactctggtaaacacaccaacacgaatgcaaaacagccttgttgatgatatggagttttattgtctgcacggaagatcaaaccagccacaacattcctttatgccaaggtctaatccagagaaagtccctcagctgcaggtctgttggagtttgctggaggatgactccagatcctgtgcacctgggtatcaccagtggaggctgcagaacagcaaatattgctgcctgatcattcctctggaagctttatcccagaggggcacccccctctatgaggtgtctttcggctcctactgggaggtgtctcccaccaggctgcagccttgctggtcgatctcagagtgctgtgctagccgtcatcaaggctccatggacatgggacccgccaagcccggcactggagagaatcgcctgatctgcgggttgctgagactgtgggaaaagcacagtatttggatgggagtttcccattttttccaggattttgaataagtcagcctactgccttctaactcttatggtttctgatgataaatcatatctttaaattattgaggatcacatttatgtgtgatgcattattgcagatcacttctttcttgctcctctcaggattctctctttctcttggctttcagcagtttg

SEQ ID NO: 479805 - DNA, 1648 bp, Homo sapiens
gatggccgaataggaacagctccagtctacagctcccagcgtgagcgatgcagaagacgggtgatttctgcatttccaactgaggtaccgggttcatctcactggggagtgccagacagtgggtgcagtgcaccgtgcatgagccgaagcagggcgaggcattgcctcacccgggaagcgcaaagagtcagggaattccctttcctagtcaaagaaaggggtgacagacggcacctggaaaatcgggtcactcccaccctaatactgtgctcttccaacaggcttaacaaacggcacaccaggagattatatcccccacatggctcagagggtcctatgcccacggagcctcactcactgctagcacagcagtctgagatcaaactgcaaggtggcagtgaggctgcggaaggggcgcccaccattgctcaggcttgagtaggtaaacaaagcagctgggaagctcgaactgggtggagcccaccacagctcaaggaggcctgcctgcctctgtaggctccacctctgggggcagggcacagacaaacaaaagacagcaataacctctgcagacttaaatgtccctgtctgacagctttgaagacagtagtggttctcccagcacgcagctggagatctgagaatgggcagactgcctcctcaagtgggtccctggctcccgagtagcctaactgggaggcaccccgcagtaggggcggactgacacctcacacggccgggtactcctctgagataaaacttccagaggaacgatcaggcagcagcatttgcggttcaccaatatccactgttctgcagccactgctgctgatacccaggcaaacagggtctggagtggacctccagtaaactccaacagacctgcagctgagggtcctgactgttagaaggaaaactaacaaacagaaaggacatccacaccaaaaacccatctgtatgtcatcaattatgagattttttgtgattaattttagctcaaccattatctttagtgttagtgtattttatgtgttcctcatgacctggctggagcaccttgatgctgataccaaatacctccctgaactgttcagttatgataaggttaaggctttgtgtccccacctaaattgcatcttgaattgtaatccccaggtgttgagggagagactcacaaagagactggaagcattttgcccctgccctagagatctgtggaactttgaacttgagagagattatctgaaattggaacttatgtttaaaaggaaagcagatcttaaaagtttggaaaacttgcagcctgacaatgcaatagaaaaaaacaacccattttctggaaagaaattcaagcctgctgcagaaatttgtataagtaaccaggagccaaatgttaattgccaggataatggggaaaatgaaaaaggggcagagtccctttgaagagatatattagtgtcaaaagccaggctttaaaacttctatgagaacttttaatgaataagcataactgattatatagaggtgagaataggaatactggcatgatttggatctggatctaaacaactagggaaacacccagaggaggagaaggtgaggttaatcaagcctaaagaacagaaagcaaggcgtggagaaagaaagg

SEQ ID NO: 479806 - DNA, 870 bp, Homo sapiens
aaccatgttctaactaattctgagagctgcttaggaaattgcctcaacaaatagctatgaaagttgtgggctacagatggataatagtccatttaggatttgtctgcgcagtggatcctaagctgagtctggatgaatggacatggaggagggggaaagcaacaggcacagatgcagaggcaggaattgcagaaggtacacttgatagcacgtggccatatggttgggtatggggcctaattcttgaagtgaaggacctggacctttctgtggctgatacccaaggaaggctgcctaaggataaagagcacaaccccagtcatgtctttttgtggctctcaggccactccaggaagtcagagatcatcaaatccaagggtgttggcaatgggaaagaatacttcatatggaagagggtaaggatgagagcactggacaagaattctgatgcagtaacctcgtttaaattttctacgaagtgtatgtgggagcagctgcccctgtgagtcgtacaggaagtttgttattacctctcttatcccacttaaccaaggtcattcttcttccaccaattttaatactatatatcaaagtaagataaggacatcatcttttcattaatgatttgcctaagaaaatatacttcatacaattttaattattttaatttattgagcttttttgtaacctaatatttggtctatcttatagaatgttccatgtgcacttaagaaggatgtgaattctgctgtttttaagtactgtttcatagatgtctattaattcgagttagtttatagtgttgcctaaatattctatttttgttgttgttgatcttctgtctagtggttctatccatgattgaaaata

SEQ ID NO: 479807 - DNA, 559 bp, Homo sapiens
ttgagcgaagaagacaagaatcagccttcagtttgaagcggaagttgcaggcaatgagggacattgctatattaaaggaaaagcaggagaaagaaatacagacattacaggaggagacaaagaaagtccaagctgagacagctgcaaagacacgggaagtacaggctcagctcctccaggagaaaagattactggagaaacaactgagcgagccagacaagaggctattgggaaagagaaaaagaagagagcttaatatgaaggcccaggccttgaagttggcagcaaagcggtttatttttgaatactcctctggcatcaagagagagaaccagcagttcaagaaggaattactgcagctaattgagcaagcccagaaactaacggctactcaaagccacttagaaaacaggaagcagcagctgcagcaggaacagtggtatctggaaaagccagtcttcaatttctgagattctttcctcagcttggtttattctgctattaatacttgattgccttgtgaaattcttgtattgtgtttttcagatgtctcagattc

SEQ ID NO: 479808 - DNA, 568 bp, Homo sapiens
ccagccattttcacttcttttgtgattcttcacttgcttcaggccatctggatgatggtagagaacatggtaacatgagtgaatttcatgagcacgggcccattgccacacttcttttgttacaaagtgaagttctaaatcagaagcaatgccgtgtggaaaccatggcagtgtgtaaagcattctgtaagtccatggatggaagcaaatctgtatctaatctgatcaccttgggaaatggcttcaaaccaggggctcagtgtttgctgctgggagattgggctctcagtcatggctatagccaggcacgtgagcctaaatttcaggaatcgataacagattttgatgactgcagcaggacacatgtgctcatggccagtaggtcccagtcagatgtagaggacaaggtgctgatcagcaccttgaatcccccaaataatcatcctggtcctctgccccttcctctgccacctgtggctccagcacatccccctccttatggaacatgtggagcaggaggaggacacccccaatccctcatgggggaaaaatcaggataggttatgaa

SEQ ID NO: 479809 - DNA, 478 bp, Homo sapiens
gtagccttcctatcaaaaatccttaacccaattctttaaaatgcatttctttgatcccccaacgcctgcaccttcctctaagccttcttccaaaacctctcacaacggaataattgctcctcctccatctaacgacaagaccaagatagctatcgtaaaagttaaagacttaaaacaaactttggcaattaagacaggataccagttggaatggatcaaatattccatccacacgttaaacaaaagcaattgttatgcttgtgcacacagcaggccagaggcccagattgtcccctttccactaaggtggtcctccagtcgaccaggcatgggctgcatggtagctcttttccaggattctacagcctggaatagtaagtcatgccaagctctctctgctatatcccgaagtctggcaccctgtgggtcagcccccgagggccatccagcttcagtctcccaacactaagttcacttc

SEQ ID NO: 479810 - DNA, 744 bp, Homo sapiens
ccagaaagagactataagggagagtatgagaaatctagtccaaagtgcggggcagctaacatttagaggatggttgatgtgtttgaacacccagagagttgctggtcccaccttgacctttatctgccccaagcttattagcttattcccaatgtctgcccccaagcttatctcaaaatcatcctcttcctgtgaagctcaatgtggcctctggtttctcctttcaagatatagagaaaagttcgccttttaccttttctttatggctatggatagaaaggtattatttcctagtcagaagaagattccatatggaaatgatacacctgtttgtctaagatttttttcttgttccccattaaaaactcttctcctctctcagtctactctctatttgaccaaaggaaacctccatccatgtaaaccataacattgtccatgtctgttgaaaaatacttaaaaacatctattttctgtgccacaaaagaaagttacaaagaaacaagaaacaaaaaaatcttgtttcttttgtgggctacaaaggtaggccccagtgtctgttgttcccttctttgagtccacgtgttctcatcatttagctcccaattataagtgagaacatgtggtatttgattttctgtccctgcattagtttgataaagacaatgggttggaagccatcatcctctacccttatgtttctttgtggtctttatgctttgggaaaatacttcacttctacac

SEQ ID NO: 479811 - DNA, 495 bp, Homo sapiens
gaagaggggcagcggagacgccatctgcgcagcctggattctccagggtatggtcagcaacggagtgcccaagcccctgctcattccatggagtcccaggggttcaggatgcattcgaaaggggtacagactgaagatgaatggctacccatctagaaagaggggagcaggcatccctggttcccttctctgcctgacagatacccgagccaaggtaaggggtaacagatggcacatggaaaactgggtcacttccaccctaatactgtgcttttccgatggtcttagcaaacggcacaccaggagattagatcccgtgcctggcttggagggtcccatgcccacggagcctcactcattgctaacacagcagtctgaaatcaaactgcaaggcggcagcgaggctgggggaggggacacattcaaagctgtgtgtagagggaaatttatagcactaaatgcccccaagagaaagtaggaaatatctaaaattga

SEQ ID NO: 479812 - DNA, 546 bp, Homo sapiens
cgtgggaattcaagatgagtgagatttgggtggggacccagccaaaccatgatgcaaatgctgatgcacacaaaaacctggatgaacttcgaaagccttatgctgagcaaaagaagactgacaaaaaggtaaccaaagaaccaggagaatgcaataaaacagaagctaaaagaggagaggattttaaaggagggatggtaaacagcaaaagaattcatagagagtttgaagatcacaatgttaaaggtaaaatcttagatgaaaaaccagatctgtgtagatttttatgccaacgtggatatggtgaattaagagcaaagccaaaaggcctaacaggattttgcagtggcagcttgaagcaggagaaaaaacaaacagccaaagcttctaatgtgaacctttttcatacttttacttgggctatctggggtaatcctcttagttaatctttcttggcctcagtttcctcatttgtataactaaagtgttggattccattatttatcctccaacttctactgagaaagaataaataaataagtatgg

SEQ ID NO: 479813 - DNA, 1278 bp, Homo sapiens
cagtggccaccgtcttcaccgtcgtcacctcagcctagtcgccactccagttgaggcactgactggcgtcatgtctgccacaggggatcaagacctgatccaagaggaccaggaggctccagtgaaccaggagggagcgcaggccgaggccggaggtgaccgggagggcggtgactctggccccgacagtggcaacactgtggccggagtcgcagggcccatgagaggcctcggggaggaggagggtgagcaggcggcaggcttggccgcagcccccgggggtgggaacgccgaggaagactcagagatcaggatagtagtggagatggtggaggaggaggaggatgaggaggaggaagaggaggaggaggaggaagagaggaacgaggcggacaacttcgacttggtcgcggccgcccgtcgctaccccataagaggctttcgcatggagtttctggacatggtccactcccttctcctccgcatctatcacaacgaccacatcctgatcaggatgcaagagccccggctgttgctggtgcatgagaggctgggcgtgggggccgcgggtcctgagggcgagggcctgggcctgctccaggaggccgcgttggtcccagagcctgaggtgccagcagacctggccgagatggccagggagcctgcagaagagcccacagaggaggcctcagagaagcccacagaggaggccgcagaggaggagctttcagaggaggccgcagaggaaccgcgcaaagaggaatcggctgcagaggaggagtccgctcaggaaccggccacacaggagggtgctcccctgaaggtgtagtaacagtctatctgcagtggcggggaaacacggacccgtgcactcaaggtttcctagcaggccggcggtgtgcccacaagtggtgaatcatgtggtgaaatgggggtcggactcgggtggtgaagtaggggtcagggcctcctgaaattaaggccaatgtgtaccatgagtcgagccaattctctaacggatctatgatttttgagaaacatgccgcctctagcaccctgtgttgagagaaatctaagatatcaatgccatttgggggcaccaatgaatggcacgtagatagggtcatgagggactcgcaggaaacaaggacaacggaaagcaaaaacgccaatggcgagcatctttttgtcatggctttcaaaatgtaagattcttaaaagtgatccccaatattgagtgttacaggccctggtaaaatatacattctggagtttgta

SEQ ID NO: 479814 - DNA, 733 bp, Homo sapiens
aacaacctttccaagggatcctgccagatcgaccactctcctggtgcactagtgttttcataatgatacaattagatgtaatcagagctggccctgaaaatcgagagcatttgatctccacaggcctgattggctctaacggcagatggaaggagcctcaagtctctcaatcactgtcaaactgtgaggtggggcctgacaggagcagtggaggaaaaggtggtttaaggtcgtcacccaacacaggagtcatttgccctttctaccatgcagctcacacaaaggcaaatcccagtggagaatcaggaaagcaactgagagctgaagagaatctaccctggtgtccagaacgccttccacccctaaaagagggccggcagaggaaagaaacctggagagcacacacaaatgaggatgatctaagaattcacatcatgaaaacgagaatgatgacaataccactgccagcatgaccaaaaaaaaaaaaaaaaaaaaaaaagacagacaaattattgtgttattttagtgacggatggaagaacacataagactggattagggagaaagagcgatgtaacatacaatgacatccagtgtgcttcagagtgtttaagaattatggacactttagccatgaacagtctataggaggaatcattgatacaaaggacccgattgactgacaaagcaagccttatgtatagaaaggaaatgcacatttctggaaacctgg

SEQ ID NO: 479815 - DNA, 881 bp, Homo sapiens
tataattactacctttcaattctaaggtacaagattttgtcattccggattggaggtaaatgtcaaagaatgattaactaagatcaaaatgatatacctttttctactcagtattcattatacaaatgattttaaatactgggtgtgtgcccttaatattcagggctctaaaaaagaagcctttggcaactaccattctattctttacctccatgagattcactgttttagcacccatatatgaggacgtggatgaagctggaaaccatcattctcagcaaactaacacaggaacagaaaaccaaacaccgcgtgttctcactcataagtgggagctgaacaacgagagcacatggacacagggaggggaacatcatacaccggggcctaatgtaacaataggagaaaacagaagtaaagaaaacaaaaatctgggtgctaatgacggtgacagcaggaaaaaggaaggatctataaagatagtacacatagctgcaaacacagttgccaagtaccagcatgaaaaattgagacaacatggtctccaagggcagtgtctatctctagacgactatgcctatacagagtttccttctgtaaagagaatatccaccgaggttccccagaaccaaaacttcagactaaggtttcagcccacatttaggaggaacatggatggagctgaatgctattatcctcagcaaactaatacaggaaaagaaaaccaaatactacgtgttctcacttataagtggaagctaaatgatgagagcttatgaacacaaagaaggaaacaacagacactgggggtctacttgagagtgcatgtacccattaatatactaactaacatactatatctatcatttatatttatattt

SEQ ID NO: 479816 - DNA, 506 bp, Homo sapiens
ggtgtatcggcggcatgtgggatccagttcatgtaaggagggatgcggctgcatggtccaaattccataactcaggacttcctagaagggtttaaggaggcagaggagtttggctggtttgttgttttcatgactcaacccactcattttaccagcaatcaaaacgagcatggattctcactgcacctgctcagcagagagggcggcatccaaaccagtagatctgcaactgtggcttctgcaacaacagcctcagcatcacctatgcccatcctagcaacaaagatccccagactccgctccagacccaatggagcagaaatgttactaggaggagagactaagtctgctggtccacatagactgtggccacccctcccactaggtgctaaggcccagggagatccaaattctgtccctgagcctctggatggagttattggagatcctgaaggaaagccctgaccattgaggaaggatgggtcagggttaggcctgaagaggca

SEQ ID NO: 479817 - DNA, 539 bp, Homo sapiens
atcctgctttttctcactttctgtgggtcacgcagaccacctagcaaaagtttgctgcagcggtggggccctcatggagaacctctgccagggcagtatggaagggaaatgtggagtcggagcctcaacacagagttctactggggtactgcctagtggagctgtgagaagagggccaccatcgtccggaaaccagaatgatagatccactgacagtttgcactgtgtgcctggaaaagccgcagacagtaaatgccatcccaagaaagcatcaggaaggaaggctgtaccctgcaaagccacagaggtggagctgcccaagaccttgggaatccacatcttgcctcagtgtgacctggatgcgagacctggactactgcctatgttcactcaagaccccagggctttacaatcagccaatggcaaagccagccaggcctgtgtttttcccttcagggtgtcaagattccccaggtcccacatgggtccagatgtgctgtccaggggtcagggactatagtcaaaagccttagaagtct

SEQ ID NO: 479818 - DNA, 865 bp, Homo sapiens
aaaaggagagtcgttatctgcggaagatggcaagaccttgctccaaaatcctagaggcctttgctgtgattcacctatggggacctgccaaaggctccaaacagcacctctatctgccactgacacctcaagcactattggatctgctgggtcatatggcccaagtggcagagcagcttgcacagcagcctgaacctgttgcagagctttctcctgttctggaccccactcaaaactggcagctttttcgtcagggacccaatgtggtgattctgccagctgctcagtatatctatgccaattatgcattctggcactgggaaaatgacaacaggatgagtctgggaacccactggacctacttcaatgccctcactttaacagtagacacctggaaaggctgtgcatgcaccttttgttgcagacacagccaggaccgatactttgcatccttcaatccaatcaagttgacattcaatattaaccatcacagtccctaatttctttcagtaatgttttatggttttttgatattccaacagttcgattgtaatgtgtttcaatgtgagtctcttagtttttcctatttgaagttcatttagcttctttggtgtgtagattcatatattttatcatatttaacttttcatccattagttatttatttaaatattttattttcccatttctcttctccttctggcattcccataatgtatatgttaatacactttttgatgtttgacatttacttcagtttctgttcatttctttcattattttttctctatattcctcacactagatcatttaaattatcttcaattttgctgattcatttttctgcctgctcaaagttgttgaa

SEQ ID NO: 479819 - DNA, 615 bp, Homo sapiens
tggcaaagggatgtggaggattgcggtgggcctggagaaagctgtactatggggagtgatccggcgggctggtgcatggctgtggggctgtcccactggagctctctgccagccaggcataatccgccagtgcaggagctatgatgcagaaaccctgggcacccaaggctgccctgcaagcaggcattaccaagctggggcctcagtagaagccagtataacaagggatgctcaggccagactggttctgtctaatgggcaagactgctcgacagaatttaggtttgacagctctcccagtgctaaagtcttctatggaaacaagttgagcctaataactggtagtggacttgccctcctttcagaaaaaattacaaaactggaaaatacagataaaatactgtctgcagacgttggcaaacatgtagcatagaaccgtaatcagtgaagggatacaagaagcatggcatatgtttatccatcattttatgggtcataatttttggcttctttgcatatctaataatttttcactgtatagtaggtatctgtgaatattatggtattgagtgtctatatttgttgtcctacattagcaagatttgaattatattt

SEQ ID NO: 479820 - DNA, 891 bp, Homo sapiens
cctgacagtaggctccggagggaacacatgcaaagtggcaccggtgcccacctaagggcagagacatctggagaatgctccagggttgcacagcggcggccgggcaacggcgctcctcacttctcagacggtggggcggccagggagaggcgctccttactttccagacggtggcgcagtggtgcagaggcattagtcaagtgcggccgccaggcagaggcgcatctcacttcccaggcaggaccgccgcagggcagaggtgctcctcacttcccagaaggtgtggcagccaggcagaggcactcctcacttcacagaccgttgggcagccaaacagaggcgctcctcacttcacagacggtagggcatccaggcagaggtgctcctcacgtcccagtcggggcggcggccgggcagaggctcacctcacttcccagatggtgggacggccgggcagatgtgctccccacttcccagacagtggggcagtcgggcagagaggctcctcacttcccagatggtggggcgtctgggtagaggcgctcctcacttctcagatggatgccacaattgctatagaggaagaagagccagagggataaatagaatattaaattcccaggaaatgtgtagaaagaaagaagttaaatggattagagaaatttgtaaggtttgggaatttctctgttatcttttaaagtaaactttctaattctatctctttctctaccttcacttaatggctaaataactcttagatttgcccttttgagggtattttctagatcatataggaatgcttcgttgtattttattcttttttcttttgtctcctctgactgcattttcaaatagctcttaaaactcactaattctttcttctgcttgatc

SEQ ID NO: 479821 - DNA, 3916 bp, Homo sapiens
gattgatatttggctccttgttgcctatgcaaacttttgcaagtcaaaacatttttggcctcgatgtcattgaaacaccagaaggagacaagatgccacaactgattgttcaaaaggagttagatagggaagagaaggatacctatgtgatgaaagtaaaggttgaagatggtggctttcctcaaagatccagtactgctattttgcaagtaagtgttactgatacaaatgacaaccacccagtctttaaggagacagagattgaagtcagtataccagaaaatgctcctgtaggcacttcagtgacacagctccatgccacagatgctgacataggtgaaaatgccaagatccacttctctttcagcaatctagtctccaacattgccaggagattatttcacctcaatgccaccactggacttatcacaatcaaagaaccactggatagggaagaaacaccaaaccacaagttactggttttggcaagtgatggtggattgatgccagcaagagcaatggtgctggtaaatgttacagatgtcaatgataatgtcccatccattgacataagatacatcgtcaatcctgtcaatgacacagttgttctttcagaaaatattccactcaacaccaaaattgctctcataactgtgacggataaggatgcggaccataatggcagggtgacatgcttcacagatcatgaaattcctttcagattaaggccagtattcagtaatcagttcctcctggagaatgcagcatatcttgactatgagtccacaaaagaatatgccattaaattactggctgcagatgctggcaaacctcctttgaatcagtcagcaatgctcttcatcaaagtgaaagatgaaaatgacaatgctccagttttcacccagtctttcgtaactgtttctattcctgagaataactctcctggcatccagttgatgaaagtaagtgcaacggatgcagacagtgggcctaatgctgagatcaattacctgctaggccctgatgctccacctgaattcagcctggatcgtcgtacaggcatgctgactgtagtgaagaaactagatagagaaaaagaggataaatatttattcacaattctggcaaaagataatggggtaccacccttaaccagcaatgtcacagtctttgtaagcattattgatcagaatgacaatagcccagttttcactcacaatgaatacaaattctatgtcccagaaaaccttccaaggcatggtacagtaggactaatcactgtaactgatcctgattatggagacaattctgcagttacgctctccattttagatgagaatgatgacttcaccattgattcacaaactggtgtcatccgaccaaatatttcatttgatagagaaaaacaagaatcttacactttctatgtaaaggctgaggatggtggtagagtatcacgttcttcaagtgccaaagtaaccataaatgtggttgatgtcaatgacaacaaaccagttttcattgtccctccttacaactattcttatgaattggttctaccgtccactaatccaggcacagtggtctttcaggtaattgctgttgacaatgacactggcatgaatgcagaggttcgttacagcattgtaggaggaaacacaagagatctgtttgcaatcgaccaagaaacaggcaacataacattgatggagaaatgtgatgttacagaccttggtttacacagagtgttggtcaaagctaatgacttaggacagcctgattctctcttcagtgttgtaattgtcaatctgttcgtgaatgagtcagtgaccaatgctacactgattaatgaactggtgcgcaaaagcattgaagcaccagtgaccccaaatactgagatagctgatgtatcctcaccaactagtgactatgtcaagatcctggttgcagctgttgctggcaccataactgtcgttgtagttattttcatcactgctgtagtaagatgtcgccaggcaccacaccttaaggctgctcagaaaaacatgcagaattctgaatgggctaccccaaacccagaaaacaggcagatgataatgatgaagaaaaagaaaaagaagaagaagcattcccctaagaacctgctgcttaatgttgtcactattgaagaaactaaggcagatgatgttgacagtgatggaaacagagtcacactagaccttcctattgatctagaagagcaaacaatgggaaagtacaattgggtaactacacctactactttcaagcctgacagccctgatttggcccgacactacaaatctgcctctccacagcctgccttccaaattcagcctgaaactcccctgaatttgaagcaccacatcatccaagaactgcctctcgataacacctttgtggcctgtgactctatctccaattgttcctcaagcagttcagatccctacagcgtttctgactgtggctatccagtgacaaccttcgaggtacctgtgtccgtacacaccagaccggtaggtatccaagtttctaacacaactttctaactatttttttattattattttcagttgatgtagaactttacaaaatctattgacttcaaagagggatcaaaacaatcatattctacagatgtacccaatagatatatggattcaattaagtttggtagaagatgagaacaaaataactactgatttaggaaaattggatgcagaataataattatagtaggggcaattttgtctgtagatggcagtatgacaattcttgctagaaaatatattgaaaaaaacttcaacacaaagggttgtagcactgtcctcagtaccattgtgggcatgaggatcagaatagtctgggctagatacatcacattaaagcttttcagaatctgataaatagctctaaatactaatgatattgagaagcctagcttcacttgggaaaatctgtggctgttcacagaaattcagcaccaagatattccccccatactctaccaggccttcaggtcctcataaagaaaagtgtcgttttcagattaggaactcaaaattattttggtgcatcaaatctacaaatgctagcaaaataactgagcactgaaaaagaaattatgtatttaaaaattcaaatgcagtaggtgtcttctttttaaagaaatatcatacaaaatgggagaagtgacagccaatacaatacaaattcattgttccttaaggaaatacttagagtggaataaaatattactgttagcagaaggcagaattattccaatttattttaaacagtgagaaatgcattttcaaaatgagggtttggggaatatttacagttagttcattactcatctgtatagaaacaggaaagtggaaaataaaatgttctagtagactataagagacaagggaattcatctgaaattttatgttttataaagggaatcaaatactttctagttctcataatttctcattctccttgatcattctataggttgtttttctgacttggatgttctgaaaatatatggaacatttattagataggagtatgaaatgacaatcaactaattttctcaagatttgaaacttttgtttctaaaaaataaactaaattgtgcctttttctaagtgtttaactgtgccatggtgccattcagaagaataaaagtctgcccaatttattgtgacttttcctgcataatttctatgtacattaaacaggtttataattcacttgttcttagacttcatacatataattagtcatttgtcatttatatatttcaaaatcactgcttcagagaaataatgtagaagcatcatggaggttatggctttctatgtacatataagatctttacgtttgaggatcatatttaaagact

SEQ ID NO: 479822 - DNA, 949 bp, Homo sapiens
acccgattagttagacacagagccctgattgtttgcagcatgataataagctctaaaccagggaactatatcagttgcatagacaatgaatccagtctggaagataaattgttcactgaggccaagaagcaggcttcagggtcaatcaaatacttggctgctattttgaaatgcgtgttactgtttcctgcttgtccaggtgagattgacagcagtctccaacttcttgttcactttctggtaaatgaggccgccaaactctgtcccgtcattcacattagtgtgaaattggaattcatcagtcttgcagccaactgcaaagttgctctgggtcactccggactttgcagtctcaaaattcatctggtagccggccagccagcccttgtaacccagcatcagagcagcccggatggaaggcccagcaatgaggtggctatggccggggctgctgtgcggaggcagagaactaagtggagccagctgcggggcccaactcccgtttttaaaaccatcagatctcaggagacccattcactgtccggagaacagtacgggaaagacccacccccctattcagtcatctcccatcagttccctcccacaacatatgggaattatgggagctacaagatgagatttgggtggggacacagagccaaaccatatcaaccaccaataaagccaatttaataaaatgaagaatatatgtgtatgtgaaaaatactatatgttataatctgtaaacaaaacatatcatagaaaattgctcatatttatagagatatttattatatatgtagactgtgttcttattgcgttattaatatctaaagttacattcgaagtctttagtttaatctggaaaatcatctcaatttactactgcatacttcatatgaaaattgcttttcagtttttttactacaaaatatacatctggatatct

SEQ ID NO: 479823 - DNA, 4121 bp, Homo sapiens
tcttttctgcactgttgtcatgatggtgaatggtctcacaagaattgatggttttaaaaatgggagtttccccacacaagctctctctttgcctgctgccatccatagacatgatttagggtatcgggtggaagaaatttctaagcagcaaagcattcaagaggtgactcaggtgctgttaaaggcattcaattttataagggaagcagaggataaaagttcagaaaatttggagcctgacaatgcgatagaaaagaaaaacccattttctgaggagaaattcaagcgggctgcagaaatttgcgaaagtaatgaggagccaaatgttaatccccaagacaacagggaaaatgtctccagggcatgtcagaggttggggctctcatggagaacctctgctagggcagcgcagaagggaaatgtggggtcagattccccacacagggtccctactgtggctccacctagtggagctgtgagcaaagggccacagtcctccagaacccagaattgtagatccaccgacagcttgcacagtgtggctggaaaagctgcatacactcaacaccagcccatgaaaatagccaggagggaggctgtaccctgtaaagccacaggggtggagctgcccaagaccatgggaacccacctcttgcatgcaagacatggaatcaaaagagataattttggagctttaagatttgactgccctggtggatttcggacttttatggggcctgtagcccctttgttttggccaatttctcccatttggaatggctgcatttacccaatgcctgtacccccattgtagataggaagtgtgtatctcttgggagacattctgacaattcctcaaaatgttaaacataggttactatatgacccaacaatttcacacttttctatatactcaagagaatttcaaacatatatttacatattaacttgtacacaaacattcacaacatcattattcataatagctacgatatggggaatgacccaaaagtccatcagatgctaaaaggttaaccaaaatgtggtatattcataaaattgaatattgtttggcagtaaaatctatgaattactgttatatgctgcaacattggtgaatcttagaaacatgctaagtgaaagcagttagacacaatagggcatgaatcgcatgaatctatttatataagttatccagaataagtcaatccatagagacagaaagggaattaattgttgccagggccttgcaggagggaagaacaaggagtgattgctaatagatacagaatgactaaaatattctaaaaatttattgtagtgttggtttcacaaccatcacagtttatttgtatatatattaggatggtacaaaagtaattgtggtttttccattaaaagtaatggcaaaaaccacaattgcttttgcatcaacctaacctaatactaaacaccagtgaattgtacaatataaaagggttcattttagggttaattttatgtcttgttaattatatctcaataaagctagtataaaaaaagaaatggagtgctaatactaaaaatgaataaataagtcaataattgacagtcaaaaatagtgtgatctctttcaacttttatagccatcatcattagtagttgtaatagtagtgatagcagtagcatttcattgttattgactggagtatttgctcttggagatataaatttatttatatcagagtgcaggagagtaagattgcagccatttctaacaaagaataatactagatgaagacggatgttacactaagctcagggcatacaatgcaaatgcacagagcataattatttttattttagaaaacttccagtttaaatttactttctatattaatttgaatatctatgtgactctttaataagtacagtattaaatttatttttattctgatattattgtgttaataagaccctttttggaaataaataatgcatcatttagaagtaaaatctgtatgtgttatagaattatgaagcgacaatatctccagttgagaaaactgtgtagagataaagaagaaaacataagaaatataaacatggtaagtaaacggagctgagtttttcaaaattagtcaatctttttaatctaatcaaaaatattaaaatatgtatcacgtgatgattcaatttaaaatgcacactcagaagctatcaactttttgcctactttctttctttatggctaggaatgttagaattgttatagttatcaaacaaaaacatttctaaaacaaattctacaattactttgaaaaaataataaagaaagcaaatgctatgtaattttatgtgcttgaatttgaaaataaactgtataaaataccagacaaacagatttgtggtagtaagctgacaagagtaactagtgagtttctgcatttttcaaatgcttgaagtaaatacatctataggctgaatgtctgtgtctctgctccgaaatttatgttgaaatcctaacccacaatgtgatagtattaggagttatggccttctgtaggtgattagcttatgacatcagatctctcatgaattgcattagtgtccttataaaagagagcttagagagcttccttctcccttgcctccccaattaagtgaagtcacactgagaagacagctgtctctgaatcaggaagcaggccctaaccagacattaaatttgatagtgccttgatcttggacctctcagtctccaaaactgtgagcaataaatttctgttgtttctaagccaccaagtctataatattttgtaatagttgcccaaatggaatgagacaatatcatatagctaaaagcttccataaagagttcacagcaaaatgaaaaagtaaccgtatcaatgtgagtgatttaaaaacaaaaaacaaatttttgtataaattatgaaagctaaattgttctacattaaataattctataagatgctattctataaaacttgtatttagtctaatgatgtccttaaggaaattagtcattatattacttgcagtctgattcatgaggattttccatataaatttcttcctagtcttaacatcaaaaatatttgtgcatttttctgagccagtctcctgttttcatctgataggccctattaactatgttttggtttctctagtatgtgtatggatttaatgatatgtatttttcatacaagcttcattctcagatatgttttatattctactattgtcatttttttctttgtcatagaatttataatatttctctccttttaaattttcttggcttacaactctaagggggtccgcatgagagggtcgtgatcaattgagcaagcagtggggatgccaatgggtcataaattcaatctcttaattccatgtttcttggagattttgtttgtttcttgtcattttttaaattcttgtctgactgtcttatttcagaaagccaatcttcagagacacaatgctgagagcaatgctgtccagtggaacatcctgcaatgatggtactgttctttattggtactgacaatagagtagctactacttacatgtggttgttaagcaactgaaatgcagccagtgtgactgagaaagtaaatttttaatcttattttattttgactactttctatttaagtaaatacatgtgtctgtgttgcatggagtggatatagagatcaattttaagcaggaaaaattcataaagaagcctagtatgtccctggtagaagttgaattatcttccaagccctcagatttttcaccttccactaattaaacaaaatattatgaaatcctaaagtttcccagagttggccattggatttcagaggaagggtaaggtgaaagccaagtgattgaggataggtactttccactgctttctactcctatactttcaaaaaagagcagaattttgtgtatttggtaaattaatttttcacttaacttatttgcataaagatctgtaccacttgaaaattttgaaaaccactaccttgtacaacagattgtacccatattcagaaagcagtacacgatatgtttccattatgtggctgtacatatttataggaagggaaagttgctattcatgc

SEQ ID NO: 479824 - DNA, 1050 bp, Homo sapiens
gcagcgaattaagaaaccctgctctaagtcttttgaagatttaagaaaagcttagtgttgtacatgatgtatgacaccaacatttctccttgtgaggaccgtaggaagctttcaatcatggcagaagacaaagggcatgctgacacatcagacgggcgtctgcctgtggagcaggcctctttgtgggaacccaggcttttccatacattttctgaaatccaggggagctcaagattcttctaccctcagcaaggctatgtaaaaatcaatgctatggatgcctgtggggtccaagtacaagagaatatagcttttggtgtaccaaaggaaggaggctgccttacatctatgagtgactcagcttgccaatttctgcagagggagccagcagggatttttgacaagaaatgtgttgaatttgtaaatgtattttcaaggtattaccatcatagtagtaataagactttcaattcataaacatggaatgtctttatatttaaattatctttaatttttaatgatattttatagttttcatgcacagtatagttttctcatacttctttttttacttttattcctaaatatttaattctttctagtactattataattataattattttcttggtttcctttttgataataactatgagtttccatacatgcccactttcaggttgagaaaatttctattcctagttttaaaaattaatttagtgtttttcatcatgaaaggacattgaattttgtcaaattttttctgtatctattgagatgtttctgtatttcttgtcctttattctattcatatggtatattattttattgattttcatgtactgaattaactttgcattgctgggataaattctacttggttatggtacgtaaacctttttatgtgtggccaaattttgttttagtattgtcttaagaatttttgcatttatattcatacggaatgccagtctgtggttttgtggggtttttgatgcctttgttatatactgaatacttgtgtttccccaccccctaaattcgtatctc

SEQ ID NO: 479825 - DNA, 715 bp, Homo sapiens
attagtcccgtgtcaggacagcactgagtttaatgcctcacaatttctgtgttctccctcctcaatacccagagatgccctctgtgccatgcctctgctgccagggggtgagggaggggtggagtggcaattcaagactgttttttaaaaatatcttcagtatctctttcagtgatatgaagacaaaaacagatactatgagaactcagctgatatttggttcttatgaagatgttcagatgtgtctggagtttcttccttctggtgggttcatggtcttgctgacttcaggagtgaagccgcagacctttgcagtgagtgttacagctcttaaaggtggagtgaagctgcagaccttcccagtgagtgttacagctcttaaaggtggtgcatccggagttgttcgttcctcccatccggaggtgttcgttcttcccagtgggttcgtggtctcgctggcttcaggagtgaagctgcagaccttcgcggtgagtgttacagcttgtaaaggtagtgtggacccaaagataatcatacattttaactctagaatttttacttgattcttttgttataattctaattatttattgatattctgtatttggtgagacattgtcattatagcttctattacttatttaagcataattttctttcacttttcttgaaaattctaaattgtaggtatgtaatatagcaactgtgtttactt

SEQ ID NO: 479826 - DNA, 986 bp, Homo sapiens
ctgctagttgctagctgcaatttggtgagggccatctggaactaatgtaatggcttcatactccctcctgaggcacctttgtgtcccaagctttcatttgaagccctggaatggaacaccagatataaggcagattaccgtgggttttgagggccacagtacaggccagggagggcctgaaagctggggaccgggttgctggtcccatgaactgcaatgtggacttgtgatgcctattctgggcccacccatggctgcccatggcttcccatggactactagagcagggcagaggatggtcagaggattaacagggcagagagatgatgggaccaccagctacagagaggaactaccctctctgctgatagctggaggtgatggaaaatccagttgcagagaggagctaccctgtttgttgagagctgcagagacaacctgcccacacggaggagctaccctctccagggcctcctctttgccaagaatggcagacatcatgacagccagttgcagtgaggagctgcactcttcagggcttcctctctgctgagaactgaacaaatgatggataacctgcctacagagaggagctacccactgagggtctcctctgagctgttgtaacactcaataaagctcatcttcctcttgtttaccctttacctgtctgcatacctcattcttccttgatgcaggacaagaacttgaacaaaggcgccctagtcacagaagtttctgatcagaaaattgacactctaatggtgccctaacaattatgtaattattgatttatttcagctaacaccctactggttatagcaacagatgcaaaatatggtaaattaatttgtaaaagatcaatgtaaagtattatgtcttcatgttgtgactgatcttagcccacttgatcatgtgagttattagtgataataaaatgttctcagaatttcaaatattaatgaaaaagggaatcttgtaaagta

SEQ ID NO: 479827 - DNA, 2651 bp, Homo sapiens
taagaagaagagacatcaggggcatgcatgcacagagaaaaggccatgcaaccacatgcgaaccattacaccaccacctgggctatgctctccggctgccgctgccaccaccccgcccccaccttcgcctccccctccgcctccgcctgcggtgcacattaaagatccaaagtcatgactgactccaagtatttcacaaccaataaaaaagcagaaatatttgaactaaaagctgaactcagcaatgaaaagaaagaaaagagaaaggaggctgtgaagaaagtgattgctgttattaccgtggggaaggatgttagttctgtctttccagacatagtgaactgtatgcagactgacaatctgaaactaaagaagcttgtgtatctctacttgatgaactatgccaacagtcagccagacatggccatcatagctgtaaatagctttgtgaaggactgtgaagatcctaatcttttgattcgagccttggcagtcagaaccatggggtgcatctgggtagacaaaattacagaatatctctctgagcccctcctcaagtgcttagaggatgaggatccctatgttcggaaaacagcagcagtatgcgtggcaaaactccatgacatcaacgcccaaatggtggaagatcagggatttttggattctctatggggtctcatagcagattcaaatccaatggtggtggctaatgctgtagcagcattatctgaaatcagtgagtctcacccaaacagcaacttactcaatctgaacacacagtacattaataagctgcggacagccctgaataagtgcactgaaggggccagattttcatgctggactgcctgtctaattacaaccctaaaaatgatcggaaggctcagagcatctgattctgactactacaatatgctgctgaagaagttagcccctccacttgtcactttgatgtctggggagtcagaagtgcactatgtctccctgaggaacatcaacttaattgtccagaaaaggcctgaaatcttgaagcaggaaatcaaagtcttctttgtgaagtacaatgatcccatctatgttaaactagagaagttggacatcaggattcatttggcatcacaagccaacattgctcaggttctggcagaactgaaggaatatgccacagaggtgaatgttgactttgttcgaaaagctgtgtgggccactggacggtgtgccatcaaggtggagcaatctgcagagcactgtgtaagcacattgcttgatctaatcaagaccaaagtgaattatgtggtccaagaagtgattgttgtcatcagggacatcttccgcaaatactccaacaagtatgaaagtatcattgccactctatctgaccctgtcatggctaaagaagtagtcttgtctgagaagccactgatctctcaggagacggaacctattgagccaactgcgttggaggagctaatctgccacattggttctttggcctctgtgtatcgtaagccttccagtgcttttgtggaaggaagtcatggaatccatcgtaaacacttgccaattcatcatgggagcactgacacaggtgacagccctgttggcaccaccaccgcaacgaacctggaacagcctcaggttatcccccgtcaaggtgatcttctggggagtcttttaaaccttgacctcagtctcccagtcaatgtgccacaggtgtcctccatgcagatgggagcagtggatctcctaggaggaggactagatagtctggtgggacaatccttcatcccatcatcggtgcctgcaacctttgctccttcacctacacctgctgtggtcagaagtggactgaatgacctgtttgaactctccacagggataggcatggcacccggtggtttaactggtgtcatccccagcactcctctggccatccatacaccactgatgccaaaccagagcattgatgtctccctgcctctcaacaccttgggcccagtcatgaagatggaacctctgaataacctgcaggtggctgtgaaaaacagtatcgatgtcttctacttcagctgcctcagcccactcaatgtgctttttgtagaagacagcaaaatggagcaccagtatagtttggtagtttgtaattgagagctcatttcaaaagcagaaaaagacaaccaatattaaagcaagaaaaagtgtcattgaaaaaaataataaaaactttctcaactttcaaacagaaacacctacaaagaatcagcactactcatgttcctttctgactggtctttggtgttgattcatgaaacttaagccgattttattttctcacttattcaatattgggacttcatttgtagatttatgtgcaaactgggtttttcttttgggcattttatttctgaatttttcaaaagaacacaaattattcttaggtttggatgcctaacatagtcccaaacttggaggctttgttcattttttaaaattattttttttgatggattgggttaattcaaaagcctcatctttgagccctgaagttttttcttcatcttgtttgattctattttttagactttccagtgctttctgcatttctctaagtgtgtccttgatttccaggagttgtgattggtttttattta

SEQ ID NO: 479828 - DNA, 2504 bp, Homo sapiens
tgcgctaaaatcacagaattcaacactatataattcattcatctcttatactatgataccagagaagcccttggataagaaagaaaagaagaaaggttcacagttgaacacagtcaatctgtacctgtatgcatctggtggaagcctgcatggaactggatgctatattggtggcgggaataagcatgttggagaaaccaaccccacaccacccggcgggtaccccaagtccagcggagacaaaggagttagaaagaaacagaataagagttcaaaaggcgggtccaggggaccggagtgttggaggcttgctcagggcccagagctcttgggctccgcctatttattggtttacaagctctttgttcttagggcagatgggaaggaggccgcccatggctccctgtgggtgtctcgcacagggaagaccaactcatctggcaccctagaaactctctttcccacatcccaactactggggaggctgaggttggaggactgcttgagcctcacaagtgaggctgaaatgtgccaagatcatgtcactgtactccagcctgaggaacagtgagattgcctcaaaattcttttaaaaagattttgtaatttcagaagatttcaacatgtattatcttgtgtaatatttcaaaatgtattgttatgttatacagtccataaatacacatgatatttaaatagtcactgtagtcgcaataaaatgtattgttatgttatacagtccataaatacacatatttaaatatgtcactgtacatattattttatgtaatatttcaaaatgtattgttatgttatacagtccataaatacacatgatatttaaatagtctacagtgactatctaaagtgagcattagagctcattttgtctctaatgctttcaactgacttttactttgtcattaatatagctatactgctttcattttgtgatttgtttccatttatttgatgtaacttgcctagtcttttactttctactttttcagtttgaggtatattatttttaggtaaaatatagttagaattgtttttcacccaattggtgatttttagtttttaaaattattgaataggtttgccaatttttatttaaagtcttaagtttggtctcacttttgtcatcctcttttaagccccattttctatatttatatagtccttcatttattttctaacttgttctgcataatctgtgctttcttttccttttctctctagaaatttagaaaatgtatcctctctttttagtgccactagtggttatttttgtaatttaaaaagaatgcatagggctgtattcatttatttgtcacttttagaaataaaattatatacattgagtttatctggaacataagaatattagtactttaaaatttcttcccaccttttaccttttatcccaggattttagattttgtacttttgttcaaaactaaaatttaaatctggtaggaactggtagccataataatttaagtttattagacaaaattcaatgttatgctaatttgaatgcatatcattcctttcataactcaacttttctattgactgatttattgatttttattctatttttcagttgcatagattatagattatgtctttaagtaaatttatcacaaaagggacagaattggggtactttagtttttgtacatgtaagaatatattaaatatttattctgatgcctttacacatgtatgacaaattagatgaatataaaatttggggatcatacccttttacctaaaagtagatatctcttaggtatctatttccttctgggaactaatgttgctgaggaaaagtctcattagaatgttctgtttcatatgccagaaattttaaagtttttatcttttcttgaaattttataatatataataaatttcagtattggtgtttgtccatttttattactatttctttactcatgaaaagcccatttgaactgccaaatcactttttttttttttgttttgagagaatgtacttccattaaattattgagaattttttcctggttatttgttctggtcctatcttcttgcatatcagttgttgatatgtcaaatctctattatctgtattctataactacattttcactaataacttccaattgttaatgtgtgctacttcattcagtataaagttgtcaagtgtattactggtttcattttacttattttgttttttatatttatttttatttaggatttttgaataaaaaattatgcctaaattttttattatatcccagattacattctttaaatccttatttgaatatcatagaagcttatgttgacatttttaaattacaaaggatgaaacttaataaattcatcaagtagttgttgaaaatgtatatttttttccatttctttgatagagtaaactctatgatcattcagagcattataattgctttagcttttctaatgaataaagtcactgtatattactactt

SEQ ID NO: 479829 - DNA, 1550 bp, Homo sapiens
gtcagggcagaagaagggtattttaaagttaatggagaaaaatataaggcaactctcacaggttgcttgatggcagagaaagaattcaaaatgggttgtaaggcagtggagacaaatcgcaacatcaacaacgcatttggcccaggaactgctaatgaacgtacagtggaacaaccgatgatgaccagctcagtggttggactgagaagaagctccaaagcagctcccaaagccaaacttgcaccaaaaaaaatggccatggtcactgtttggtggcctactgccagtctgatccactatagctttctgaatcccagcaagaccattacgtctgagaagtatgctcagcaaattgatgagatacaccaaaaactgcaatggttgcagctgtcattggtcaacagaaagtgttcaattcttctccaggacaattgccaaccacacgtcacacaaccactgcttcaaaagttgaatgaactgtgctgcgaagttttgtttcgtccaccatattcatctgacctcttgccaactgactaccacttcttcaagcatctcaacaactttttgcagggaaaacgcttccacaaccagcaggatgcagacaatgcttccgaagagatccgagctaaatcagaagaaaataacaaggaagaaaaacctgatagtaagaaggtggaggaagacttaaaggcagacaaaccgtcaagtgaggaaagtgatctagaaattgataaagaaggtgcgattgaaccagacactcatgctcctcaagaaatgggagacgaaaatgcggagataatggaggagatgatggataaggcaaacaataaaaaactggctgctatcgaagccctaaatgatggtgaactccagaaagccattgacttattcacagatgccatcaagctgaatcctcacttggcccttttgtatgccaagagggccaaagagcatgagagagcccagagggaggaagaagccagacgacagtcaggagctcagtatggctgttttccaggtggctttcctgggggaatgcctggtaattttcctggaggaatgcctggaatgggagggggcatgcctggaatggccggaatgcctggactcaatgaaattcttagtgatccagaggttcttgcagccatgcaggatccagaagttatggtggccttccaggatgtggctcagaacccagcaaatatgtcaaaataccagagcaacccaaagaaggagactatccccatgaccagtactgccccaggcccacagcaagtactgcttttctaccactgatgttcactcatggtctacggacccttcagttagcttgtagcaaatgctgccaggcctgggtctctcccttcggggcaatgggatcccttctaatcagggtgagtccagaaatgctttctagaagccaaggcctgaaatcaggcagcccagaagcccactttgtgttctattttactacggctgagctagtacctaaactgcaagataaagtctcctttactcttccctctcctttactcaagcagaaggagtct

SEQ ID NO: 479830 - DNA, 693 bp, Homo sapiens
gccactgaattccatttgacagcgctgagttcaatgtctcacaattgctgtgttcttcctcccccagtgcccagaaatatgctccacaccaaactgcagctgcaggaggaatttgttcccacagttatggaggctaataagttccatgttcgctgtctgcaagctgaagaaccaaggaaagctggtggtgtaattcactctgagtccgaaggcctgagaatgggagtatctacgcttatgagtatgcagtttgagagagattttgacaaaccaaagattgtccaaaatggagtgactaaggaggaaaaagtgactctggcttttccctttctagacaaaggcattctatgccaagacattgagttaaagaaggccttttcttgctattctttagtaaagtcttgtgtacattttggttgttggtatcataaaatcttccagaaagtgaaacttggattccacaaagagaaaagaaataatctttagaatcaacaaaggcactgtacaggtcatttagttggcaacttgaaaataagagtatgagtacaaaatgtaattttattcctccattccattaataagaaagcagctcactagttagagttctaacataatttttaaaaaattacttaatgggtatggtgtacattattcagatgatggatatactaaaagccaagacttcactgttat

SEQ ID NO: 479831 - DNA, 1766 bp, Homo sapiens
gctgctaaagttacccggaacgggagtcattatgacccttatggtaccccgagaggaggaatggaaacttttcttaactgagtcgggccaagagataagaccagctctggctaagtggtggccaagagtgtgggcagaagacaaccctccagggttggcagtcaaccaagcccccgtacttatagaagttaagcctagggcccagccggttaggcaaaaacagtacccggtccccagagaagctcttcaaggtatccaggtccatctcaagtgcctaagaacctttggaattatagttccttgtcagtctccatggaacactcccctcctgcctgttcccaagcctgggaccaaggactacaggccggtacaggatttgcgcttggttaatcaggctacagtgactttacacccaacagtacctaactggtacacattgctggggttgctgccagctgaggacagctggttcacctgcttggacctgaaagatgctttctttagcatcagattagcccctgagagccagaagctgtttgcctttcagtgggaagatccggagtcaggtgtcactactcagtacacttggatccggcttcccaaagggttcaagaactcccccaccatcttcggggaggcattggctcaagacctccagaagtttcccaccagagacctaggctgcatgttgctccagtacgttgatgacctttttctgggacaccctacggcagtcaggtgcgccaagggaacagatgctctactccggcacctggaggactgtgggtataaggtgttcaagaaaaaagttcagatctgccgacagcagcatgactgtgtagaagtgttggactcagtttactctagcagacctgacctccgggaccagccttgggcatcagtagactgggtactatacgtggatgggagcagcttcatcaacccacaaggagagagatgtgcagggtatgcggtggtaactctggacactgttgttgaagcccgatcgttgccccagggcacttcagctcagaaaactgaactcattgctttaatttgggccttagaactcagtgaagaggctcgaaaagcagcatctgcccccttccgggcatcagtcacagcccccctgctccctcaagcacctgatcttgtacctacttattctaaagaagaaaatgactttctccaggcagagggaggacaagtgatggaggaaggattgattcggttaccagatgggagagtagctgtgccacagctgctaggagctgcagttgtactggctgtccatgaaaccacccatctaggtcaggaatcacttgaaaagttgttaggctggtatttctacatctcgcatttgtcagcccttgccaaaacggtgacccagcggtgtgttacctgccgacagcataatgcgaggcaaggtctagctgttccacctggcatacaagcttatggagaagccccctttgaagatctggatccaggtggacttcacagagatgccaaagtgtggaggtaacaagtatttactagttcttgtgtgtacctactctgggtgggtggaggcttatccaacacgaactgagaaagctcgtgaagtaactcgtgtgcttctttgagatcttattcctagatttggactgcctttatggatcggctcagataacgggccggcatttgtggctgacttggtacagaagatggcaaaggtattggggatcacatggaaactgcatgctgcctaccggcctcagagttcc

SEQ ID NO: 479832 - DNA, 615 bp, Homo sapiens
tgtgttagtccattttgctgcctcagtaatggtagtctggggaaggtacactcacaacggtccccagtggggaaggcctctgctgcatccacaacagtcgacagggcccatgtcttacaatcctagtgaaggggagcaaacctccagagatccacattcaaattatccggatgccagggttggggcccagtcctgcactcaggtgcaaggaaaatcatacccaggtgatgtcacaggtgggagttggatggataatgcagagaggaaaatgtctgccgactctggtttagcaatggacttaggagcacagtgtgtggtgacttggtggtaccccactgtgatgatgagcaccccactgtgtgatgaacggcagaagtggctgtggggcatgacgagccgcagacaaaactcctcagacaccgagttaaagaaggaaggggtttattcggctgcgggcattggcaagactcctgtctcaagagccgagctccctgagcgagcaattcctgtcccttttaagggctcacaactctaaggggttgtgcgtgagagggtcgtgattgattgagtaagcaggggattttaagccagcaatagtaaataaaagacaaagaa

SEQ ID NO: 479833 - DNA, 612 bp, Homo sapiens
tctggaaagggtagtgtgcgggagtggggatatgcaactctttccaaagatgctgttgagccattccctggtggggttttcttgtgaagaagctatactgcatgatcatagcacagcctccatctggacatatgacatatcatatgttcattatgatgtggaagaatacatacctgaggctgaaggcccaagagcccccaggaggccaccggtgccaagtctcagagtccaaaagccaaagaacctagagtcatatgtccaaggcaggagagaaaaatgtatcccattccaaaagggaatgagaaagcagagaaagagaatcccccttcttctgattgtttttcccaacagggcccacagcctatttgattgtaccttctcacattgggggtgtgtctactcacacaccaatcaaccttggaaacagcctcacaaagacagagacacctgaccatgtgctataaaagaaaaaacccattttctaggggggggtttcaaacatgctgcataaatttgcataagtaacaaggagttgaatgttaatagtcaagacaatggggaagatgtcttcagtacatgtcagaggccttcacagcagcccctcttatcaca

SEQ ID NO: 479834 - DNA, 805 bp, Homo sapiens
agggccaaagtatgcaaaccaattcccggatctctgtgggtgcccaagtggctgctctgctgagactgcacagctctgtcttcggatccaagaccctgatggtgtgggctcacgaggggatctccttacctgcatgttgcaaagatccgtgtgctaagtgtggtttcccaggtggggtcacacaattactcaccacctcctttcgctggggatgggagctcccctggctctgtgccactcccaggtgggccatcgccccgctcagcttttcctcattctccatgggtcaagctgtccaattaatcagtcccaatgcaagagcctggatacttcagttgaaggtgcagaattcacttgctgttttctttcctcttccactgaagctgccctatcagcttttggttgctttaactcagactggcacatcagagttaaactattatcttgcttaagccactgtaattttggggtcgctgatattaatgaatacaacatcttttcctcttatgactttgcttttttaatttttggttttcttatttcaataggcttttgtggaacaggtggtgttttttacatgtatgtatacattgtgaagattttctcccaccctgtgggttttctgttaactctgctgattatttattttgctgtgcagaagcttttaagtttaactaaattattgatctaacattcatttaggcattgcaagtgagttagagattcaactttcctttttttctaagccccaagccggttgtaccaacactacattaaggtttttaacattaaaataaatatcatt

SEQ ID NO: 479835 - DNA, 623 bp, Homo sapiens
tctgtgagggtaacacgatggcacacgtttacctatggctcagaagaagaaagatgttggaaagtttggaacttcctagatactttttgaatggctttgaccaaaatgctgaaagtgatatggacaatgaagtccaggctaatgtggtctcagataaagatgaggaacttgtttggaaatggagcaaaggtgacatttgctatgttttagcagagagactggcggcatttagcccctgccctaaagatctgtggagctttgaacttaagagagataatttagggcatctagcacaagaaatctctaagcaccaaagcattcaagaggtgacttgggtactgttgaaagcatttagctttgtatatttacaaatacatggtttggaattaagaagcagcttccccatctccagtagtggaaacacctgcttgccgactcatgctgccatcaacctttccacctttttctgaggagataaactctgtgcttcctaagatctgtaactagactaaagtcccagtaagccccgaggtgaggttcagagtgtgacccatgaggaggtgcactacacttgaaaagaactgcttgaattttctaatttatatgagaagaaatctggaaaa

SEQ ID NO: 479836 - DNA, 1783 bp, Homo sapiens
accttttcctctccaagccatgcttgaggagcccttctgcccactgctgcattgtgggagcccctctctgggctggccaaggctggagccaactccctctgcttgcggggaggcagtctccagcttgctgtactggccagcagggattccaagccagtgggtttttgtttgtaaagttccatggaaatggggcctgctgagcgaggctgcttggctctctggcttcagcccccttcccacagcaatggatggatctcctgcctcactaaagttcccagagccaaagtatgcaaaaactcctgtgtctcagtgcctgcttgacaggccacccaccctagcagctgtcattagtttgcccagctctgtgcttgggacgcaaggccctgatggaaagtttgactcaaaattagccttattttcctcacagaattgttgagtggctttatattattttaatctttgacgcttaatgatatcagaaataaactgagatctagaaaaaaaaaagatcctctctaacatattcaatttcttaagcacatttacatctttgatcattaatgaactcagcacaaccaagtgaacctggattttgaggggaatatcctatattaatataggaagaactaaacaaataatacaacttaaatatacagagctgttttcttaatgtgactattagatttgatttcaatagaatttatcttatttcaaattattatttattcgacaaaagttacttaatcgtggagtgacagaaaaacattttgaaaccctaatttctacatttttttattttgaaattaacatatgcgacatattctttagaataaagcacaatctattgtatacttatatttgtttttgcactttcgacattttcccatcaattatctcacagaacttggcagagcaccaaattaatcataatctgtgttgtgggctcttgtatctattttgggggcatcctgttttattattttccatgggagattgcattttcttgaattcagaagactattagagatttatattcaacttgatgcttcacagtgactcattgtgtataccatctgaaatgcatggccagagatttaataaataaagaacagaaatgtcaagcttaattctaaatcatcatgtctgacaaacatttagcaaactttgcaagatttttatgcttcattgtgttctacggaaacagatgaatttatgatttagtctcttttgcattttagatgcttctataataaacttggcagacaagtaattactaccttttgacaatggatgtaatgcacagttgagttgcagtataagaataataagtacataaaataaactcaccagctaaatagtgtattactgagtccgatataagtatgcctcctagaagaaaatcttttttggcatgaatattcctaaagagtatggtcaatcacagaaattaaatgagaatactgaatttccagatgtataattgagtaattttctcctcaaattactctgtgcatcttaacaagatgcaattagtatattctcaactcatattttcagataaatgtactgttacattccctaaaagtataagacaattaactatttactagtcaatattaaatgtccttttattaatgacacattttataggaagagagaaattcattcatgcctttaacatactttaaaaattatttttatatagcaacttttattagtttaatataaaagtagaaatataagatataaattatagctgctgcaaaatagttttgaaaattat

SEQ ID NO: 479837 - DNA, 926 bp, Homo sapiens
atccatcaagtgcaaggttatagggatgattacccttatcttgtctcctgctaagtcatggaattttgaagtgtactggggcttggaggctaagtttatttgtggaattaagggcacccggatttcaatgctggcactagctaaatgccttgtggtgaggaagaagtctgctgcagaggcagagccctcatggagaacctctactagggcagtaaagagggaaaatgtggggttggtgtccccacacagagtccccactggggaactgcctagtgaagctgtgagaagaaaacaaccatcctccagatcccagaatggtagctccactgacagcttgcaccaagcacctggaaatgactcaggaattcaacaccagcccatgaaggcagacatggggactgttctccgcagagccacaggtgcagagctgcccaaggccttaggagctaatctctcgcatcagcattccctggatgagcctttcagcctgccgctgggctgtgggggaccctctctggggctggctaaggccggagctggctccctctgcttgcctggacctgtggaggcagaggcgtgggcagaagccggggctgctcgcgcctgcagggacaggtttcgggtgcgcaaggacttggcgggcccctcacatttggcctgccagtgcctgctgggcttcattggggggatgagctccctctgggctgctggagtgccccggctaggtgccacaaagtcccgggcgagtgccattgagagctgaagctgggctggctgggcttctgggtcgggtggggacttggagaacttttctgtctagctaaagggttgtaaacgcaccaatcagcactctgtgtctagctaaaggtttgtaaatgcaccaatcagcactctgtgtctagctaaagggttgtaaaggcaccagt

SEQ ID NO: 479838 - DNA, 1421 bp, Homo sapiens
ttctcataagatctgatggctttataagtgtttgacagttcctccttcacacactcgctttctttctcctgctgccttgtgaaaaagatgcttgcttcctcttccccttcggccatgattgtgaaaaacttaaaagataatattcctggcatcaacttcaagaagtatggaattgctatctctggggttggggccaaggaatctgtacataatcttcagttattctggagaaagtgtgcttcttatgcagcaaatagacatgtaaatgtgcttactgatggccaactttgcttgggattcatcaccaggttctctcatcatctatatatattcttcctggattatcctaactgctctcattgttatcaccaacaaagtaatagctcttcaaacaccagctcatacattctactaagtaatccgaccgcctactttacatcttcaagatctcttgacttaatatgtctaaaacagaaaagattatcttctctaccaaatatgatctgctgctatattaacagatgacctgagtcaagttgtaggagtaggttgtcaccaccattttctgggtttcccagagtattaagtttccataatgtatgaaataattaaaataaaggtgcctctgatttacaaacactagtgtgtgaatggacccatggcaagtaatttctttcagtgtgatttgataccagtaaggtcattagaaacttctcattgagagctatcaaggtttgaattttccccttctgtaacagaacttgtcatcaatgatacttgtcttatcctctgataaagtatattctttagggcaatggtttcaaaaaatatcatgcgtaagaatcatccaagtgcttgtaaaacatatttctggacctcactctcagaggtggttcagtgactctggagtgaggcccaggaatctgaaattttttataactatttcaagtgattatgaaaatatagtcaatgatgatactccataaaatactgctctagagctatctgacgcttatttttcggcaacaccttctctcaggaatatgagctaagcgttagcttttcactgactgcagcagttatagaagaagagttaactaatgttcttgctctcctgagcataagagagaattttatgggtatgctcttggtagttaaatgagcatgttgattaagggtgaagagggtgagaggaggactaatgctacaaatataatattgtgctatggcttaaccttggcagatttttcttttaaagtttttgttgttaaatattacacaacttttagataagattttttttccaatattttcagttttgaatatacttgttttccaagtagcatgatgagtaccttgacggtagcatatagcatgatgggtgctttcagatttatctaattttttataactctgtgaag

SEQ ID NO: 479839 - DNA, 2939 bp, Homo sapiens
tacgtaaacaaaatcaatcaatttgctaagggacgtaattcaaggtacaaagccaggattcacaggtccaggaatcaggggatggaagtggaagtggcactactcaccatcgcccctggtgatccactagcaaaatttttgcttcctgttcccacgacattagaggagcctcacctcatggccactgctacctcaggctcacaaggaatactgccagattaccaccaatgtttccttaaggtccaagggctcttcagtcagcttgtgttgaatgctgctggcctgggactcacccttcagggcagtggctcccctctgccctacaggcacaaaaaagttttcagcactatgctgccagtgccggtggatgtgggaggggtgacatcagcaattcaacactgtttttgctacctcttcagtgcctctttcagcgaagttaaaaccaggtactcatccgacaaattagttcagcctgacgatgggtaagcttatttacgctgtatcaggaccctggaaggacttttagacctttactgtgcataattggatgagactctttcatgctattgaaagaaatactgacagaaggcaaatgtcagtatccttgaagcaaagcaggcgacttatttagcctgggcagcatgatatcaatttgactgtttgccattagaagggtccaaggtacttttcattatactatgctgccagagaggctttaaaaagaagcatgtctggaataccgcctattcctatttaatagatggtgtactcgagatccaaataacatattacttctttacctccagctctagatcacacagaaaggttgacaactaatatatctttttagagttggcgatagataacaatgatattgtgttctttattgtaatagtcatatttaaaatcatgaactgttattttttaaaattaaccaagtaagtcacaatcattgcaaaaaagttgaaattactgttaagtttagcttaaagcttcttccttacatattttaaatttggcctaaaggttcctccatacacagtgaaccgtaacctaactggaagtgtaaacagactataagatactcttgtagcaatcactaagtttcggcaaatcacacagagccaattatttaaacggtattcaaatgaggcaaacactaagctgtaaccaatccagctgtttctgcacctcacttctattttctgtatgttattttctttttctctgtccataaatcctctctaatcatgcagcagtgccagagttgctctgatcctattctggtttgagggtttcctgatttgcaattcattcattgctcaaactctgttaaatttaatttgtctaagatttttcttttaaaggtatatagatacatctgaagtaaaaaaaaaaaaaaaaaaaaatgaaagttctagtctcccagctcatccttgaaggtgaatgaaaattaaaagtttgggatagatcctttcagacttgttgtgcttatataaatacataaacagagaaacatgcactacagtatgtatgattcaattaacatctggtttatgggtaatattttcacttgttaatgtattactggacatttaagtagacttgtcattgttgcttcacaaacaaggctgaaatggacatccttatacatacatccttttgcactcttgaaagaatagagagacgtagaagataattgctgagtcaaagggaatatgtattttaagttaggataaaacttctcaatttacttccatatatgtatatcccactaagagtgtttgagtgtattctttattctacactctccccaaagaggaatataccagttttgtttttcttcttcattcttacagaataaaataatatttcaataaactttcaaatattttatgtaaaatatattgctgctttaattttaagtctaaactcccatctttaaaaagccgtcatttatttaattctaaattcccttgaatctttaacttttcccctgagtatacttaaaaactaataataatatctgattgtctccttaccttcgttttctgctatttgaacattgtatgcctagatgtaggattttggtattttttatgctaggtgttctctgagcttcctgaatctgtggttttgtgtctttcaataattttgaaaaattctcaatcattattactttatacatttcccatattcttttattttttaatcttttggtattcccattatgtgtattttataccttttctcccacttataagtgagaacatgaggtgtttggttttctattcctgcattagcttgctggggataatggcttccagctctattcatgacctgcaaaggacatgatgcatagtatcatgcatcatgatatgattccttttcatggatgcatagtactccatggtgtatatgtaggatattttctttatccagtcaattactgatgggtgtttgggttgattctacatctttgctagtgtgaatagtgctgcaatgaacgtatgcatgcatgtgtctttataatagaatgatttataatcctttggggatatacccagtagtgggattgctgggtcaaatggtatatctggttctaggtctttgaggaattgccacgctatcttccacaatggttgacctaaattacattcccaccaacagtgtaaaagcatatctatttctccacagcctcaccagcatctgttgtttcttgactttttaataatcaccattctgaccggtgtggatggtatctcattgtggttttgatttgcatttctctaatgatcagtgatattgagcatttttcatgtttgttggcctcatgaatgtcttcttttgagaagtgtctgttcatgtcctttgaccactttttaatagggtcatttgttttttcttgtaaatttgtttgtttcttgctgaacaatatc

SEQ ID NO: 479840 - DNA, 880 bp, Homo sapiens
agattgtgtggtaatgagagaccgccaaacaaaacgttccaggggcttaggttttgtgacttattcttgtgttacagaggtagatgcagcaatgtgtgctcgaccacacaaggttgatgggcatgtagtggaaccaaaaagagctgtttctagagaggattctgtaaagcccggtgcccatctaacagtgaagaaaatttttgttggtggtattaaagaagatacagaagaatataatttgagagactactttgaaaagtatggcaagattgaaaccatagaagttatggaagacaggcagagtggaaaaaagagaggatttgcttttgtaacttttgatggtcacgatacagttgataaaattgttgttcagaaataccacactattaataggcataattgtgaagcaaaaaggccgtttctaaacaagaaatgcagtctgctggatcatagagaggtcgtggaggtgggtctggcaattttatgggttgcggaggaagctttggagatggtggaggtaattttggccttggtggaaactttggtggaagaggaggctatggtggtggaggtggtggcagcagaggtagttatgggggaggtgatggtggatataatagatttggaggtgatggtggcaactatggcagtggtcctggttgtagtagtagagggggctatggcggtggtggaccaggatatggaaaccaaggtggtgggtatggtggaggtggtggaggatatgatggttacaatgaaggaggaaattttggcggtgagaccttgatatttccatgatttcattttattctggagataacaactaaaataatttacatattagattcttggcagttcatatttagtagtagtggttagc

SEQ ID NO: 479841 - DNA, 837 bp, Homo sapiens
cagccagatattatggtatggatgtatagcagtacaagatttcagaggatgtatggaaacaactggctgcccaggcagaattttgctgcaggtgtggggccctcatggagaacctctgctagggcagtgcaaaaggaaaatatggggtttgagcccccacacagactctccactgggccagtgcctagtggagctgtgagaattgggccaccatcctccagacctcagaatgatagatccaccaacagcttgcaccatgtacctggaaaagccacagatattcaatgccagcccatgaaagcagccagtagtggtggctggaccctgcaaaaccacaggggcagagatgcccaataccatgggaaaccacctcttgcatcagcaaacatctggggagtcatctgccaatcaccttgggagcctgtaggagactggcttcaaaaatggcccttacctccaacagaaaacaacaacagcaacactggcttcatgagggaaggcattgagagtggacggaggaaagacacagaaactaggttgaaaggggagaaagctgggaaccctgcacagggttaccatgaactaggactcatttctggcccacaatggctccaggggaataggtaaatcaagaatttcttcttggtttggatcccttgctggtgagctagtgtgattttgggggggggggtgttaaagatccttgttttgtcatattaccagaattggttttctggttcattctcatttgtgtagcctctgtcagaaggaaggtctagggctgaaggctgttgttcagattcttttgtcccacaggtgtttccttgatggagtact

SEQ ID NO: 479842 - DNA, 732 bp, Homo sapiens
gaccacattagttccccagcaatgtttcttaaagagatggaaatgactgaaatgacagaaatagcattcagaatattgataggaacaaagatcatcaagattcaggagaacattgaaacccaattcaagaaagctaagaatcacaataaaatgatgcaggagctgacagacaaaatagccaattctccaagatcagatgaaagaaaaaaactgttaaagacagctggagagaaacgccagtcaggcccctcttctgcaggtctgctgcagtttgctgtaggtccactccagaccctatttgcctgggtatcaccagcggaggctgcagaacagcaaagattgctgcctgctccttcctctggaagctttgtcccagaggggcaccggcctgatgccagccggagctctcctcagagctcgagcgctgtcccggtaaaaccctctttgtcaggatcagctgctctcttcagagctggcaggcaggaacatttaagtctgctgaaggtgcatctacagttgccccttccctcaggtgctctgtcccagggagatgggagttatatctataagcccctgactggggctgctgcctttctttcagatatgccctgcccagtgaagaggaatctagagaggcagtctggccacagccactttgcagtgctgtgttgagttctgcccagtccttagcactgtgaggggaaaaccacctactcaagcctcagtaatggc

SEQ ID NO: 479843 - DNA, 1353 bp, Homo sapiens
tctggcaccagacacttctgtgaagtcgagttaggggccatgggccctttgcatttctttgcggacatgaatcttgttatttgtgtcctacttttgtccatttggaaaaataattgcatgactacaaaccaaaccaatggatcttctactacaggagataaacctgttgaatcaatgcagacaaaattgaactaccttagaagaaatctactcattttagttggtattatcatcatggtttttgtctttatctgtttttgttatctccattataattgtctgagcgatgatgcgtccaaagcaggaatggtcaagaaaaaaggcatagcagccaagtcatctaaaacatcattcagtgaagccaagacagcctctcaatgcagtccagaaacacaacccatgctatctactgcagacaagtcatctgattcatcgagtccagaaagggcatccgcacaatccagcacagaaaaattaatcagaccctcaagtctacaaaagccatccataccaaacagtgcaggaaagttaactaggccatcatatccaaaaaggtcatccaagtcatcatgctcaaaaaaattaagcaagtcatctcacctggaaaaggcacataagaaaggcagcctagaaaaattatgtaagctagactatgcgtgtaagctagccagttcagataagccagtcaggccacctcagctattcaagccactttattcatctcatccacaaaatgaaatctcaccatccaagccattcggtccacaggaattggctaagcctcccaaacattttaatccaaaaaggtcagtgagtctaggcagggcagccttattatccaactctgaattagctgaaacttgtcaaccctacaagaaaaaacatcttgttgccaaaacttataggcctttggtcaatgatatttctgaggcaaaggagaaaaacactcaaaacctacatgtttcaagcaaagtcaagtcctcttccaggtcctttcgtaagttagattccaggaacaatgcatacggtgatcatgtgaatgacagtgatacgatgaaatattatagtgaggttgacagtgataaagttataatcattacgtgtgacagagggtacaatcaagtcacctctgaagtaaccctaaatgattaggagctcaacaaaaataaaatccaagtgtgaaagagcaaacttataccaactattttatgctcatcatcccttaagaaaccagtagagggaaaaatcactatcaagatcacccatatctgtcttggaggcgatttattttaaaaatatcaataaaatgcatgacataaattactattgtaattattatttcattttaggggg

SEQ ID NO: 479844 - DNA, 522 bp, Homo sapiens
ggtcgggagtggacctccagccaactccagcagacctgcagcagagggtcctgactgttagaagcaaaactaagatacagaaaggaatagcatcaacatcaacaaaaaggatgtccacacagaagtatcacaactcctcgctagcaagggaaataaactggatggagaacgagtttgacaaactgacagaagtaggcttcagaaagtgggtaataacaaactcgtccaagataaaggagcatgttctaacccaatgcaaagaagctaagaaccttgaaaaaaggttaggcaaattgctaactagaaaaaccagtatagagaagaacataagtgacctaatggagcagaaaaacacagcacaagaacttcgtgaagcatacacaagtatcaatagccaaatcaatcaagtggaagaaaggatatcagaggttgaagatcaacttaatgaaataaaccatgaagacaagattagagaaaaaagaatgaaaagaaacaaacaaagcctccaagaaatataggact

SEQ ID NO: 479845 - DNA, 633 bp, Homo sapiens
ggcgggtcacccccagttcaggccaagatgcaggttacggatggggcccggccaaacccggagcgccacagtagaactgcgtctgatccgtacagcggcatccctgggtgtgaggactgtgaggacggagttttctctcctcaggacccacccaggaggggccatggcttcgagacacctgaggagacctggggccacgtccgcgatgaggacatctctgggacacctggggctgcatctccgggacacctggggctgaccctggttccagcccagaaccagctctccagggcccactcagggaaagtttatgagttgaatgaagaggtgtccaggccacacaggagaggcatcccaattgtggggcgagtcggtggtattagagagcaacttttatttaagcagctgtgcacagtggcagcagaggtactgctccttatggagcagggatgccccataggcagtcagcccagagtagcagctcagaggcagttctgcacacatatttatacccacttgtaactatatacaaattaaggaggaggttatttagaaatttctagaaaaggggtggtaactttcaggtcattgccatggaaaggggcagtaatttccagctgttaccatgagaac

SEQ ID NO: 479846 - DNA, 1445 bp, Homo sapiens
gcggaggatgcattgtcaaaggacacccgaggataactgaaagaagctcgatttaatgagcgcagaggcatgatatgggctgaatgtaaagaaatttggactcaaggccccaaggaatatttgtttgagttgtggaacatgcttgattttggtatgttagcaattttatcagcatcattcattgcaagattcagggcattctggcatgcttccaaagcccagagcatcactgatgcaagtgatactttgaaggacttgacaaaagtaacattgggagataatgtgaaatactacagtttggccaggagggagtgggacccctcggatcctcgtatggtgtctgaaggtctttgtgcagttgctgtggttttgagtttctctgggatagcttgtattttgccagcaaatgaaagctttggacctctgcagacgtcgcttggaggagcagtcaaagacatcttcaggttcatgctcatattcattatggtgtttgtggcctttatgattggaatgttcaacctctactcctactacattgatgtaaaacaaaatgaagccttcacaacagttgaagagagttttaagacactgttctgggctacatttgtgctttctgcagtgaaatcagtggtcatcaactatagccacaaattcattgaaaacattggttatgttctttatggagtctatgatgttacaatggtcattgttttgctaaatatgttaattgcaatgatcaacagttcactccaggaaattgaggatgacgctgatgtggagtggaaatttgcaagggccaaactctggttttcctgctttggggagggggagagcacttcctgttcctttcaatctggtgccgggtccagagtccctgttttatctcttgctgaagcttaaagggtggatttctgagctctatccagggtcataaaaaaggtttccaggaagagatagagctaagtaagtagagctaagtaagtagagctaagtaagtacagctaagtagggaaagacaggaacttgcaggaactaacaggtaccatagggacagacagggacagatagagatagatgaaggctagcaatataaggtcagtgccctaaagaggtactgatcagtgccctaaagaggtacaaaagtaaagactagtaatataaggtcagtgccctaaagaggtactggtctgtgccctaaagaggtacaaaagcaaagactagcaatataaggtcagtgccctaaagaggtactggtcagtgccttaaagaggtacaaaagtagagagtagtgaagactagcagagatttgcagggacagacaggaacattctgaattatggaaattagctatggctcaaagtccaatcaaaatctgagagggcaaatataaaaggaatagagaggaggaggcaaggaaggataaaaatgctctttcttttctctcc

SEQ ID NO: 479847 - DNA, 585 bp, Homo sapiens
tcaggatctgtgttgctcaagctggctggagtccccggcagggatgctccacagggcaggcctaagccacctaaggggctgccttgaccatccattaatcacctcacttcccagtcagggaaccaagaaatgtagcaggacaagccgcagacaaaacccctcagacatcgagttaaagaaggaaacagtttattcggccaggagcatcagcaagacttctgtctcaagagccgagctccccaatgttgaacacaatgatgaaagtgagcatcagtgctgtgttcctgatcttaaagctttgggtgccaacaattcaggtggtgattgttatgggttttgcataaaggtgttttatcatgtgaagaaaattcgaatcttcagcttattggtggtttttatcattaaatacgttgattatctttaagtactttctgtaacagttgagataaacgtgtttttcccatcattttaattatatagtatacggaaaaggaatggctttagtatgttgaaaaacctttgattttctgaaaaaaaaaaaaaaaaaaaaaaaaagacctcttcattgtggtgtataatgttttc

SEQ ID NO: 479848 - DNA, 553 bp, Homo sapiens
agggagcaggggaggcggggagaattcaaaatgggccataaagcagcagagacaactcgtagcattaacaacgcatttggtgcaagaacttctaatgaacgtacagtgcagtggtggttcaagaagttttgcaaaggagacaaaagcctggaacatgaagagcatagtggtcggccattggaagttgacaatgaaaaattgagagcaatcattaaagctgatcctctcacaactacaagagaagttgctgaagaaatcaaagtcgtccattctatgatcatctggcatttgaagcaaattggaaaggtgaaaaagctcaatacatggatgcctaatgagctgagtgaaaatcaaaaaaattgtcgttttgaagtgtcttctcttattttacacaacaacgaaccatttctcaatcagattgtgatgtgcaatgaaaagtggattttatatgacaaccagcgatgaccagctcagtggttggactgagaagaagctccaaagcaatttctaaagccaaacttgcaccaaaaaagtcattgtcactgtttggtgg

SEQ ID NO: 479849 - DNA, 919 bp, Homo sapiens
agcagggatccttgaggtgttgaaacacttcttcatctggattgtggttcattggcgcccatggtacagatggaggcgaatttggagactgtcattaggatttccatctggccagcgccatcttccacccaatcatagtggcggagccgggcgggggaggacgggagccgggccccccgcttgcaccgtagcccgcgggtggaccccgagccgccgccgacccacgcaccgagcccactaggcctccactgccgtcatcgccgccggctcctcaggtactcccggccctagtccccgtcagccggccgcttttttttttttttttttttgagttttttttttttttttttttttgacttacaactgggaaggaccaaggtggccaactagaagcagcaatgatcagaggctcccatcgaaaagatcccaaacagcatggaatcctgcattggaaactaaggtgcaggagggaaccagataaagggggcctgaagttaaccccctggcaaaccacagcagccctacagaagagggacctgactattgaaagaaaaataaacaaacagaaagcaacaacaacagcatcaacaaaagtccccacagaaacttcatccaagggtcaacagtctcaaagattgaaactagacaaactcatgaagatgagaaagaatcagcaaaacaaacaaaatgctgaaaacccaaaaggccagagtgcctcttctcctccaaataattgcaacacctcccagcaaggacaagcaaatgctaaggaaattcatcaccacaaggcctgcttgcaagagctcctgaaggaagcactaaatatggaaaggaaaaaccagtaccagccactgagaaattcaccaaaacataaaaactaatgacactatgaaaaaacagtatcaactagtgtgcaata

SEQ ID NO: 479850 - DNA, 867 bp, Homo sapiens
tccgcggcttcattcttaaagtcaccttcttggctggagcacagccatgttctttacagtaacagagcgcccctgcacagagtccccactggggcactgcctagtggagctgtgggaatggggacatcaccctctagacccaagaatctggcagaaccactggcagtttgcaatcccagcctggaagggacacagacatttaactccaattcatgaaagcagctacagggtcaccctgcaaagccgcagaggcagagctacccaaggcctagggagcccaccccttgcactagtgtgccctggatgcggccatggagtcaaggattattctggagctttaagatttaatgactgccctgcaggggtttcagacttgcatggggcttgttgtccttttcatttggatgatttatcccttttggaatgggaaagtttactcaatgcttgtaccaccattgtatcttggaaataaataacttggttttatgtgaaagaattgacgaggtccctatgaagactgttaaattccacctttgaagtcaatatcagtttccagacacatgtgtgtgtggctgttcaaataatttaatagtaggtattccttggcttcaaagagtgagataactattaatgtttttgctcccaaaatcatgtagtgtattgtctacaagctaggaagatcacacactcaggtttgtatgtaatatttctgatttatgtctttttttccagggtcttgtttagttttacttttttttatacattttcatttttaattaagtattaatagttgcattaaaatagtctacaatggattcattagtcttttttctttttttgagacagagtcttgctcttgcactgtca

SEQ ID NO: 479851 - DNA, 3101 bp, Homo sapiens
cggcttcattcttgaggcactataaacaaaatggtttgggcgtttccttgagtgtttacgggccctcctcagtaaggttacgatgaatgtttttataccacttccttctaaatgcccctggattcatctccagctcggcagccctttgtactgctgcatcgactagcagcaggaagctgctgaagtcggcgtgctcctctggagacacaagttctggagaagacggggatgtgacagaaaccttgacctttttcttcggctgggctattccggtgagcttctggctaggggccgactccggatctggttgcttctctcttgacatctggccctttggcaagggccacaggggcaggctttgtacattgtctggaccactgggccctgacttggccggcacagacgcctcggccttaaaccgatgcttatacatccagtcgcggaggatcttaacggactcggctggcaagtttcccttgcgcttcttcttgtgctctgttcattaaatatttgttagcatttaatattaacatctattagctttctgaaatacctattacaattacattttagaggtatctctagtgatagcaatatatatttttaagtttttacagtctccatagatttcgtattctaccactttgcaaaaaatataagaacattgtgcttggatatgttcattctctatacctctatcttctaattttatagttttcatgtgtattatatcgaaatatgttcaaaactatattaaaatgttataacttttgtttaaatcagttacgtgtctatttaagtaattaagaggaaatatagtctgttagtttcctgacatcttcagaattttctgtgttttctgttcataactaaaagtctgatttacatctggaataattactcttcagccagaaaaactttctgtagcagttattctcaggtatttatagagatgacagattttcttagtatttagtttttattttctgagtatgtcttcacttcacttccattattaaaggatatttttgctagatatagaatcagattttcagttaatggttttatttattgttgagcccattaaaaatctccctccactgcctttccattttcattatttctgaattatagtgataactgattcacatttttcatggccttttaaggtcagttttcaaatgtctgaacatgatttattttctgtttgttgtctcttcttcatgttttctgaatttcttaactctacacatatatgaattttcttaaaatgaagattttggtctttatttcttcagatagtatttctgtcccatgctgtcactcctcattttctgataccttcattttatatattttagactttttcacactttaccagagattattgtagatctactcattttttaaaatattttttctctatttttctgattggataatttatatcaatctatctattttttctttattttcctgattggataatttatatcaatctatctttaagtgaatatttgtgtttaaacttttcttttcctagtttcttaaggtataaaattagacttttgatttgagatttttcttcccttttaatataattgcttatagttctaaattgtcttcttattacttttttttgctgcatctcataccttttggcttgttgtatttaattttcatttctcccatgatttttaaaatatttttaatagttacttcctagatctattggttggtcaagagtgttttttttcagttttcacatatttgtgaattttccattgttcctttcgttcttgatttctggttgtattccactgagttcagatatgatatttgttgaattttagtctttaaaaatttattgaaacttgtttcggggtgtaaaatatgaaatttcctgaagattgttccataatcacttgaagaaaatgtatattcagttgtcaatgtgaggagcattctgtatgtctattatgtcaacttggtctgtagtactatgaactttcctagtctctaccaattttttgtgtgctctttctgttatcgaatgatctactcctgtttatgtctccagctattattgtagaattttctatatatttgttcagttctgtgaatgtttgctttacatactttggagctttgatgtttggtgcatatttgtttataattgttatatattcttggttagttaaacctcctatcaacatataatgttctttttttgtctcataacagtttttttacataaagactattttattctaatattagtatagccactactacacttctttggttattaatttgcatggaatatatttcccatctttttattttccactataatgagtttcttgtacacagaatgtaattggattattttaaaacaattcacccacttatctatgcctttcaattgagggatttagtccatttatattttttaaaaatccttataggtaggggcttatattgcaatctcgttatcattttctatatgcttattaatttttgcattcatcattccctccattacttcttctttctcttgtttagttgagtttttgttatagcatgttttaattctcttcttatttctttttgtgtatatttcatagatattttccttgtggttattatagggattgaatataataccttaaagtcacaacaatctattttaaattgatatcaattaaactttatttgcatatatagactctactttatctctctgccctactgctatgtattattaatatcacaaagtacatctttatatattgtgcattcattaagatagacatacatttttatgcattttgtttttttaaattctgaagaaaaatttatattacaataatcttggttttcatactgttgatgtatttaacgtcactaaatatagttatattttcatctggcttcacattaacatgtagtatgctttcattttggcttgaagaactctttctagcatttcttgtagggcatgtcaggtgtattttgattgataaggtatggactaacaattctgaaactagtataaatgcgtgctagaataaacaagtaaatgaatgtcagatgatgat

SEQ ID NO: 479852 - DNA, 633 bp, Homo sapiens
cccttgagtaaacacagttttatatgtggctgtgcagttcgaagtgcaggccactaggtggtgtttatgggttgtggggttacactttcaggagaaatgctcaggtgaaggcagggcagcagtgctgtgggcctttaactgcagaaaccaggtcccctcagctggagcaacagagactggcagctgtggggtgtgtggcacacttgcacttccctcctacaaaagtagctctgggttttattaatactcttgggggcatgcacatgtgctgggcctccttgctctctctctggccctggagtggcaaggacttagccagtagcagtggcagctgcaaggggcttgtcagcgacctctgggagtgtgctctcagaggaacacagagccacagctgcagtgttcagatgaaggtggggcaggtgcactggaggcctaaagatgacaaggcccatttagcaggaagcagtgaagacttggcatagggggaagctgaatatcattccttcttattgtgtttcttacaagacaatgaatgggatctctgaaattattaccttttaaaaaggctatgattagttaaatgtacaaggttacttaacgccgaatgatacaagtttaaatgttaattataat

SEQ ID NO: 479853 - DNA, 499 bp, Homo sapiens
ctgcaactcctctacataactgaagcggggattctctccccatgccctccatccccacatgcccacagggagtactgccaggtgaccagcaatataccctcaaggtccaagggctttttagtcagctagtagtgaatgctgccaggcccgggattcacccttcagggaagttggctctactctggcccaagaaaggtccacaaataacatccaagagccaaagcctagaattggggtcccaaaaagtccactatgtgctctacctcaccgtggctgagctggtacctgaggtgcaagagaaagactccttttctttctgcttctcaagagcagaaggagtctgtcctcatagccaccacatctgtaaatgttctgggtcacaccttaagctagcaggtctcagagtcccacccaaagctcatgccaggtactactggactactgcgattgtttattcaggacccaagagccctttagtcagaagatgatgtatactatt

SEQ ID NO: 479854 - DNA, 1280 bp, Homo sapiens
atttatttgaggcacagtattttctgcagtaggggcagggagaaagatgtttccctcaccagatccattcaagggacttgggggaccctcctccaatcactggcgcttatacgattatatccttggcaaacagcgacagtttgaattcttctttactgatttagatggcctttatttctttctcttctctgctctggctaggaattccagttctatgttgactagaagtggtgaaagtggacatctttgtcttctttcagttttcagggtgttaccagggggtcattgctcccagagttcccaagatggtggtgggccgcttccaaaatggtggcgggccacttctaatatggtggcaagcctcgtgttctctgacctggggttcttggcctcagggattccaaggaatggaatcttgggccatgcggtgagtgttatagctctattagaagccctgggtcatggaagagaactgtggaacccagtgactaatgttcagcttgattaggatgaacccaggcacttagccgtgcaggaacaatggcaagcctttagcccagtcgggaacagcaatgggtgcctcactggatcaggagcacagtggacaccctgcgggatccggagggatggaagtcagcggctggtctgtgacggcggcaaacagcagtgacggacagcgagccaaagctcagctcgagtcataacaaacatggaccagaagagtgcagttgcaaaagagtgaaatagagtgaaaacagagatcccatacaaagggaggggacccaaagagggtagccattgcaggctcgaatgcctgggtttatatcccaatcatcgtccctcccactgtgctctcaggcattagatgattggctatttctttacctcctatttttacctaattagcattttagtgagctctctgattgatcaggtgtgagctacattgcaagccccgtgtttaaaggtggaagcagtcaccttcccagctaggcttagggattcttcgtcggcctaggaaatccagctagtcctgtctctcaagggggaatactttcaacttttctgtattcaatataatgtcggctgtgggtttgtcatagatggcttttacttccttgagaaaatactactcaagtgagaaaaagtctaacttgaataaaaaaaaaaacagtcaacccctttaattaatccccagacttgatccaattcacagactcagaaccccttgaataaaagggagactgtgacttctccaggaaggactcgcgtacactgtc

SEQ ID NO: 479855 - DNA, 591 bp, Homo sapiens
gcctgctctgtctttgccttccaccatgattggaagctttctgaggcctcgccagaagcagatattgctatgccagcagtggccatggcagtgtgtgtggacactgtccttaggaaacttgctagtgtgcagtcacctagatgcttatggggttggggttgctcttagcagcctcaggcaggcaaatctcaggctctggagaccacatgctttggcttcctttgtcgtagggacagtctccccagggcactgtactgcctttttcccagggtgcaggactctgtgtgggctagagtgctggggacccttctgcactgtagggtccagccagaattgtgcctctgcagtcctccaggtgtatgtgggggaatgtctgtggggctctgaagatgtggagatgctggttctgctgggcctgaaggcaaactataatcaggtgtttactgtcacatctctgctgaattttagtgctctttcttagatgctctatttaaattaggactatcttttcacaatttttgttatttgtggaggaggtacctggctcatctgattgggactggttaaaagtgggtgcagcccatggaggac

SEQ ID NO: 479856 - DNA, 578 bp, Homo sapiens
tttaggtacatgggctttgaagttattggaatcagattatgtcgaggaaactttgtgttctgtcaaaattgttacaaagttcagttggaggtttccttctccctgtggtctttccccaattccactggcggccttacccaaggatccttctctctaagttcatctcagctccaggtaaagtcaaatccttctcccatgatgtggacattaaggttccccagtgaggatgtttgtttaggggcagacgatccacctttcacattttcacgctttgggcactcagagtttttcggccatttcctggagcctgaagtagcaattcacttctttcaaagggtctgtggattcctttggctttcctggtatggtcctgctgtggttcttcaagcaaaagttttggatatgggtctccacacgccgctctgtccatgtctataaaatatggtatttaaaactatttgtaataaaatgttttgaaaattagaaacttctctttaacatgtatggatatttacttgaattatcatttcctaaaatcaagagctctctgcctacctgtaaatctgttcaacatcatt

SEQ ID NO: 479857 - DNA, 1465 bp, Homo sapiens
ctgcagtgtgcagcctcaggatttggtgctgtgtctcatctgctgcagcatggctaaaaggtgccaaggtacaactcaggccattgcatcaggggatgcaagcctcaagccttggcagcttcctttggtgttgagcctgcatgtgcaaagatgtcaagaattgaggtgcatacacattgaggattatcatgtcttcttggaagattgctctgtttatgtaatgcctcacattatcgctgataattttccatgcactgaagcctgctttgttattataactactccatatttcctggttttgttgacaaaaagagtcaaactctataaaatatttgaagatatttattttgagccaaatgtgagtgaccaatggcttatgccacagccttcaggagactgtaagaacatgtgcccaaggtggccaggctacagcttggttttatacgtgttggagagacaaaagacatcaatcaatgcatattagatagaaaagatacatcttttagtggctcccttttcaatagaaaattataaatcaactttctaatctgtgctgtggtaattgctgaatttaagtatttttaaagttaactttattgatatttttctaggaaatcattcttttgttaaaggtgtccaaatttattttcatagatgtgcatatatcaaattcttaaaaatgttaaattactagttatgattcttgccttttctcatttatataatcagctattttagcttttttcctcataaataatttatccattttactaaacgataaaaaagagaaaattatttccacatacacatccaattcattatatttatttatttatttactgtttaattaacttaatgttatctgttatgttaactaattcctttttctttcttttggttaattttgtcatttttttcctaatttctcgagagtagcaaactcttatttttttggtttcttcttgtaattaaaataaagttttaattttttctttgagaattatatttcataactttggatataaggtgtttttatcaattcatgctacatatatttttatatttcacttttgatattctcttttattgaaattttataaggatgtttcagatatccacacagttaatgctttttgtttacactttttattattgctattttattattgttttctgattgtgttggattattatcatatattgtaaggattttataattttcagttatatattatatatatattactttcaaatatacatatatgtatattttcaaatatacataaattatttattgccaagcatatgattgatattttcaccaaatattgcatggatagagaaaaacataaatatatctaaattaaggttgtagttgtgttttacatttattttctatgatgtttggggtacaccagacatgtgaaggtgttagaaaaaatatgtccccactagtttacatagc

SEQ ID NO: 479858 - DNA, 512 bp, Homo sapiens
ctttagggatagctatgcagggtgtccatggctgggtatgggaaagaatgcccataagcctgagagacccggtacaccccttcaaacctggggactctgtttgggtcatgaaatggaatccaaccactctagggcccatatgggttgggctccatactgtaatcttgtccactccctctattgttaaagttgcaggaattgtgccttggatccatcacagttggttaaaaccagaaatccaggacaagtggaccagccagcagaacccagaccatccaagccggctgatcctgcgacgggagccagttgccactgaggacaacagccctgctctgggcactccctttacctgtgtctggggatgggcccatagaaaggtgcccccactgcactcacaccacgtagtcggagagcacagtaactagaaccctgttatatcacacttactatgaatgtacagggacccaccaaggtacctgtattcacaatcagatgacctactcagtctgtga

SEQ ID NO: 479859 - DNA, 639 bp, Homo sapiens
ttgccaatttttgtactgaaatgttaggcccctttttgcttactgatttatacatattccttgtggaggaacagtactatatgttggatgctgattcaaagcacatacggcaatctggaaaaccctgccccactcctataaggtattttcacctacctggtgctgtaacagagtcttcaaaaggcaattccgcattctatcaaggcagctgctttaggatagtgtggaacatggtaagaccagtgaattccataagtatctgcccattgccacacttttttagccgtgaagtgatttccttgtttaaaagcaacgcagtgtataatactatgacggtggataaggcatactgtaagtccatggatgatagttttaacagaagcatttcatgcaggaaaggaggagccagatgcaacaatttatccttcatcttggatgaattattacatgtcccacatcacttgttccctagaaatttcactgaggtagaagatcctttaatttagttatatttatttcccaccctctcatgggcaaatgtcttaccatgggctagaactggtagtgtaactggaaaggggtcccaatccagacctcaagagaggtctcttggatttcacagaagaaagaatttgaggc

SEQ ID NO: 479860 - DNA, 7203 bp, Homo sapiens
gctgtgggcatgtttaagaaagcccactgtgtacaacgacctggccccaattttaaagctggtggagaaagttttcaaaacggatctttccacagtattaatgcatctccccacaaaacacctgtttattacaaaagcaaacaagtaactttgcagtggagaaaactggcagatatcacctcaatcaaacaatataattacctggaaattaaaaacaacgtgctcatgaacgacttttgggtaagcaataaaattaaggaagaaatcaagaagttctttgacactaatgagaacaaagaatgggagaacatatttgcaaactatgcatccaacaaaggcctaatatccaaaatctataagaaacttaaacaaatttacaagcaaaaaacaaacaaccctattaaaactggggcaaaggacaggaacagataattttcaaaagaagacgtgttgtaaaataccgacgtatatattatatttataggggttgtaaaataccgacatatatattatatttataggggtcgtaaaataccgatgtatatattatatttataggggtcgtaaaatactgaagtatatattatatttataggtatcgtaaaacaccgatgtatatattatatttataggtatcgtaaaataccgacgtatatattataggtatcgtaaaataccgacgtatatattatatttataggtgtcgtaaaataccgacgtatatgttatattcatcagtgtcgtaaaataccaacgtatatgttatattcgtaggtgtcataaaatactgatgtatatgttatattcgtaggtgccgtaaaataccgacatatatgttatattcgtcggtgtcataaaataccgacgtatatcttatattcgtcagtgtcgtgaaataccgacgtatatcttttattcgtcagtgtagtgaaacaccgacgtatattttttatttgctggtgtcgtaaaatactgacgtatatcttacattagcaggtgtcgtaaaataccgacgtataacttataatcgcaggtgtcataaaatactgatgtaaatcttatattcgcttgtatcataaaatactgacttatatattatgtttataggtatcgtaaaataccgacgtatatattatatttataggtatcgtaaaataccgccgtatatattataggtatcgtaaaataccgacgtacatcggtgtcatgaaataccgaagtatatcttatattcgtacgtgttgtgaaataccgacgtatatctcatattagtcggtgtcgtgaaataccgacgtatatcttttattcgttggtgtagtgaaacaccgacatatattttttatttgccggtgtcataaaataccgacgtatatcttacattcacaggtgtcataaaataccgacgtataactattcgcaggtgtcataaaataccgacgtaaatcttatattcgcttgtgtcataaaataccgaaatatatgttatattcacaggtgccataaaataccgatgtatatgttatattcgtcgttgtcatgaaacaccgacgtataccttatattagtcggtgtcgtgaaataccaacgtatatattatatttgtaggtgttgtaaaataacgtcatatatattatatttgtaggtgtcgtaaaataccgacgtatatagtataggtgtcgtgaaataccgacgtacatattatattcctggtgtcgcaaaataacgacatatatattacatttgtaggtgtcgtaaaataccgacgtatatagtataggtgtcgtgaaataccaacgtatatcttatattcgtaggtgtcgtgaaattccgtcgtatatgttatattcgtcggtgtcgtaaaataccgaagtatatgttatattcgtcgctgtcgtaaaataaggacatatatgttacattcgtcggtgtcataaaataccgacgtatatgtcacattcgtcgttgtcgtgaaataccgacgtataccttatattagtcagtgtcgtgaaataccgacgtatatattaaatttgtaggtgtcataaaataacgtcatatatattatatttgtaggtgtcgtaaaataccgacgtatataatataggtgtcgtgaaataccgacgtatgtattatattcgtaggtgtcatgaaattccgtcgtatatgttatattcgtcggtgtcgtaaaataccgacgtatatgttatattcgtcggtgtcgtaaaataccgatatatatcttagattcgtcggtgtcataaaataaggacgtatatgttacattcgtcagtgtcataaaataacgacgtatatgttacattcgtcgttgtcatgaaataccgacgtataccttatattagtcggtgtcgtgaaataccggcgtatatattatattcataggtgtcgtaaaataacgacatatatattatatttgtaggtgtcgtaaaatactggcgtatatattatagtcttccgtgtcgtaaaataccgacgtatttgttataatcgtcggcgtcgtaaaataccgacgtatatgttatgttcatcggtgtcataaaatagcaacatatatattacatttgtaggtgtcgtaaaataccgacatatatagcataggtgtcgtgaaataccgacgtatatattatattcgtaggtgtcgtgaaataccgacgtatatattatattcataggtgtcgtaaaataacgacatatatattatatttgtaggtgtcgtaaaatacagacgtatagagtataggtgtcgtgaaataccgacgtatatattatatttgtaggtgtcgtgaaataccaacgtatatcttatattcgtaggtgtcgtgaaattccgtcgtatatgttatattcgtcggtgtcgtaaaataccgacgtatatgttatattcgtcggtgtcgtaaaataaggacgtatatgttacattcgttgctgtcataaaataccgacgtatatgttacattcgtcgttgtcgtgaaataccgacgtataccttatattagtcggtgtcgtgaaataccgacgtatatattatattcgtaggtgtcataaaataacgtcatatatattatatttgtaggtgtcgtaaaataccgacgtatatagtataggtgtcgtgaaataccgacgtatatattatattcctggtgtcgtaaaataacgacatatataatatatttctacgtgtcgtaaaataccgacgtatatagtataggtgtcatgaaataccgaaatatgtattatattcgtaggtgtgaaattccctcgtatatgttgtattcgtcggtgtcgtaaaataccgacgtatatgttttattcgtcggtgtcgtaaaataccaacagatatcttagattcgtcggtgtcataaaataaggacgtatatgttacattcgtcggtgtcgtaaaataccgacgtatatgttacattcgtcgttgtcgtgaaataccgacgtataccttatattagtcggtgtcgtgaaataccggcgtatatattatattcgtaggtgtcgtaaaataacgacatatatattatatttgtaggtgtcgtaaaataccgacgtatatagtataggtgtcgtgaaataccgacgcatatattatattcgtaggtgtcgtgaaataccaacgtatatcttatattcataggtgtcgtgaaattccgtcgtatatgttatattcgtaggtgccgtaaaataccgacgtatctgttatattcttccgtgtcgtaaaataccgacgtatctgttataatcgccggtgtcgtaaaataccgacgtatatattatagtcttccgtgtcgtaaaataacgacatatatattatatttgtaggtgtcgtaaaataccgacatatatagcataggtgtcgtgaaataccgacgtgtatattatattcgtaggtgtcgtgaaataccgacgtatatataatattcgtaggtgtcataaaataacgacatatatattatatttgtaggtgtcgtaaaataccgacgtatatagtatacgtgtcatgaaataccgacgtatatattatattcgtaggtgtcgtgaaataccaacatatatcttgtattcgtagctgtcgtgaaattccgtcgtatatgttatattcgtcggtggcttaaaataccgacgtatatgttgtattcgtcggtatcgtaaaataaggacgtatatgttacattcgtcggtgtcgtaaaataccgacgtatacgttacattcgtcgttgtcgtaaaatacctacgtataccttatatcagtcggtgtcgtgaaataccgatgtatatattatattcgtaggtgtcgtaaaataacgtcatatatattatatttgtaggtgacgtaaaataccgaagtatatagtataggtgtcgtgaaataccgaagtatatattatattcctggtgtcgtaaaataacgacatatatattatatttgtaggtgtcgtaaaataccgacgtatatagtataggtgtcgtgaaataccgacgtatgtattatattcacaggtgtcgtgaaattccgtcgtatatcttatattcactcttgtcgtaaaatactgacgtatatcttactttcgcaggtgtcataaaatacaggtgtataacttataatcgcaggtgtcgtaaaatacagacataaatcttatattcgcttgtgtcataaaataccgaaatatatgttatattcaccggtgtcataaaataccgacgtatatgttatattcgtcggtgtcgtaaaataccaacgtatatgtaatattcgtaggtgccgtaaaatactgacctatctgttatattcttcggtgtcgtaaaataccgacgtatctgttataatcgtcagtgtcgtaaaataccgacgtatatattatagtcttccgtgtcgtaaaatactgacgtatttgttataatcgtcggcgtcgtaaaataccgacatatatgttatattcgtcggtgtcgtaaaataacgacatatatattatatttgtaggtgtcgtaaaataccgacgtatatagcataggtgtcgtgaaataccaacgtatatattatattcgtaggtgtcgtgaaattccgtcgtatatgttatattcgtcggtgttgtaaaataacgacatatatatttgtaggtgtcgtaaaataccgacgtatatgttatattcgttggtgtcgtaaaataaggacgtatatgttacattcgttggtgtcataaaataccgacgtatatgttacattcgtcgttgtcgtgaaataccgacgtataccttatattagttggtgtcgtgaaataccgacgtatatattatatttgtaggtgtcgtaaaataacgtcatatatattatatttgtaggtgtcggaaaataccgacgtatatagtataggtgtcgtgaaataccgacgtatatattatattcctggtgtcgcaaaataacgacatatatattatatttgtaggtgtcgtaaaataccgacgtatttagtataggtgtcgtgaaataccgacgtatgtattatattcgtaggtgtcatgaaattccgtcgtatatgttatattcgtcggtgtcgtaaaataccgacgtatatgttatattcatcagtgtcgtaaaataccgacagatatcttagattcgtcggtgtcataaaataaggatgtatatgttacattcgtcagtgtcgtaaaataccgacgtataccttatattagtcggtgtcgtgaaataccggcgtatatattatattcgtaggtgtcgtaaaataacgacatatatattatatttgtaggtgtcgtaaaataccgacgtatatagtataggtgtcgtgaaataccgacgtatatattatattcgtaggtgtcgtgaaataccaacatatatcttatattcatagatgtcgtgaaattccgtcgtatatgttatattcgtcggtgtcgtaaaataccgacgtatatgttatattcgtcggtgtcgtaaaataccgacggatatgttatattcgtcgctgtcgtaaaataccgacgtatatcttagattcgacggtgtcgtaaaataccgaagtatatcttatattcgatgatgtcgtaaaataccgacgtatatcttatattcacaggtgttgtaaaatactgacatatatcgtactttcgcaggtgtcataaaataccgatgtatatgttacattcgttggtgtcgtaaaataccgacatatacgtcatattcgttactgttgtaaaataccaacatatatgttatattcgtcggtgtcgtaaaataccaacttatatcttttattcgtcggtgttgtgaaatactgacctatatcttttattcgtcagtgtcgtgaaataccaacgtatatcttatattcgtaggtttcgtgaaactccgacgtatatattatattcgtatgtgtcgtgaaataccgacgtatatcttatattcttaggtgtcatcaaatgccgacatatatattattatcttagattcgtcggtgtcgtaaaataccgacgtatatgttatatttataggtgtcataaaataccgacgtatatcttatattcataggtgtcatcaaatgccgacatatatattatattcgtaggtgtcataaaataacgacgtatatattatgtttgttggtgttgtaaagtaccgacgtatatattataggtgtcgtaaaatactgacctacatattttatttataggtgttgtaaaataccaatgtatatattataggtgtcgtaaaataccgacgtatatattatatttataggtgtcataaaataccgacgtatatattatatttataggtgttgtaaaataccgacatatttattataggtatcgtaaaatactgacgtatatattatatttataggtatcgtaaaataccgacatttatatttataggtatcgtaaaataccgacatacatattacaggtgtcgtaaaataccgacgtatagattatatttgtaggtgttgtaaaacaccgacgtgtatattatatttataggtgtcgtaaaataacgacgtatatattatatttataggtgtcgttaaataccgacgtatatattatatttatatttatcgttaaataccgacatatatattatatttatatatatcattaaatatatatttatataatatatttaataaatgtttattgaatttcatggaaatttta

SEQ ID NO: 479861 - DNA, 509 bp, Homo sapiens
ggcattgataactgttcgacttgcctgctttacaacttggtagactatgtcagaggaaagatctggggcccaaaggctgctgctccaggctgtgcttttcccctgctggagccagggaggctggaccacttggtcaaaagacctgtcccccacagcccaacacactgactgtggcagactgaaaccacagtgcctcttcaggcttgactctgactcatccttcctcattgggaactccaataactctagccagaggctcagagagagaacctggatctccctgggcctgaggctccaggggaggggtggccacagtctctgccgaccagcagacatagccttttctcctggtagttctgaggaatccaggcagcccagactagtgggtttttccccagtgaagcacaccccctccaccaagggacagacaaagtgcttcattaaatgggtcctgttccccgtgccacccaactgggtgggaccctccaacagggattgttagacatcct

SEQ ID NO: 479862 - DNA, 679 bp, Homo sapiens
aggagtgaaggtttaggagatgccatggggtgcaaactcaacctcaaaattttccaaactcttactaagccccccacctgggatggagggcaatggaagaacatgggccttcccccaccaatgcatgccattgctgagactagctcagttgtggagaccctaacccgtggtgctagaggaattaaagacacatacacacagaaatatagtgtgtggagtgggaaatcaggggactcgcagccttcagagctcagagcatcgaacagagatttacacacatatttattgacagcaagccagaaacccacaaccttcatcgtgggcgtcatggccatcacgaacatgtcacagtgctgcagagattttatttatggccagcttaggggccaatttaaggccagatgttggggcctatccccagcatcccatacaccacctgggcacagagcagcacagtaaaattttaatgcaagtgtttatttctaatatcatgtttccacaatgatttcagtgtctcttcaatcatggttaacctctgatatgcacagattcttcacagatctgctgtgggtggtggaaagaaatggctagtgtttaacaaagtaaataaattgctagatttaaaacaattgctagatgtttaatctttgaaattttaatgtcaataatgtttaattta

SEQ ID NO: 479863 - DNA, 668 bp, Homo sapiens
tgccggcagatgtggtgtctggtgaaagtctactttctggttcttcgatggctgtcttctcactgtgtcttcacatggcaaaaggggtatgaccagtctggggatgtgataggggccagcagaccaaggagtgctcaggtcgaaccagcctcatctgatgtgcaaaattgtcctgcagagatcaggtctgacagttcccctagggctaaagtgtctcatgggagcaagtcaagcctagaggattgccatccctggccacactttgctaccgatgcttccacaccaaatcctctgggattcacatcagctgccttgctgccaaggccatttttcttgtctcttaggaagtacaccccagagagatgcaagtcagcaatagttcagtgctatcagcccaggatggtgggtctgtgctgtgggtccaagtcaggggttttctgtttggtgatgagcagtggagggtgtgtgggagccatgggagatagactggcctctccttgggttgactccagcttgttggagttgtggacaagggatatatagctataaaattcccacttagtaccacttttgctgtatcccacagcttttgatgatttcttattgcacattaacagttttttctttctgattgaattactcccttcagcatttcttgtaggctaggt

SEQ ID NO: 479864 - DNA, 684 bp, Homo sapiens
tatctcagtatgtcgtgtgaccccccccctcccccgacccctggtccactgtctctgggcctaattcaacaccaggactcacctaagagtttactgcctgctcttctggaggggctgaggtgttcccattccgctggcaacagcactctgatgggatgttccggccaaagtacttccgtggggcagcggcagcgtctgccagtgaaagagctatggtggtggctgctggcaaatgcctcatctgggaagctgaggctgcgctgcaagcggatgtggccaggcagggacgctgggataggccagcagacagcgggacactcagatcagactgaccctatcccatggccaagattgccctgctgcgtccaggtccagcagccagcaaacactaaagccacagagaggagtgtgctctcccggcaattctccctgcaatctcaaatgtctgtgggggtcatggggtctcctgcagcttggattccagaggtccatggcgagaatgagccactctatgcttgttttactcgccccttccccaggagtcactcaggccccaaaatgagtcctggtcctcagcaacctgatgcagggttcccagcttcctcccctttcagctcaggtcccctaagtccatcatgtcattcctatgcctttgcaccctcataggttagctcccacttataa

SEQ ID NO: 479865 - DNA, 743 bp, Homo sapiens
ctcgctgttgagggaaccactactctcttcaaagctgtccaacagggatgtttaagtctgccgaagtttctgctgccttttgttcagctatgccctgcccccagatgtggagtcttcataggcaggcaggcctccttcaactgcggtgggctccacccagttcaagcttcctggccgctttgtttacctactcaagcctcagcaatagtggacgccctcccccagcctcacttcctccttgcagtttgatctcagactgctgtgccagcagtgagcaaggctccttgggtgtgggactctccgagccaggcacaggatataatgtcctggaaagggaattccccgaccctttgcacttcccgggtgaggccatgccccgcccccgccgcccgcttcagctcacactccgtgggctgcacccactgtccaacaagccccagtgtgatgaacctggtacttcagttggaaatgcagaaatcagaaatcacccgtcttctgcatcactcacgctgggagctgtagactgcatctcttcctattcggtcatcttggaacctcctccctcaggaatttctttatagcagtgtgaaaacagactaatacaggcgagtagtttgagtaggactggcattagttcttctttaaatgtttggtagaatttagcagtgaggtcataaggtctcgggctttgctttactatagacggagactatttattaaggctttactgtgttacctgttat

SEQ ID NO: 479866 - DNA, 1041 bp, Homo sapiens
tcctattcagttcctagcacatattaaaaaacaaaccaggggctgagtcaacgaaggccaaaggcacctagagaagcatgatgagatgtggggaattgatgtcccttgctgtgttccactgcagctattcctgcgccaaggccttctgggctctgcacaagctgcagtcctgtctctgccatcaatccaagcatctctccctttcagctcaaatatccatgggggttgtgagatctcctgcagctgggattccagaggtccatggtgagaatgaatcactcctcgcctgtttaactcatccctccttgggagccactagggcccaggaacaagtcctggggcttggcagccctgtgcaaagttgccattttcctctcccttcattccagaatctgtgtcctccctctatcctttctcaataccttcctaccttcctcagaatattttctcagagtgtgccaatcttcttgatggtctggtctctaggtgggagattctctttctggctgcatctagtgggtcatcttggcttccgcttccccaactttcacacacattctgttttttagtttttgctatgaacatggcatttataatgattgtaagtatttttaaaatacttaagcacattactctcaaaagaacaattgaataataattccttgattaatatcaaatgtcagctcacaggaaaaatctcagtctttttagtaattccaggtcttgcatcctgaagcagtaatttataagttcatttgcctaggtcaagttacctaatctcccatttctgataatatatataacagggatgattattggtactggatagagttgttaggattgaattagcattaaatataaaatatccttatatagtagttgtgtacatgttaatagcctatgattcaggttctcttttcaaagggccacagctcgtactgcttcctgagtccagttcgacatctcaggaatcagctagtctttgtaaaagcttcacctctgcttcttggcccatggaccagtatgctgtcagtgttttta

SEQ ID NO: 479867 - DNA, 691 bp, Homo sapiens
tttgcatgtatctgctgattagtgacactgagcagtttctaatatgtttgttggctgctttctgatgtgcttcccttttatacgttacctggtctttctctctggttgctctgaacatttttttcttcattatgactttgagaatctgaagattttgtgtcttaaggttgatcttcttgtggagcaacttactggggttctctggatttctcagacccttttccatagggctgctgcagcttgctggggatccactccagaccctatctccctgagcccctcccacccctggaaggatcaccagtggaggctgcagaccagcaaaaatggcagaattatacttcttctggcaggtctgtcccagaggggcactgacctgttgctggctggaacagtcctgtatgaggtaaccatcaggcagaaaagactaagaccgctgatctacaatactgcagctgcccctcttcctaggggctcttctcaggaagatcagagttctgtccacaaacccctggctggggatactgaaatttccgcagggaagccccatctgagactccagtgtgaccacatggtggaagaagatttatgaacagaaaaagaaagggaatgtacagaaaatggaagttacagtgtgtcattcatttccagaagttgtgattgttttttacttatgctatttctgtgcaga

SEQ ID NO: 479868 - DNA, 616 bp, Homo sapiens
ccagcacgctgtcacctctcattatgaagcttagtttggctggatatgaaatcttggttacaagaacctttttatcaaggttcttaccttccttgaattgtgttaaaacatgctactttagctcagaggagtttgttattacccaccttctgaagcctacttctgtcaattcatcaaactcattctccatccagttttgtgtccttgctggagaggagttgcaatcatttgaaggagaagaggcattctggcccctattctgctggagtttgctggaggtccactccagaccctgtttgcttggctatcaccagcaggggctgcagaacagcaaagattactgcctcctctttcttctagaagcttcctcccagagaagcgcctgcccaatgccagccagagctcttctgtatgaggtgtctgtcaactcttgctgggagatgtcttccagtcaggaggcacaggggtcagggatccacttgaggagggagtatgtcccttagcagaggtcatgcgttgcactgagagatccactgttctcctcagagcccgcaggcaggaatgtttaagtctgctgaagctgtgcccacagccgcaccttcccctagttactctg

SEQ ID NO: 479869 - DNA, 552 bp, Homo sapiens
gtgaacatcacagaatctggcagcactatgttcaccaacaccctgctccacctgatgagtgtggaccccactgtgtttctactgctggcatgtgtgaaagatcacagccagcatctgatgaagcactttggctggcagcacccattagagtgttgtggccagcagttggagaccaccatggccactccccaagaacagcaggtttctaatttcaaggggccagagaacaaaatgctactgaagctcgtgcatgtgtcacgtagttctcgtgccatggttttcagctccatcaagtcattgaaagtcttctctatgctgtttattctagtcagtcattcatctaatcttttttcaaggtttttagcttctttgcaatgggttcgaacatcctcctttagctcagagaagtttgttattaccgatcgtctgaagccttcttctctcaactcatcaaagtccttctccatccagctttgttccattactggcgaggagctgcactacttttgaggagaagaggcactctggtttttagaattttcagctgttctg

SEQ ID NO: 479870 - DNA, 1211 bp, Homo sapiens
cgagcagtgagaagaggaccaccatcctccagaccgcagaatggtagagtcactgacagcttgcaccatgcccctggaaaatatgcaggactcaacacttcccatgaaagcagccacaggggctgtaccttgcaaatccacagggctggagctgcccaatgcccttgggtacctggagggctcagaagacaggaaggtgtgggaaagtttgaaacttcctagagacttgttgaatggctttgaccaaaatgctaatagtgatatggacaataaaatcctggctgaagtggtctcagatggagaagaggaacttaactttgaacttgacagagataatttagggtatctggcagaagaaatctctaagcagcaaagcgttcaagaggaagcagagcataaaattttggaaaatttgcagtccaacaatgtgatagaaaagaaaaccccattttctggggagaaattcaagctggctgcaaaaatttgcataagtaatgaggagccaaatgttaatcaccaagacaatggggaaaatgtctccaggtgtccccctcctacagtccccaatgtggcactgcctagtggagctgtgaaaagagggccaccatcctccagaccccagaatggtatatcaaccaacagcttgcactgtgcacctggaaaaactgcagacactcaatgctaccccttgaaagcagccaagagttgggctacaccctgcaaagccacaggggtagagctgcccaagaaaatgggaacccacctcttgcatcagcatgacctggatgtgagacatggagtcaaaggagatcattttggagctttaagatttgactgccccagcggattttggactttcatggggcctgtagccccttcatttggcaactgtgtctactttgctcatgaacaagactatcgtctctttgttggcattgcccatggccaatttgatcacaaaagaagtcttcaagtttcagtttggttacttttcttcatgaaataagcatctgtgcttcatttttctgcatctgtgtcagtcatggctgcattgattataaaatgtctcccatctttttctctgtcctgttaatggttatgttgtgtataaaacaaatcatctaactccatggctaccatgttcatgggaagtatactctttcatctcctttacagcatagaccatggctacttcatttatgaagaaagtc

SEQ ID NO: 479871 - DNA, 520 bp, Homo sapiens
ttggacagtggagggctgggggagggagagcaggtaatgctttaaacgtttccccattcagtatgatgctggctgtggggcagggagagaaagaccaccaggtgcgggcaggaataagcttttctgagctgagcctctccttgggtgcggttgctgtgaaggatgggggtgtggttcccatcccagtggagtttgtattctcaggggggttatggctgtctctgctgagtcatactggtctccatgaaagcgggggaaagccggcagtcagaggcctcgccttgctcctatgtagcccacagcccttaaggctgatctctctcccatcactccccacccccaacagcaccgagtctatttccaggcagctggtgaccagggccgagaacttgccccagactaaggacagcactgagttcagtgattcacaatttctggcactgtttcccctagagcccagagaagctccctgaactatgctgctgctgccagggggtggtacatgtgcacattgtgcagg

SEQ ID NO: 479872 - DNA, 530 bp, Homo sapiens
ataactgtgagacaataatgataagtccctggtgctttaagtattcatttggtgagataatgttttcctggatgttgttgatgtcagtagatgctcatcagtatccaggcattgaagagttagatgacagattagaggctttgttgttgcatctcatttacttggaaatagcaaaattgtgtgtagagattaatgctgtggacttttatccaagaagaaacacaggagctcaatataaaaacaaaggaaacttcagatattttgaaaaacatggcaggcagcagaccatgccatgggtctggcagaaaactgggagtgactccccagtgcacaagaagggcaggaaatgtctctctgacacatatttccactggagagccaggcaatccaggccacaggggagctctttgaccctacccagtactgaatctgacttgaggagcagtggggagactgtgagaaggagtggcagtgggaagtcttttgcacatgtttccagaccctagcacaaataaagcatgatcattcct

SEQ ID NO: 479873 - DNA, 518 bp, Homo sapiens
agggtatttgaataccaacaaactggtttgagaagagaaaacaaaagagctgccagggtcatgcaagcagttaatgtacaaattccgattcctggtataggtggcttcatatgccctcatgaagtcttttcccgtgcctatgtcctgaaaggacccacagctgcagctctgctggagtttgccggaggtccactccagaccctgtttacctgggtatcagcagcagaggctgcagaacagcggatattgttgaacagcaaatgttgctgcctgatcgttcctctggaagttttgtctcagtggagtacccggctatgtgaggtgtcattaggaccctctgctgctggtgtgctgcagtttgctgtaggcccactccagaccctgttttcctgggtatcaccagaggaggctgtagaacagcaaagattgcagcctctcccttcctctggatgcttaatcccagagggacacctgccagatgccagctggtgctcttctgttcgaggtgtctgttgatc

SEQ ID NO: 479874 - DNA, 1824 bp, Homo sapiens
agccattctgagtaagggagttgtcaacttgttactggctcagtatgtctggcatgggttggctgaagtcccaagcttggaggatgcacctgatgaggagatatgagagtgggcactcacgtaactttttcatagggctgctgcagcatgctgggggcctgctccagtttctactcaccttggattttgcagtacctggagggggatgcaatatcgccattggtggctggctggaatttcaagtcaatgggtcttatcttgtgagatgccatggaagtggggccttcaggctgtcactgctcaggcccaaggaacttgaagccagcacagcactagatcttgcccatggtctttcccttcagagtgataatttttctctggccctgcgtatgttcagagatgttttctgggagccagggcttggagtcaaaaactttacaagtttacctgatgctctattctatgatgactaaggtggcactcacaccacaatacaaagttcttcccacttttcctttccttttccacagccagatgagaatctcttggtggccaccatgaccactggtttatgtggtttttccaggccttcactggtgctcacttaaagctcaaggttttccatcagcttgtgataaatactgccaggcctaggacccaccttcagggcagtggaatgccttctgacttagggaaaatccataaacgctgtccaagagtccaggcctgaggctgcttgttgttctacctaccgttgtctatctggtatctaaggtggaagacgaagttttctttatattttcctctgcttttctcacatggaaggcatcttttaccattactatcacagttgggaatgtgtaagaacacccctaaagccagcacatctcagagctcaaagcccatgaactgtgcctgaacggatatctaacatgcaagacatagtcatctttactcttcactctcctctccttaagcagaaggaagaagtcacttttactgctgcaagatgcactgcctgggattgtgggagaggtggcacaagcaccttcttagctgtgccagctggtgtgaccctaggtcaggtttcaccctaatccactagctctaatcccagccgaggactaggagttgcctaggaatgacagtctatgtgtcctagactgcctttcaagtttaattaggacctcagagaacttcagcctgcattggctaaggttgctgagaaacttaagctctgactactagtgtgggcaatttttctctgattatgtcttgtccaaatgtttcctctgtgcacaagtgactgaatccagcatgtctgtattccccactgtgacaaggcaccactgagttcaatgtaagacccccccccatcaccaagttctctctctccagaatgcacagattctctttctgtgccacatggccgctgctgagggatggaggaggggtgacattggcaattaaagactgtctgtcctgtcctccttcatgccttttttagcaatatgaagttaaaaccaggtactgtgattactcacctaatttttggttcttgtaatggtgcttttcttgtggtcagagagttgttaagatttaattttccagcatgggagacaaatggtgtaggcttttattccatatttctatactctcacaattttgctttaaagaatagataaatgggatattcgttgaaaataaattataatcattgaaaataaataactaacctgcacaatgtgcacatgtaccctaaaacttaaagtataataataaaaataaataaataaataaataaataaataaataaataaataa

SEQ ID NO: 479875 - DNA, 706 bp, Homo sapiens
ccgaccctgcagagttcaggccctatagttcccctaggtctaaagtcttctatgggaatggtagtcttgggagaagtattgtgtgcaggagaggcaaacctgtatctggagacctgcttgagcccgatcacatatagaccacttccacttgataatggaatgcggctgtgcatgcccacgttatggctagatggtcaggaagccaaagtgggggctccaccagctgctaaatatgtctatgccaattatacattctggcactggggaaatgaccacaggatgagtctggaaacccactggacccactacaaaggaataaaggctgatggcaacgtgtcttggggagaggatgtttccactacagagtatggaaaagctgtttcttctggcaaaaaaggctcatcaaagttcacaagctcagtgtccccagctttattaaggtcctcccacacatccccattcaaagttggagggtcccattctttttccaatcaatgacctcatttttacaatggacacctggtgaagctgtgtgtgtacttttgttgtaagtctcttctatgcttattttgttggggttttaatcataaagtgatgatgaattttatcatatgatttttccatatctatttagatgatcacatgatttttgtttttaattctgtttttgtgatgtatcatatatactgacctgtatgttaaagca

SEQ ID NO: 479876 - DNA, 647 bp, Homo sapiens
agcagaagggaaactttgaaatttaggtaaagaaacccttttatggcaacaaaggctaccaatatagcatcagaaacctataaaggcaatgaggacttcaagagtaatgatctcagaaaaaagggaagtgcaaagagaaccctcagctgcagacgtgttggagtttgccggaggtccactccagaccctgtttgcctgggtatcagcagcagaggctgcagaacagctgatattggtgaacagcaaatgttgctgcctgatcgttcctctggaattggggaaaggcttgaggagagcactggggcttggttgggccagcactcaacttctgggtttgactggggccagatgctccctctgtggatagctgctgactttcccttgcttcccagactgatgcaagctaaaggagaggaccaatactatgtggagaagctggctagggacttgtgcctggcaaacatgcagatcatgcttccagcagagtaatgctattggctaatctctctggtgtggtacccctcttggctggaaggcagcatcaccaccaagaactgtgtgctgattgctgcaagccccacccccattctttctttctaaccgacccaagacggcctagttctgctgatacctgcaatgttttctgt

SEQ ID NO: 479877 - DNA, 905 bp, Homo sapiens
ctggaaactgggaagcaaagtgggcagctggtaatcacagctgagaacctgcaacagaccatgagcctccctgttgagaaagctaccagactcacagtttttcagcatctcaggacacctgcagcagtgatccagtttcttcaaagggtctgtggattctcttggctttcctggtatgttcctgcagtagttcttggagcaaaagtttatgatgaaaaactcattgtaccagttgcggaagaagaggcaacagtccaaaacaataagatcactgtagtgagtgttggacaagttggtatggcgtgtgctatcagcattctgggaaaatctctggctgatgaatttgcttttgtggatgttttggaagataagcttaaaggagaaatgatggatctgcagcatgggagcttatttctcaagaagcttaaaattgtggcagataaagattattctgtgactgccagttataagattgtagtggaattgaatccagaaataggaactgacaatgatagtgaaaattggaaagaagtgcataagatggtggttgaaaatgcctatgaagtcaacaagctaaatggatatacccactgggatattggattaagtgtggctgatctcattgaatccatgttgaaaaatctatccaggattcatctcgtgtcaacaatggtaaaggggatgtatggcatcgagaatgaagtcttcctgagccttccatatatcctcaatgcccggggattaaccagcgttatcaaccagaagctaaaggatgatgaggttgctcagttcaagaaaagtacagataccccgtgggacatccagaaggacctaaaagacctgtgactactgagctctaggctgtagaaatttaaaaactacaatgtgattaactctgagccttt

SEQ ID NO: 479878 - DNA, 556 bp, Homo sapiens
tcgcctactcagagctatgtccatatgtgtctaagacctagacatgtagtgatgaaaaatgcacagtaccctcttataatgcactcatcctattctgggatacctgtgcagaacatgcagattaggttgctggagatattacaaatagggagtaaacagtcaaaacgggttagtcgggagaaagggactgtgaatgtgaccggggtaaggtatctgagctaccaccagcagcgaatccagacacggaggtctgtctgtgacacgctgctccattacagcaaagcaaagccccataatgacctaatccagaaggataagatcccaggacccatagaacaaggaggccagagggaaggcaggccacaaagaagaaggaaaccagacttccccatccctctgggctcctgggggggtcagtggaaaaaggcctttaacctaagtgctcaaggccctaacctaacagcttttgtttttcacgctggagcgctggcacttcctgaccccgcttagtccttctattagaattttgtactctgatgctagttttcagagtata

SEQ ID NO: 479879 - DNA, 870 bp, Homo sapiens
ctggagggaggccaaagcccaggccgccctgccgcgcccccaggccccgctgctgccgctgccacactcgcctggctagcggacatcgccgccgccatgttgtctacaacgagcctcacaggctaccgtcgtcctcccagctcctcttggcggctacggtctctcttctgtagggctgctgtggtttgccggatgttcacttcaggccgtattcatctggagctcagcatgcttaagcaaattctagctgagaggtgcttgagaatctgcacggctatgggttggggcctcggccctagtggtgtgggtttgcgagtgggatcttctgatctgtgggttgcacagttctgtggaaaaagcatggtttccctggctgggtgggatacttaccaccactcttggcttgggtgtgggggctcctatgcctcatgctgctctcaggtggccactgcaggacgctgctctttcttcctctccatggatcacgccagctgctttatcagttctggtgagggaacctggatatcttggttgctggtgaaggattcacatgctaattatggttctttccgatgggagactctgatcgctgctgtttctcgtcagccatcttggccccactccagtaatttccttttgatcccaccccaataaatttctgtcctggaagctttaacatcctttttattttcactctcaattgacgaccttatctcctattgccttttgcactgaggtcataagtaccattcagagccaatgtgcctgtgatgactcaccctggttctctgttgacccatagacaatgctgttttcaatcataacttcacaacaaagtaatagatgtaaaatttatttgttaatattcct

SEQ ID NO: 479880 - DNA, 1000 bp, Homo sapiens
cccgctcgggaggcattttccatctggtatctgggagaaagtatgggagacaggacggggcctgatcctaaattaggaaatatgtgggagctgacggttttaaaagcaggagtttccctgcacgagcgctccctttgcctgccaccatccactgtaatgattaatactgagtgtcaacttgattggattgaaggatacaaagtattgatcctgtgggtgtctcctgacaatgcgatagaaaagaaaatcccattttctggggagaaattcaagcaggctgcagaagtttgcataagtgacaaggagccaaatgttaatctccaagacaatgggcaaaatgtctccagggcatgtcagaggttttcacagcagccccaccaatcacagggccagaggcctaggagcaaaatgtggttttgtgggccgggcccagggtccctgagctgtgtgcagcctagggactttgtgccctgcatcccagccgctccagccatggctgaaaggggccaacatagagctcgggctgtggctttagatggtgcaagcaccaagccttggaagcttccatatggtgttgagcctacgggtacacagaagtcaagaattgaggacttgcagtacaatgatgaataggaatggtgatagtggacatccttgccttttttcaaatcttaatggggataacattcagtcattcatcattaattatagtgttgactatggatacttttgcagattatctttattgggttcatgaagttaccttatatttctagtttaccttccctctaagcattgctttatcttcttccacaaatattgatatgttatacctttattttcattttgttgaaatgttttgtagtttcttttgagacttcattttgacccatggttatttagaagtgcatggtttaatttttaaatatttggagattttctaaatatctttctataattcatttctaatgttactctggaatatactttctatgatttc

SEQ ID NO: 479881 - DNA, 833 bp, Homo sapiens
gtggaggttggctgggcatttgaacatggctgacaagtatgggcacagatgtggcctgtttctattttcctcctatgacttggcaacttatttgactgaaactaggagcacaggtggcactgggaccgactggaatcttcctgggttctgtgtcctcagattggtagatgaccatagtagttacataatggtggaacaacagaattccaatagctcaggggcaggaaggatgaaagtagccaaagctctcagtgcacggtacaagctatcgttggatctaccattctggggtcctgaggattgtggccctcttttcacagctccgctaggcagttccccagtggggactctgtttgggggctccgattccacatttcctttctgcactgccctagtagatgttctccatgaggagcccctgcagcagaacatctgcctggacatccaggtgtgtcatacctaaaactgctttgccaaataaatccaagatcatgaagatttacctgtatgttttcttgtacatattttatatttttagctcttacatttaggcttttgatccattttgaattaaacacgttttatatggtatgaagttcttaaaggaaaagctaaggctgttgatttgagacatttcttttcaaatacaggcatttagtaacataagtttccttataagtactgctttggtgtcatcacataattgttacgttatgttctcattttcatactggttaaaatatatgatcattttgctttggtttcttctttgccccataagttacttaggagtatattacttagttctccaaatatttgggttttttttccag

SEQ ID NO: 479882 - DNA, 454 bp, Homo sapiens
gccaaagagactttacccaccatcatgagtcatggcacttgggagcacccctttcctggtcctttggctggagagagcaagtttttcttggagctttttctgtctgcacccattggtgtttccagattgccagtttcttcagctccaagtttgggatctgtgaggcagaaagaaaacccacagaagccaccactgagtagttccatggatcctgaagcagtgggtacaactcaaggagagcaagcagaagcagagtggggcgttgcttcacacgagaagtgcaaggagctgggggacctccccaccccgccagccaagggaagccgtgagggactgtgctacctggcctgggtactatgtttttcccgtggtttttgcaatctgcagatcaggagataccctcgtgtgtctaactaccaggaccgtggatttctagcacaaaactaggtggctg

SEQ ID NO: 479883 - DNA, 1954 bp, Homo sapiens
ctgagacagaccaagctccatttcactgggccccgaggagcctatggtctcaatggtagtagggggccaaaaaacagacttgatgatagatacaggtgctgaacactcggttgtgactcagacaattggaccgttatcaaaggactatgtgaacattatcggagccacaggaagagacttgctacacaagttgcaggctcagatctcctttacacccagtggagatatgaccttaagcctaggactgaaagaggctatggtattaacactcactattcaaaaaacagaggaatggaggctttacgaaagcaattgtcaagaatgtggaaagagatacactgtagctaaaggagaaaaactgtttacagatctgctccttaaattgccaggtgtctgggcagaggacaaccccaccgggctagcagtgaatagagcacctgcggtagtagagttactgcgcagaacctatccagtgcggattcgccaatatctcattcccatggaggcctattggggaattgaaaaacatttaaaaagactccttgagttctggataatagaagaatgtacctcctcctggaatacccccttgctgccagtgttaaaaccgtctgcaaaacctttatatgaggctaccaaagtggggataaaggagcccctcctttggggaaaagaacaggacatggccttcaaggaaatcaagaaagctttaattcaagctctggcactcgggttgccagacttgacaaagcccttttatctgtatgttcatgaaagaaaggagatggccacaggagtcttggtgcaaatgttagggtcatggtatctacctgtagcatatctgtccaagcaactggactgggtggccacaggatggccgccccgtttcaaggtgctggctgtcactgctctgttagctgaggatgctaacaagctcacttttggacagaagttgataattcaggtgccccatacagttgtcaccctgatggaacagagaggaggacatcgttggctctctaaccctagaatgctgagataccaatggctcctgtgtgaaaatccatacatcaccttagagactgtaaacaccctaaatctggctacacttctgccaatagaatatgcagagcatgggaagcccccgttatgtgccccagggtatcattgctgtgtagaaacagtagatgaagtcttttcaagccggaaagacctaaaagaccagcccctaaaggacccagacatagagtattttactgatggaagtagcttcatatccgaaggtatcagaaaggctggatatgcagtagccacactgaactcagtcgctgaggcctgccctttaccagtaggaacctctgcacagaaggcagaactaatagctctcataagagcgctacttctagcaaaaggaaagtcagtgaatatctatactgactcaaaatatgcctttgctaccttgcatgctcatggagccatctacaaggagaaaggactgttaactactgaagggaaagaaataaagaacaaaaaagaaatagagcagctcctagaggcagtatggactccaaagaaagtagcattaattcattgtaatggacatcaaacaggaggaagtaatgaggctacaggaaacaggaaagtagacagggaagcaaaaagggctgcaataacaaaaatgacagaaaaaagagagacttatgtcatgcccttattagaacctccccttgcagaaactcctaactacacctccagtgaaaaggcatggttcgcacaggaaaacggggattatcaaagaaaggaggctggtggaagttttcagacgggaggcttgccatcccagaagcccttcgaccataaaagatggccgccccctgaagcggccattttagaggcctaccctcagggatgcgttctctttctcagggatgttccttgctgagaaaaagaattc

SEQ ID NO: 479884 - DNA, 726 bp, Homo sapiens
ttctcaaggtgtattttcctaaatgcgtcatgatggagagtccagctgtgaaactaaacctcatcggaaataccatgtcgcctgacctggcagctgatttccaggagctgtctcagtcaaagactggggtaaaggcagagatggtcctgatgtccaggggaagattctgccaaaatcagagcaatttaaaatctcataaggagaactgcgactatgggacagcaggggtgacccagctcccaaacatcccacacagaacacttagtgatgtcatccacgcttgtgaagaggagaaactggtgtcaatgagtaccctgaacttactgccttctaacagtttgcctaaatcaaagacccaaatgaattgtttggactggaagaggaaccctaaagggaaaggtccctcagtgggaggccacactggaggccttggccagctcctgcctgatgaatgtatgacctgctgggggtgccctaacaagagtagattcttggtgcccaggagtaccacctatgccctctgggattgtttttacgtgtgtgcactcactatccatcactgccttatccctggaaggcattcacatcagcttcatcttcctggccagagttgtgctgagcctgaaatggtggctcacgctggacaaaaatggttaacacagaatcttaggaaggaggtcccctgcctttctaagatagaccttcatcattaataggatttgtata

SEQ ID NO: 479885 - DNA, 614 bp, Homo sapiens
ttgtggtcacagcagggacagtgggagacagagatacgaagggtgggcagaagaggggcaggcaaagaagcaggggagacaaagccacatgtgggctgtcacagccaccagagggagagggtgcctggaaggagattgtggagctccaggagcaacagaggttccccagatctgtgagcatgccctgcctggcagtgcaggaagagatggctgccacccaggccctacctgcagtggtatatgtgagaaagaactgtcccattcccaaatcatcgtccccaccccagcccccaggcccttggttggtgagatccttgatgggcagtctcacgctcctgtccaggagactttcccaccgttgctcctttgcatggagactaagtggactcttctattccctgtgcatcacagggtctacagtgcacgcatcttcctcatccctctgcgttccccagatgacgatttcatctgtgtctcctcctacatactcccaaatggaccgtcccagccctagaacccgaaaatggttcagagagcgaaggccaagatgcccaaacacctgctgcagaatcctgctccaggactgaagtgtatagtctctatcaaaataaaaa

SEQ ID NO: 479886 - DNA, 1101 bp, Homo sapiens
ggcactttgggaggccaaggcaggcggctgggaggtgtaggttgtagcaagccgagatcacgccactgcactccagcctgggcaccattgagcactgagtgaacgagactccgtctgcaatcccagcacctcgggaggccgaggctggcggatcactcgcggttagaggctggagaccagcccggccaacacagcgaaacgccgtctccaccaaaaccagtcaggcgtggcggcgcgtgcctgcaatcgcaggcactcggcaggctgaggcaggagaatcaggcagggaggttgcagtgagccgagatggcagcagtacagtccagcttcggctccgcatgagagggagaccgtggaaagagagggagaccttgtggccccgacaaaaaagaaggcccatggctgcagtgccacatataaagaatgaagacctcgaggcccttctccctctgagtctccctcccaccggtgaccctccagaagcccactggctcctcctcaccctcactcacacttcaactcccagttggattggcctgtggacctacctgctgcatctcaggagcaagtgcatggtggtgtcgctgacttctagtaggaggatgaggctctctgtcaggccacggaccaagtggcccaacccatgggaagtctgcccactttccctcacactcactcacacttcaacttctgggaggactgatctgtggacccacctgatgtgtcatagtcagcaagaaagaagtcacaacatttcctcccacagctctgcagggacagaaggcagacagcaagacccacaggcagcaggaacttgcataggaaggaacatgcacattgagccagggactttcagggacagccagagtttcctcactgtcaccatgatagcagcagctgctgccatcacactggctgcagcagggaggcccagccagggctgcacgctctgtggaggcagcaggagccagggacaagtgggatccccatcttttacgagttggggagggagctcctgggtgcacctgcagctgcccaaacagcagctgtagacccagacctctagctccatggagcaggcatattgtggctacagatcca

SEQ ID NO: 479887 - DNA, 941 bp, Homo sapiens
gctcaccagcacacctctgttaactgaggttagcaggtcccccaggagagcatggtttctaacaccattctttttatcacctatggggaactctctatatccaatgaagaggactccctagaaaatgggcagtccctgagctccagccagctgtctctgcctgccctgtccgaaatggagccagtcccaatgcccagggatccctgctcatatgaggtgctccaaccgtcagacatcatggatgggccagtgtctgaagagagtccctctgccagtgagtctggagtcctcctgtcccaagatccttcagccaaaccagtcctgctactgccccccaaaaaacctgctgctttccctggagaccatgaagagaccccagtgaagcagctgccccttctcaagcagcccccggccctgcctcccaaacccactaccaggattgccaaccacttaacaggtgaaatcgattcaatgtcaacatttttgcaaagataaagaatagtgccttctccatatgggtatgtcgagggtttagatttttgggctttaggtgatggacctggaagcccagtgtatttcccccatttaaaatcacggcacggggtggctgttctcttaggggaaaaaaaaaaaaaagacaatctgcaaattatgtggtaaatacttttaaaagaagagtaagcttagcaatgttgttctaaaatgattgcacacgtcctttgcagtgtttctgaagtgttacttaatgaatgtagccacaggcattaaattgagcactcagtgaaattgtacttcactgcactttggcacatgaattagataccactttgtgattgaaggctgtggtataatcagagattaaaatatttcagagggtcatttctccaactttgataatagtttcacctgatgctgatcgactgcctttttaaaaagcactc

SEQ ID NO: 479888 - DNA, 927 bp, Homo sapiens
gcctcactaaacagaaatggagtcttgctgcagcacatgtaggaggagccatccagggaactagctgggaagacagggctgaccccaatgcgagccagcattaaccagcacaaaacagagccaatttcactggcgctgctgaccaccagggaacaggaaggcatttcaggaggtgagtacagcaaaggccctgaagagagaaggagcgtggttatcgggaaatccagaggccagagtggacgagagagatatcctggcgcccctgtgaaattgccttgtctgccagtgaaactgtcgcctccgctacctccaaagaaagtcatgatctgtatgcccgtgggggggccagacctctcactggtgtcctacacagcccagaagagtggccagcagggtgtggcccagcaccaccacactgtcctgccctcccagatccagcaccagctgcagtacggcagccacggccagcacctcccctccaccaccggctccctccccatgcacccctcgggctgcagaatgatagacgagctcaacaaaacgctggccatgaccatgcagaggctggaaaggtaaaggtgggcaccaggagggaggacgggaggagaggggttggctggggaggggggcctagggatttggaccatgacttaggaatgtgaacaaggggtcatccccactgggggaaaatgtttgaaagtaaaatgagacaaaaaactgaaggtcaaagcatggaaaaaaaaaatgttgccaattgaaaagctctggaataatcacatttatcggaaagaaaaactaacattcatgtatatatgtatatgcttatatatacacacagtcctcagtgtcattagtaggttcgtgaaaattgcaacttcagtaaaataaaatctaacaaaaccaacttaaccatagactaattgatat

SEQ ID NO: 479889 - DNA, 995 bp, Homo sapiens
ccgcctgtggttttccccaacatggatgtgcagcacatgcctatttatatttccagtgacacccagttgacaactgtgcagggagttgtcacaagtttctgtggtgattatggcgtgattgatgagtcgatctacttcagtagtgatgttgtgactggcaacgtgcctctaaaagttggacaaaaagttaatgtggttgtggaagaagataaaatactttatggattgagagcaatcaaggtccgcattactcacatacgtggaagaagtggggtgataaagaatactatctttttcaccttggattctgtgaaacttcctgatggatacgtacctcaagtagatgatatcgtcaatgtggtcatggtggagagcattcagttctgctttaagtggagagcggtttctatcaccccagtacaaaaatcatgacaaaacatttttattctgtttatatttccttttaagagcagtaaaggggctggtttaactgaaaaggttagcttagtaagcctaaatactattttacatatgacttttctggcaaatctaattgagatactggctagttcaattggaccatgaacccagcttagggaagtgccttatcaattaaaagcatgctaaattagcttgctagtagtcactggaggaaaggagttcttaattaaaatgaacactgccattaaatttgaattccatatttcctattagcagcagcagattccaggatgacagaggcctaggacggccctaaagggaacatcagagccaaagtatttaacagaaaaggcatcagggacagcatgttaaaggcatgatttaaagttacacttcagctttgagtcccccttatgctgtctgtacaacctgtattgttccatagcctctttcatcttctgtcattcacataatttgcaatgtttattattccttatgttccttcttctccatgctagaatgtaaactccacaatggcaggatgtcttttggtc

SEQ ID NO: 479890 - DNA, 702 bp, Homo sapiens
tcctacttaactgacttaggacaaaagaagcccaccgagcctccagttcctattattacagttcatggttatcactctagtggaacagaaagcatgggaaagcatggccttatcaaatcataaggatgctaaaagtcagggattacacacaggaaccaaaggaaagctaatagtaggccattgcctctggagggaagacatgcaaagcagcaccagtgcccacctaaggtcaaagaagtctgacactctaagagtggaccccaaaaaaggaatgccccaggggatcttctggacctcaacctctccaagagggatcccctgggcaaaggctctggggcataatactaagccctccttagaattttctcttgcagttgcaatactgtttggcccccatactgtttggaatctggagtttgctgttgaatgggaaaatggaatggaattgcatgtatccaggctttggtgctgctcttctaaacagggtcaggcctaattagtatgtgatgttctcctttggtgctgtttggtgccagtgttctttggagtctgaagaaggttggcctttaaaaatcaaactgccatggaaactgctttacccaaaattttggttcacagccttcattggattacctattgaggcaaacaaagtaaaaccatctggctagcagtctatctattttgttaatcttttcaaaaaaa

SEQ ID NO: 479891 - DNA, 625 bp, Homo sapiens
agttcagagtgtgtgtcaggaaattcctcagagagctcagagcccctaccctctgtacaggaagcatggtgctgacatctgcttttggtgaaggcctcagaaagcttacaatcatggcagaaggtgaagggcagccagcgtgtcacatggtgagggagagaaagaaagaactctttactgcccaaagaggagaagatgaacagagaataagtgttttattattacaacctttgcaccggtgtgatagaaactgccctccaaatataacaggattgaatcctctcaaccatggccatattgacgatatcatatctttgagccaatctaagggagaagcacaggatttattaaacaattggtcatgttcacaactccttagtgagaggcagtcaagtacacagccttttttcctccaaaacaacaacaacaacaacaacgacaacaacaacaacttgacggtcattcatgaataaaaacagctccaaaagagcacaagagtccacttaagaagctatagcaacacagttgaagaaaaaaactgagaatacttgcacaaaaaaggtaggaaggacagtttcattttacctgcatcatcccatcccccagttgacactgctcagcatgg

SEQ ID NO: 479892 - DNA, 557 bp, Homo sapiens
tgggcgcagcagtacataagggggaagcaacactgccatggagaccaagtacagccatgcttgtacaagtgtctggtacataggaagggctgcatacatggaattggctgtggtcatatgcaaaacagaagcaccactgcgagtgctcctgcccatgaaaacaactgatatttatccagcctcgtctgcaccttgttcatctatttgttacgtgccagccctcagtggcagagaaggggtagcagacacagaaggcttaagaaaaagaagagaaaaaagaaaacagaaagtagggggcattctacccatcagcattgtttctggttttggaaaagctctgtctgtgtgtgcctgtacctttggtttcctgcagccactgaagcaagcatcttgctgctgtgtctcctcacaagttcctccaggaggaaaacttaaggagaagagcttggccacattcctgcccccgctccattccttcctgtgactttgccttttcccccgccagagagaaggccttggaatgctttgtgctgtttcctgtccctgcttcctgataa

SEQ ID NO: 479893 - DNA, 693 bp, Homo sapiens
tactacaagatacaataagacttggacatctgcagtcattggctgcaggttgcgggagacggcgagggggatatgacttggtgccaaagaggctcccattcttgaggagaactttccagagaagggaagggggcagccgacattcacagcagctgtgggatgggtgcactggccaataaagagcacctgagcagaccactacctacaccacctctcagagtaaccaagtctataaatgtccatataacttgctgtgcctgggccctgggcagaagggagccactaagaaggattgtgctaggcgtttggctgcccttgatcaacagatgtttggatctcacctcagctctctgggcaccccaacattgccatcacccctcacccctcatcagcccttctctcatcaggtttcagaaaggggatttcctgagcatgggtagaacaagtgtccgtaggcacatcacagcaaattcaggtcccatacagtcctacaagatgggttatccaaggccagtcttttgcgggctgagggagcccagtcttcatgcctggatgactcactcgcaccatcctctctctggcccctctgcatcctgctctcctgcagggcagtgcccgggtttcctgtgcttctctgccagtgagctggttccatgctgggcttcttctaatgcatttctgggctcttagaca

SEQ ID NO: 479894 - DNA, 533 bp, Homo sapiens
gtctggctttgatatcggggtgatattggcttcatagaatgaagtagtgttccttccgttctctggatgataagagaatgccatggagcctacaccctttcaatggggagaataatgctggttcaaaggagtcagtcacttcaaatcggacacttcaaacgagtcagccaactccacctgaagaagtttatacttttggctgtgtgtttataaataatgggcagatacaggcttctccacttcaaacgagtcaaccaactccacctgaagaacttcatacagttggctacgtgtttacaaatgatgggcagcaaatgaggagtgatgaagtaaatcaggttgcaacagggcatcaaagcaaacagaaacgttccagaaaatccaagagacactcttcatctaagagagggaagagtatgtccctgcggttagacaaacaggaaggtgagggggaatccaatctttgggcctcaaccatgtcaaaggacatttgtagtcatgtccttgagggatgaacagatatgagcacattt

SEQ ID NO: 479895 - DNA, 2526 bp, Homo sapiens
agtctggcttcctgctgcacacagcatggcatttatagatgctagcatcactcacaatgtccatgaagagaaggtaaaaaatggccagccagcacctggtaatgtcatcacaactgttccaccagtgcttattaatatggctgcagctggtatttcatccatgagtactagggatcagtatgctgcagtcactcacagcattcgtgaagagaggataaataacggccaaccagcacctgataacaccttgtcgactgctcgactgctggtaatatggcagcagctggagtttcatccacgagcacgagagatctgtctcaacctgttccactggtttccagatgttaccatcactcacaatgtccgtgaagagaggatggaaaatgaccaaccccaaactgataatgtcttgtcaactgctccaccacagcttggttatatggctgcagctccatccacaagtatcagggatctgtatgctacagtcaccttcacagtccctgaagagaagatggaaaatggccaaccccaatctgagaaccccttgtcaactgctccaacagggtttattaatatggcaggagctgttattccatccatgagtaccaatgatctgtattccaccgtcactcacaatgtccgtgaagagaagatggaaaatgaccaaccccaacctaataacatgttgtcaactgttcaaccagtggttatttatttggcagcagctggtattctgggcatgagtaccagggatcagtatgctaccgtcactcacaatgtctgtgaagagagggtggaaaataaccaaccactacctaataacggcttgtcaactgttctaccagggcttacttatttggcagcagctggtattccagccatgagtaccagggatcagtatgctaccatcactcacaatgtccgtgaagagacgacggaaaatggccaatgccaaactgataacgtcgtatcaactgttccaccacagcttggtcatatggcagcagctggtattccatccatgagcaccagggatctgtattttaccatcactcacaatgtctgtgaagaaaagacaaaaaatgaccaaacagcacctgataaattcttgtcaactgttacagcagggcttatgaatttcgcaggagctggtattccacccctgagtaccagggataagtatgctaccgtcactcaaaatgtccgtgaagagaggatggaaaataaccaaccatcatctaataacgtcttgtcaactcttctaccaggacttacttatttggcaacagctggtattctagccatgagtaccggggatcagtatgctgcagtcactcacatcgtctgtgagaagataaataacgaccagccagcacctgataacatcttgtcaactgttccaccgtggattggtaatatggctgcagctggaatttcatccacgagtaccagggatctgtttagcttcctagaaactgagcatgacagggatatacctgtggagttgccaaaatgcacttacctcacagctcaacattttcctttggtttctagatgctaccgtcaatcaaaactgagcatcagacggatatacctgtggggttaccacagtacacttatcttacaactcaacctcttcatctggtttccagatgctacagtcactcaccatgtccgtggagagaagataaataatggccaaccagcacctgataacttcttgtcatccgttacaccagggcttattaatgtgtcagtagatggtattccacccatgagtaccagggatcagtatgttactgtcactcacaatgcccatgaagagaagatggaaaatggccaacaagcagctgataacatcttgtcagctgttccactggggcttattaatacaccagaagctggtattccagccatgagtaccaatgatctgtatgctactgtcattcacaatatccaagaggaggagatggaaaatggtcaaacgcctcctaatggcttcctgttaaattctgctccaccagagcttataaatatgacaggagatcatatgccacccaacgcattggattctttctcctacaacttcactagtctcagcagatataagctgctttacaaacctgatagtaatgacttgtggtaggcaccaaaaatggtctctgcaggtgacccaccagtcacagcaatgtcttcagtggaaactgtgccaaatataccacaaatatctcctgccatggcaaagaaaattaatcatgatataaaatgtcaattaatgaaagaagtttgaaggtttgggcaaatttgtatctttccatgaggatgcattttctatttgcatgtcgattgtaaactctattttgtatccactactacctcttacaactcgtagatcctgtaggtatcctctggttaatggaatacctctttaatttcaggtttaaaaaagttgccttaattcagcaactcgagaaggtgcttaaagatataggttcctactgccatctcagaaaagttaagcacatg

SEQ ID NO: 479896 - DNA, 561 bp, Homo sapiens
acctagttccttaaggtggtaggaatgtggttcccatttttttgctggctgtcatccagaaactgcactaaacacctagagccatcctataccttcttgggagcactgctttatcctcaaagcgggcctgctgtgtcacatccttcttgcactttgattcccttacctcttcttctgctccttggtaaggaaaatgctctgcttctcaaggattcccctgccagggacccaaacatcatgaacacatctaaacctaattacctcccaaaagctccacctccaaatatcatcccactgggagttagggtttcatcatatgaattctcagaggacacaaatattcagtctgttcataatgcctgtctaccacaaaagccagaagcggacagcttcattacgacaggcccaactgggatagctctgaaggacagtggtgaagggaaatcctccaagagggaagatgcttgagcagtgtttctgtgtggaggagagatggccagactataactcctcacccttcaatgtgtccacgaacctaatcttccccgttcgtgtgaactc

SEQ ID NO: 479897 - DNA, 1928 bp, Homo sapiens
taaaaccatcggctggctctggtggccctgtctgtttgtcctcaaccatcaagatttggctttaccatttactgacagtgggacacaggtcatcacctcatcttctctggcctgcacttcctcaccacagtggcgttgtcataatgcacttacctcacagctcaacctcttcctttgaacagaggatggaaaacggccaaccccaaactgataacatcttgtcaactgctccaccacagcttggtgatatggcagcaactggagtttcatccacgagtaccagggatctgtatgctaccatcactcacaatgttggtgaagagaggatggaaaacagccaaccccaaactgataacgtcttgtcaactattccaccacaggttcgtcatatggcagcagctggtattccatccatgagtaccatttatcagtatgctaccgtcactcacaatgtctatgaacagaagatagaaaatggccaaccagcacctgataacgtgttgttgactcttccaccagagcttattaatatgacagccactgatatttcatccatgaatgctaccatcacttactacgtccctgaagagaagatggaagatggccaaccccaatctgataacgttttttcaactgctccaacaggtcttaatatgacaggagctgatattccagccatgagcaccaatgatctgtgtctcaaccttttcatttggtttccagatgctactgtcactcacaatgtctgtgaagagaggatggaaaataaccgaccacaacctaataatgtcaggtcaactcttccactacggcttagttatttggcaacagctggtattccagccatgagtaccagggatcagtatgctactgtcactcacaatgtccatgaagagaagacaaaaaatggccaaccagcacccgataatgtcatcgcaactgttccaccagcacttactaatatggcagcagctggtgtttcatccatgagtaccagggatcagtatgctaccttcactcacaatgtccatgaagagaagatggaaaacggccaaccagcacctcaaaacatcttatcaaatgttctaccagggctcattaatatggaagcaactggtattccatccatgagtaccagggatctgttagccctcactttgcgggtcatagaaccaatgtggggattctgccagtcactgagtatgatcccaactatgcattctgaaactgggaaacaaccagagggtggattcatggaccaacttagtccactgtacgttggacctgatgtaaaaccacatggattacctgatgtaaaatcacatgattaccagaaactacaactcttattagaagagcatagtgacattttgggtatcctggaattagcaccagttcagagccattatcaagtaattcctgagaattctgattatttacttctccaccatgacctgccacactaataattggccacaggtctgttggggaaggtggggacaaggattaacagcattgttatttggcagtgcagcatgatctttcctcaagggcaagcctgcagtaatgtctgattaaagaagagagccaccacaatctcctcacagatttttgggctccccttaccaagtaatttcttgcagccttggtgaaagtcacatcatctggacatccagcgtggctgagcagttcttccaggataaagtcactctcacattccaatgtccttaagcctttggagtatatcaaggaagtccttgaacttctccttaattgacgatagtcaacattcggtttctcattttagctaaccaaccaagcaaactgctagagccatccttatcctctcaaagagaaacactgaatccagagccttggcttaatgacccttggcttaatgactatatagcaataagtttggtgtgaat

SEQ ID NO: 479898 - DNA, 1487 bp, Homo sapiens
ataaaaaacacagatgtgtgatgatggagtggagataagagtgttcaactccaatagccacctccattttttcagaatatttgagctcaaccacttcatttggtttccagatgctgcagtcactcacatcgtctgtgaggagaagataaataacgaccagccagcacctgataatgtcttgtcaactgctccaccatggcttcgtgatatggcagcagctggaatttcatccacgagtaccagggatctgtatgctaccgtcactcacaatgtctgtgatgagaggatggaaaatgaccaactgcaactgaataatgtcttgttaacttttccaccagagcgtgttaacatggcagtagctgatttttcggccatgaatgctaccatcaatcacaatgtctatgaagtgaggatggaaaataaccaaccacagtttaataacgtcttgtcaactgttaaaccagggcatattaacatggcagcagctggtattccagccatgagtgccaagggtctgtgtgctactgtcactcacaatgcctatgaagagaagatggaaaatggccaacaagcagctgataatatattgtcagctgttccaccggggcttattaatacatcagaagctggtattccagccatgagtaccaatgatctgtatgctaccatcactcacgatgtcagtgaaaagaagataaaaaacagccaaccagcaactgataacttcctgtgcactgttacaccagggcttattaatttggcagaagctggtattctggccacgagtacgagggatctgtatgctactgtcattcacaatatccaagaggaggagatggaaaatggtcaaatgcctcctgatggcttcctgtcaaattctgctccactagagcttataaatatgacagaagattgtatgccactcaacgcattggattctttctcttacgacttcactagtctcagcagagaggagctgctttacaaacatgatagtaatgaatttgcggtaggcaccaaaaactacagtgtctctgcaggtgacccaccagtcacagcaatgtcttcagtggaaactccacagatatctcctgccatggcaaaaaaaattaatcaagatataaaatgtcaattaatgaaagaagttcaaaggtttgggcaaactcattcttgggctgcattagatctgtatgtgatttagcgtgacttctatttaatttcactgaaaatttctaatacatctgcttaaatgttttgttttcctttgttagtgttcacaatagtttccttagtaatatacaggtgttgtgatttaagcattcaaacacaaacactacgtaacattgtaacccatgaaaaatgtatacagtggtagtggatgcactaagattgaggtatatttcattttcataattgtagaaatactaatgtttttaaatatcttcagattataaaagaattttcattttgcttgaagaactacaagg

SEQ ID NO: 479899 - DNA, 629 bp, Homo sapiens
catctcaccacaagcaccgtgtatggtccaagggcaatggaaggaagggaagcctcaggacaccgcgtgccctgctccaacagaacacggggacctgtgcagggcgccagagtccctaggagaaggctctcgctcagtgggtgccagcctagagaaccaggaagcgcagccctccccttcgctgactctggcgccctctaaaggcggcctgcccactactcagcgttctctggatgataagagaatgccacggagcctacaccctttcaatggggagaataatgctggttcaaaggagtcagtcacttcaaattggacacttcaaacgagtcagccaactccacctgaagaagtttatacttttggctgtgtgtttataaataatgggcagatacaggcttctccacttcaaacgagtcaaccaactccacctgaagaacttcatacagttggctacgtgtttacaaatgatgggcagagcgtcgtgtgtgttgagtgatgagaaatctttgacctgtgcctaaaactttatattaacgatataaatgcatggctgtgtatgcatatgaagactgtgactttgcaatggttggatttgtctttaatggaatatgttcactgatgttttt

SEQ ID NO: 479900 - DNA, 724 bp, Homo sapiens
tcatctttcagcgtggacagctcctctgggtgtttaaatgctgctctgcatgttttctgtgcaaccacatggctggttcatgggtccgtgtgggaggcggccccaggccagaaacacttatgtctcaactaacagaaatggattttggagtatttcataataggaatctgaatgaggaggaaggcagagtccagtgcaagaacagaggaagactcaccaaacatcaggctctcctcttagactgccccaaggttactataaaaacttgtgacacccttaatccagctctgctcatgccagtcaattcctcggagaacctaactcattcctgtattaaaaccatagagcagatctacttaggtagaagagatctaagagatacatctctcaagaatcctgatgatgaatatagttttctacattctgatggaagtagttttctaaaaaatggaaaaataagggtaggatgtactgtggccctggatctaggtcagggaaaggcacttaacatatatgctgactccaagaacgccttctttgtgcttcaaccacatgcagaacataagaatttagacttcaaaactgcactcactgtcaacagtggtatttgttcatgcttaattaagaaatattgaccttaacagcaaggatatttttaaaaatggatttcaagacaggccgtgtgtactggttatcagcatagagtaaaactatgcaactctat

SEQ ID NO: 479901 - DNA, 746 bp, Homo sapiens
agagagagagagagagataaaatgaaaaggagaaggagaccttttggatgccgttttgggctggccatcaatctccagatatcttttagtgctttgtctgctgagatggttaagtatctatacaagaagaaaacaaagtcagagacgttaaaaaacttctctgcccaagtttatgcagatggtgacacccagttgacaactgtgcagggagttgtcacaagtttctgtggtgattatggcgtgattgatgagtcgatctacttcagtagtgatgttgtgactggcaacgtgcctctaaaagttggacaaaaagttaatgtggttgtggaagaagataaaatactttatggattgagagcaatcaaggtggatgttgtgcctcaccctcttaacgatgatggaccctcagactcaaaaatcagagttttaaatggatgtgttacttctataagtgaagatactgtttatattagtaacatcatttatttccctatggacattgtttctgaagtgtgtctgtttaaatatgtgcaaaaatgactttaggtgttgcagaactgactttaaagtagtacactatcaaataacgtgtgcaattcaagatgacctagttaagagatcatgacactcacatttctccatggctgttttagattttgtgccttataagggcaactggttaaaagttgaatattccactgaaccaggcttcttaaacttcaaggcaagctctgtgaagcccactc

SEQ ID NO: 479902 - DNA, 777 bp, Homo sapiens
gtcttgtgtctttatttctacactctctcgtctccacacacggggagagacccaccgaccctgtggagctggaccctacaatgaccttccacataatctatcctccagtatgttccacatgcagttggaaagaatacgtgttttgcagtatttggacggaatgttctgtggatgttgtgcctcgccatctttatggtgctggaccctcagactcaggaaccagagttttaattggatgtgttacttctatatgtgaagacattatttatattagtaactgcatttatttcttcatagacattgtttctgaaggtggagcgtggacatgggtatccttacaaagcacccctggtgttagcaatgggccaaccaggttggaaatcaatgatttgcatcgaagtgacctgcactcatgcaggacccagggtgaggaggtgcaaagctggttacagtgcttattgggcttttccataatcatttccattatttatactcacaggtctgcattactagcgtacatggaagaaatggggtgatagattatactatttttttcaccttggattctgtgaaacttcctgatggatacgtacctcaagtagatgatatcgtcaatgtggtcatggtggagagcattcagttctgctttatttggagagcgatttctatcaccccagtgcataaatcgtaatgacaaagcatttttattctgtttatctttccttttatgagcagtaaaggggctggtttaacttaaaaggttagcttagtaagcct

SEQ ID NO: 479903 - DNA, 735 bp, Homo sapiens
cagggcacatgcaacatgaatcccactggacacaccagacacagctggaaggtgattccattaatactacaaaagcgctctcagtgcagttttcctggaatgtcttttctaaaggcctttccaagtgaacaccatggcaaatctgagcactggttaaagcagcttttgcccatggaagtgcagagggaagaggtcagcctgggagctcaaaggttggcttggaggttcagcttctggctcaccagccctgggaacatgagcatgttactgtgcccctctgcacctgcctccctttctgccccatgggcacagcggttcatgaagaggaagcaacgttcacagtgccttttaacatttgaaactgacagacccgtctctcttccattgcctagtttctcactttctgtgacttttcctggtgacagcaactctccacatacatgccacctgggaatgactgcaggtttaatgtcaaatttaataaaatgtcagatcatattaccctgggaatcacagcaaaatgtttaaagttgaggctctgcggcctcacactgacacctgcttccttcactcctttcctgtgccccatggccttgtagcctttctttttcccttatcaaagcctgtgatgcagtgatgactgtgtctcttgctgaaagccttagcaacaccctcccaagggcttttagatatagttcaaggaagtggccaacagatggcactattctcattagc

SEQ ID NO: 479904 - DNA, 669 bp, Homo sapiens
accagttagttttgcccagaatccatttctcttctgaatttgcagcattttctcaggacctgtggtgggaatgtccaggactggtcagcctgtgagcctgtaacatggatacagtggagccagaacaaactgtccagaacagccagacaagtaagagcaaccttatcttgtatgaagtgatagggattactgaggcatctccttggaaaccatacctcattaatcctgctgtgaagaaagatggagtgacacatcttcccttcaccaggggcctacaggctagaggtgggaaaggggctgtaagcagtggcattgtgtggagctgcttcctagaggttgaggccaagggactctggtgggaaagttgccctgggcactctgcattcaagggagtgtttcctactcccttctccatgcctggcaccacaacaaagcatattgttgagtgtaacgtgagaagtataccttttggcaaagacaggacttttatgatggggatagaaccttactttccattatccttgagaattccagacttggctactggtgaaggcttagcttctgtgtatacccttagcctgtgaaaaatggctcaggaaaaggtgagctatacctcttttactgtagcttagtagagcaatctgagggagatatctgagaagcaactgc

SEQ ID NO: 479905 - DNA, 1023 bp, Homo sapiens
aatgcacacattttaatgtccagaaaagttgcgggttttgtatatttgtactagctcaagagttgaggattgaaaaacgttcctaaagggatgagacaacaggaaatgggccacgcggaccccgtggggcggggcggaacctggcagggcgccagtgaccgctggggccagagccctgccgggaaaggagggcttccgccttgcagcgcagctcggatcagcagcagcccaggaggcctcccgcccgtactttcccgcgtccatccctctgtcccacggtcggtgagtcagcggagcctgatggaggccttgggctctgggcactatgtgggaggcagcatcaggtccatggcggcggcggccctgtctggcctggcggtgcggctgtcgcgcccgcaggggacccgcggctcttacggcgccttctgcaagacgctcacgcgcacgctgctcaccttcttcgacctggcctggcggctgcgcaagaacttcttttacttctatattctggcctcggtgattctcaacgtccacctgcaggtatatatttagagccactaactttgtggcatttgggggctcctcgtcaggatggctgacttccacccacctgctcacccaccctagagcaaagcgaccaactccgctcctgcatgcagacttgccactcattctttccattgcctcatcttttagtataaatgggtggcaaaaaaagaaaaaaacagcatttgtggaaagcctgaaatataacccaaatcgtctaagatagaatgaaaaattgactctcaaggaaatatttgaaggaacagaatacagcttaaaaatttgaaaatccttaaaaatatctgagaagtttttgcatccgtaaaacagaaaacagcacgaactttaggaaatgacaatgggcacagaatgcaataaaaaaaaaaaacggggaaagctctccttcgccttctgccatgagtggaagctccctgaagccctcaccagaaggcagatgctggtgccatgcttctcata

SEQ ID NO: 479906 - DNA, 946 bp, Homo sapiens
gagccacagtccttgtgcaccccctggacttccccaaggagggcatgtggaagagaaagtctgcctttctctgggagaatgcagggtccgcgtctgctcaggaggaaacactgggcaaatctagtttggagtcacctctgctctttagatctaccaaggttgtgaaactgagggacagtctcaggaacagttccagaaaaagaaaactggacctgaatggaaaaagacattttttctcccagttgaggcaggtggagtctgaatgttactttagtattaagaggccactgtgtggacataatgttactggccactacaccttggttgtggagaagaaccttgaggtctgtgctgaggaaaacgaaactcttgtctttgaagtgggcttggtgctgaactccataagcggaacacaaggcgcttcatggggtcagaaaaggcgggttcgcgcgccccctgctggccaccagagacagtgcgagattctcagcgctcactgtgtagcggtagccatctcatagtcattttgttaacatttctggtgatgagaataggatccaaagtggtccccaatttcttttcctctactgcctcaatcaatgcctaggtgccagcaaggatgctgtaaggtccagttgaattctggcatggtaggaaagagttgggccctaaatccaaaactgaaaagaactctgtgtaccctcttgttaccctccttgcactctgtcaaggccacttccaccttagtccttcttgctgccactgtcttctctttctgaactgcctttcttctccttgcctcccattctggaactgccctgtttgttgactctgcaacccctttggttgcaccttttaaagtgattgataactctacaggtggtcacactaccttttctacagacttgctgtagttcaaccatttctacttgatgacaaatgtgtg

SEQ ID NO: 479907 - DNA, 494 bp, Homo sapiens
tggccagactgcttttttaagtgggtccctgatcctgtgcgttcaggctggcaacagagccgtacctcactgggatggagctcccagaggaaggaacaggctgccatctttactgtttggcagccttcactgttgccaccttcaggtactggaaaatccaaggtgaccggggactggagtggacccccattatactgcagcattcctatggagaagtggacagacactttgttacatgggtccctgatcctgtatctcttcattcaactggtcctcctggcctgggtctccagccaactgccaccagagctattgagccagcagcaattctgcaacttcccaagacagaactcccaggaccagaggctggtgaagacccccagtacagagcatccacttcatggaaaaaaggccagactcttctttatgcaggtcctgatccacacttctccttactgggaaggaatgctcaatctgggactccagcataacca

SEQ ID NO: 479908 - DNA, 566 bp, Homo sapiens
gccgtagaatataagtgggggtggctggaggccctggatgcccaacacaggcccctgatatgatttggctgtgccttcacccaaatctcatcttgaattgtaaatcccacaattcccacgtgttgtgggaaaggccaagtgggagctcaggccatggcttcagagtgtgcaagccccaagccttccacgtggtgttgagtctgcaggtgcacagaagaattgaagttgggaacctctgcctaggtttcagaggatgtatggaaatgcctgaatgcccaggcagaagtttgctgcaggggaggggccctcatggagaacctctgctagagcagtgtggacgggaaatgggttggatgccgcacacagagtctctactggggcactgcctagtaaagctgtgggaagtgggccactgtcctccagaccccagaatggtagatccagtgaaagcttgcaccatgcacctggaaaagccacagacactcatgccagctcatgaaagcagccaggagagagattgtaccctgcaaagcaataggggtggagctgcccaagacccatgagga

SEQ ID NO: 479909 - DNA, 1346 bp, Homo sapiens
ggcacctggaaaatcgggtcacttccacccaaatactgcgcttttctcacagtcttaccaaatggcacatcaggagattatatcccgtgcctggctcggagggtcccacgcccacggagcctcactcattgctggcacagcagtctgagatcaaactgcaaggccgcagcgaggctgggggaggggcgcccgccattgccaaggcttgagtaggtaaacaaagtggccaggaagatcgaactgggtggagcccaccccaggtcaaggaggcctgcctgcctctgtagactccacctctgggggcagggcatagccaaacaaaaggcagcacaagcctctgcagacttaaatgtccctgtctgacagctttgaagacagtaatcgttctcccagcatgcagctggagatctgagaacggacagactgcctcctcaagtgggtccctgacccccgagtagcctaactgggagccaccaaccagtaggggcagactgacacctcacaaggccaggctccgctgaggatatccaggcaaacagggtctgaaatggacttccggcaaactccaacaaacctgcagctgagggtcctcactgttagaagaaaaactaacaaacagaaaggacatccccaccaaaaccccatctgtacgtcaccatcatcaaagaccaaaggaatgcagctccgaaccagcaatgaacacaggtggatggagaatgactttgacgagttgagagaagaaggcttcagacgatcaaactactctgagctaaagaaggaagttgaatccatgacaaagaaaataaccaatgcagagaagcccttaaaggacctgatggagctgaaaaccatggcacgagaactacgtgatgaatgcacaagcctcagtaaccgatgtgatcaactggaagaaagggtatcagtgaaggaagatcaaatgaatgaaatgaagcgagaagagaagtttagagaaaaaagaataaaaagaaatgaacaaagcctccaagaaatatgggactatgtgaaaagaccaaatctacgtctgactggtgtacctgaaagtgacggtgagaatggaaacaagttggaaaacactctgcaggatattatccaggagaacttccccaatctagcaaggcaggccaacattcagattcaggaaatacagagaatgtcacaaagatactcctcgagaagagcaactccaagacacataatggtcagattcaccaaagttgaaatgaggaaaaaatgttaagggcagccagagagaaaggtcgggttacccacaaagggaagcccatcagactaacagctgatctctcagcagaaactctacaagccag

SEQ ID NO: 479910 - DNA, 835 bp, Homo sapiens
tgagggttattatggtgggaaagaccaaatggaagccattagagctgcctctacctagaaacacaataaatcaaaaacagtatcacatccctggagggattgtgattagtgccaccatcacagacttgacagatgcagcggtggtgattcccactacatcctccttcaactctccaatttggcctgaacagaaaacagatggattttggagaattacagtggattatctgaccgaaaaggctgccagttttgagttgggtccagaacaggagaaggctcttcaacaggtccaggctgctgtgcaagctactctgccacttgggctatatgacccagcagatccaacagtgcttgagttgtcagtggcagatagggatgctgtttggagcctttggcaggctcccacagatggaggaacattgccaccaggagacacaacgattccattaaactggaagttaagattgccacctggacagtttgggctcctcctacctttaagtcaacaagctaagaatggagttatagtgttccctggggtgactgacccagactatcaagatgaaatcaatttattactccacaacggagtctagctaaataaaggtttgacaattttgttaaccctcagttttggttttgttgggtctctgtattattttctattcctcattttgtttacttctgttctaatctttattatttccttctgattactttggttttagattgctatttattttatggttttttaagatgaaaagtcagactattttgaaatttttatcctttttaaatgaagctatttgaaggaatgaagataatggtgtaagac

SEQ ID NO: 479911 - DNA, 1317 bp, Homo sapiens
gctcctcacttcccatacggggtttggtggtacacgtgaaggtttcttatatagtctggctgtagttcatgacttggcacagttgggctgcccactggagctctggggtgatcttagtgcttatgttccttccccagcgtagaggcagcagaggaggagatcttagtagtggttgtgaccaaggtgaagatgaacaggattgggaactgcttaaaaagcagtctgatcctgttttgatagagcagctgcgttgtgctgggggtccacttcagcccttggtcacctcacactctgaagcccaaaggctggaatggggaagtgcaatgctgctactgctagctgactggaattccaagccagtgggtcttatcttggcagtgagctccactctggccctgggtaggtatagaaatgccattcaagagtcaaggcctagaattggggaacccaagagcctgcttggtgctcttcctcactgtggccaagctggtacctaacctgcaagtcaaagtctcctttatcttccctttgcttttatcaagcagaatgagtctctgctcatcgtcaccatagctgtgcatatgttgggtgacacctaaaggtagcatatctctgaatctcacccaaggcccatgctaatgtgataaattgcctctttattttgataatttttatagaatatatcctagaaggcatatttttatcaagtaaaggtataatacaaaaataaaaattttcttgagtgtgctaatacaaccttccagtgttaatgataatcaggactggggggaattaatctccttcctgtgaaatgctgaacacttgtcctgaaaaaatactgacatcagactctagtatattcaatgttttatatattgtggcctatttcctcttttgttatttggataaaactttctttatatgacacccattaatactgcccacagtagaagaaatttctgatttattttcaatctggtactttatgctgccatgacaaataacctgttagaaagaataacagaaaaaataaactaatatttattgagagaatattaaagttatgagattggacccagaaggggtgttcaggcaatacaatatattgtctcagctcaagggtattttatttatttggggagataagatacataaagttccctaacagaacacaatacaggatacattatttgccaaatgattaaaaccataaaatttgtgctataagaattcaaaggaaaggtgatttgctgtgggccagggtggtcagaaaaggctttagataagtagaatttggaccttgaagattagatagga

SEQ ID NO: 479912 - DNA, 1745 bp, Homo sapiens
ctgaataggaacagctctggtctacagctaccagcatgagcgacgcagaagccgggtgatttctgcatttccatctgaggtaccgggttcatctcactagggagtgccagacagtgggcgcaggtcagtgggtgaactcaccatgcatgagccgaagcagggcgaggcattgcctcacttgggaagggcaaggggtcagggagttccccttcctagtcaaagaaaggggtgacagacggcacctggaaaattgggtcactcccacccgaatactgcgcttttccgatgggcttaaaaaacggcgcacagggagattatatcccgcacatggctcggagggtcctatgcccacggagtcttgctgattgctagcacagcagtctgagatcaaactgcaaggcagcagcgaggctgggggaggggcgcctgccattgcccaggcttgcttaggtaaacaaagcagcctggaagctcgaactgggtggagcccaccacagctcaaggaggcctccctgcctctgtaggctccacctctgggggcagggcacaaacaaaaagacagcagtaacctctgcagacttaaatgtccctgtctgacagctttgaagagagcagtggttctcccagcacgcagctggagatctgagaatgggcagactgcctcctcaagtgggtccctgacccctgatccccaagcagcctaactgggagacactcgccagcaggggcagactgacacctcacacggccgggtactccaacagacctgcagctgagagtcctgtctgttagaaagaaaactaacaaacagaaaggaaatccacaccaaaaacccatctgtacatcaccatcatcaaagaccaaaagtagataaaaccacaaagatggggaaaaaacagagcagaaaaactggaaactctaaaaagcagagcgcctctcctcctccaaaggaacgcagttcctcaccagcaacagaacaaagctggacggagaatgattttgacgagctgagagaagaaggcttcagaagatcaaattactccgagctacgggaggacattcaaaccaaagactatgtgaaaagaccaaatctacgtctgattggtgtacctgaaagtgacggggagaatggaaccaagttggaaaacactctgcaggatattctccatgagaacttccccaatctcgcaaggcaggccaacattcagattcaggaaatacagagaatgccacagagatactccacgagaagagtaacaccaagacatataattgtcagattcaccaaagttgaaatgaaggaaaaaatgtgaagggcagccagagagaaaggtcgggttaccctcaaagggaagaccatcagactaacagcggatctctcagcagaaactctacaagccagaagagagtgggggccaatattcaacattcttaaagaaaagaattttaaacccagaatttcatatccagccaaacaaacttcataagagacggagaaataaaatcctttacagacaagcaaatgctgagagattttgtcaccaccaggcctgccctaaaagagctcctgaaggaagcactaaacatggaaaggaacaaccaataccagctgctgcaaaatcatgccaaaatgtaaagaccatcgagactaggaagaaactgcatcaactaatgagcaaaataaccagctaacatcataaagacaggatcaaattcacacataacaatattaactttaaatgtaa

SEQ ID NO: 479913 - DNA, 721 bp, Homo sapiens
gctgctgcctggaaaatgttgataatgtgttcccatgatgaggctgttctggcccttgttctgttggaatgtggtgtttcttgcactttttcccagcagaatatgataagaggcaggctgtttctcatggcccaaatatccagtgggatgtttcactttgaccaaggagagcccttgatttggctacacggagagctgcgccagcagagaggggaggggctgaggggcttttggggaatggctcgcaaacgcatgagggccaatgggagaagtgaagtccagaccatgttaacctctaaggagagtttgaaggtaccaaacttgttttacggggtgcatgttggtgaagtcgatctgccagtgctgccctgccaggtgccctcgggcctgatgtgtggggaaaggaggtcatttgataatttcctgaggcaagttgaagttggaaatccacagtcagaagtatcccacaaggcccaagaaggagaggaggtcctttgaaggggcatgtcccaaattagctccttgcattgggttgggatggctggagagttaggggttaggacaagcccaaggttgaaattagaggagggattgtccaaaggaggaggcatttttgcgggttttttgttgaggaggaggatttgaaaaggtgaacatgattggtagagagagagagctgcaaacagagataagcaaagcatctcacgtcatttaccattgc

SEQ ID NO: 479914 - DNA, 577 bp, Homo sapiens
agaagaaaccagaaaaacaattctgctcaccagcaatggatccaaaccaaaaagaaatcccggatttacctgaaaaagaatgcggaaggtcaagtattaacttaatcaaggaggcaccagagaaagacccaagaataattagtgttcctgaggaagaagagaaatctaaaagtctgaaaaacatatttgggggaataattgaggaaaacttccctagccttgctggagacctagatgttcaaatacaaaaagctcaaagaacacctgggaaattcaccacaaaaagatcattgtctaggtacatcatcatcaggttttctaaagtcaagacaaaggaaagaatcttaagagctctgaggcaaaaacaccagggaacctataaaggaaaatctatcagaataacgcagatttctcagcagaaaccctacaagttagaagggattggggtcctattgttaacttccttaaataaattatcagctaagaattttgtatgcagcaaaactaagcatcataaatgaaggagagatagcctttttcagacaaacaaatactgacagaatttgccactaccaag

SEQ ID NO: 479915 - DNA, 1472 bp, Homo sapiens
ggccgaataggaagagctccagtctacagctcccagcgtgagcaaagcagaagatgggtgatttctacatttccatctgaggtaccgggttcatctcactagggagtgccagacagtgggtgcaggacagtgggtgcagtgcactgtgcgcaccgtgcacgagccgaagcagggagaggcattgcctcacttgggaagcacaagggatcagggagttccctttcctagtcaaagaaaggggtgacagacagcacctggaaaatcgggtcactcccaccctaatactgcacttttccaacgggcttaaaaaacggcacaccaggagattatatcctgctcctggctcggagggtcctacccccatggagtctcaccgattgctagcacaacagtctgagatcaaactgcaaggtggtagcgaggctgggggatgggcgcctgccattgcccaggcttgcttaggtaaacaaagcagccgggaagctcgaactgggtgagcccaccacagctcaaggaggccttcctgcctctgtaggctccatctttgggggcagggcacagacaaaaaaaaagacagcaataacctctacagacttaaatgtccctgtctgacagctttgaagagagtagtggttctcccagcatgcagctggagatctgagaatgggcagactgccttctcaagtgggtccctgatgcctgagcaccctaactgggaggcactcccaagtaggggcagactgacacctcacacggccgggtactcctctgagacaaaacttccacaggaacaatcaggcagcagcatttgcagtttaccaaaatctgcagttctacagctactgctgttctgcagccaccgctgtggatacccaggcaaacagggtctggagtggacctctagcaaactccaacagacctgcagctgagggtcctgtctgctagaaggaaaactaacaaagagaaaggatatccacacaaaaacccatctgtgatcaaaatatccgagctacaggaagaaattcaaaccaatggcaaagaagttaaaaactgaaaaaaaattagacgaatggataactagaataaccaatgcagagaagtccttaaaggagctgatggagctgaaagccaaggctcgagaactatgtgaagaatgcagaagcctcaggagctgctgcaatcaactggaagaaaggttatcagtgacggaagatgaaatgaatgaaatgaagcaagaaggaaaaatttcatatccagccaaactaaacttcataagagaaggagaaataaaatactttacagacaagcaaatgatgagggattttgtcaccaccaggcctaccctaaaagagctcctgaaggaagcactaaacatggaaaggaacaaccagtaccagccactgcaaagacatgccaaattgtatagaccttcaaggctaggaagaaacagcatcaactaatgagcaaaataa

SEQ ID NO: 479916 - DNA, 685 bp, Homo sapiens
tacgttcagtgctgatgtcccctcttatattcctgattttggtgatgtgtatcttctctcttttgttttgtttcagaaggaatggtaccagttcctccttgtacctctggtagaattccgctgtgaatccatctggtcttggactctttttggttgaatgttgaatattggtccccactctcttctggcttgtagagtttctgctgagagatccgctcttaggctgatgggcttcccattgtggacaggaccctcagctgcaggtctgttggagtttgctagaggtccactccagaccctgtttgccggggtatcagcagcggtgtctgccaaacagtggtttttcgtgacccgcgaatgctgctgtctgatcattcctctggaagttttgtctcagaggagtacccagccatgtcatgagagctccactctcatgattgtgattggtgcccttataaaagaggcttacaggagcccttttgccttcctgccatgtgaggacactgtgaaaggacacagtgagaaggtgccatttttgaagcagagagtgacccctcaccagtcttcaaatccactggtcacttgatcttggatttcccagcctctgaaactgtgaataataaatttctgttgttgataaattacccagtctgtggcatttttgttatgcattttgtttcatggc

SEQ ID NO: 479917 - DNA, 1039 bp, Homo sapiens
caggtagtgattgctgctggagacttccttctccctgtggcgtttctccgcgcctctggccaccctcctgaaggatccctgtgattccaggcaggaatggtctgcttggagacccgcaagctttcagggcctttcccactgcttcctctaccctcatatttcacttggctctctaaattgactcagctccaggatgtggagcatctagaactcttacatgctgctagtggaaatgtgaactggtataatcattttggaaaacagtttggtagtttcttagaaagaaccaaggtcagaagagataaattgacaaaatttagaaagcaagggccaagtgctggtggagactggaaatataggaactctcatgcaggtgaaagtgtagatttgtactattattccagagaactaactgaaagcagacagttaaacttgagtcatgccccatgccccagcaattttgttcctgagtcggtatcccagagaaattctcccatgaattcaggtacagaaagcacagaatgtaaagacaagcctttcactaccgctttaagagctggaggaaaaaaagacatgacagtaaatctgcttcgagttccccgatactaacataattaaccaggtatggctacatattttatttctactatatttgaatatttgcgataacatttcctatttctagaatatactttaatgggaaataacctcagttaattaagttacagggcatttgtgggaggaataatatgcatcataatataccttttcaaagagatacattgagctttagagaaactagaaggttttcaacaacaatgccaatataaacaagacattgtgctgctagaaacaaaggcaactgtaatcttttctactaccataaaatgaatatatacgatgctgttttaaggcttttgggttcaaaataccttctacagatgttaaggaataaaagggctttattcttaagatttgcatgctatattctttaaacattgatttatttttaagatctctgacattcaacaagtacaaa

SEQ ID NO: 479918 - DNA, 684 bp, Homo sapiens
aggaaaaccagagacctttgttcacttgtttatctgctgaccttccctccactattattgttcactgttggcatacagaaatgctactgatttctgcagaggagtctcacaccctaaccactaccaccccaggccatgaggagtactgccagactatcgccaatgttcccttaaggcccaaggtctcttatgtcagcttgtcgctcgcccaaggccctcgatgtacctggctgtcgctgctggttattcaaggcccaagggctcttcagttagcaggtgatgaatgctggcaggactgggttctatccttcagggcagcaggtttccttctggcccaaggtgtgtctataaatgtcattttggagctaggtcctggaatggaggccagaaggaagggatctcttttggagctgcaggctgaactatttcctcattgcaatcagatccatgcattacgggtcaacagcacccaactggtagagacagtaccagaggcagcccttagtccaagagaactaagcagccccttgcatggcctctggattgattgccagtgaggggctgccaaactgtgggtggtacctgaaagggctatcccagatgagcccccaaatttgtaaccacctgacagaatcattttaggtttgttttatatgaaatattcagcattttaagccggtcttc

SEQ ID NO: 479919 - DNA, 555 bp, Homo sapiens
catagatataggctccaggctcactgacatgaacccaggcccctggtcatccatgcacaaccaaccaacagttccacaccaggggattgaggcttcagactcaaccctgtgggcccaggtgtcaggcccacctacctactgtcccaggtgcctggccagcctgcccaaggactctgatggcaatcttgccattggatcaaaacattccaaatttggagaaagatgtgaatatccaggtacaggaaaggcaaagttcttcaatccaaacaagactacaccaagacatcttataataaaactgtcaataattaaggacaaaaggagaatcctaaaagcaacaagagaaaagaagcaaataaagtataagggactttccataaagctagtaggagatttcttagcagagaccttgcaggccaggagagaatgagataatatattcaaagtactgaagaaaaaatcctgctagtagtgtaacacaaaagcatatgaaagtatacaattcactggtgaaagtaagtacatgatcatattcagaatactctaatactgtaa

SEQ ID NO: 479920 - DNA, 504 bp, Homo sapiens
aacattttttccttcatttcaactttgatgaatctgataattatgtgtcttggagttgctcttctcgaggagtatctttgtgttttccttctaacagtcaggaccctcagctgcaggcctgttggagtttgctggaggtccactccagaccctgtttgcctgggtatcagcagtggtggctgcagaacagcagatattggtgaaccgcaaatgctgctgcctgatcattcctctggaagttttgtctcagaggagtacccggccgtatctcaagctgcatgctgggagaaccactactcccttcaaagctgtcagacagggacatttaagtctgcagaggttactgctgccttttgtttgtctgtgccctgcccccagaggtggagcctacagaggcaggcaggcctcttgagctgtggcgatgactcgctctgctttggctcacgcatgctttggcccactgtcctgcaccccctgtccggcactccccagtgagatgaaccc

SEQ ID NO: 479921 - DNA, 533 bp, Homo sapiens
aaagttaatctttttcttagttccatcttttctgctctggtttctccccatctttgtggttttatctgactttggtctttgatgatgatgacgtacagatgtggttttggaccatcagctgcaggtctgctggagtttgctggagttccactccagacgctgtttgcctgggtatcaccagtggaagctgcagaacagcaaatattgcagaacagcaaatattgctgcctgatccttcctctgaaagcttcatcccagaggggcactcacctgtatgaggtgtctgtcggcccctactgggaggtgactccctcattttggtcaaagccattcaacaagtctcttggaagttctactttccacatcttcctttcttcttctgagccctccaaactgtttcaacctctgcctgttacccagttccaaagttgcttccacatctttgggtatctttacagcagcaccccactcttccagtaccaagttactgttattagtctgttttcatgctgctgataaaggcatacctgaga

SEQ ID NO: 479922 - DNA, 862 bp, Homo sapiens
attattctgctaactgcctatatttagtgagtcatttgacctctttgaggtggctacagtaatgccacaaaataatagggaagacaggaaaatgtgggaaagtttggaacttcctaaagacttgttgaatggctttgacaaaaatgctgatagtgatatgaacaataaggtccaggctgaggtggtctcaggtggagatgaggagcttgtttggaactggagcaaaggaatggaggtttgggaacctgtgcctagatttcaaaagatgtatgtgtatggaaccacctggatgcccatgcagaagtttgctgtaggggtgaggtcctcatggagaacctctgctagggcagtgcagaagggaaatgtggggtgggagtccccacacagagtccctactggggcaccacctagtggagctgtgagaacagggccaccatcctccagaccccagaatggtacgtccactgacagtttgcactgtgtgcctggaaaagccacagacactcaatgccagcccgtgaaggtagctgggagggaagctgtaccctgcaaaaccacaggggcaaagctgctcaagactatgggaacccacctcttgaatcagtgtgacctggatgtgcaacatggagtcaaaggagagcatcttggagctttaagacttgaccgccctgctgggtttcagacttgcattgggccttgagttcaaataaaaaatagccagcataaaaatacattattaaatagtattacttcatcaccaatgactcacatggatcaaacatattaattttcccacaatattaactaaattaatctgtgcacagctcatgaaatgaaacaaaaactctgacattgtctatga

SEQ ID NO: 479923 - DNA, 838 bp, Homo sapiens
aactcaagtgtctacggtggtcatgagctatccttctgccaggattccagaggcctttggtgagagggtgttcatgcagtctcagttcacaggattcgacctgacaaaagggtttcctggagtggtcctggaccctgggttttctggaacaggcctagacctgggccctctggagcctcggtttgacctgatgctgacgctggcatggagccggtttctatggggactgctctggagagcaggattgtgggtgttagcctggatcctatgtccactgatgctggcctgggggcttgttgtgcagaattggaatggcagtttccaggagttattgttagccaatgaagttagtaaggacgaatttataacaggatacattcacagagttaccaatgctttctataaaaatgaatctaaggcttttgttttctgtcggagaaaacaaaattctgtctttacccaagaagaggaaattcacagtctaggtgaagaggggacatggatgaaattggaaatcatcattctcagtaaactatcgcaagaacaaaaaaccaaacactgcatgttctcactcataggtgggaattgaacaatgagaacacatggacacaggaaggggaacatcacactctggggactgttgtggggtggggggagggggagggatagcattgggagatatacctaatgctagatgatgagttagtgggtgcagcacaccagcatggcacatgtatacataggtaactaacctgcacattgtgcacatgtaccctaaaacttaaagtataataataataaataaataaataaaattttaaaaaaagtaccaacagtc

SEQ ID NO: 479924 - DNA, 689 bp, Homo sapiens
cttctccttctcctcctccttctccttctcctccttcttctcctcctcctcctttttctcctcttcctcctcctccattctctcatcctcctcctcctccttctcctcctcctcctttttctcctcttcctcctcctccattctctcgtcctcctcctcctcctcctcaggtgttctggggtgatgcacaccctgtggctgttctgggcctccttgcctgcctgttccaggatgttggctgtcaggcttacaggagctgcgactgtgtttgtttccagccatgatgtttgctgggttttgccccggttgtcacagcttgatttttctgctggcctgagtctctcaaggtgccagtgcttactgcagcccactatacccctgtgctccagcccctcactggtcatcagttgccttagtgacaacctccactttgtgatgtcattggtgtccactgggccgtccttttcaaggattgattctcctttctactatgcacttactgaggggctgacccctaggctaggtccaccctacatcatgcaacaccagccatgcatcccaaaccatgcttatcctcccatgctccctccaacaatacatctcccaccagattttaccttacgatggatgcaccctcatctgttaatatatctcacctacttcttcccaaggagagaaagtctctaaaa

SEQ ID NO: 479925 - DNA, 677 bp, Homo sapiens
agtgcactacgtgcttaaccttgaggggccaaagaacacagccatgggcctggtaccaacaccccagggattgaggtactcacacccatggctgtcaggtgtgactgtagctacaaacactcatctgagtcctttctccaaaatttccttcagccataggaaaacctctcacccaatggcaacccacatcccgtcattccccctccccagtggcaacccacatccagtggatggtcaatgcagggatatgaaggttgatcagtgtcctgtccattcactaattggaagattagtgacgaagactgggcaagagacatgtggatggagctatggaagtgagcataaaagggaacacagcaaaaagagttccattaaacttcaaagctgtggctgcttcccaggtgtttcaggccttttgtaccaagaaaggagcaggaaaggaacaggcagtatcctggcaggggaaatggaccctgatcatcatgagcaagtaaggctaaggttgtacaaaggaagaatacatttggttccaagatgatccactagatgtctcctcatattctgaagcctaaatctaatggcaaatgggcaaataactaattctccttatttgagtgttattggggtaagataattccgtatgtgttttgtgttttaaatacattaggctaataata

SEQ ID NO: 479926 - DNA, 579 bp, Homo sapiens
gccctggtcctatggaaaagacagcccttttctctccaggtctagcagcttacatatgtacaattacattttctactacaagaagatgtactacaagaaggaaacatgatgattatgaggaagacacagatcaagatcaagccctctcctgtcttgattcaataacagaacaatctagcattttggatgatgcagacacatatggtaattttaacaatttaagattctggtataatcttgagatccatagcactcctggaccacccatagagattatggaaatgacatgtattgctctgcctgaaatggctgaagagttctggtatttactgaagttaactattgaattaccaaaaccaaccacaatgccagaaatacagtgcgaccttggcaagcttagggacaagcagagttcaggggctggtgggaaggagagaaacctggcaaactttcctcaaggtgaagcagaggtaagcaatgaacaactgtgaacatttgttattcgtatgttaccttcacaatttttggcatacctttgtatcacctatataataatttaaaggcattctaatggaaaac

SEQ ID NO: 479927 - DNA, 850 bp, Homo sapiens
cagtgtttgccaggtgctaacagatgacggtagggattgactacaaaggtgcagcacgttggaattttgggggtgatcacacttttctttatggaaatgtgatggcagatgttatcccttctgagagatggatagtaaattttgacaaagacctttcagatggtcttgtttttgcaacacagttgggagcctattgcccattcttggactctgcacaaataactcccaaatttctgcagaagtctcacataacaccttcatacagttctgtctggggctggctgagtggcgtcttttcttgtgcttctctttttccagaaggtgtcaacttgactggattgaaggatgccaagatgactggcaacgttttgtttctaggtgtgtctgagggtgtttccaaaggagatggatgcaggagtcagtggcctgagaaaggaagatatgccctcagtgtgggttgttaccatccgattggctgtggcagtggccagaacaaagagacagaagaagggggatattcagccacagacatctgtgacccaaatccaatcctgatgctcatgctttgtgtctacatgtatgaaagactccctacatatctccctaagaaggtggtgtcctttgaatgtactctacatgacacggtgctgaataaggaaaagcaggaatttacagccaaggagcaggatggagatcagtgggtgggaaatgactaagaggaaacatatggattctactgaaaaattccagctcgcgaaacttagtgtataatgctagaattgttggaagagatgctgctgacttctccctttcccaaaaagggaatgttgtgacaatttctccaaggcat

SEQ ID NO: 479928 - DNA, 817 bp, Homo sapiens
tctctctctcttctcttctctctctctctctctctttctcattatagagagaatgctatgctttcatgtatgggtctgatttctctgaagaaggaagagcaggttttggttctatcccgtgtagtgccatactgcagcaataatatgccccccatatgtgtgcaaaatacaccaaaagtcaatccttgttttgcatccagcaacatatattctgattctgaaagaattttgcttagttggatgaacataaattatgagaatactcgacatgtgatatggaaaaactgtcacaaagatctaaaggctgagaagtccaagattaaggtactggcaggttctatgtctgataagggctgctgtctgtttccaagatggtgcctagacgatgcacactccaaacaagaggaacactgtgtcctcacgtggcagaaggcacaaaagagataaactccctccatcaaagaacaatgtattattcagcagtaaaatgaagtgagctatcaaggcatgaaaagacatggagtaaacttatagatgtattactagtctttctccatagcaatttttatcttgatactgaaaatattttacttaatttccagtttattgttcacttatgtagaagttatatcaagtattatatacattactttatatcacatttcatgtgactcataactattatatgtgactgatcttataatgatttagagttcacatatcttcataactcaactacctttacaagcaagattatctatgtctgcattaaagaatatacctcattgcatttcagaagtgtttcaaaacaaaattc

SEQ ID NO: 479929 - DNA, 1329 bp, Homo sapiens
tgtccctgtctacacttcccaccatgcttgctgtgttatggttggatgctccagagatccaggcaagtgcttgctatgctcagctgttcttcatccacacattcacattcctggagtcctcagtgttgctggccatggcctttgaccgttttgttgctatctgccatccactgcactaccccaccatcctcaccaacagtgtaattggcaaaattggtttggcctgtttgctacgaagcttgggagttgtacttcccacacctttgctactgagacactatcactactgccatggcaatgccctctctcacgccttctgtttgcaccaggatgttctaagattatcctgtacagatgccaggaccaacagtatttatgggctttgtgtagtcattgccacactagaacccttgcgctatgcagccatcctaaccaatgatgtaatcattgggattgggttggcaattgctggaagggccttggctctggtctttccagcttctttcctcttgaagaggcttcaatatcatgatgtcaatattctgtcctaccccttctgcctgcaccaggacctcataaagacgactgtatccaactgtcgagtcagcagcatctatggcctcatggtggtcatctgttccatgggacttgattcagtgcttctcctcctctcctatgtcctcatcctgggcacagtgttgagtatagcctccaaggcagagagagtgagagccctcaatacttgcatctcccacatctgtgctgtactcaccttctatacaccaatgattgggctatctatgatccatcgctatggacagaatgcttcctcaattgtccatgtgctgatggccaatgtctacttgctggttccacctctcatgaaccccgttgtctacagtgttaagaccaagcagattcgtgacagaatcttcaataaattcaagaaacatgaagtgtagatgacagagattctgaaacataactttccctccattccccatatatttattttatgagaggtcatctgagctttgctaatttggatgcctgtgtctctcccaacatctggaacattttcagacactatttaccaatgcttttttgtccctttctttctctcttctcattctgggaatctcataattcttgtttatctgtgttctcttgcatttcatcaaccctctttaagctgattattttgagttatttgtcaggtaatttgtcaatcgccattgctttggggtcaataactgaagttttagtagttttctttggtggtgttatgcttgcttaattctttgttgtgcaggtagccttgcattggtg

SEQ ID NO: 479930 - DNA, 3450 bp, Homo sapiens
cctgtaaaaccaaagacaggaagtatgctacaaatgaagactctgcacaaagcctcaaccctctggaaacatcgagaaaataattatactgactgtactcaacctatattgcagttaaagggacacctacacacagagatgggaaagaatcaattcatcaaggcagaacagaccctccgggagcccatgttctactttctggccatcctttccacaattgatttggccctttctacaacctctgtgcctcgtacgctgggtatcttctggtttgatgttcatgagattaactttggagcttgtgtggcccagatgtttctgatccatgccttcactggcatggaggctgaggtcctggtggccatggcctttgaccattacgtggccatctgcaatccacttcactacacaaacatcttgacatgccgggtgctgaacgagagaagtgaggaagatgcagaagaaaagtttgaagttagcaaagtcacatttttcctcattggaatcccaggtctggaagacttccacatgtggatctccgggcctttctgctctgtttaccttgtggctttgctgggcaatgccaccattctgctagtcatcaaggtagaacagactctccgggagcccatgttctacttcctggccattctttccactattgatttggccctttctacaacctctgtgcctcgcatgctgggtatcttctggtttgatgctcacgagattaactatggagcttgtgtggcccagatgtttctgatccatgccttcactggcatggaggctgaggtcttactggctatggcttttgaccgttatgtggccgtctgtgctccactacattacgcaaccatcttgacatcccaagtgttggtgggcattagcatgtgcattgtaattcgtcccgttttacttacacttcccatggtctatcttatctaccgcctacccttttgtcaggctcacataatagcccattcctactgtgagcacatgggcattgcaaaattgtcctgtggaaacattcgtatcaatggtatctatgggctttttgtagtttctttctttgttctgaacctggtgctcattggcatctcgtatgtttacattctccgtgctgtcttccgcctcccatcacatgatgctcagctaaaagccctaagcacgtgtggcgctcatgttggagtcatctgtgttttctatatcccttcagtcttctctttccttactcatcgatttggacaccaaataccaggttacattcacattcttgttgccaatctctatttgattatcccaccctctctcaaccccatcatttatggggtgaggaccaaacagattcgagaacgagtgctctatgtttttactaaaaaataagactcttaccatgttattttactaagggctttgatccttctataaagaccgatatgttcttgccttaaggaatatctcctgatccttaacttattgctgtcaacttgcaatacaagttggtttgttcctggatgctgactaataatggattttaaaactgtcagaaacatcattgtagttgaagttcaaagactgaccaactatcctggaagggatatcctgggagagaactgtggggcctttgactgcatgaccttgtgaagaatgcttgttagcacaggctgctgcttttctggggaaagaacatattttactgagtgttttttgactagtgatgagagatatgtggcactggaaatttaccctgtaaactactttatttattcctttaatctttctttccttattttcttcctttctttcttttttccttttattctttttctcttacttctgtttattcatgcatcatgcattttatgattcctttaatttatattcattcaatgtctggccctatggagcttgcattctgttgtcctcttacaaagcaaatttcacgggttcaaaacaatctttgccaaatctgtagcttcaagtggaatcatatgccaaagacatgacactcagtgcaatgatagccaaaacaaacacacaatttcaaaactatttatcagtaataccagcataacttatcactgattgcttttcggaattcatgaccataacataagcaccagttaggtatagcatttttacgtctgtgatatgtggaggtctttgcctatcactttttccagtattctctcaatctatatttgaccctaaaagactctatttcaaaatccaagacctctctttccaacctgtaatctgtcatttgttctcccacagactttaatatagactatgtcatatctagctatggatagccacatttcacatgatgctgaaggttttcaatttatttaataagatttccaaagaccaagcaattaattaccttttgaattatcaaacttgtcacattgttttttacaattatactcattttgtcttatgtaggttattaaaaatataaagcaaaaatgtaacaaatagctttgttcctgataccaaaaattaacaactttttatattgcgctcatctcaaagaggatgtttaaataacatgcacacagcatgaaagctaatatcacctttaacactgccccagcagatttctctcccaatttccagaggcaaaggctagcatgtgtgttttctgatttcacattgcaaatttttagatttacaaccaatcacagtatttttgttaatcatttgttatttgtttatatagattaatgtactccatgttttgttttgtaacattgatttcatttatatttttattttctaatagataattcatcttattatttttaattacaaaacatgctgcacatctttgtatttatttgtttctacattttaagttaatttatccaggttttattctttaaagtagaattcttaggttgctaaatttatagatttcactgactttttaaaaatttttattaagaagtttaattattaaataagcgtgcttaaggataacattttttttaagtggaccaagactcatgattggctgaacttcagaaggttaaatgtatacactcatcaaaggatttcaggcttaaaatgcattcagtacaccacattgaacctctcaatactctagaacatatacgtaagcaatggaaaattttttttttgcacagtcatttgttattctccagagtttaagctaatttatggaaaagccagaaatcaaaaacattaacaatcatttatgtaacaacaacttgtattagttgtaccatttgcaaaatttaaacaaactgtcatcacaacttttcacatatgtaaataaaaacatcaatatcttactgttcacgatatcttataacacctgtccaaacatccatcaagttataaagagactgttttagattaaaccaaagatttatttgacgagataaaacatttggttgtcacttctgcaactttgtgttg

SEQ ID NO: 479931 - DNA, 1220 bp, Homo sapiens
ccaggtggattttcatcctgatatgcatgggaccgctagtgagtttcacccctcctccttcctgttgctggggatcccaggactagaaacacttcacatctggatcggctttcccttctgtgctgtgtacatgatcgcactcatagggaacttcactattctacttgtgatcaagactgacagcagcctacaccagcccatgttctacttcctggccatgttggccaccactgatgtgggtctctcaacagctaccatccctaagatgcttggaatcttctggatcaacctcagagggatcatctttgaagcctgcctcacccagatgttttttatccacaacttcacacttatggagtcagcagtccttgtggcaatggcttatgacagctatgtggccatctgcaatccactccaatatagcgccatcctcaccaacaaggttgtttctgtgattggtcttggtgtgtttgtgagggctttaattttcgtcattccctctatacttcttatattgcggttgcccttctgtgggaatcatgtaattccccacacctactgtgagcacatgggtcttgctcatctatcttgtgccagcatcaaaatcaatattatttatggtttatgtgccatttgtaatctagtgtttgacatcacagtcattgccctttcttatgtgcatattctttgtgctgttttccgtcttcctactcatgaagcccgactcaagtccctcagcacatgtggttcacatgtgtgtgtaatccttgccttctatacaccagccctcttttcctttatgactcatcgctttggccgaaatgtgccccgctatatccatatactcctagccaatctctatgttgtggtgccaccaatgctcaatcctgtcatatatggagtcagaaccaagcagatctataaatgtgtgaagaaaatattattgcaggaacaaggaatggaaaaggaagagatgctggagataaaattttgactatgtcaccttcccttactttgtggaatttatagagtctaaaattaatgagcaacttcaactttgaaatgtccatactttttgttttaattgttctatatcattataatttatgtttatcttcccttaagagacacagcgatttaatggtaatggggtatcctaaatgggatgctggattagaaaaaggacattggctaaaaagtaagaaaatcttaataaagta

SEQ ID NO: 479932 - DNA, 880 bp, Homo sapiens
ttcctgctcaaccctcaacctgggcgcttcactattctacttgtgatcaagactgacagcagcctataccagcccatgttctacttcctggccatgttggccaccattgacttgggcctttcaacagctaccatccctaagatgcttgggatcttctggtttagcctcagggagattatctgtgatgcctgcctcatccagatgtttttcatccacaactttactggcatggagtcagcagccctcgtgggaatggcttatgaccactttgtggccatctgcaacccgctacgatatagcatcatcctcaccaaaaaggctgtttctgtgattggtcttggtgtgttagtgaggtcatttatgtctgttattccatttgtttttctcattttgcggttgcccttctgtggggatcatgtcattccccacaccaactgtgagcacatgggtcttgctcatctgtcttgttccagtatcaagatcaatataatctatggcttgggtgctatttcaatcctatgactcacaatgtaactcacatgtctactcaataaatgtcagctgaatgaattgatctagtttaaaataagaaattcatgtgttcataattactcatcgtatactacaagaaagttggtattaaatgtatcaattggttcctatttatcttttctttctggaaggaaggaagaaggaaggtaagaaggaaggaagggaggaaggaaggaagggaaggagggagagagggagggagggagggagggaaagggaatatcagaactgcagtgtgggaaatcagtaacatagatctttttagcctggtgtcaaccactatcattgtctttttaaaatttctctcaagtttccttatttcaacaaa

SEQ ID NO: 479933 - DNA, 668 bp, Homo sapiens
cacgaaaattaactgcactagatgtggctcatccacacatttcaaggcattgaatcaggagtcctgctagccatggctctggaccgctgtgtagcgatctgttatcctctgaggcgtgctatagtattcactcgacagctagtcacttatattgtagttggagtgacattgcggcctgccattctggtaattccatgcctattgcttataaaatgccatctgaaactctaccgaaccaagttaatataccacacttactgtgaacgcgtggcccttgtgaagcttgccactgaagatgtttacattaataaggtctatggtatccttggagcatttattgttggtgggcttgacttcattttcatcaccctctcctatattcagatatttatcactgtctttcacttgcctctgaaagaggcacgacttaagattattatttttaagcttttcactgaagtatatcatacaattagaaaagtgcaccaatcctaagactatatttttctctcccctcccctcccctcccttcccctcccctcccctctcctcccctctcctcccctcccctcccctctcctcctctctcttctcttctcttctcttctcttctcttctcttctcttctcttctcttctcttcttttccttgagctcaagtctcactct

SEQ ID NO: 479934 - DNA, 877 bp, Homo sapiens
cctttgatagtgttgcattaagaccttcgtcttcaaagttgccacactgtcttccacaatgattgaactaatttacagtcccaccaaccatgtaaaaacgttcctttttctccacaacttcaccgggatgccctgccagagaggagtaatctggctgtccggccacagcagccttgctgaactgcagtgggctccacccagttcagacttcctgactgctgctgtgttggcagcaaatttcaagatcgtagcttgcttggctccatgggtgtgggaccagccaagccagacaacttggctccctggcttcagcacccctttccaggggagtgaagagttctgtctcactggcgctccaggcaccactgggaagataaacccggtgctgcctgaggcaacagtgatggtctcctctgaggcagttgagaggcaagataatgttgattctcctcaggagccacctacaacatccctgtttgcttctagacctataactagattaaagttctggctggcccctagaggagaggttcagagtgtaattcacaagggtgtgtgtgacactcgaaaaaagctgcttaaattttttaatttatataagcagaaatctagagaacaggcatgggaaaagatattaagggtttgggataagggtggaaggaacatagagttggatcaggctgaatttattgatttgggcccactacataagcactctgcatttaatattgcagctctagaagttaaaaaatgttctaaaactgtatgtgcttggctagctaaaatatggattaagagatgggccacgtaactgagctggaaatgcctgatctcccttgatttaaagtagaggaaagaatctaaaggcttagggaga

SEQ ID NO: 479935 - DNA, 766 bp, Homo sapiens
ttgagtcctgagagatcatctttgatgatagtgatgtacagatggggttttggtgtggatgtcctttctgtttgttagttttccttctaacagtcaggaccctcagctgcaggtctgttggagtttgctggaagtccactccagaccctgtttctgcgtatcagcagtggaggctgcagaacagcagatattggtgaacagcaaatgttgctgcttgatcgttcctctggaagttttgtctcagaggagtacccggtcgtattccatttggcacaagaacttggtaaggatttgttggaacctaaaagaggttctgagctatgaacttgttccacttggttgtgctccaaatcaccagccagtttactcagctttcggtaacagaaagaagcacaacatcaccacagctcaaagagcatgttgggccaaggcaaaaatcctggaattggatgaactaaatcagaaaaccgagcactggggaagaagttccatgaaagttgcacgggagtgaatgagttgtaatttgtataataggagattagaacaggcagaagatttgttggtacgaatatgaagcgctgttgctggaatgaaaaaggcattgtcctcttattatttattctattttaattgctcctttaaagtgatgctttggtacctgaagtggtgtatgattaaaaaataaataagagtgatactttcaaattattagcaacatctgaaagtttctcttcctatatgaactggttaactatactgaatattt

SEQ ID NO: 479936 - DNA, 496 bp, Homo sapiens
cggaatcaaagtagtataccaataggcttattggtatacccaggatgaagttgaaaaaggactacgggtactgtgcttttcccatggtttttgcaatctgcagatcaaaagattccctcgtgtgcctacaccatcaggggtctgggtttcaaactcaaaactgggtggctgtttggacagacactgagctagctgaaggagtttttatcatacaccagtggtgcttggaaatccagcagttttccactgacagtgctaaggaggatgggaggtttggactgggtggaattcagcacagtgtggcaaagcagctgtggccagactgcttctctagattccttctcactgggcagggcgtctctgaaggaaaggcagcagtccgattcaggggcttgcagataaaactctcatctccctgggacaaagcacctaacggaagaggcagctgtgcttacagcttcagcatattgaatctttcctgtctgtcagaatgatt

SEQ ID NO: 479937 - DNA, 1727 bp, Homo sapiens
gagaaccgagtgattagtgagcatgatgaaagtgagctttttcagtagaggatggtggaggaacactgaagggaaaagaggcattccttccatttccagcagaggcagggtgagtgagtggtgtgggcaaggcgatcagttggagctatgccacaaccactggcccagaactcaaggtccctctgtgaccatgcagcctccatctggcaatgatctgtccacagtcgtcttaatacagaaaccagggccccggaggcttcctatccacaggagcaacagcgcaattcctctcaacactcccacactccaaggcctctcacctgggcctgtgcacgtgaaggcttctctcctggcccagagctctgattccctggactgtaaaccagcaccagcctggctaaccagacaacttctctaccaaaccagtggactgaactacaacttatgccatgagagatccttccaactgtttccttccttgcgtactttcccctagccctatggtgtcatatcaaggttccataaatctcagagttgatcatagttgaattatttgtattaaacttatcctgtttaacctatgtagttcctatcttttgattagacccatgctgatttctgatggcattattattagtatattttaacttactcattctctgtcactcttttgccaatatattggtttgtaaatcttatatgtgtgtgttgatgtatgtatatgcatatacatatatcatctagtagtgatacttttgtctaacaatttatgtataagttattttgggttttctagtccataatcaaatcacctatcaataatgacagatttgtttcttcatttgtaattcttacacttttattattcttgccttactgagtaaattaagatctccaatagaatcaagggaaactatttctcaatctcaaaaaagaaagctttcaatatttcaaaatttagtggacatttattaaagttattaaagatgtccttcagttaagaaactttctttctcttcatagatatctgaaaagttttattatgaatgcagtttgagtttattggacacttttttactacatgtactgaaataatgatatgatttccatgctttggattaatatggtggaggacactaatttatttcttaatgatagaccgtcttggtcttgatatgttactttgttcatacattgttgaatttactttgctaatattttcttgaggattttccatctatttccatgagtgtgattgatctcttattgtcgtttatttttgtgtccatcatcatattcactttcaaaattttactacatgatataaataggaaaatgttctttttttctcatatattccttagaagactttgtataagattgggatcattttcttatttaatatttgatgagcttagaggatttcatttttggttttaattctttggggaaacttttttaaatgacccatttgtttcttttaataactataggtctattcttgattttcatattgtcttgagccaagtttgttatatttttcaagcatttgctaattcatctacactttcaaaaatattaccacaacgtatcacatattttctcatcatctttatcactgagacacattatgcatatacaaaatgtgaataatatataaatatgcatataaaatatgcatatacagtcctatatttcaaacagtgtatgctttctctttcaaattt

SEQ ID NO: 479938 - DNA, 1792 bp, Homo sapiens
gtcaaactatactacaagcctacagacataggcatgggcaaagacttcatgacaaaaatgacaaaagcaattgcaataaaagccagaattgacaaatgggatctaattaaactaaagagcttctgcacagcaaaagaaactatcaccagagtgaacaggcaacctacagaatgggaaaaacattttgcagtctaccgatctgacaaagagttaatatccagaatttacaaggaacttaaacaaatttacaagaaaaaaaacaaccccatcaaaaagtgggcaaaggatatgaatagacacttctccaaagaagaaatttatgcagcctacaaacatgaaaaaaagctcaacatcactgatcatcagagaaatgcaaatcaaaaccacaacgagataccatctcaggccaacatgacatttaagtcatccctgaattaacatgtcaggaaacaatagatgctggtgatgctgtggagaaatgggaatgtttttacactgttgtccatcaaatccttgctatggaatatcacgcactcctaaatccaactgctcctttgacattctttggccacaaccttaaaataaatggccaccctaggatagatggggttaaaaccacaaaaaaagagtcttcttggcatgctagagtggctgcagtctaggaggctttctggaaaatggaggtgattctccagaaaatggaggtttgtttttctggaaacaaaatgtcatggttgtcaggttactgataaggggactattaggaaaattgggtcccaaatttattcgtaaggcaagtaggggtgcaggacgtgaaaagaaggtgggtttccctgtatgctgggtgtaatggcctaattatttctactacatgcaaaatacaacactgcttcttgggttcctcaaaatactcaggccctgggcactgaatagtgtgtgcacggatgagggctgtcccccttagagtgatgattggtaatgataggtgattcatgaaaaaaaaaaagtacagaaggttacagggcagaggatggcaaagggacaggttggagaatctgttttttttaaaaagttatctggttggtggtcaaggactggaggtggagaagagtggaggggttgaagaggattgtcttctctgtgaaaagggttttataggttatttctagtatagcacactcttgtgggaataaatgttcatttgaatttttgtgaaattctaaaaatagtttctaacattcacttggtaaagaattcagtaactttccaagtgaatatgtatattgatcaataggttcccaatccatttttacctaaatggtagcacactgtacaaactactctgtaccttgctcttttgaattagcactgtaaccatagacaaccagaaaaaaacctaagtatttatcaaagtgggcaatggttaaaagaattattctatatccatgaaattgagtatcatggagatattagaaatggtgatgcaatcatatattgacattaaaattatattcatcttctaaggtcaaatgagaaaagcagcttttgaaacagagatgtgtgtgtacacatgcaaatgcatagttagaagtttagagagatataaacacacaaaaattgttgactgaacatctctgaatgatggcattacagatgatatgtttccctattttatgtgcattttgtaatgtttgggatttgctaccatttggttcattacatatttaatttttaattatgtaatactttcacagaattttttaaaatcagcaaataacaaaaggtatagatt

SEQ ID NO: 479939 - DNA, 1168 bp, Homo sapiens
gccagcaggattggccacttgttgaatgtgatggggagaggcggttccaagatggctgaataggaacagctccagtgtacagctcccagtgtgagtgatgcagaagacagggtatttctgcatttccaactgaggtaccgggagattatatcctgcgcttggctcggagggtcccatacccacggagcctggctcattgctagcacagcagtctgagatcgaactgcaaggctgcagcaaggctggaggaggggtgcccaccattgctgaggcttgagtaggtaaacaaagtggccaggaagctcgaactgggtggagcccactgaagctcaaggaggcctgcctgcctctgtagactccacctctgggagcagggcatagctgaacaaaaggcagaagaaacttctgcagacttaaatgtccctgtctgacagctttgaagagagtagtggttctcccagcagggagtttgagatctgagaatggacagactgccttctcaagtgggtccctgacccccgagtagcctacctgggaggtaccacccagtaggggcaggctgacacctcacacagccaggaacccctctgagatgaagcttccagaggaacaatcaggcagcaacatttgctgttcagcaatattcactgttctgcagcctccactgctgacacccaggcaaacagggtctggagtggacctccagcaaactccagcagacctgcagctgagggtcctgactgttagaaagaaaactaacaaacagaaaggacatccacaccaaaaccccatctgtatgtcaccatcatcaaagaccaaagcaatggaacaaagctggacagagaatgactttgacgaattgagacaagaaggcttcagacgatcaaacctctctgagctaaaggaggaagttagaacccattgcaaagaagctaaaaaccttgaaaaaagattagtcgaatggctaactagaataaccagtgtagagaagtccttaaatgacctgatggagttgaaaaccatgacacgagaactatgtgacaaatgcacaagcttcagtggcctatttgatcaactggaagaaagggtatcagtgattgaagatcaaatgaatgacatgaagtgagaaaagaagtttagagaaaaaagagtaaaaaaaaaaaaaaac

SEQ ID NO: 479940 - DNA, 1616 bp, Homo sapiens
ggtgatgttccttgtgatttaggccaggtgatcactggcaaaggagagggtcaagttcctcactctcccatggtagtattgtgctgccttatcctctagagggtgcaaatcctcttctccagggtcctctcctccttctggttgtccgtggaggttgggctcccacctcctctctgtgaggcatcctgctgtgcatatgggaatggcctcagcctggcatctctgcctgatcagctcatgtacctggcatagtggtccccaacatatcgatttgccaagtgatgatcctactgaccaattccctgatcactgccaaaaacccatccttatcaccccatgtagcaagtttgaagatttcagggctgatccaagaaaagacatgatcatgacatcaggagacctcctgagacagtggcatggggccactgcccaaaaagggaagagggcaatggaactcctggtggagaagggaattggagaaggcgttatgtgtcaaggtgatgtggctcagcagcaagatggggagtctgtgtcagagagctctgaggggcagcagcagcttggtgtcttttatagccccagaatttgttttatctatggcaggcagaggctaggtgcagttttgcagggtatgcaaagcagggaagttctgaatggctaaaaatattacttgggctatatttaaagcaattgatgtgtaagaatttgaatttggcaccagcctgctgtgaagaagtgaacaacagagtcaatatacagggaccatctttggttcatttatgtaacaacctttaattcttgcaatatgaggcagaggtcaagattattttttccaaggctattcagttgctccagcaccaaaagagtatctgttccccgttgaattttactgtggcctttgttgtagttcagccaataatctatgtgaagttctatttctagattgtttattctgatccatttatctatttgtctatccttgtcccagtacttgactgtcttatttaggcctttacattctttcaataatattttgtaattttctctaccgtgggttttgtacatattttgttaaattttttcctagtttttttttggtacatttcttgatgttctagtaagtagccttaaagtttcattttcttattgttgttcctgatatgtagaaatatagttgtatgtatacagttttatgtgttgacattttatccaatgatcctgataagttcacttataaattgtactagatcatctgaagatacttttaggcttttttacattcacaaaaatgtcatctgcatattatggcagttttatttcctccttcctatcctttacatttttaatttctttttcttgatgattgcattggctaggacctttaatacaatgctgagcagaaatggtaatagtaataacagatattctttccttgctcttaatctatggagaaactttcactcattcaccattaactatgatgtttgctgtaggttttatgtagatactctttgtcagattaggggagtttattgggggaaccaacccccaatatttcaacgtaggttcttttctattttccctaagtgtcggccgctctgaaaaataaagggaaa

SEQ ID NO: 479941 - DNA, 828 bp, Homo sapiens
tggagcctacaacagcacacatctcagcacgcatctcagaggacaggtttcaggccaccggaggaatttaggagtgagaactgcaggagcgatcttatccctcgctgtttgaacaagcactgtgggccaatggccatggcccaggagccgcagggccttcatggactgagccagtggagatcagctttgagcttccgggcttcaagtctacagcccgcttctgatgcatttttgaatgctatatggacaaacacgggcattttgaagcaggagaagtgggccatctacaagctaagaagagatacctggaagagatctttccctctttctactcaaaaggaaccaacccagctgacactttcatttggacttccgtcttccataactgtgaacaataaattcctgctgtttaagccaccagcaaaccttcagacagtttggcatagagagcagggtcaccaaagccagtctgctcttctggaacctgcagttaagggaatgcaggaaactggcaaactggcaaaggagagggttacagggagaaagttcactctcatcttgatctgtgttcttgagagcttgatttgtgagcaagaggaaacactctctcttgctctccaccatgcaggggaagtgatttttgagtcacagcaggcgtctggtgtaggaaatctcttcgctgggaagtggagagattttgttttgttccgagtgtgccaagctctcagcagggtttgtcacaagaagtcccgtccagaaggggctttgtcatctctaactttattgcctagggcagggatcaccaacccataatccagggaatggtat

SEQ ID NO: 479942 - DNA, 733 bp, Homo sapiens
tagatagtggcatctgaatttcgctaccagcaggcagtgcagaactcaacatccacctggaaaagatgttgagcctgagcaccagtgccaccacctttcaaggatgctatgcttggtggtccggctgggttgggctgctgtcatgggaacccaagttacacagcccccctaacacatcagttttgccagaaggttcaggccacagggctgggccatcatctggacattaatcccccaggtgctgaggaagttgctgaggcaaagaaaggagcagcaaggactggaaagactcaggctgtttctcttgcaggtcagagtgctcctggtgccatgaacggagacgacgcctttgcaaagagacccagggatgatgctaaagcatcagagaagagaagcaaggccttcgatgatattgccaaatacttctctaaggaagagtgggaaaagatgaaattctcggagaaaatcagctgtgtgcatatgaagagaaagtatgaggccatgactaaactaggtttcaacgtcaccctctcacttttcatgcgtaataaacgggccacagactctcagaggaatgattctgataatgaccgtaaccgtgggaatgaggacaggccagattctacaatctcccacaatcactacaagaggtctgaaaatccagtgcttgagtatctgccaagcttttgactttaaaggagtgtctttatactgaaaatgtttcagagccacc

SEQ ID NO: 479943 - DNA, 545 bp, Homo sapiens
gattactgttggagatggagccttggtggccacagagccagcaagtcttgcctcaccagcgaacagtgaacaggggatctgcccataccgtgagtgatcactcctgcttgtggggcacagagaaggcacccagatctgagccagccagcactctgccccaagccaacattacctccgaagtaacagcctacacagtctccagcagtggccccctgctccctgctccccacagctgctttgcctctgctgcagtgctgctgcaccttgatccccccagtacagtagactccaaacatcaaggagccagagaacaaagttggggcccaatacaagtcccccagagatacagcatgcagtccaggggttgggagctgaacattggccccctagtatcttccagaaacgaagccagatggatgaatccaccttataccacaatcaaacccccaaggtcatcaaataggataaaagaaaaaaaacatccaaaggtcagcaacctcaaaagttgaaggtagagcttgaggactgcctttctgaagtaagac

SEQ ID NO: 479944 - DNA, 860 bp, Homo sapiens
tctacttgccctgattcccatggttacggtcattatcagaatcattcccctggaagtctgcagcccgtttattacgcatgaaagaaatctgatcaccccacactgtcccctgggccactgctctgccccctccaggtctcctcaccttttgcatgttctctggtatttgagaaccaaccctgggtctccttgcaaaggcgtcgtctccattcgtggcactgggagcaatctgacctgcaagagaaacagcctgagtctttccagctgcaggacctttggtcctgtggagggagaaatcagtgaagtccggccacactcagtcacctggaatcaggtgttgcatttctccatccagggcttatctgtccagtccctggatgaaggacagagcccgaggttgggacctagtcagaaacaggactcagaggagcccgactcaagtctggtcaaaggacagtgactctgtctgaaagcataagcaagaaagtcaacagcagtaaaatgaatgggtcacaaaggagaatttttgtgcattgctaagcaggactctgctttaaccattgtgaaagctgattatgtgaagtgagtcattcttaattgtttttaagttcttatttgtggaggaagccttcagtatttttcttaaacaatcaaattcacttatatttatcatcactttcccattccaatttctattagagcaacttgggtttgtttgtttgtttgtttgttttctcaagctcagggtgtaggaaagaaatgtacttggaatttctttctgactggtatataggcttgaaagaaaagtcagtcccaccagagacctacttctgacaaagctgtattcacaggctagagtg

SEQ ID NO: 479945 - DNA, 589 bp, Homo sapiens
agctaatccttgccatttgatagttgaaaatatctcatttcttttgtgtgtgtttgtcaatgaaattgagtatcttttcatacaaccagacactctgcttctttcctcggggcctgggtaacctcaaccccaaatcaggacagtttctaactctgttccacatggaggtaagtttcctgtttcctgagtctaagaaaactgcagtgtccattctgggagattatggcttaaacaaccttgccctccatgtgtgggagagtagggcccagcagggcttcagtgggtccccagtgctgacttaccatgacaatccatgtggcagaggttcttgtgatggtggtagcgatggtattcatgatggtaacagtggtgatgatattgattgtagtgatggtgttgatggcagagatggaggtgatggttgtgaaggcaataatggtggtggtgttagagttagttaaactactcagcatagtcagtcagggagtgactcaagggatcatgcccaggcctggagagatgctgtcccaggaacacccccatttcctggagctctgtccctattactcccaaacactagctgaagtta

SEQ ID NO: 479946 - DNA, 556 bp, Homo sapiens
taaagaactgggtaagctgcactaggcgttcacaaacagcaggagagggttattttcaactaccaaagatatgacaatttacttgaaagcggaggctcaacttctggtgctgaggagcactggcatcagaggcaagaagctcttccacccttgggaattaaggggatggtgcccagtgtgtgggggcagtagtggtggtggaggtttcacagtcctagactcaggtggagtaaggaagaacaaaattgcagatatgatagacacattcagtgctctcttgacttttggacagtatgagttttgcagacaaaaacgtgaagtatgtgaacttggggaggccagtggagaggttaaccgaattcctctcagtctccaaagacaaaccagatggtcacatatctcggaagatatgtgggatgtaaacccagcagcctggccccagagcccatggtcttcatggcagcagcatgtgtgccgcctctcatgtgtacaagtgaatgaagaatgaaaggggtgatggcctgttttcttaattcattgaaatttcaaaatgatt

SEQ ID NO: 479947 - DNA, 650 bp, Homo sapiens
aaagtctagcagttccctggcagttctgtccagacgctgaaatggggctcaggaaacaagactgggagagtagtacctatgctgctcctgtatgctgccacttcaatgaaagttgctgtctaacaccactggcttaccaagaactttccctggctaagccccagttttggggctcaactgccctgcatcatttggcaaccaatgaagggataaaggcagtgaaaatggcagcaatggatggagagacagctccatctgaggatcccctccttgctggttctcctagaaggcctatgcctttcccagagtctccccagtcccccaattctgaggggggtcctgccagtgctctaacaaaggattctagctcaaggtcatcagacactcctccccctcatccaactagccccagcttatacccccatttcccccaaaataagcccaatcaatactaccaggagtggagcctcatattagcccctaaagtaaaatctgtgtccattgcaggagctaaaggaccctctcccagtggccaccagcaccaccagcccctggggaattctgctagaccaccaccaatgttcacttaaagttcaagggctcttcatttagcttctggtgaatgctgccaggtctgtgactcacccttt

SEQ ID NO: 479948 - DNA, 958 bp, Homo sapiens
tctgctagcgcaggggctatgacatgggcccacaggagatacctgggggctgcactgcaagcaggcatgaccaggctggggccccaggagaggccaacagactgaggggtgttcaggtcagaccagccgtgtcttatgggcacgattgccctgcagcgttcaggtccgacagttcccctaaggctaaagtcttctataggagtgagtcaagcctagggagatgggcaaccatggccatgctccactacagatgctcctgtaccaaactctctgggctccactccagctggagttctgcccctgccagttctctgagtagctctcactgccaattcaagtgtccatggtggtcaaggggtcttctcctgcagggattccagaggcccgtggcgagagtgggttgctccttgcctgttcaaccccttccccaggagtcactggggaccaggaatgacctggtgtatggtagccctgagcagcgttcccagcttcctcctgcttccacccagtatctgtatctcccttctgtctgctctcaatgccttccctcaagatctgctaggagtgtgctagtcttcctgatgccctgtccctttgtgggagacattccccctggctgtatctagtcggccatcttgcgcccttttttatttctctgcgtatctttgattggacatttattttcatttttcatatgcatgtaccggtcctcggcctaagaatagaatttctgagtcataggtgaaggttattttccttggtgttatgttttaatttcttatcttttatttttttgtgtatccattgtatgacttttggtttaaggttaccatgagactttcaaataaaatcttgaaacctattattttattcttatgtttgcagtatatgcttgtttgtgcccatctttcttgggaaggctttccaggtatttgaagagccttgaatgttgtgatct

SEQ ID NO: 479949 - DNA, 1241 bp, Homo sapiens
actgcactgaggtgaaggagcaggcagaagacaggagagtgcatgttggcaggaggggcagagggcactcagggattcttaaaagatatttcatcaaaatgccgaagtgtgcgagagcatatcctccctcacatttctgcacatttgtgtcaagtggtcaaacagttcctaagcaacggtgcggaggcggttgctaggctggcttgtcacgtgtccacggattcagccgctaaagaaatggcttcttgtcttgcccacttcctggaaaaaaatcacaggacattctgccaagactcaagtcagacttcagttaacaccgaaagactcaccccggtatccaaaagaaaggaaataatcttaccggacaccatcccaattaccctgggttctgtggactcactaggcatgggggtgaaggatcccggtcaccctcagtcttccgttgtcagcgccagcagtgaagagatttcctcctgtgatggtcagggggctttattatgagccgcacccaaacggggagggtgtccctgttgggggcagtccactttccagtgtccccaaagaccacaagttggacacggtctggtgggggaccagtggttaggacaagcctttgcccagtgtccagagttgccacgtcggaaacagactcccagaggggtcgggtagttttcttttgggtcattgggaggcttttgtgtaactggcttttggatagcagaggcaagcatctggctttttaatgagagatgtttgtctttttgaattttttgttcctcatctctgttgttaaagacacagaaggctacatttaggaggtcctgccgggatgtctggggaccctcctctaagttttgtaattttttccagatatctggggcagattgggaaacaaattggaggtggagaaaagtttgaccttctctagattctgggtccaaattggcatattttagcatagcttcagtgaggtgtgataagggcaggattttcttggggctcttgtgtaatttctctaagtttctcataattaactgccttatgggcatttttgtccatacccacaaggagacagctaatcatgtggtctcttcatctgatgccattgtctccctgttggatctggtagtgcattaatctagttaccaaaatgataccactcataccacgcttggattagtaacttttcaaataatttggaaacaaacaaaaaaaccgtttaacattaaaattgaaaataa

SEQ ID NO: 479950 - DNA, 1411 bp, Homo sapiens
acaattaattcaaactaggatttgtccaatgccattcttcttactaatatgcaaagtcttcaacacccgaatccttcagccattttataactctgagtctaaccatctgcatgaaaagctgttcacagaggattcaggaatttttctccccacaaacgaattttttgcctctatcacaactagtcattccttaataactgtgacaatgatgctctacttccttatattcccgggcttctttctcctctgggtaccagctccttactgccctgcagacaagcgtgccgtgcgtgcttgtggccaagggaaggaagagctggttgatccacagatagctccttcctccccgccccttcctttttgtttggaggtcccaggatctgtgttcacagacatctgggggaagaaaaggagcaggaaactaccccgcacagagttaagcaggaaacaacaacaacatcatgcaaaaaccctgcaaagaaaacgaaggaaagccaaagtgcagcgtgccaaagagggaggaaaaacgcccgtatggagaatttgaacgccagcaaacagaagggaattttagacagaggctgcttcagtctctcgaagaatttaaagaggacatagactataggcattttaaagatgaagaaatgacaagggagggagatgagatggaaaggtgtttggaagagataaggggtctgagaaagaaatttagggctctgcattctaaccataggcattctcgggaccgtccttatcccatttaattaatttctctgacaattcaattattttctgttattaatgttgccactgctttctgtttgtctgcactttcttgataaatatttgctatcgttttactccagtcattcgatgttgctgagatttacatatgactcttgtcaacatctcatcttttgacccaatcttattcatttaataagaggtctcattcatttgcatggaaaaatgctcattgtatattgcaaagtgaaaataacgagttgcaaaacagtgtatacatatatgtgtgtatatatgtacactttatttgtacatttctatgtgacataatgcaaaggaaagtgtctgattttattatacaccaaaggttaacagtgaatctctgtgtgatctctttttttttctttttgcctatctgcatcttctcacttgccaaaaaatgaatatatgtttatgtgtgtatattacttgtgtcacaaaaaaccctaaagtagacagtaaaagaacttgtcaatcgcctttggaaggcaatgaaacacttaataaactctcaataacagaagcgtaaaaatgaaatgtaaacctccaattacctctggatctcttagccagagtaataaactggtaattattacagatacacacgtttaagactcagtcttttcat

SEQ ID NO: 479951 - DNA, 988 bp, Homo sapiens
agcatctgtgatgccccctgaggacataagggtagccctgaaatctgagaactggctatggttctgttctgtctgcagttttataagtcttacaactgcatgcaaggggaaaaagaagaaaactgcccaggatttctgcaggaaaggcaaagaagggaacatctcaacatggaaaagctctacaaagaaaatgaaggaaagccagagaatgaaagaaacctagaaagtgagggaaagccagaggatgagggaagtacagaagatgaaggaaagtcagacgaggaagaaaagccggacatggaggggaagacagaatgcgagggaaagcgagaggatgagggagagccaggtgatgagggacaactggaagatgagggaaaccaggaaaagcagggcaagtctgaaggtgaggacaagccacaaagtgagggcaagccagcctcccaggccaagccagagagccagccgcgggccgccgaaaagcgcccggctgaagattatgtgccccggaaagcaaaaagaaaaaccgacagggggacggacgattcccccaaggactctcaggaggacttacaagaaaggcatctgagcagtgaggagatgatgagagaatgtggagatgtgtcaagggctcaggaggagctaaggaaaaaacagaaaatgggtggttttcattggatgcaaagagatgtacaggatccattcgccccaaggggccaacggggtgtgaggggagtgaggggcggaggtaggggccagaaagacttagaagatgatgtcaaaaaagtgataatgtttccttggatgacaaacctaaagaacaaggctcacaatggcattgctgcctccatcatcaatgccttagaaaggcattttcacaccaattcacagcttgactatactggccccgaaattgtaaactgtttctgtagtgaatgtgggtattcagacaaatggtaacatcccttttattttgaattgtaggaac

SEQ ID NO: 479952 - DNA, 1017 bp, Homo sapiens
taagaaacaagtttgtgatgatgcattggaagcaaagacattcacgcagccgttcaccggaaccagttttacgagaaaggataaatcctccgcacagcccccagagggtggtgctcagacaggatgttaaaggaagggcctcgatgtgccctggcctgtttggttggttctgcaaggactttagctctgtgtcttcctggtgcagagcatctgatgcctgagccagcccaggccctgaagcacaggagaccccagcccccagacataagactcttaggtcaaacagaaaatgtcctctctaccaccatcattgctgtcaacagcatcatcatcatcatcatcatcatcatcatcatcatcaagggatggtgttcagtgaatattcaatggattctggtgacatttacattgaaatggttacatggttacattaatgataaattacctcttcctaagagcataaacttgaactgcttttcaaaactcttgcttctaactaaagtttctaaagtaaaatatagaacaatgaccaagaaatgtgaaaggagagtaattgcagtcaaagaggaaaagggaaaaacaactttcgacatggaaaattcccaccaggaaaatgaagaaagtgttcataacgtagaggaagagctacatttggaagaaatggaaggccaggaagctagaggaaataatctccaggaacaagcaccacctacccaggaagatggagatggcttgccccataggcatgtcaataacaatgaagggagagggaggaagaggatgaggaggaggaaggagatggggaggaggagaaagaggaggagaaagaggaggagaagaaaagtgtccagaagagatttttaaaaattaagaaataaatttagagtaatgcatcggatgaaaagacagtccaggaagtggccttatccaattcagtgctttttgtcttgaattattttttcttatatttttagggcttcacttttattttaggttgcattttctagtcttactttc

SEQ ID NO: 479953 - DNA, 570 bp, Homo sapiens
gtgtgcgtggaaatggcctccaggtgcgaaactaagcacagagaaaagtggacccgcccctgccctaagaggccactgctgccagctggaccgctcacaaagggcgcaaacaccaccaccagtgtgaacaggcacacagtcgccgtctgggccctgtcaccgcccggcccccacagccgcgctgtcaatgctagccgctgctgcgaaggcccgcacagaggccagcaacacaacacccatcagtaccctgtcgcagcagatgaaaatgaaaccagtcaactgaactataccacaatgaaacccgcaaggtcatcaaataggataaaagaaaaaaaaaacatccaaaggacagcaacttcaaagattgaagaaacatcaacacacaaagatgagaaagaaccaaatgtgatggctgaaatgacagaaatagaattaagaatatggataggagcgaagatgattgagatccaggagaatgttgaaacccaatcaaaggaagctaagagtcacaattaaaagatataggggccgacaaacaaaatagccagtatagaaaaaaaatgtaaccaa

SEQ ID NO: 479954 - DNA, 603 bp, Homo sapiens
ctctccagatgtgtccctgcaggcataaaactttcagttgctgctgatggagatgaccactggcagcccaccaccttggccaagttagagtagatggccagtggctcccgcaggcagcaaaggaagaaggctgtgtcaaaatgtctgctgctgctgtgctccagtaatgcagcacccagatgtcaggaagaagaggcacctgtccagatgagcccaggtggcttctgcctttgctcgccttctgacacctgcatggtggttatctgccaactgtgccctgggcctatgccctttcagtctaaactcacactggtagagctcctagaggtcatcaagcataattgtcttcatgttaaagcccgagaagtggaggcccagagtggtgtggcgagcaggggagaggacgatgacaaacctaaggtcacatggcaagtaaggcaagcccccaggagtaggacagtatggaaggaaacacttggtcctaccagatggactcctttcccaagccctgagtagggagaatcatgaaggccttgccaagctttagagatttagaagctgcctccttgacccaagactgaagagatatgaaaggccctccag

SEQ ID NO: 479955 - DNA, 484 bp, Homo sapiens
tttactacctgatgcgggggcagtcaaatcttaaagcaccacaatgatctcctttgactccaagtcttacatccaggtcatgctgatgcaagaggtgggctctcatggccttgggcagctctgcccctgtggctttgcaggctacagccccccatcctggctgctttcacaggctggcattgagtatctgcagcttttccaggtgcacaatgcaagctgtcagtggatctaccattctgggagtccccaggctctgcccgctgaacccctaggacagggtctcatggtcccaggaccatccagtggccacctcactgacttgcctcctcaatctgccctgacatccaactcaaaaggtgccattgacagatctgggcagctgtgtccacagtgtcctggagcctgtgagggagtgggaggagatctgggaagccagtacaggggttgggtaatgaagtgtgatcactctgtcgtctaggaggga

SEQ ID NO: 479956 - DNA, 2855 bp, Homo sapiens
gttttcaggatcactcaccttcctatgtcacaacgcttacttgcctacccaaatcccccagcagagccccttggaccccagcctttccccatcaaccttccttcccgtaggtcagactccgctggttgatgaacggcatccccagtctctggatcatcgtcttactgagaccgaacaatctgataacaaacccatcatacaatctgaaatccctctgcttcagctgtgcccatcgcattttggtatcaagctgcagctctggtgaatccattgaacccattactgctttccagtgtcctacctgcaggtatgttatctcgctgaaccaccggggcctggatggcctcaagaggaatgtgactctgcagaacattattgatcgcttccagaaggcttcagtcagtgggcccaattcccctagtgagagccgccgggaaaggacttacaggcccaccactgccatgtctagcgagcgaattgcttgccaattctgtgagcaggacccgccaagggatgcagtaaaaacatgcatcacctgtgaggtctcctactgtgaccgttgcctgcgggccacgcaccccaacaagaaacctttcaccagccaccgcctggtggaaccagtgccagacacacatcttcgagggatcacctgcctggaccatgagaatgagaaagtgaacatgtactgtgtatctgatgaccaattgatctgtgccttatgcaaactggtgggtcgtcaccgagaccatcaggtcgcatccctgaatgatcgatttgagaaactcaaggtaagggatctggggagcatcccctatacaactttgtcgcataaatgcagttagcaagttctctaataaaataggtgacttttcctatatgacaagtgagttaactttaagttgttctcatgaggaataacctgctctcctgcaagctcttcctggagcctatctcatctgttgcataaacattcttgcagtcacacacttctggctaacttttggggagtcagctcatggcctgcaacaccagtagttcatccagggaaacacaccctctatcttctgtcagtgacatattgcttattatatatctttgctatgatctttccacctcttcttttaagtatgtgagtacttgtgtacgtgtactacaattagcatatgtgtcgatttgcatatgtaggtatatggcaatgggaaggcagggtgtgtctctgtgtaggtgtgggtggaggtggctgagtgtatctaggtaggtgagagatttttgtggaggacattattgtatgtttgtgtttgtgtactcaatacactaaagaaacaaaagtttggcattggccattacaaattgccattaagcctttaacatagggctaattctaagcctgcctttaaaaacaaaacaaaacaaaacaaaacaaagaactgaagaaacttcagtataccacgaaattgggagggataattaaatatctgaatgaacaatttaaactgaaggcaataaatattttatccagtatcaaattttgtgacagtgctcactattatgggctacaaactgaagcatttgtttatagttcctgccttacaagttcctagtcatttatgtgtattcaatggacagagttttctaaagttgttgtgtcatataatatgtatgtacaagtctaagtgcccataaaaagtcctcctaccttacactgatgatccagcgaattgttttattcccattgcttgtctgctatgttgtataatttctcttaagaagggagctacttagcatatattctagaaaaataaaatgtttaaacggatagtaaaattaccactccaaatagaacctgagtacataagccaagctagaagaaagacccagataggataaaaggagggcaagaagggaatggagattttcctcctgccatgcagtggatgattcattgtaacttctgtaaaaagtataatgttggtgagagtagcagtactcagaataggatatatttgtcctgtaatttgttgcaaataatattgagagtagtcacaatgactatggtttgtgcctcttttggttattatttatacctgatatgtataaatgtgtagcaaattcaatttttttatttcactcaagttgatactctcattcatatcaaggctgcagagggaaataatcttgttaacttcagttcttagactcataagatattaggcctttgacttggtctagtcgaagcgctctactttaaagttgtataaacagaccttgatagatgaagtgacttggtcaaaatcaaagaaatgattagtaatgggaaagctagaactgggacttagcctctagattgagtaactatcctttgtactgtagccggctgccactttgttttggatctaagttttccccatgaaatgtgatttgaaacttaactttatgctcccacaactgtacatttcgtggtcatagataaatgattaatgacatcaaggaagggacagattgtataaacttacagctgtataatggcaaaagataggagcggggttataggaagagtgggggatgtgaagaggacagaacaatctctgccaaatatttgcaggtgttgggactataataagtcattggccttgagaaatattccaaacagaaaaatctgtgtccatatgcactgttgagataacaaaaagactggctagtgtaagcttgtattacagaaaactagctatttgaaaacatccgaaaacatgatgattgattagatatttggcatcatgaagctatagccctcatctccagggatggatggaacatggacatattttaccaagatatattttagtctgtgactaatc

SEQ ID NO: 479957 - DNA, 2237 bp, Homo sapiens
gagaggggggttcccatgtctctgaaatgtcctggagacattttccttattgtcttggtgattaacatctggctgctcattacttatgcaaatttctgcagccagcttgaatttctccccagaaaatggagctttcttttcttgttgggttgcaaattttacaaatttttatgctgtgcttccccttcaatgctttgccgcttagaaatttcttctaccagatactctaaatcacatctctcaagttcaaaggatggcagagtggaagaaaattcttgtataagtgggcacatgcagttcagacctgttgttcaagggtcaactgtaatctgtaatgatgaaaaaatgatcagcagctgccagaaagtgagggattgggagatggggtgaaagagttttaactgccaaggagcatgaaggaacattttggggtgacaaaaatgttctacacctcatttgtggcggtagtgacttgggtgtatacattagttgaaacttattgaactgtgtgcttaaaactgatacttttattgtatgtgaagtattgatcaataaagttgattgcttttaaacaaaaactaaattaaaaataagactccaggcaactctaaatattttttggaggccgtccagtgctgctagctaaattaagtctctctaactgcatttctcaagcctactgaagaatatgtgtttatatgtgtatatatatgcatatgtgtatatgtacatgtctatgtgtatgtcaatatgcatgtgtgtatatttatgtatatggtatatatacatgcatgtatatgtatacgtgcatgtatgtataggtatatgtgtgtgatatgtgcatatacattcattatgtgtatatgtatatgcatgcacatacatatatgtgagtgcatgtgtatatgtatatgtgtatggtgtgtgtacatatgtacatgtgtgttacttgtatatatacgcatatatatgcatgtgtctatgtgtgtatagtatatatatgtttatatgtatgtatatggtacttgtatgtgcatatatgtatgtgtgtgcctcttaataggtacatgtttagatatatgtgtatggtataggtttttatatatgtatatgtgtgtatgcatgatgtatgtatatgtgtgtatgtatatttatatgcataggtgtgtatatatgtgtatggcatatatgtgtgtatatatgtgtatggcatatatgtgtgtatatatgcgtatggcagatatgtgtgtatatatgtgtatgacagatatgtgtatatctatgtgcttgtgtgaatgtgtatgtttttgcgtatgtgtatagcatgtgcattatatatgagtaaggggactgagtgcagtggctgacacctgtaatcccagcactttggaaggcctaggcaagaggatcatttaaggacaggagttcaagaacagccttggcaccatatcaagaccccatttctacaaaaaaattttaaaatatacatataaattagtatgggtatatgtatggtgtatgtatacaggtatatatgtgtacatatatgtatatgcatatatgtgcattatgtgtgtatatatgcatatatgtgtatatgtctggtatgtaaatgtgtaaatgtacatatatgatgtgtatatgtgtatatgtgcatagtatgtggatgtgtgtatgtatacatatggtgtttatatgtatatgtatatctatgtgtatacatgtgtgtatcacatataaatatgtgtatatctatgtgtgtatgaatgtgtaaatatttatgcatatgtgtatggtatatgcatgcatatatgtgtatgtgggtgcatgtctatacatatgtataagtgtacagcgtgtgtatgtatacatgtgtatatgtgtggatgcatacgtatgtgtgtgtgcatgtgtatatatgtatgtgtatatgtgtgtatggtatatataagtgtatctttataaatgtttgtgtgcaaatgtgtatatatttatgcatgtgtgtatagtatatgtatatatgtttgtatatgtatatgtgtgtgcatttgcatatgtataaatatgtgtataattctgagaaaagtgctcttttgcagaattatacatatatttatacatatttagcaagaaaaagctaaattagagctgaatgctgtgacgcattcacagttgtggttgggcacattcaactagacagatttttaaaaaaacaatactgcatggagtccaaacct

SEQ ID NO: 479958 - DNA, 633 bp, Homo sapiens
gcacctcatgcattagagctcagaattcacaaactgattgcgggaagagatggaggagaataatgagccagggtctgtttgataccagcctcctggggctggatgagagttgccattactggacccagttgtgtatattaaatagagttgctgtcaagtcaatgaagtacaagaataaactaatacagaaaattggtatcaaggagtgggacattgctataaagatacctgaaaatgtggaagcagctttggaactgggtaatgggcagaggttggaacagtttggagggctcagaaaaagacatgaagaccccagaatggtagatctactgacaacttgcactgtgcacctggaaaagctgcctatgaaagcagccacaggggctgtatcctataatgccagagaagcagagctgttcaaggccttgggagcccaccccttgcaccagtatgccctagatgaatcccaagaggacccacagaccatccggaggaagtggactgttcctgcaggacctgggaggcaccccaaatactttgagtacccaagctggggaagtgggaaagggagatcttccactcccgaacacacacccccactagggaaactgaaggtctagtttgagggagaag

SEQ ID NO: 479959 - DNA, 486 bp, Homo sapiens
cacagcacagctgctctatgaaaatgcagccagactgctttttaatgcaggtccctgggcccgttcctcctcatggggtgggatctcctgaccgtggtccccagccactcccatcagtgtgtttggactggcaacaggaactagagcagatcctcagcatactgcagcagccctacaaaaaacctggccagactgtttgttatgagggtcccgaatcccatatcttctcactggaggatctttgtggcttgggtcttcacccaccccctgggactatcaagccggtagcatttctgctctggagagtctgcaggcccaagggcttttctggacacccagaagagcacccacctcatggaaaagtggtcagactgttctccacacagtttccagtcctcaattctcctcactgggcagggctgcctgacctgggacgccaggaaaaccattctgcccctacatgaccacttcaatcagaaacagctc

SEQ ID NO: 479960 - DNA, 463 bp, Homo sapiens
gtagataaatccatgaagatgaggaaaaaccagcgcaaaaagtctgaaaattccaaaaaccagaattcctcttctctccaaaggatcaccattccttgccagcaagggaaaaaaaactgtacagagaatgagtttgatgaattgacagaagtaggcttcagaacatgggtaataacaaactccgctgagctaaaagtgcatgttctaacccaatgcaagcaagctaagaactttgaaaaatggctagaggaattgctacctagaataaccagtttagaaaagaacataaatgacctgatggagctgaaaaacacaacacgagaacttcatgaagcacacagaagtatcaacagcccaattgatcaagcagaagaaaggatatcagagattgaagatcaaattaatgaaataaagcaaatatgggactatgtaaaagatgaaacttacgtttgattgctgtacc

SEQ ID NO: 479961 - DNA, 726 bp, Homo sapiens
ctcctccttcctcttccactgtgattgtaagcttcttggggtcctcaccagaaacaaatactggcactatgcttcttgcacagtctgaagaactaatcactgatgtgcaggcaaatcatatccagagtatggtaaagagccaccagaagacagaggagcctcaccccatggccatcaccactacagtcccaggggtagaattgccagactacctcttttgttctcttaaagcccagaagctcttcagtcagcttgcggtgaatgctgcctggccttggactcacctttcatggcagtgggctcttctgtggcccagacccagtccaggaatgctgtccaagagccaagccctggaattgggcaccccaaaaactggcttggtgctctacccttctgtggctgagctggtacctaaaggccctagggctcttcagttagcaggtaatgaatctcaccaggactgggtctttccgttcaaggcagtagcttcccttctggcccagagtgtctctagaaatgtcatccaggagctagtgcctgaaaaggtggcctcaggactttgaccgggggaatactttcaactttccaccattcagtataatgttggctctgagtctgttccatatggcatttattattttcagtctgtaagtgtctttacaggaaaggaagcctggctaaaagttcatcaattttgattaatgtttccacttcaaactatactat

SEQ ID NO: 479962 - DNA, 692 bp, Homo sapiens
tgactgcaacacttctccagcaagggctcagagctaggctgaggcagagatgagtgaaatgacagaagtagacttaagaatgcagataaaagcaaaccttgctgagctagaggagcacattgcaacccaatgcaaagaagctaaggatcatgataaaacaatgcaggagcagaagccagaatataagatactccaagaggagatcatcaccgagacacataattgtcagattctccaaggtccaaatgaaagaaaaaatgtaaaggacagccagagagaaagcccagagaagtttaatcatctgaagccttcttctctcaacttgtcagagtcattctccatccagttttgttccattgctgggccctcagctgcaggtctgttggagtttgctggaggtgcaatccagacactgtttgcctgggtatcagcagcagaggctgcagaacagcgaatattgctgaacagcaaatgttgctgcctgatcgttcctttggaagcttcatctcggaggggtacccagccttcccatgcagccactctatggctgttaatggagatattcatttacattcaatgtcattattgatagcttgaatgttattggtgtatagacatgctacttattttgtgcattgattttgtttcctaaaattttactaaagtctttaccagttctaggactctttcag

SEQ ID NO: 479963 - DNA, 859 bp, Homo sapiens
gtgttgctccagtacgtcgaggaccttctgctaggacaccccacagcagtcgggtttgccaagggaacggatgccctactttggcacctggaggactgtgggtataaggtgtccaagaagaaagcctagatctgctgacagcagtgctcccaaggacaagacttgcaattataagtttccactgctcccaaatttgcttcctggagcctctggaccaaatggacagacagacacccactggcagcatatggggcacttatcaaaactgaagccctggtggggcagagaaaattaccctatggaccgagattcctgttatgccctggaggacaatcagattccctactgctggctgcaaatgacctccaacatttatgcctatgctgttgttctgccctttccttacctgagaaagttcctaccttcaccaatgtcaattatacctcgattggtggatcaccctatccctggtaatccacaccctactgctggcagaactaacaacgttcttcttggactgccaataacacctgcaaaacctatcccacactcatgggaacacatcaatgctatttattattggcaatcaacaggaaactcaagcacaatgcacaacagtcacagcaaggaggaacatgcaattgccaactacaccaaacgtgcctatagccttagccacagcaacatataaaatggtaaatctaacctaatgcagggcttgcttctgccaacctgattttagaaaatatagtgtaatacttcttccctggcaacgctgcatcatatacctcacttatttagatgagccgattctcctaaccgttgacattcaataaccttatccagagacttatctcac

SEQ ID NO: 479964 - DNA, 659 bp, Homo sapiens
catcaactcgaatttcttctgcatctctgctttatatttaacaatgttcaatataggccctcaatctcctatggcctgtaatgtttttgctcagtggtccactgttattctgatgtgctttgtaggaaactgcaccctcctgctgaattcacacagaaacagggaagctgggccagagactctagcaggcccgccagcctggctacaagtggcagacacagatgaggtcatgtgctctgatctccaggtttttcccatgacaacaggaagctgctccctccagctgagctcacatagaagcaaggcttctggaccagaaggtctagcaggcattgcccccgctggctaccagggtcaagggcaagtagtcttgtgctttgctgtccaggtgcttcctgttacaacaggaagctatgacctccagctgagctcacacagcagccagtccactgggccagagggtctagtaggctttgcccatctggctaccagtggctctgatgttcagggtgtgtttcccatggcaacaggaagttgtgccctccagctgagttcacacaaatgtgggactgctggctggctggctaccagtgccagaggtggaagacgtggctggctgagttcatgctgaatcaggactactggtccagaagctggca

SEQ ID NO: 479965 - DNA, 764 bp, Homo sapiens
tgtcttcattaacgcagaaacaatggttccttacccaccagtagccaagctgggacctgggcccagaaggatgctgtcaatggtggtggcagcaatagcagaagcagcagctctggtagcagcaggagctgtagccacaggaacaaggattccctgtggtggaagcactgggactggtgacaggagatggacttgcctgtctcttaagccagaccctatggaatctacacaaatattaactctccattctgagtacaaggacaagaacaacttgcattcaggcattaaactgtctcaggctcttcctcgagctcttccttgtccactttgcctagtgaccaccactgtcttctgcctggggcagcaaatgatttgtgtcagcggaagaggcccaagttcatccattgctctccactcccagggcacaaaggctcttcagttagctggtaatgaatgctgccaggactgggccctttccttcaagggagtgggttcccttctggcccaaggtgtgtctagaaatgttgtctgggagctagagcctaggagggctctcacaactgcgactggtgccctgtctgctgtggctgagctggtattctagatgcaagacaaagtcctacccagtcttctctcttctctcctcaaggggaaggaaggggtctcatttggaaccacaagctgtgcagcctggggttaagggagtagttatgctagcactcccttggctgccccagctggtgtcttaagatgaaatctcactc

SEQ ID NO: 479966 - DNA, 692 bp, Homo sapiens
gcaaaatgttggtatttacagtgagtgcctcctattggctagacccagcgggaagtcagcctgggaaagagcctgaaggggtcagtttcctcctctgtcaataccaaaccaagatgccctgccatccacaccgggtcacctctgaaggttgtttcctttactgtggggctgaatccatgactgaatgctatcccagaaaataccccattggcttggatctggcactcagttctggggcggtgaggggagggcaagagagagggcgtcttttcaggcagcatgctgagactgacactgccgcagcttcctgtgcttcctgcctgggcagaggtgcccagggtattttaacctttgaccaccctcttactgaaaacttcaactttcatgtcctctcattcattgaatctgcttggcaaaactctttgccttcttcaactatattcctgcagaaaaccatacaaccacttgcaggttggaactgctgtaaattcacattcttcaatttcaagcatgtcctaaatagtgtcaaacaatccttctatgcatccctaagatcgttcccagttcacacaaaagataattcaacctgtcatcactttctttgagattactacctcattacctctactgtcattctcatattaactcactttttaccttacaaagacatttggagcaatcaggtagaattt

SEQ ID NO: 479967 - DNA, 583 bp, Homo sapiens
aatacaccatggaatactactcagccataaaaaggaatgaaataatggcattcgcagcaccctggatggaatcagagaccattatcctaagtgcagtaattcaggaatggaaaaccaaacgtcgtaagttctcatccgtaagcaggacaggatggcacatgaagtgtggggccaagagcattccagacagaggaaacagtgtgtgcaaaggcctcgaagccgaaaagagcttggatgttgaaaggcagaactcctggagaaatgccagtggattgaagttctccgaccctttttacaagaaaacacatgaggagtatctgtccagagaggatcatcagaagagagcacgccaagggaaaccctacctctataaactcaagcatgtgtttatccaaatgacccctgagggcagtgattcgaatgcatattccgagatgcttatttatcagtggagctcataatctggaagaggagacagatgcgcacataaataacactaataaggatgacactgggaaacgctggaatagaagtgcaagcaaaaggctatgggaatatggggaggggaaaattaatttcaacc

SEQ ID NO: 479968 - DNA, 769 bp, Homo sapiens
ggaaaatcacctactaaagcctcagtaatggtggatgcccctacccctaccaagctcgatgatcccaagtcgacttcagactgttgtgctggcagtgagaatttcaagccagtggttcttagcttgctgggctctgtgggagtgggacccactgagctagaccacttggctccctggcttcagcccccttttcaggggagtgaacggttctgtctcactggggttccaggtgccactgggcatagcaccaggtcttactcaaggcctgccgtgaccactctccggctatggcctatgtttgttcaaggccctggaactttacaatcagcaaattgcaaagccatccaggcccttttccttccctttatgatgggcccaagagcccttcagttagcaggttgtgaatcctgccaggactggttccttcccttcaaggcagcaggtcctcttctttcccaggagcccagaaatgctttctgcaccatgctgcctctgctggaagatgagtgaggggtggcattggtgattcaagactgatttttgtacgccttcagtgcctcttttggcaatatgaagttaaaatcagggttgtcatggctattcagactcctttttggttccatatgaattttaagatagttttttttctaattctgtgaagaatgtcaatggtagtttaatggaaatagcattgaatctataaattactttgggcagtataactattttcatgattgatttttcctatccatgagcatgaaatgttttt

SEQ ID NO: 479969 - DNA, 687 bp, Homo sapiens
acctgactgtgaactccttgagggcaggattctgttttattcatgtttgtatccacagagcctaactcagggctggctcagatttctgtgctgcatattgtcagtatccacagtgaccccagaggagcctgtgctggcaggagtaatgctgtgaccaacatgtttgataactgctactctagtccagtggttctcaaagagtggccccagaccaccaccaccaccgccatcgccatcatcatcatcatgcctgggaacttgttagaaacatcagtcctcaggccccactctaaatctactgaattagaaactctggggatgaggcccagcaggttctgttttaacaagctttccagccttaatggtaacttgattcaaaatggttccttacaaaatggaacaaaccgccctaacagacctttgtcttcaaatataagaaaagaaaaacttacactgaccagtcatgtctataagatgtctaaagagccagatttacttttctgagtattgcctgtaaatggaattatataacatggagcctttgtgtacaacttctttcacttaatataatgctttcaaggtccatccatgttgtagcatgtataaatactttatttttattgctgaataatattccattgtacggagatatatcacattttgtttatttaccaattgatggaccct

SEQ ID NO: 479970 - DNA, 9074 bp, Homo sapiens
ccacggaatggaatgcactcgaatgcaatggagtcgaaactaatggactggaatagaatggactcgactggtacggactccaatggaatggaatcgaatggaagggaatcgaacggaatggactcgaagggaaaagactgcaatggaaaggtctcgaatggaatggaaattaatggaatggaatggaatcgaatgaaatggagtcaaaaggaatggaatcgaatggcaagaaatcgaattgaaatggaatcgaaccacaaggaatggacaggaatagaatggtctcgaattgaatggaatcgtatggaatggcatcaaacggaatggaatggacagccacggaatggaatgcactcgaatgcaatggagtcgaaactaatggactggaatagaatggactcgactgatgggattggatgggattggaatgaaatgtactggaaaggactcgaatttcatgaaacggaatggaatgaattggaacggaatggactcgaatggaatggaatgtcatgggatggcatcaaatggaatggcatcaaatggaatggaatcgaatgcaatggaatgctatggaatggaatggaatgcattggaatggaatgtcctctaatggagtggattcgaggctcgaaaggaatggagtcaaatggaatggtctggaatggaatgaacacgaatgtaatgcaacccaatagaatggaatcgaatggcatggaatataaagaaatggaatcgaagagaatggaaacaaatggaatggaattgaatggaatggaattgaatggaatgggaacgaatggagtgaaattgtatgcagtagaagagaatagaatggaatgcaagcgaaaggaaaggaatggattggaatggaatggaattcattggaatggaagggaatgtagtagtgaaatggaatcgaaccacaaggaatggacaggaatagaatggtctcgaattgaatggaatcgtatggaatggcatcaaacggaatggaatggacagccacggaatggaatgcactcgaatgcaatggagtcgaaacaaatggactggaatagaatggactcgactggtacggactccaatggaatggaatcgaatggaagggaatcgaacggaagggaatcgaacggaatggactcgaagggaaaagactgcaatggaaagaaaggattcgaatggaatgaaaaagaattgaatggaatagaacagaatggaatcaaatcgaatgaaatggaatggaatagaaaggaatggaatgaaatggaatggaaaggattcgaatggaatgcaatcgaatggaatggaatcgaacggaatggaataaaatggaagaaaactggcaagaaatggaatcgaaatgaatggagtgttatggaacggactcaaaaggaattgaatatgggattggatgggattggaatgaaatgtactggaaaggactcgaatttcatgaaacggaatggaatgaattggaacggaatggactcaaatggaatggaatgtcatgggatggcatcaaatggaatgacatcaaatggaatggaatcgaatgcaatggaatgctatggaatggaatggaatgcattggaatggaatcgctcgaaaggaatggagtcaaatggaatggtctggaatggaatgaacacgaatgtaatgcaacccaatagaatggaatcgaatggcatggaatataaagaaatggaatcgaagagaatggaaacaaatggaatggaattgaatggaatggaattgaatggaatgggaacgaatggagtgaaattgtatgcagtagaagagaatagaatggaatgcaagcgaaaggaaaggaatggattggaatggaatggaattcattggaatggaagggaatgtagtgtaatggacaggcctggaataaagtggaatgctacggtctcgaatggaataaaaatgtatggaatggaatgcaatgaaacggaatcgaatgtcatagaatgtaatggatgcaaaaaaatgaatccaaaatcattgactggaaaggctgggtgtcgaaaggaattgactccaatggaatggaatcgaatggaatggaatgaaatggaatcgaaccacaaggaatggacaggaatagaatggtctcgaattgaatggaatcgtatggaatggcatcaaacggaatggaatggacagccacggaatggaatgcactcgaatgcaatggagtcgaaactaatggactggaatagaatggactcgactggtacggactccaatggaatggaatcgaatggaagggaatcgaacggaatggaatcgaacggaatggactcgaagggaaaagactgcaatggaaagaaaggattcgaatggaatgaaaaagaattgaatggaatagaacagaatggaatcaaatcgaatgaaatggaatggaatagaaaggaatggaatgaaatggaatggaaaggattcgaatggaatgcaatcgaatggaatggaatcgaacggaatggaataaaatggaagaaaactggcaagaaatggaatcgaaatgaatggagtgttatggaacggactcaaaaggaattgaatatgggattggatgggattggaatgaaatgtactggaaaggactcgaatttcatgaaacggaatggaatgaattggaacggaatggactcgaatggaatggaatgtcatgggatggcatcaaatggaatgacatcaaatggaatggaatcgaatgcaatggaatgctatggaatggaatggaatgcattggaatggaatggctcgaaaggaatggagtcaaatggaatggtctggaatggaatgaacacgaatgtaatgcaacccaatagaatggaatcgaatggcatggaatataaagaaatggaatcgaagagaatggaaacaaatggaatggaattgaatggaatggaattgaatggaatgggaacgaatggagtgaaattgtatgcagtagaagagaatagaatggaatgcaagcgaaaggaaaggaatggattggaatggaatggaattcattggaatggaagggaatgtagtagtgaaatggaatcgaaccacaaggaatggacaggaatagaatggtctcgaattgaatggaatcgtatggaatggcatcaaacggaatggaatggacagccacggaatggaatgcactcgaatgcaatggagtcgaaactaatggactggaatagaatggactcgactggtacggactccaatggaatggaatcgaatggaagggaatcgaacggaagggaatcgaacggaatggactcgaagggaaaagactgcaatggaaagaaaggattcgaatggaatgaaaaagaattgaatggaatagaacagaatggaatcaaatcgaatgaaatggaatggaatagaaaggaatggaatgaaatggaatggaaaggattcgaatggaatgcaatcaaatggaatggaatcgaacggaatggaataaaatggaagaaaactggcaagaaatggaatcgaaatgaatggagtgttatggaacggactcaaaaggaattgaatatgggattggatgggattggaatgaaatgtactggaaaggactcgaatttcatgaaacggaatggaatgaattggaacggaatggactcgaatggaatggaatgtcatgggatggcatcaaatggaatgacatcaaatggaatggaatcgaatgcaatggaatgctatggaatggaatggaatgcattggaatggaatggctcgaaaggaatggagtcaaatggaatggtctggaatggaatgaacacgaatgtaatgcaacccaatagaatggaatcgaatggcatggaatataaagaaatggaatcgaagagaatggaaacaaatggaatggaattgaatggaatggaattgaatggaatgggaacgaatggagtgaaattgtatgcagtagaagagaatagaatggaatgcaagcgaaaggaaaggaatggattggaatggaatggaattcattggaatggaagggaatgtagtagtgaaatggaatcgaaccacaaggaatggacaggaatagaatggtctcgaattgaatggaatcgtatggaatggcatcaaacggaatggaatggacagccacggaatggaatgcactcgaatgcaatggagtcgaaactaatggactggaatagaatggactcgactggtacggactccaatggaatggaatcgaatggaagggaatcgaacggaatggactcgaagggaaaagactgcaatggaaaggtctcgaatggaatggaaattaatggaatggaatggaatcgaatgaaatggaatgggattggatgggattggaatgaaatgtactggaaaggactcgaatttgatgaaacggaatggaatgaattggaacggaatggactcgaatggaatggaatgtcatgggatggcatcaaatggaatggcatcaaatggaatggaatcgaatgcaatggaatgctatggaatggaatggaatgcattggaatggaatgtcctctaatggaatggattcgaggctcgaaaggaatggagtcaaatggaatggtctggaatggaatgaacacgaatgtaatgcaacccaatagaatggaatcgaatggcatggaatataaagaaatggaatcgaagagaatggaaacaaatggaatggaattgaatggaatggaattgaatggaatgggaacgaatggagtgaaattgtatgcagtagaagagaatagaatggaatgcaagcgaaaggaaaggaatggattggaatggaatggaattcattggaatggaagggaatgtagtagtgaaatggaatcgaaccacaaggaatggacaggaatagaatggtctcgaattgaatggaatcgtatggaatggcatcaaacggaatggaatggacagccacggaatggaatgcactcgaatgcaatggagtcgaaactaatggactggaatagaatggactcgactggtacggactccaatggaatggaatcgaatggaagggaatcgaacggaagggaatcgaacggaatggactcgaagggaaaagactgcaatggaaaggtctcgaatggaatggaaattaatggaatggaatggaatcgaatgaaatggagtcaaaaggaatggaatcgaatggcaagaaatcgaataatggaatcaaatcgaatgaaatggaatggaatagaaaggaatggaatgaaatggaatggaaaggattcgaatggaatgcaatcgaatggaatggaatcgaacggaatggaagaaaatggaagaaaactggcaagaaatggaatcgaaatgaatggaatgggattggatgggattggaatgaaatgtactggaaaggactcgaatttcatgaaacggaatggaatgaattggaacggaatggactcgaatggaatggaatgtcatgggatggcatcaaatggaatgacatcaaatggaatggaatcgaatgcaatggaatgctatggaatggaatggaatgcattggaatggaatgaatggacaggaatagaatggtctcgaattgaatggaatcgtatggaatggcatcaaacggaatggaatggacagccacggaatggaatgcactcgaatgcaatggagtcgaaactaatggactggaatagaatggactcgactggtacggactccaatggaatggaatcgaatggaagggaatcgaacggaatggactcgaagggaaaagactgcaatggaaagaaaggattcgaatggaatgaaaaagaattgaatggaatagaacagaatggaatcaaatcgaatgaaatggaatggaatagaaaggaatggaatgaaatggaatggaaaggattcgaatggaatgcaatcgaatggaatggaatcgaacggaatggaataaaatggaagaaaactggcaagaaatggaatcgaaatgaatggagtgttatggaacggactcaaaaggaattgaattcaaatcaatggaatcaaatcaaatggaatggaaaggaattgaatggagtagatgggattggatgggattggaatgaaatgtactggaaaggactcgaatttcatgaaacggaatggaatgaattggaacggaatggactcgaatggaatggaatgtcatgggatggcatcaaatggaatggcatcaaatggaatggaatcgaatgcaatggaatgctatggaatggaatggaatgcattggaatggaatgtcctctaatggaatggattcgaggctcgaaaggaatggagtcaaatggaatggtctggaatggaatgaacacgaatgtaatgcaacccaatagaatggaatcgaatggcatggaatataaagaaatggaatcgaagagaatggaaacaaatggaatggaattgaatggaatggaattgaatggaatgggaacgaatggagtgaaattgtatgcagtagaagagaatagaatggaatgcaagcgaaaggaaaggaatggattggaatggaatggaattcattggaatggaagggaatgtagtagtgaaatggaatcgaaccacaaggaatggacaggaatagaatggtctcgaattgaatggaatcgtatggaatggcatcaaacggaatggaatggacagccacggaatggaatgcactcgaaagcaatggagtcgaaactaatggactggaatagaatggactcgactggtacggactccaatggaatggaatcgaatggaagggaatcgaacggaagggaatcgaacggaatggactcgaagggaaaagactgcaatggaaagaaaggattcgaatggaatgaaaaagaattgaatggaatagaacagaatggaatgaaatcgaatgaaatggaatggaatagaaaggaatggaatgaaatggaatggaaaggattcgaatggaatgcaatcgaatggaatggaatcgaacggaatggaataaaatggaagaaaactggcaagaaatggaatcgaaatgaatggagtgttatggaacggactcaaaaggaattgaatatgggattggatgggattggaatgaaatgtactggaaaggactcgaatttcatgaaacggaatggaatgaattggaacggaattgactcgaatggaatggaatgtcatgggatggcatcaaatggaatgacatcaaatggaatggaatcgaatgcaatggaatgctatggaatggaatggaatgcattggaatggaatggctcgaaaggaatggagtcaaatggaatggtctggaatggaatgaactcgaatgtaatgcaacccaatagaatggaatcgaatggcatggaatataaagaaatggaatcgaagagaatggaaacaaagggaatggaattgaatggaatggaattgaatggaatgggaacgaatggagtgaaattgtatgcagtagaagagaatagaatggaatgcaagcgaaaggaaaggaatggattggaatggaatggaattcattggaatggaagggaatgtagtagtgaaatggaatcgaaccacaaggaatggacaggaatagaatggtctcgaattgaatggaatcgtatggaatggcatcaaacggaatggaatggacagccacggaatggaatgcactcgaatgcaatggagtcgaaactaatggactggaatagaatggactcgactggtacggactccaatggaatggaatcgaatggaagggaatcgaacggaagggaatcgaacggaatggactcgaagggaaaagactgcaatggaaaggtctcgaatggaatggaaattaatggaatggaatggaatcgaatgaaatggaatgggattggatgggattggaatgaaatgtactggaaaggactcgaatttcatgaaacggaatggaatgaattggaacggaatggactcgaatggaatggaatgtcatgggatggcatcaaatggaatggcatcaaatggaatggaatcgaatgcaatggaatgctatggaatggaatggaatgcattggaatggaatgtcctctaatggaatggattcgaggctcgaaaggaatggagtcaaatggaatggtctggaatggaatgaacacgaatgtaatgcaacccaatagaatggaatcgaatggcatggaatataaagaaatggaatcgaagagaatggaaacaaatggaatggaattgaatggaatggaattgaatggaatgggaacgaatggagtgaaattgtatgcggtagaagagaatagaatggaatgcaagcgaaaggaaaggaatggattggaatggaatggaattcattggaatggaagggaatgtagtagtgaaatggaatcgaaccacaaggaatggacaggaatagaatggtctcgaattgaatggaatcgtatggaatggcatcaaacggaatggaatggacagccacggaatggaatgcactcgaatgcaatggagtcgaaactaatggactggaatagaatggactcgactggtacggaccccaatggaatggaatcgaatggaagggaatcgaacggaatggactcgaagggaaaagactgcaatggaaagaaaggattcgaatggaatgaaaaagaattgaatggaatagaacagaatggaatcaaatcgaatgaaatggaatggaatagaaaggaatggaatgaaatggaatggaaaggattcgaatggaatgcaatcgaatggaatggaatcgaacggaatggaataaaatggaagaaaactggcaagaaatggaatcgaaatgaatggagtgttatggaacggactcaaaaggaattgaatgtaatagaatggagtggagtggactcgaatataatggactggaatggaatgaaatcacatggaatgggaacgaatggaatggaatggaaaggaatggaatcgaatggaaaggaatcgaatggaagggaatgaaattgaatcaacaggaatggaagggaatagaatagacggtaatggaatggactcgaatagaatggacacgaatgctcaaattaaatggactcgaatggaatggaaacgaaaggaatgtcatc

SEQ ID NO: 479971 - DNA, 9203 bp, Homo sapiens
gacagccacggaatggaatgcactcgaatgcaatggagtcgaaacaaatggactggaatagaatggactcgactgagtgaaatggaatcgaaccacaaggaatggacaggaatagaatggtctcgaattgaatggaatcgtatggaatggcatcaaacggaatggaatggacagccacggaatggaatgcactcgaatgcaatggagtcgaaactaatggactggaatagaatggactcgactggtacggactccaatggaatggaatcgaatggaagggaatcgaacggaagggaatcgaacagaatggactcgaagggaaaagactgcaatggaaagaatggaatggaatcatctggaatggaattgaatggaatggaacaatatgaaatggaatggaatggaatggaatggaatgcccttgaattaaatggactggaatggaatggactcaaacagagtggaatggaaagtgtggagatagaatggaatgaactcctttggaatggtgtagtatgcaatgcaatcgactggcagggaatcaaaaggaataaaggattcgaatggaatgaaaaagaattgaatggaatagaacagaatggaatcaaatcgaatgaaatggaatggaatagaaaggaatggaatgaaatggaatggaaaggattcgaatggaatgcaatcgaatggaatggaatcgaacggaatggaataaaatggaagaaaactggcaagaaatggaatcgaaatgaatggagtgttatggaacggactcaaaaggaattgaatatgggattggatgggattggaatgaaatgtactggaaaggactcgaatttcatgaaacggaatggaatgaattggaacggaatggactcgaatggaatggaatgtcatgggatggcatcaaatggaatgacatcaaatggaatggaatcgaatgcaatggaatgctatggaatggaatggaatgcattggaatggaatggctcgaaaggaatggagtcaaatggaatggtctggaatggaatgaacacgaatgtaatgcaacccaatagaatggaatcgaatggcatggaatataaagaaatggaatcgaagagaatggaaacaaatggaatggaattgaatggaatggaattgaatggaatgggaacgaatggagtgaaattgtatgcagtagaagagaatagaatggaatgcaagcgaaaggaaaggaatggattggaatggaatggaattcattggaatggaagggaatgtagtagtgaaatggaatcgaaccacaaggaatggacaggaatagaatggtctcgaattgaatggaatcgtatggaatggcatcaaacggaatggaatggacagccacggaatggaatgcactcgaatgcaatggagtcgaaacaaatggactggaatagaatggactcgactggtacggactccaatggaatggaatcgaatggaagggaatcgaacggaagggaatcgaacggaatggactcgaagggaaaagactgcaatggaaagaaaggattcgaatggaatgaaaaagaattgaatggaatagaacagaatggaatcaaatcgaatgaaatggaatggaatagaaaggaatggaatgaaatggaatggaaaggattcgaatggaatgcaatcgaatggaatggaatcgaacggaatggaataaaatggaagaaaactggcaagaaatggaatcgaaatgaatggagtgttatggaacggactcaaaaggaattgaatatgggattggatgggattggaatgaaatgtactggaaaggactcgaatttcatgaaacggaatggaatgaattggaacggaattgactcgaatggaatggaatgtcatgggatggcatcaaatggaatgacatcaaatggaatggaatcgaatgcaatggaatgctatggaatggaatggaatgcattggaatggaatggctcgaaaggaatggagtcaaatggaatggtctggaatggaatgaacacgaatgtaatgcaacccaatagaatggaatcgaatggcatggaatataaagaaatggaatcgaagagaatggaaacaaatggaatggaattgaatggaatggaattgaatggaatgggaacgaatggagtgaaattgtatgcagtagaagagaatagaatggaatgcaagcgaaaggaaaggaatggattggaatggaatggaattcattggaatggaagggaatgtagtagtgaaatggaatcgaaccacaaggaatggacaggaatagaatggtctcgaattgaatggaatcgtatggaatggcatcaaacggaatggaatggacagccacggaatggaatgcactcgaatgcaatggagtcgaaactaatggactggaatagaatggactcgactggtacggactccaatggaatggaatcgaatggaagggaatcgaacggaatggactcgaagggaaaagactgcaatggaaagaaaggattcgaatggaatgaaaaagaattgaatggaatagaacagaatggaatcaaatcgaatgaaatggaatggaatagaaaggaatggaatgaaatggaatggaaaggattcgaatggaatgcaatcgaatggaatggaatcgaacggaatggaataaaatggaagaaaactggcaagaaatggaatcgaaatgaatggagtgttatggaacggactcaaaaggaattgaatgtaatagaatggagtggagtggactcgaatataatggactggaatggaatgaaatcacatggaatgggaacgaatggaatggaatggaaaggaatggaatcgaatggaaaggaatcgaatggaaatgggattggatgggattggaatgaaatgtactggaaaggactcgaatttcatgaaacggaatggaatgaattggaacggaatggactcgaatggaatggaatgtcatgggatggcatcaaatggaatggcatcaaatggaatggaatcgaatgcaatggaatgctatggaatggaatggaatgcattggaatggaatgtcctctaatggaatggattcgaggctcgaaaggaatggagtcaaatggaatggtctggaatggaatgaacacgaatgtaatgcaacccaatagaatggaatcgaatggcatggaatataaagaaatggaatcgaagagaatggaaacaaagggaatggaattgaatggaatggaattgaatggaatgggaacgaatggagtgaaattgtatgcagtagaagagaatagaatggaatgcaagcgaaaggaaaggaatggattggaatggaatggaattcattggaatggaagggaatgtagtagtgaaatggaatcgaaccacaaggaatggacaggaatagaatggtctcgaattgaatggaatcgtatggaatggcatcaaacggaatggaatggacagccacggaatggaatgcactcgaatgcaatggagtcgaaacaaatggactggaatagaatggactcgactggtacggactccaatggaatggaatcgaatggaagggaatcgaacggaagggaatcgaacggaatggactcgaagggaaaagactgcaatggaaaggtctcgaatggaatggaaattaatggaatggaatggaatcgaatgaaatggaatgggattggatgggattggaatgaaatgtactggaaaggactcgaatttcatgaaacggaatggaatgaattggaacggaatggactcgaatggaatggaatgtcatgggatggcatcaaatggaatggcatcaaatggaatggaatcgaatgcaatggaatgctatggaatggaatggaatgcattggaatggaatgtcctctaatggaatggattcgaggctcgaaaggaatggagtcaaatggaatggtctggaatggaatgaacacgaatgtaatgcaacccaatagaatggaatcgaatggcatggaatataaagaaatggaatcgaagagaatggaaacaaagggaatggaattgaatggaatggaattgaatggaatgggaacgaatggagtgaaattgtatgcagtagaagagaatagaatggaatgcaagcgaaaggaaaggaatggattggaatggaatggaattcattggaatggaagggaatgtagtagtgaaatggaatcgaaccacaaggaatggacaggaatagaatggtctcgaattgaatggaatcgtatggaatggcatcaaacggaatggaatggacagccacggaatggaatgcactcgaatgcaatggagtcgaaacaaatggactggaatagaatggactcgactggtacggactccaatggaatggaatcgaatggaagggaatcgaacggaagggaatcgaacggaatggactcgaagggaaaagactgcaatggaaaggtctcgaatggaatggaaattaatggaatggaatggaatcgaatgaaatggagtcaaaaggaatggaatcgaatggcaagaaatcgaataatggaatcaaatcgaatgaaatggaatggaatagaaaggaatggaatgaaatggaatggaaaggattcgaatggaatgcaatcgaatggaatggaatcgaacggaatggaagaaaatggaagaaaactggcaagaaatggaatcgaaatgaatggagaattgaatggagtagatgggattggatgggattggaatgaaatgtactggaaaggactcgaatttcatgaaacggaatggaatgaattggaacggaatggactcgaatggaatggaatgtcatgggatggcatcaaatgtaatggcatcaaatggaatggaatcgaatgcagtggaatgctatggaatggaatggaatgcattggaatggaatgtcctctaatggaacggattcgaggctcgaaaggaatggagtcaaatggaatggtctggaatggaatgaacacgaatgtaatgcaacccaatagaatggaatcgaatggcatggaatataaagaaatggaatcgaagagaatggaaacaaatggaatggaattgaatggaatggaattgaatggaatgggaacgaatggagtgaaattgtatgcagtagaagagaatagaatggaatgcaagcgaaaggaaaggaatggattggaatggaatggaattcattggaatggaagggaatgtagtagtgaaatggaatcgaaccacaaggaatggacaggaatagaatggtctcgaattgaatggaatcgtatggaatggcatcaaacggaatggaatggacagccacggaatggaatgcactcgaatgcaatggagtcgaaactaatggactggaatagaatggactcgactggtacggactccaatggaatggaatcgaatggaagggaatcgaacggaatggaatcgaacggaatggactcgaagggaaaagactgcaatggaaagaaaggattcgaatggaatgaaaaagaattgaatggaatagaacagaatggaatcaaatcgaatgaaatggaatggaatagaaaggaatggaatgaaatggaatggaaaggattcgaatggaatgcaatcgaatggaatggaatcgaacggaatggaataaaatggaagaaaactggcaagaaatggaatcgaaatgaatggagtgttatggaacggactcaaaaggaattgaatgtaatagaatggagtggagtggactcgaatataatggactggaatggaatgaaatcacatggaatgggaacgaatggaatggaatggaaaggaatggaatcgaatggaaaggaatcgaatggaaatgggattggatgggattggaatgaaatgtactggaaaggactcgaatttcatgaaacggaatggaatgaattggaacggaatggactcgaatggaatggaatgtcatgggatggcatcaaatggaatggcatcaaatggaatggaatcgaatgcaatggaatgctatggaatggaatggaatgcattggaatggaaagtcctctaatggaatggattcgaggctcgaaaggaatggagtcaaatggaatggtctggaatggaatgaacacgaatgtaatgcaacccaatagaatggaatcgaatggcatggaatataaagaaatggaatcgaagagaatggaaacaaatggaatggaattgaatggaatggaattgaatggaatgggaacgaatggagtgaaattgtatgcagtagaagagaatagaatggaatgcaagcgaaaggaaaggaatggattggaatggaatggaattcattggaatggaagggaatgtagtagtgaaatggaatcgaaccacaaggaatggacaggaatagaatggtctcgaattgaatggaatcgtatggaatggcatcaaacggaatggaatggacagccacggaatggaatgcactcgaatgcaatggagtcaaaactaatggactggaatagaatggactcgactggtacggactccaatggaatggaatcgaatggaagggaatcgaacggaatggaatcgaacggaatggactcgaagggaaaagactgcaatggaaagaaaggattcgaatggaatgaaaaagaattgaatggaatagaacagaatggaatcaaatcgaatgaaatggaatggaatagaaaggaatggaatgaaatggaatggaaaggattcgaatggaatgcaatcgaatggaatggaatcgaacggaatggaataaaatggaagaaaactggcaagaaatggaatcgaaatgaatggagtgttatggaacggactcaaaaggaattgaatatgggattggatgggattggaatgaaatgtactggaaaggactcgaatttcatgaaacggaatggaatgaattggaacggaattgactcgaatggaatggaatgtcatgggatggcatcaaatggaatgacatcaaatggaatggaatcgaatgcaatggaatgctatggaatggaatggaatgcattggaatggaatggctcgaaaggaatggagtcaaatggaatggtctggaatggaatgaacacgaatgtaatgcaacccaatagaatggaatcgaatggcatggaatataaagaaatggaatcgaagagaatggaaacaaatggaatggaattgaatggaatggaattgaatggaatgggaacgaatggagtgaaattgtatgcagtagaagagaatagaatggaatgcaagcgaaaggaaaggaatggattggaatggaatggaattcattggaatggaagggaatgtagtagtgaaatggaatcgaaccacaaggaatggacaggaatagaatggtctcgaattgaatggaatcgtatggaatggcatcaaacggaatggaatggacagccacggaatggaatgcactcgaatgcaatggagtcaaaactaatggactggaatagaatggactcgactggtacggactccaatggaatggaatcgaatggaagggaatcgaacggaatggaatcgaacggaatggactcgaagggaaaagactgcaatggaaagaaaggattcgaatggaatgaaaaagaattgaatggaatagaacagaatggaatcaaatcgaatgaaatggaatggaatagaaaggaatggaatgaaatggaatggaaaggattcgaatggaatgcaatcgaatggaatggaataaaatggaagaaaactggcaagaaatggaatcgaaatgaatggagtgttatggaacggactcaaaaggaattgaatgaattgaatggagtagatgggattggatgggattggaatgaaatgtactggaaaggactcgaatttcatgaaacggaatggaatgaattggaacggaatggactcgaatggaatggaatgtcatgggatggcatcaaacggaatggcatcaaatggaatggaatcgaatgcaatggaatgctatggaatggaatggaatgcattggaatggaatgtcctctaatggaatggattcgaagtgaaatggaatcgaaccacaaggaatggacaggaatagaatggtctcgaattgaatggaatcgtatggaatggcatcaaacggaatggaatggacagccacggaatggaatgcactcgaatgcaatggagtcgaaactaatggactggaatagaatggactcgactggaatggagtcaaatggaatggtctggaatggaatgaacacgaatgtaatgcaacccaatagaatggaatcgaatggcatggaatataaagaaatggaatcgaagagaatggaaacaaatggaatggaattgaatggaatggaattgaatggaatgggaacgaatggagtgaaattgtatgcagtagaagagaatagaatggaatgcaagcgaaaggaaaggaatggattggaatggaatggaattcattggaatggaagggaatgtagtgtaatggacagtgaaatggaatcgaaccacaaggaatggacaggaatagaatggtctcgaattgaatggaatcgtatggaatggcatcaaacggaatggaatggacagccacggaatggaatgcactcgaatgcaatggagtcgaaactaatggactggaatagaatggactcgactggtacggactccaatggaatggaatcgaatggaagggaatcgaacggaatggaatcgaacggaatggactcgaagggaaaagactgcaatggaaagaaaggattcgaatggaatgaaaaagaattgaatggaatagaacagaatggaatgaaatcgaatgaaatggaatggaatagaaaggaatggaatgaaatggaatggaaaggattcgaatggaatgcaatcgaatggaatggaatcgaacggaatggaataaaatggaagaaaactggcaagaaatggaatcgaaatgaatggagtgttatggaacggactcaaaaggaattgaatgtaatagaatggagtggagtggactcgaatataatggactggaatggaatgaaatcacatggaatgggaacgaatggaatggaatggaaaggaatggaatcgaatggaaaggaatcgaatggaagggaatgaaattgaatcaacacgaatggaagggaatagaatagactgtaatggaatggactcgaatagaatggacacgaatgctcaaattaaatggactcgaatggaatggaaacgaaaggaatgtcatc

SEQ ID NO: 479972 - DNA, 698 bp, Homo sapiens
agccaaactgcagtccagctgagacttccactccaagcccagatgcaaccagaagcagtgctcagggagagcaaaagccttattctttgctgtttgaaacctgggccatccgaattcatcctggtagtagtgcagactggagataaagtccactgtgcaggcctaaaacctggggctgtggggtctggcctggccctgagacagaaggctgttcaaattaatgcttctgtgaggagacaatctctggagagtgctattgtgtccgtagttggttccttccagtggattcttggtctcgctgacttcaagaatgaagccgcagacctttgtggacaccccaactgctgctgggaattgggcgatgaccactctagctactttctgctggataggggcgaagaaggggccctacagttggcccgaaggcgagtaatagcaagatggatgtcacgggacctagaaaggggagaagccatgtcacccaactccagagggtggtataagagtttgaaaggcttgtatggccctgtgctgatggacttgagctctgaggggcactgatagggtctgattaccacaagattagaacttaggataatacatgttacactgttaacttttagcaaactttacttttgtaaaaacttaccttgaaacctgctgggttaaggatttttgatgggaaggctatgggttgt

SEQ ID NO: 479973 - DNA, 2665 bp, Homo sapiens
gcatctggctgcgctgtgactccctgagcggcacccacaacctgtatcgggaataccaggacctgaccacggcgggcggtcacccagtgctaccgagtcatggactctcggcactgcgcccaggcccactccatccagatcatgaaggtggaggagatcgcagccggcaagtgccgccggccgtccgtcaagcagttccacgactctaaggtcaagttcccgctgccccaccaggtcctgcgccgagatgtttcgacaacttggcacagtaacaatgacgatgtgtatagggtgcctccaattgaccgttccatccttcccactgctccacgggctgctcgggaacccaatatcgaccggagccgtcttcccaaatcgccaccctacactgcttttctaggaaacctaccctatgatgttacagaagagtcaattaaggaattctttcgaggattaaatatcagtgcagtgcgtttaccacgtgaacccagcaatccagagaggttgaaaggttttggttatgctgaatttgaggacctggattccctgctcagtgccctgagtctcaatgaagagtctctagaaatcgggattctgacaaaacagatacggactggagggcttgtcctgctacagacagctttgatgactagaagaggtgatgatagctttggagacaagtatcgggatcgttatgattcagaccggtatcgggatgggtatcgggatggcccacgccgggatatggatggatatggtggccgggatcgctatgatgaccaaggcagcagagactatgatagaggctatgattcccggataggcagtggcagaagagcatttggcagcgggtgtgatgatagacgtcccccccaaagacccaaactgaatctaaagccttggagtactcttaagcaagatgattcctctgctagtacctcccagtccactcgagctgcttctatctttggaggggcaaagcctgttgacacagctgctagagaaagagaagtagaagaacggctacagaaggaacaagagaagttgcagcgtcagctgagtgagccaaaactagaacgacggcctcgggagagacacccaagctggcgaagtgaagaaactcaggaacgggaacggtcaaggacaggaagtgagtcatcgcagactgggacctccaccacatctggcagaaatgcacgaaggagagagagtaagaagtctctagaaaatgaaacactcaataaggaggaagattgccactctccaacttctaaacctcccaaacctgatcagcccctaaaggtaatgccagcccctccaccaaaggagaatgcttgggtgaagcgaagttctaaccctcctgctcgatctcagagctcagacgcagagcagcaatcccctacaagtggtgggggaaaagtagctccagctcaaccatctgaggaaggaccagcaaggcaagatgaaaataaagtagatgggatgaatgtcccaaaaggccaaactgggaactctagccgtggtccaggagacggagggaacaaagaccactggaaggagtcagataggaaagatggcaaaaaggatcaagactccagatctgcacctgagccaaagaaacctgaggaaaatccagcttccaagttcagttctgcaagcaactatgctgctctctcttgatggtgaagatgaaaatgagggagaagattatgccgaatagacctctacatcctgtgcttttctcctagtttctctccaccctggaacattcgagagcaaatcaaaacctctatccagacaagacaaaataaaactcaccatctcctgaagatctttcttacctttttttaaaaacaaaaaatgaaactattttgcatgctgctgcagcctttaaagtattgaagtaactggagaatcgccaatatagccagagagaaagggactacagctttttagaggaaaagttgtggtgcgttatgtcaccacgcagttgccagtgtgattagcgcctaagggtctccatttagcagaaatggtaatgagagtgatataacccctggaacctggttgggcagtaggggagggagggagaaggaaaagtcttcccttgagagaataaacggtaatggagagaactatttaacaaggtcctggtttctcttgcaacacagtagctaaacttgcctgcttttatatgcatttctttgtagggatcagcttgatagacagtattagcagagaaacgacaccttgatcttgatttttttgtttccatttttctttttccatcctatgtctttttgtctccaactttttgtttaatcataaaaattagtgatttccagtcatcagataattagatttagcagcatattttctgatttcttttatctttcatctcaactttctttcatttcatgtttcttcttccaccttatctcctaattctgggtttatttttcttcttgctgaagtacctgttttaattatttttaaagcacgtatttgtgtgcaaatctgttcttttatatttcataatgtcctccatattttatggcaaatggcagaattttagttttaaggctgaatgatatttcactttgtacatataccacaatgtctttatcccttcattcactagtggaaatttaagttgtttccatat

SEQ ID NO: 479974 - DNA, 1904 bp, Homo sapiens
tcatcagttaaggcaaggaccggccatttacacttcttttgtggtggaatgtcatcagttaaggtggggcagggcatattcacttcttttgtgaatcttcagttacttcaggccatctgggcggcccatcaatgattggaatggataaagaaaatgtgatatatatacacaatggaatattattcaggcataaaaagaatgaaagcatgtcatttgcagaaacttggatggagctggaggtcattatgttaagtgaaataagccaagcacagaaagacaaatattgcatgttctcactcatagtgacagaggcctttgaagaacccacagaagagccaaagacccagagagtgggaagccattccaccaaggaagaaatgaccaatcccttacctctcttccctactcctatttccaccctggtgaggatccaaataggaactggcaagtggagagagaaagaagaaaacctatcactcctccttttccaaaggcatttagccaccactacaggccttagcatgggcttagtgggaaacaaagcctcaccattaagtgaagatggagaaagttgagtaatatcttggactgaatacattctaattactaaatcaaggttgtgttttgtgacttagagtgacctaaggactgtttatttttgaagaagtgagcagaaaatcatgtgctctatccaaacttccatctatggtcaggaaaaggttacctcaatggggtacattttattggaacatggggagacaaaataaagttgtgttttgattctacaataaataatactgtagaaaatactggttgtactgactaattcatcccttcaacaagcatgtgattcctttcatgcgtcagacattgtgctaggaataggacatacagtgaaataaaacatagttcttgccctcaaattacttatgatatatggcaggggtcagcaaattcttctctaaagagccagataataaatattttaggctttaagggacacgtacaatctcaattgcatattctacttcttttggtaactaaccttttaaaaatgcaaaaaccattcttattttgaaggctgtactaaaagaggccatgggtcagatttggcctgtgcactctaattttctggctcctaaatgatggaagtaacaaatttttataaaccaccaattaccatacatttattatgattgaagatatgtttagggcacttgggggaggagacacagaagagcatttgctaattctgatggggaaatcagggtttgcaggaagaggcagtgttgatttgtaacctgaaggatgagtaagaattaatcagagttaaaggaggctactttacaagaaatggaaaatcatgcctgtttgttttcattctatttttttcattcgtctttgaatgctcacatgttttctggtgagattatatgacactataattcttagttattccagatttctctattctttcatgtatttgggataaatttttcaaaattcctaggcctgagattaactctttagaaattgttagctttggaataccagaaaagaacagcaaataattcaccaaactgttgtgtaataaccaaagactaaaaaagtgcctttgagttacctatttgacaacgaggcagaactacaaaaggccttgaaaactaaagtcccaaaccacaggacagtctctatggtaaggggtcaggaatatctttttcatcaatgtaaccacaatgattaatatagtgcctcaaacatagtgggtgatcaatctaccctggttggccgaataaacactggtgcagagagcactggaagaaatacttctagattgctatcaaggtaatcagaccttctggctattttacatataactgagtttgtataagaacttattcatt

SEQ ID NO: 479975 - DNA, 573 bp, Homo sapiens
cccagaaaggctttcagactctaccttctgcttcccaaagtagctgcagataatctgggagattggttgttggtgcagggcaggtagtagtagtaatagtagtagcaaatgacaagatggaatctggagaaataaagatgtacttggcaggaggcaagaagtatcgaagccagtactcaaaaaaattgagtgccagctatgtacaaggaaggcatagtactgtcaccagagaccctcgaaggtcggaatcacaagctaaaccacccactctctgtctcctttcccctgagttgcaccctgatcctgctcaaattttcaagagctgtggaatggtgtcttcctgcaccaacccactgggatcagaaagaatcaaaagagcaaactatgcagaaaagaagggatccaagagagccaaaagaaagcaagggtatgttccctcctatggagatggctctctgccttgccgtattccacagaccatgcctggggagttgcaactgccaatcagtttgttagaggagtgagtgcagaaagctaacatggctgcagcttgccttttctttcatatgaatg

SEQ ID NO: 479976 - DNA, 702 bp, Homo sapiens
ctggtagcttgcatcaacacatctctctgaaaactctatagccaaggagaaaggaaagagaccaaggacagctgtacaagtagcatggcgccagcatctgcttctggtgagggcctctggctgcttccactcatggcagaagatgagggaagctggcatgtgcagggatcacatggtgggagagaggaagcaagagagagaagtgggatggaggtgccagcttcttttaaagaaccagctcacatgggaactaatagaagaatacccttaccagaaagccattgcaattggcagcacagcatagtgattaagggaatggcctttggagccagacagcagacgcttgaatctcaggtctctcctttattaggtgtgatctggtgttcaggagtatatgtgcaggtttgttatataggtaaattgcatgtcaccagggtttggtgtacagactattacatcacccatgtaataagcatagtacctgataggtgaagttcacatggattatcatgtttatccctcataataatcatatttatcattattacaattatctttattttatagttgctaaaatgacagcacagaaaattaagtagtctccccaaggatgcaaagctgggaagtggtggagccaggatttgaatccacagtctactctggaatccatgctgtcaactaccgagctgtacacacgaggta

SEQ ID NO: 479977 - DNA, 599 bp, Homo sapiens
gcatagggagccctcttcctcaagagacaagttataacacgtgtgatgggtagtatgaaagggcgagtccaaggtgctgtgactaagtcatggggacttgtcctcatcatggagagacaaggaagaccttccagaggaaatgacactgaagtgaagtttgttattaccgaccttctgaagcctacttctgtcaacttgtcaaacacattctccagccagttgtgttcccttggtggcgaggagctgcaatcctttggaggagaagagagctgtcagacagggacgtttaagtctgcagaagctgtctgctgccttttgttctactatgcattgcccccagaagtggaatctatagagccagtaggccttgctgagctgtggctgagagaggtgaagaagctgcagaagaaaagtttgaagttagcagaggttggttcatggggtttaaggaaagaagccaactctacaacgtaaaaatgtaagatgaagcagcaagtgctaatgcagaagctgtagcaagctatccacaatatctattaatagctaaagaaaaactctactgcgcataggcctaggcaaagaaattatgatgaagaccc

SEQ ID NO: 479978 - DNA, 903 bp, Homo sapiens
tcctctaaagacaaagactcttctgtgactaagcagtctctctctttgccccctctctatagatttatctacctttggtctttgatgttggtgaccttccgatggggttttggtgtggacgtcctttttgttgatgttgagtccattcctttctgtttgttacttctccttaaacagtcaggcccctctgctgccggtctcctgaagtttgctggaggtccactccagacactgtttgcctgggtatcaccagtggaggctgcagaacagcaaagtttgctgcctgttccttcctctggaagcttcatccctgaggggcatctgccagatgcctgccagacctctcctcaggctgtctgtcccttagcagaactcgagcactgtgctgggagatccactgttctcttcagagctggcaggcaggaatgtttaggtctgctgaagctgcacccacagccaccccttcccccaggtgctctgtcccagggagatgggagttttatctataagcccctgactgaggctgctgcctttttttcagagatgccgtgctcagagaggaggaatctagagaggcagtctggctacagcagctttgccaagttgccatgggctccacccaattcgaacttcctggtggctttgtgtacactctattacttacagtactaggttgaatatcagcagtgaaagtgggcatcattgttatgttccagatcttagagaatcctttctttatccttgaccttttggagtttgattattaaatgccttgagatagtcttctttgggttaaatctgtttggtgttctataaccttcttatacttggatattgctatgtttcttttgatttgggaagttctcagttattatcactttgaataaattttctaagcatatc

SEQ ID NO: 479979 - DNA, 641 bp, Homo sapiens
agcgcaccgtcggtgacatggtggtggtgtttgatggggggtctagtttacctgttcatgtaacttactattgtcctctgatccttttagatctcaatcctggagtacaatttctgtcttacgatggactactgctgggccagactgactttatgccttggatccaaaccaaccactcaatcgattatttttatgatggtgcaggggcccccggtgctgcctcatttttaagagtcaaagcctgccagtgtctgattcccctcatctggcagcaagtttggacactagtggaagcagcccagattatatatgaggtattttacattctccacagccatccgaggatagaatctcaattagaacatcaaggtctgccttctgtggccccttgctatgtcagttccacctatgagctgctgtggatttgcataaattaaacgctgctggatagctgccattgtcttgaaaaatggaatgtgatcagcatgggggagggaaggagagggaaaatttgtctttgtttcatcgtcttcttgttaatattcattcaagactgctttaaccacaggtcagttgtggtttggtaattttttatttttattttttcctatggggaaaacaatttgagcaacatcttcttc

SEQ ID NO: 479980 - DNA, 3213 bp, Homo sapiens
ggtgtacagagacctgtctatcagctcctttaggctgccagccaccttcaggaagatccgacccattttggtggtaacagcttctgagagtccttccagaaacctggtccgtagaatggcatcagaccaagacaaatgtcgggccagcagcaggaagtcatctgtggctttgatttccggagtggacatcactccaaaggctgtctgtggtgtggacattgttccagggcctgaggccctcattagtggtgtggacatccctctagagtctgtggctgtcatttgtggcatggacatacccatgccacatccagaggctgtggctcttggtagtggcatgggcatcgatccagaaactgaggctctcataaatgatgtggaccttgctccagaagcagaggctctaattggcgctgtggccatccttccagacacggtatatgttgtttgtgacaaggacatagatctagagttcgcaacactggtttgcaatgtggacgttgctccagaggccatggtttccattagcggcatagacatctctccagaagccatggctgacattaaaggcatgggcattgttccagaggccggggctctcattaatggcttggacatccctccagagaccatggctgttgtttgtgcagtggacatatgtccagaggctgaagctctcattaactctgtggacacagtctcacaggctgagggtctccttagtggtgtggacatagttccagaggctggagctcttactagtggtgaggacacccctccagaggctggggctcgcactggtagtgtgcacatgtctccagaagctgtgggcatcatttgtgatgtggatgtcactctagagtctggggctctcatcagtggcatggacatccctccagaggctgtggatcttgttagtggcatggacattgctccagagatgggagccttcacttgtggcatggatgacatcattccagaggctgtggctgtcatttctggggatctcagaggcgtggctatctctccagaagctggagctctcattagtggtagggacatctctccagaggatgaagctcttgtgagcagtgagggcctctctccagggtctgaggttctcattagtggtgtggacattgtttcagaggtccaggctctcactgttggtgtggacatcacatcagaggttggggaattcatctgcatccctccagcggtcatggacttcatgggcgacatggacatccctccaggatcttggactgtggctgtcatttgtgatgtggacattgctccagaagctgtgtctctcattagcgatgcagacaaccctccagaggctgtgtctgtcatttgcggcatggacagagctccagaaactgtgtctctcattagcagtgtgggcattgcttcagaagctgtggttgtcattttctccgtgaacatcgttcctgaggctttgggtgtcattagtggcttggacaatgctccagaggccagagatctcatttgtggacaggacatcactcctgaggctgtgtctctcattaacagcgtggatgttgatccagaggtttgggctgtcattagtggggtggacattgctccagaagtcatggctttcatctgtgctgcagatgtcaatcctgaggccatggttctcatttgtggcatggacattgcttcagagacaggggctctcatttgcagcatggacattgatccagaggctgggactgtcaattgtggcatggacattgtttcagaggctgttgccgtaactggttgggtggacattgctccagaagttggagctctcctcagtggcgtggacatctttccagaggctgtggctctcttgtattgttttgccacggctttcatagagcctgtgggcattgctccagaagttttggccattgttaactgtgcggacattactctagaggctgtggctgacatttgctctgtggacatcactccagagcttgggactgtcatcagtgaggtggtcatggctccagaggctggaactgtcttttgcaatgtagacatatttccagaggctggggctcccattagcggtgtggacattgctccagaatctaaagctcttactggtggtgcagacatcaccccagaggctgttgctctcactggcggattagacatcatttcagagtctacattttgtgttgaccatggggacatcgccccagagcctggggctggcatcgtttgggtgggcatcactccagagggtagggccgtcattagtgctggggacattgcttcagcatctggagctggctttggtaatgtggacatttctccagcatctgggactgacagtagcggtgtggacattacttcagagcctggagatgacattaaaagcgatgacattattccagagtctagatctgacatgagcggggtaggtattcccccagagttttgggtgcttgttggctggggtgatgtacctccagaagctacagctgacattatcagtgaggatattgcttcagagtccgtgcctgacattagcagcgaagatatctctccagaggctagagcagtcattagcactttggacattgcttcggtgtcttcatctgtaatttgcaatggggacattgcctcagagctgggagctggcactggctgtgtagacatcactccaggattcatatcttgcattagaattggggataactctccagaatctggggctagcattaatggtgtggacattgcctcagaggatgaagtgctcattataggtgtacacaccactccagaggatggagctggcattgccaatggtgatatctctgcagaatctggtgctaccattagcgttgcggacatcgttccaaaatcaggaattgtcatcatccctggggacattaccccatactctgaagtggacagcaatggggacaatgttccagaatctaaggctggcattagcaatggggacagtgccccagagtctgaggctggcattagcaatggggaaagtgccccagagtctgaggctggcattaggggtggggacaatgctccagagtttggtactcccattagaggtgcagacatggtgtcaaagactggagatgtcatcaactgtgtggatgtccctccagggtctgaggctgaagttgagactataggcaactgtacatgagaatgcagaatctgtac

SEQ ID NO: 479981 - DNA, 604 bp, Homo sapiens
accaatttcagtttgacatacaagatgcaaaggaagacaagctttgaattggctagtggggtagaagagatggaacagcctgacaaaagccgtggagaaagtgaacctacagagcagttgaaggaggagcaagtgcatttggccagtgcgctggatacacgtaggggcagacctgtgcccaccatgagtcctcaccttgaccctaatcaacttgggattctcctcaaagtacttagaaaggaaaaggaagacggtgactaccctgacatgatggccacccacccgagctccaggtatgaagcctgctcctctggaattactctagagaagcctgagaaattgcggagtgggaaggtgaaggaagaagagaccctcttggaaagagcatataagttctcccagggcttccaaatgaaagtccctacaagagacccaacaaggttgtcatttttaagggaaaaatacccaggcatggtagctgctgcgaggaaatttgagaagtgacctgcaagttacatttgcgatgtgaaaaccactttgtgttctttgtaagcaactgtttgatgtgtggcattgcagtcatgggtgtgaaacatctggtttt

SEQ ID NO: 479982 - DNA, 737 bp, Homo sapiens
aacctaaaagaaatgcagctgttatattggcctgaaataaaccttgggccaactgctcaaaaggcagatctgcccacctggacaggctatggggtgggctccagccagcttggggtgatgaaagatgtcctgctgcgtgctgggagaaccactactctcttcaaggctgtcagacagggacatataagtctgcagaggattctgctgccttttatttggctgtgccctgcccccagaggtggagtctacagaggcaggcaggcctccttgagctgtggtgggctccacccagttcaagcttccaggttgctttgtttacctactcaagccttggcaatggcgggcacccctcccccagccttgctgccgccttgcagtttgatctcagactgctgtgctagcaatgtgcgaggctctgtgggcgtagtaccctccgagccaggcatgggatataatctcctggtgtgccatttgctaagaccattggaaaagtgcagtattagggtgggagtgacccaattttccaggtgccatctgtcacccctttctttgactacgaaagggaattccctgaccccttgtccttcccagcaagttgctgaaactctctgaacctttatttccttctgcaaagaagggatagtaatatctctttataggcctaggcatatttaccttttggatttttttgtgcttggccaataataaaataaatttacattatctaagcacactag

SEQ ID NO: 479983 - DNA, 528 bp, Homo sapiens
ccgatccgagtcacggcaccaaatttcatgcgctgtttttacttcttttgtggatcttcagttacttcaggccatctggatgtatacgtgcaagtcacaggggatgcgatggcctggcctgggctcagaggcctgacacaatccagtcaaatatgccaaactaatctcaaacacacagctctaagtcttcacatataccattccccttatcctgatttcccatttatttcctttatttttgtttgctttcttcaatatccatctcaagtcacctcttcaaggaaggctttccccaaagatgtaatatttgctcaccacaaagtctgcaagtttacattgcaaggattgatctttcaagcttgcaacattttgaataaacctgagtgggagattgagtcatgagtttattttgtaatcaataatttcatggacagattttatcctttcattgcttaatttctatccttgagtcaataacggccccatattttgatctctgtggtgactttcaatcaactttggggtttc

SEQ ID NO: 479984 - DNA, 697 bp, Homo sapiens
gcctctcctcatgacttcaaagtcaaagaatctaaaataaattatgagggaaccaagaagaagaagacttctccatggtggacttattggaggacagtcacccaacgttggaggcgtagaggggatggggcctttctgggtgaagactacccccggcccagcagcagctgctgcatatgaggtccagacacctttggctgggtccaaacagcatacagacaactatgctggaaaggaggggagggacttccagttccttgcgaccaaggacagccattttccagcaaggcttaacaatcatctggggagattggccaaaaggaaggcaacttcaacagcatacaaacctatcacagtacacacagcccaaacccactgggcctacaaagatgcaggcccagccccagaatgtgcttttaacccaaagctgggaaagttaccacaaaatgtccaggagatatcttataagacattcctggtttaaatgtaacaagaagacggctgttagcttcttgttgcatcctttaagggtcccctctgtgaaaggatgtcttgtattttgcttttgtgatctttggggtgggaagcacagtttggctagaggtaaggggcatggcaaggtgacgggaaagcagttttggacttctgcaagcaagctgtgtactttgggtttttgcatatcctgtcacactagtgt

SEQ ID NO: 479985 - DNA, 1504 bp, Homo sapiens
agcagctccaaggcttgtggctgcggctgacttcccgcgcctgcctctccgcgctgcttagtcctaggtgatggcagcagcagcccatgtgcagtggctgctgcgaagatgctggctgcagcaggggaggcacgggtggggttacctgttctgtggggctggtgagatccaggaacaggcaggagtactgctccctaccaagttgtctgagtgggagccccgcattcccaggcacatctgcagcctcccagccgtggctttggacccaggcatccctgtactctctagggtccaggaagcccctgcccctgcaggctcggaagtgcctgctcctgctatgcagatggtcacagcggaagccgcatgcagtacatctggtccatctgcagcctcatgtggagccagcacctgtgcaggcacctggagctacccatcgcgctgtagcagccagaatgcctggctgtgtacagtggccagacccagcgcttgctggcccacacacccctcactgctccgtgcctggcttgcccttgacagttgatagacatttgggttattttgaaccttatgctgttaaatgaataatgctgctatgaacatttgtgtgtaagtatttttgtggacatgttttcaattctcctacgcatacacctaagattggtattactgagtcatatggtaactctatcatgacacttggagaaattgccaaacccttttccaaacttcctgcagaaatagcaatgtatgaggcttctaatttctccacattttcactatcacttgttattgtgtcttttctttattatagtcatactaatgggtatgaagtggcatctcattgtggctttgatgtatatttctctaaaatctaaagacgtttgttctttgatctatgaattatctagaataaaaacattttccaaattaatgggagatgtttttctattgttattgatttctaaatgaatagtttgatggtcaaagaatgtgatctgtatgatacttattttgggggttgttgaaaatgtcttgtacataatttttaaaaaattcatgtgtttaatatatgtttatgatattaaccttgttaattgtgttcttcaaatcttatatctttactgattctttgtctttttgaattaataattgagagaggtagcacgaaattttccactttgatggtggatttgtccatttcttcctgtaattttatcaattttgtttcatatatttcaaaactacttaatttgatatatgaataggtttcggattgctatatcttcctagtgaatttaatcttttataattatgtagtggtcccctgtatccctaatactgcttcttgtcctagtgtctagttttttgaatattaacatagcaattccagttttctttttgttagtatttgtttggtatatattttcctagctgtttaatcttcaacttttccgtgttattttagttcagatgggtcttttgcaaatagcacataactgcattt

SEQ ID NO: 479986 - DNA, 473 bp, Homo sapiens
aactttgataactctattggtacacgtgcacaatgcgcaggttagttacatatgtatacatgtgccatgctggtgtgctgcacccattaactcgtcatttagcattaggatttaagagtgatgaactaggatatctggcaaaagaaatctttaagcaggaaaatgttgaagctgctgcatggcttcttgtaattgtttatagtaagaagcgagtacagagaaacaatttaaagatgaaatttttaattaaaatggaagtagaacataaagatttgaaaagttttcagcctgactttgtaaacaataaaaaagtgtgtttagaagagaaaaccaagagtgttgccaagctactgtttgataaggttagtatggatagaatgaatccagatgatattcatcaagacaatgggagaatgaccccaaaggcatttcagagatcttggcggatgctatgtccattacaggcctagaat

SEQ ID NO: 479987 - DNA, 669 bp, Homo sapiens
aaggacctttcttcactagttacccaggtaatagagaagaacttcattcatgttttcaggcagattgagagccagagctctgataaaggttgtgaattcaggcaagagccagagggacaggaaaggctccagtttcccagacattttggctcccagcagctccagggatcatgtaggcaggcactgctatagtccttccagagatttattgacattaatggattgcaaacctgaatcttatcaatctttttctaataggaggaataaggtagagagcagaaagacactggagtatggaaaacaaactgctctttgcacttggatgatgttttgtcctatttaccactgtagctttttaagggctggcaccatgtcttattcacttttgcatctgacaccttggccttcaccactgcctaatacagtgcctgatatattatagatgcttagtaaatatttccatacaaacaaaagctaaggttgtatagaactgggcagaggagtagcgatgggggaagtgtttgtggttgtgtccagccatggaaaatgactgagtcataacctttacttgttatgtattcccagagggaaagagaagcagtggtttaagacttttaaaagattgcttgctaactaatgcttaaactgtatgggccaataactcttaga

SEQ ID NO: 479988 - DNA, 1698 bp, Homo sapiens
attgtgagcacacctcaccagttgagaactatcctaagttaaaaagcaaaaagtgcctcctcccgctttgcctttcaccatgagtaaaagctccctggggctacctgagaagcagatgatgctatgcttcctgtacaaccttcagaatatgatccaattaaacctcttcttacaaattacctggtctcagtcaggtccctcagctgcaggtctgttggagtttgctggagtttcactccagaccctgtttgccttggtatcaccagtggaggctgcagaacagcaaatattgcagaacagcaaatattgctgcccaatccttcttctggaagcttcttcccagaggggcagctacctatatgaggtgtctgtcagcccctactgggaggtgactcccaagtggaatttccagttccctactaagcttccagtgatacttccctggctgaaagaggcttcctctgacaccactgcagcagagaagagtagaaacacctcattactgcttggtgccagtggaagtccacgtttcccctgtagtcttcactgatgacgtgggtgttgggaagataaccttgttaccagttggcagtgacaaaagtctcagttcattactttgccttctttgacaccaacctgttgagggtgttatactgcctagttacatccctgagagggtgatagaccctccacttgtcccttacttgcatgggtggggatgggtccacagatattcatctatggtatgttctggatctgtgtccccacccaaatctcatgtgaatttgtagccccagtgttggaggtggagcctgattgaagggggactgtctccataagctctttataaaacataagttatttcatcattctgccacccaaccttcaccataaatttaatatttctttttgcttcaattttgacagaattcgagttgctttggtggaggtttttttcaaactgatattttattcttcttaatatctcaagctagatcctgttcagacattttataacaagttagagtttactttggtgcaaatgagttttgaaatccatgcataattatttcattatacgcattttcaataaacttttgaagacccctcatatatggcctttatcatattgagatacattccttctacacctaattttgagagttattctaatgaaagaaatgttgacttttgttgaatgctttctttgcatctattgagatggtcatatcatttttatccttcattccattaatgtggtatatcacattcattaatttgcacttattaaactattcttccatcccagggatgaatcacacttgatcatggtgaattatccttttaatgtcttgttgaattagggtttctagcattttattgagaatttttgcctatgttcagcagaaatattattctgtagtttacttttcctatggtatcctcatctggctttggtatcaggctaatgctagcctcataaaatgagttggaaaatgtttccttttcttcaattttttaaaagaatttggaaagaattgctatttattcatccttaaatatttggtagagttcaacactaattcaatcaggtcttgggctttcctttgatgacacaaacaaagggaaacatatcccatgctcatggatggatagaatcagtagtgtgaaaaatgatcatactgccaaaggcaacct

SEQ ID NO: 479989 - DNA, 2259 bp, Homo sapiens
gttaataacacaaataactgctcagaagagtcacgatgacctttaagagtgattcaatatgtaattcagagatgacccaccaatatggggtctctgagtggacgtcctttttgttgatgttgatgcatttctttgtgtttgttagttttccttctaacagtcaggcccctctgctgcagagttatgggatttttatctataagcccctgactggggctgctgcctttccctcagagatgccctctccagagaggaggaatctagagagacagtctggccagagtggccttgcagagctgcagtgggctccacccagttcaaatttcctggtggcttttttacactgtgaggctaaaatcgcctactcaagcctcagcaattgcagacgccccacccccaccaagctcgagcatcccaggtccatctcagactgctgtgctggtagtgagaatttaaagccagtggatcttagttttctggtctccattgggaaactcacccctattaccaggtctctgtattgagttttcaaacaagattttgattgaagaaatttaaagaaaataagtttggaaaaaattactggactaggtaaactctaagttccctttctactcagaatgtctctgattctaatcctaaagcccaagcataggactacctccagaaattagatatagctcatttaagaaaatgtatagtaaaaggggatgccaaataatttcattggtcagtaattcttcaatttgtatacttaactacctttgttgtactcttttataaattcctttggtcatttgacagatttatccatgctttcttgtaagcataaatttgtaaacaaaatcccattttcctgttgatttacattttagagtctaaagtgaatatacccacagaaaagataagagcctcaatatgaacaaaaacacacttagaatgcagcttagcttcattttaaagcagaaaacaaaagaacaaatatttttctgaaaaatattagtctgtgtctgcatcacatacaatttgattatgccaccattaaaatatcatgttaatttggcatttgggggaataaaggggggcacctggacatggtcatcttcctaaagtgtaaaatagaaatcatattctcacctccaacagtccataggacatttccctttgaaatttgaaggcaacggctttcatctgactttgccttgaaagttgccaggtatgcatcactattattgaatccagtagcttcaccccattcagtagactctgctaatgaatccttgtgttctttcccatgcatggtgtttgtatgagctgaaaagcataaaaattcagaatagttgttggaaatagcttcatgaccctgttcagcatttcaagtgactttccaataaagttccctttaaatgtacttctaatggtttgtaaataaaagctgttcccttatctccccagctttggcctgctgaacaatgtcaaggaatctttctatgaatcatttggggtaaagctgaagaatctaataattgtaagaagtagtctctaatttgtggcttttaggaaatgtagtttcacatcaattgactcttcctgtagctgaagaaaatccccagaaattcatatagtttcataataaggcacatctgtattctgagtgcctgaaaagccctctaagatgcaagccaaaatataatgcagtgtttctttttaccaactactcacatgtctccacattgtcagggattggggggccaggatgcatgataattcagcaatcctgccctcctaatgattcagagagaccttggtagaacacagcagctatctctttccattgctgtttagttgtccagggaaaaatattgctgagctgtaagaaagataaaatgagggaagactagtttgatttggtggaaaatgttaatgataagctatttgaaaataaaataagtattttttcaaaattttcatacataataaggtgaaacaggctaaccaagggcttcctaataggacttcctccagggatctgctttcaaatactggtaggaagtttagctaattagcttaacaattataaataaatgaagggagtacttttaaagtattgaacaatgcatggaaattttaaagaattttataaatctttgcaggaaaaatttgtttaccattgtaattagcttggcaaattggcttcttagagtataaaaataaagtaggctggttccttgattttcaccaattccaaattaatggatt

SEQ ID NO: 479990 - DNA, 523 bp, Homo sapiens
caggaaagtagacatgataaatattatgatttttattttatggataaaactacaaaaaactgcagaggctattatgaacacctctatgcaaacaaaccagaaaacctaaaagaaatagataagttcctggaagcatacgatcttctaagattgaagcatgaagaagtcattttggagctccatcaggcagggacaactgtttgcagaccagccgtatccttgcagttgtcagccctgtggaggctggcactcctctctctaccactggcctgtgaacctggggatctcaagtctctcagtgatccaagagtgtgggcccatccttgcttaagcaccacacaagacagcaagtcccacttggctaggagatttgggtgtggctgcggtcacctaatctgtccacatgcttcccaggggaacatggggttgtgcctgcccacagagttcaggcagaaacagtaccactggactggaagctctagtggatgtggcccgtctggttatgagaggcagacgtgagtgt

SEQ ID NO: 479991 - DNA, 666 bp, Homo sapiens
ctttttttttttcctgaagatctgtctagtattgacataggcatgggcaaagacgtcacgactaaaacaccaaaagcaatggcaacaaaagccaaaactgacaagcgggatctgattaaactaaagagcttctgcacaacaaaagaaactatcatcagagtgaacaggccacctacagaatgggagaaaatttttgcaatctatccatctgacaaagggttaatatccagactctacaaggaacttaaatttacaagaaaaaaaacaaacaaccgcatcaaaaaaatggcgatcattaaaatgtcaggaaactacacggaatactatgcagccataagaatgaatgaaatcatgtcctttgcagcaacatggatggcagctattatgctaagtgaattaacacaggaacagaacctaataccacatgttctcacttgtagccatgctccctctcagtgctctgagagtgtggactcctttcctacttcagtgctggccacagaccttggcttggcacttccagtctgtgcactgcaggcctggggcaagcttagactttttgcttactcctcagcttagagaaagcaaagttggagacattggcagtggcaatggcaaagcacctttcactagtgtcttagggctccactccagagaaacacagag

SEQ ID NO: 479992 - DNA, 553 bp, Homo sapiens
ttcagaccccctttccgaattcggccatgaatccttctggtcctgggctttttttggttggcccctcttctgcaggtctgctgcagtttgctggaggtccactccagaccttgttcgcctgggtatcaccagtggaggctgcagaacagcaaagattgctgcctgctccttcctctggaagctccctcccagagcggcactggcctgatgccagccggagctctcctcagagctggtgcactgtgctggcagaatgcctcttgtcaggatcagctgctctcttcagagccagcaggcaggaacgattaaatctgctgaagctgcacccacagccgccccttcccccaggtgctctgtccgagggagatgggggttttgtctgtaagcccctgactggggctgttactttcccttcagagatgccctgctcagtgaggaggaatctagagaagcagtctggccacagccactttgctgcgcccatcccagacctcacagcctccttagcactgtcaggggaaaacctcctactaaagcctcagtaatggaggac

SEQ ID NO: 479993 - DNA, 1080 bp, Homo sapiens
aaaaaattaattaaaaagagaagagttttgctcctcataggtaagctttaactctcaacctgctcttactcaaactataacaatttgcattaattcaagttctataacccagttctaccatttttccaaagtataacaatttgcattaattcaagttctataacccagttctaccatttttctgttgggcaccgtagcactcactgcagaaaatcccttccatcttgaacattttccaactttgaccctttctttccattccctttccgtgaaacaggcgtgacttcttaatcctgtattgacatggaatgatactctagtcatcttggcttgatctagtgtgcctcattgtcctgatcagaaaaatcagaaactttgggggacctgaaacatcatctctctggacttgttgcaaagatggaaggtaacaccctggagatggtagagcattgagacgagaagagtgtgggtcattgaagacttcatgaaacacagcagccacacaccagctctggactgccccaccctgactttgacattagagaacctgggcaacatggcaaaaccctgtctctgccaaaaaaaaaacaacaacaaaaaagaaatcagctgggtgtggtggcacgtgcctgtagtctccgctactctaaagggtgaggtgggaggatcacctgagcccaggaggttaagcctgggtgacagagtgagaccctgtcaaaaaaaagaaagaagaaagagaaagaaagaaagaaaaagaaagaaagaaagaagagagagagagagacaaagaaagaaagaagaaagaaagaaagaaagaaagaaagaaagaaagaaagaaagaaagaaagagaaaaagaaagagagggagaaagaaagaaagcaggaaaaaaagaaagaaagagaaagaaagaaagagagaaagaagagaaaggtaaagtttttcctccccaaacctagactcaagtcccactacccaggtgtaacataatgaatctttccagaaagtttttgtttatttaaatctgtaaatgttgactgagcacctatgaagtaccaggcagcagggctaagcacttagga

SEQ ID NO: 479994 - DNA, 1697 bp, Homo sapiens
ttgtttgtttttttcttggctccaccctcgggcctgtgcccacggacctaggtgaggacaggcactcctgccttcactcccaaatgttgcattttccaagaccactctgtgcccacacgcctcatcctgtgcctataaaaccccaagatcctagcgggcagacaacaacaagcggctggacgtcaagagatgcacatcagcagaaggagaacaagtggctggacgtggagaggagcacagcagttgaagagcatgccgacaggcaccagcagacgccagcacaccaggaggccatccactggcgaaacgacacggagtttggcccaggtgatcttggacctcatcagctcagatgtcagatacggcatagcatcaagtcaagaaagttaacaaggtcagaaaaagggatgacaggagagtcaagatactcattatgtggaaatagcctgaagaaaaataacctggtagttcaaactggatttaaaaagcgtctttaaattattatctgaatttttagcagcgttgtgcacatttgaccaaatgatcttgttataactgggctttcatcttttactagaacaatcatcattcatagaaagataatgtgcattagatcaaattattccaactgagcaagatgttaaatgtcattttgggtaatgagataaatgaaggaaatttgtaacaagtggaacagtcgacttattacactctggagaattttaatctgctttcatggtaaaggttaacaaacactcagagagctcctacttgtacttgtcactttaaaagcatttttcctgcaaagatttcaaggtgatggtgtatttgctgcatttcaaagggtatagggtatcctttgtgggaatgacaatttcatcaatatcatcaagagcaaacatatattgaatactttgtagttgtaaggcagtgagctaagtgcctggaacacagatagacataagatatccttttcttacaagaagtctctttacaaaatagcctaaaatatattttcttcagaatataggtttctaatattaggttggtgcaaaaagtaattgtggtttttgccattacttttaataaaatgtggactctgtctatttaaataaaaccctgtatgttcatgtccctaaataaacatttctaatcaaccataggaggcattttgtgtttaatagtaaggacttgaagaagcagatgctaggaacacagagatattttaacttgggacctttgcatttatgttcacaagatttgtctatacttttcttgtacattccttgtctctttgttatcaaggttagattagccttataaatagatctaccatttttattctgtgacaatttgtgttaagctttctactgttaacatttttaaagtgtccatataagctcgttttaggcatttctctttctttgtgtacatatttatgtgtatgtatattcagtttgaaactctgtcttttaataggaaagattcatttgtaagttttagcctgtcatcaacttctaccaccagcagagagtagactgctaaagataattgcagaccagagacaattacgttttgatacattaatagttttaggaaaatacatgaactacagaggtctgcttagcatcatggtgtgttgtgtctcttatgtgaggggtcgtaaggtactgggggaagtagagagaatttcagga

SEQ ID NO: 479995 - DNA, 816 bp, Homo sapiens
ttttttttattattctggaaaaaccttctgaatccactttgtaaaagggttggcacaggaacgaggacatctgatacacctgatatcttcaggatgtgtgctctcactgtagtcatatcactccagaatctgaaggttgcttggcaagcaggaacccaagagtgggagtgggttgttataaagccaggaaacatccgggtttgggtcctcttcacatgtgcctgcttctcctttgaccttttctgccatgttttgagcagcaaaaaggctctcaccagaagccaagcagacatgggtgccatgcctcttgtacagcctacagaacttggttgtactggtttacaaccactttgcatggccatgagagcccaccccttgcatcagtgttccctgaatgtgaaacatggagtcaaagggaatcattttggagctttaatatttaatgacttccttgttggatttcagacttgtatggggcctgtagcccctttgctttggacagtttctcccatttggaatagagtatttatccaaggcctgtacctccattgtatcttggaagtaactagtacaacccagtggttgtactaaatttggcaaatttaatttatgaagacacattctttcaagcacataggggacacttgtgaaaattcaacatgtgtgggatgcaaaagcatatcctaatatagtataaagcatatcccatatagtataaagtagtatatgatacagaccatactctctgtgccccatagaatataattataaaccaaggtatattagtccattctcacacttctataaagaagtgcc

SEQ ID NO: 479996 - DNA, 601 bp, Homo sapiens
acagcagctgatagataaaatggccattataagaaagaaccaaactgatcagatagagctgaaaaacacactacaagaatgtcataatgcaatcacaagtattaactgcagaatacaccaagctggggaagaatctcagagggaccaaatctatgactcattggtatccctgaaagagggggagaaagcaagcaacttggaaaacatattccaggatgttatctatgaaaatttccccaacctctttggagaggccaatattcaaattcaggaaatgccgagaacctctgcaagttactacacaggaagaccatccccaagacacatagtcttcagatttaccaaggttgaaaaggaagaaaaaatgttaaaggcagctagagagaagggacaggtcacctacaaagggaaccccatcaggctaacagcggacctttcagcagaaaccctacaagccagaagggattggggcctatattcagcattcttaaagaaaagaatccaacccagaatttaatgtccagtcaaactaaacttcatcagcaaaggagaaataagatgttttttggacaagcaaatactgagggaatttgttatcacc

SEQ ID NO: 479997 - DNA, 900 bp, Homo sapiens
gggtttatagtgtgatgctaaagtttgagcttctaatgatcccatcgcccaagaagtggacagagcactcaataggaccctcagctgcaggtctgttggagtttgctggaggtccactccagaccctgtttgcctgggtatcagcagcagaggctgcagaacagcaaatattgcagaaaggcacatgttgctgcctgatccttcctctggaagctttgtctcagaggggcacccagctgtatgaggtgtcagttggcccctactgggaggtgtcttccagtttggctacttgggggtgccgtctgttacggctttcctttgctggaaaagggaattccccgacccgttgtgcttcccaggtcgcaaagatgtcccaggctgcaagtcttaccatctgggagaaacctcagcttcagcaactctcctcccactccagtcctatgatgggagagagactaataccagtgcctactgctgaggcgctgtccacactcatcactcaattctggctatgagagcccttccctggctccacagcaagctctccaatctctggcgcaagactaaaatggctgttgtggttgccactgccaggtcaccaaacaatgtctctaaactctcaaaatggtcctagctatggaccattttgtgaccagagagggtggggcccctctcaggaaaagcaaggtatgttcagagatatttatcttttcaaatttgatttgaactatacctgtaactactctgccaataagagtcattttcttagggtagtttggagaaaatttttgagaagcattgggtgaacgggaagtgctcaagagataacctgataggaatgttctaaagaggatttctatactgagaggagagggaatgatgagctctgagctccctttc

SEQ ID NO: 479998 - DNA, 682 bp, Homo sapiens
ctccaacagacctgcagctgagggtcctgactgttagagggaaaactaacaaacagaaaggacatccacaacaaaaccccatctgtacgtcaccatcatcaaagaccaaaggtagataaaaccacaaagatggggagaaaccagagcagaaaagctgaaaattctaaaaatcagagtgactcttctcctccaaaggaatgcagctcctcaccagcaacagaacaaagctggacggagaataactttgatgagttgagagaagaaggcttcagacgatcagtaataacaaacttctccaagctaaaggaggatgttcgaacccattgcaaagaagctaaaaaccttgaaaaaagatcagatgaatggctagctagaataaacagtgtagagaagaccttaaatgacctgatagagctgaaaaccatggcacgagaactacgtgatgcaagcagaagcttcagtagccgatttgatcaagtggaagaaagggtatcagtgatggaagatcaattgaatgaaatgaagcgagaagagaagaaatacagagaacgccacaaagatactcctcgagaagagcaactccaagacacataattgtcagattcaccaaagttgaaatgaaggaaaaaatgttaagggcagccagagagaaaggtcgggttacccacaaagggaagcccat

SEQ ID NO: 479999 - DNA, 1000 bp, Homo sapiens
gtgttcattcattcatcccagccagcaggccagtgcaatgtaaatgacccggctgagatgcttgcattgtgagttgtggatggatagcctgtcctcagaccagggactatgctttgccctcactaaatccacaaaatatactgagcttcttgtttgccacaatgccagcttttgggagtgccagattaccaaaggtttgcagatttattgttctttccaacagccctatcagatagaccaggcaagcaagtattattacccccataatattgatgggaaagcctctgagattgagagagataaagtgatgatcccaaggtcgcatagcagtacttactacaagggtcatttctcccagaaaattctaccagaaattgctatgtttcttctaaaaagcgggtttgcttttatcttgcggataccctgaatcaagatacgcttccttttttgctgtggttgttggaaagcccacagccaaatttgtgtcccctcccttctaatcaatgcacaggacctcaccccagcttcacctgtttgtcttcctttatttttccttcatctacatttcttcacttagttgtgctttttggctttcctgttgtttctgggctttctggttttctggtttgttttgatgtttggaagcaatatagtgaggcaagagcagagactctggggactaatatacttaacgcttggctcccagctctaccctttcctatgttaacctttcttttcctcatctgtaaaatggagaaaacaatagtagtcatggggttgttatgagtgttaaatgagaaaatacaagtgtagtgctaagccaacagtaagcactcaagatatgttcattatcaatattataacattgctgccctaaatcatttcaggagcaagaggtgcaaaagagaatataattatttattctcctatttcaaatgttcaatcttatctcccctcttattcttcctgttgcatgaattgtctttcaagcaaattattt

SEQ ID NO: 480000 - DNA, 587 bp, Homo sapiens
ttagtgttcttcagagtcaagtcttttgcaaaaacaaaggaaagtgtccctcaggacacagtctataatggacagtggccaagctggcaggcaggaacgtttaagtctgccgaagctgagcccacagccgccccttcccccaagtgctctgtcccagggagatgggagttttagctctaagcccctgaatggggctgctgcctttgtttcagagatgccctgcccagaaaggaggaatctagagaggcagtcttactacagcagctttgtggagctgcggtgggctccacccagtccaaacttccctgaggctttgtttacactcttgctgggctccatgggggtgggatccactgagctagaccactttgctccctggcttcagccccctttccagattggcgttccaggtgtcactggggtgaggacactgaggctcagagaatttaatgacctttcccaagattgcaaagttagtaagttctacatccagggtttgaaaccagggctctttgagtctccgtatactaataactctccaattttcaatgtcacatcaaacatctaggaatcttttaagatacaga

SEQ ID NO: 480001 - DNA, 669 bp, Homo sapiens
ctctttgcgcttcaacaaagagcctagactaaccttcccccagacaaatatctacctgtctttggagtctgacacaaaatgaccaccgccacccccatgagtccttttctgctggcccaggaggaacaagttttctgtcccccatattcactgcacctggtgccaccacactcccctggccccgtgagtgtcaatgattatgtgacttttggaaatgtagatcttcttcgggggcccatggtgattttgcataaaccacagaggtcaaatgggcccaagcctcttgggccacagagcctatactgtgaaattgcggaggggctgccaaagccctgggttgtggagcttcaagtcttgctactgccagagttgggggcccagaccccaagatcacaccgtgactcaaaagactgggtcctgctgaagccactctactcaccagagcaagctctctttaggggaggccctgctgtctggggcatggtggccacaggaaaggggaggccaggggaaaggagtaggttgtccttcaaagaagcagctctgaggctcaaggaccctggcacccctgattccacagcaataagggagcagctactggaaactccatggatcagaaagtgcttttggagctgccagatgaaagaaaggaaaaaagacgaatagatg

SEQ ID NO: 480002 - DNA, 622 bp, Homo sapiens
ggggcaggtcccccgatgactctgatgataaggggcacctgccagatgccaaccagagctctcctgtgtgaggtatctgttggcccctactgggaggtgtctcccagtcaggatacatggggagctgtcaggcagaggccctgcccagagaagagaaatctggcagtctggccacagcagccttgccgagctgcagtggacttcacccagtttgaacttcccagtggctttgtttacactgtgaacataaagccacctactcaagcctcagcaatggcggacacgccttcccccaccaagtttgaattccctgggttgatctcagactgctgctgtgctggcagtgggaatttcaagccagtggatcttagtttgctgggctctgtggggataaacaaaagcttaaaaagttcattaccactagaacttcgctataagaaatgcttaagggactccttcagaatgaaataaaaggatgttagacagttactcatagccacatgaagatataaagatctccaataaaggcaaatacatgggcaaatatgaaaagtcattttttattgtaattttggttagtaactccactttacattttctatggaatgtaaaagacacttgc

SEQ ID NO: 480003 - DNA, 639 bp, Homo sapiens
ttccctggaaaggcttaagcagaagctgcaagaccaggttcaaatttgagggttaggccccatgagattcagaaaaggaaaaccagacagttattgcagctctttctcaaacctggcatctccccagagcatggaaagggtattagtggaaccaaagctcagtacttccagcagtgggaaggagaatactgaaaagctgcataatcctatatcaaggagcaaggtgcattctggctttgtattactttcctatgaagtggtagtttctggtgcatggaaagctgccctggagcagtggctgcaagggccttcagctgtcataggactcagtgtagacatcagccatcaggacccctaccctggttcttgtaccttagaggaccgcctctggccccatcaggcaaaggagttggagttggacataactgaatttgaagatagatattgcctggttccattccccgtgattgatctatactgacatagtttgcaaactaagagcacaacatcttgtgcacttaatatattctaatctggttcatctacctgatctgattaaaaatccaatatatggagaaaatgagaagtaaagcagcaaaggggaaagtaaaaagcaaatttcaggattgtggtggaata

SEQ ID NO: 480004 - DNA, 889 bp, Homo sapiens
ggtcctgcaagctccattcatgaatgccacgatggtagacaagacattctatgaatccccagatggatgctactggaagaagcattataggaaaggaagacaaattcatatacagaactctcactctaatttctgcaacctaacaaatgcaaacatcccagtacaaatctgggtccttctcgccacatccagcccggtgctaactgatgccagtgctgacagcactcccttgcaccccaattctaatgttttcccatattccccacctgatagcagcaagagagggcctgatccttctggatcttctgctcgcttcctggctggcatgcaccaaccctgtcccttagccacgcagtgtgccacagtgctacaagtaacacttaaaaggcagaatcttcaggccattggagtggagtactgcataagcactctggatagccacaagtacttcaggagagcctcatactgccagatttctcaaatagaagacctagctgcttttgaggatgacaataaagcaaacaggaagacaaaggcctttgatgtgaaaggtgatgtgggccatgtatgttcaaggcactgtctcctgtctgcttctcccttcctacttctctctctgcttcaacatctccccaactggacaagcaacccaagggatatcacaggatccactgctctcttcagagctggcaggcagagatgtttaagtcagctgaagctgtgcccacagctgccctttcccccaggtgctctgtccctgggagatgggagttttatctataagccgctgactggggctgctgccattctttcacagatgccctgcccagtgaagaggaatctagagaggcagtcttaccacagccactttaccatgctgtgttgagtt

SEQ ID NO: 480005 - DNA, 630 bp, Homo sapiens
gtgagaggagccacccctactgccactccctgatttcttagcccatttattatgggtatggagaagataacaccacactgtggtctcacatttaaagcacaaactgcatcctgcctgttcggcaagcactcagatggctggagaaagaagctgactgacattgccagggtgcataattttgtctacctgatattgtcacagtctgtgtccattctgagtcatctgtccacatacttcttccccagacttcctcatatccacaccgctgacccactccacagtaccagctgcatgaaacagcagagccccctttctcctgcaatgtccttccatcgccctctactgaagacctgccaacttcacccctacttttctggggcctggcaaagtaagatcaagagtgaagccgaagacacgctagtgaaaaccccaaactcatcaagcgccccaactctaatggccacaaagctctactcttgaggttctgtcaattaaaacagaaagttgcagaaatcacagacaaaatcaacttgctaatatttccttgttatttattggcactcagaatatagttaagagggtttcttaaaaggcagagtgcaagtaaaataagtggattaactttcattt

SEQ ID NO: 480006 - DNA, 665 bp, Homo sapiens
taccagtgcctcagtttcctcctctgtctctgtacaataggtatgatactaatcaacaaccttgtaagatcagagtcatttggggtctacagcagagttgtcaaagagaacttctttgatgatgttatatttaaatgggcacaagtggctgctggctgccatactggacagcacagctctaaagaaaagggtggaaaaacgggacccatttttgatcctctgtggcagctaaagggatttcaagacccacaggtcagacagaaaggtaggggagcttgggctagaggggaggaggaggacatgtttttgatgagttcaactaaggcccttgcagtcattgggcatcaccttgccttgttccttcatgtggtcattggtttaggctgtgtctacacagacccactgagtcaagctggaggtctgaatgtgaaatacgaattacagagacatagattttacatcccacacagttccccagctcctactgtgcttgtgcagctcaccctggaggcatgtgcagagaggcattcaatctacttgccagggcttggacatttcagagatgatggtaattactgaagcagcttccaaggaggaatgagacactatatcttatggtctttccctttttaattgagttcctctggaaatgtatgtacctgcag

SEQ ID NO: 480007 - DNA, 565 bp, Homo sapiens
tgcacgctgattggtttaatagagccccatctgagccatgagttgggagattttacaatggtggtcccaggttaggaccaacactggggcagctgtgatcttgggacagaaatgtgaaaacacagactgtccagatgcagaacaggtgactttcatcaaatccagtccctccaatgaacataagaggaaactgatgccccatgaggggaagcaacttgtttcaggtcacctaccaggcagaaaatcacatttatatggtagccaggctgtaacacctcatagctacccattgtctctaatcagaaatgacagcctggtgactggctccatgctgggtgaagtccagcaaactgcaggccctgggtccatctttgtccatttgcatgtggacgtcgacttgacccagaatcatttgctgaaaaggctattgttaacagttccctccctgccccatagcagccatgcatggggcaacttccagtgaggtcagagataaccagtttcacacatgtttgtgtctttccacagtgtcagacttttattgatgctatttcaatcacaaaat

SEQ ID NO: 480008 - DNA, 1826 bp, Homo sapiens
aggaggcatccttaagtcctcctcctctttctcccccgaatcccttttccaacaaccgccagtgcgcatgctctccgacctgaccctggtaggctgctacaacctctctgtcatgcctgaaaagcaaagaaacaaggtccttctggaaagtgccaagtcaaatctgaagcacatggcgttcttcggcctcactgagtttcagcggaagacccaatatctgtttgagaaaaccttcaacatgaactttatttcgccatttacccagtataataccactagggcctctagtgtagagatcaatgaggaaattcaaaagcgtattgagggactgaattttctggatatggagttgtacagctatgccaaagacctttttttgcagaggtatcagtttatgaggcagaaagagcatcaggaggccaggcgaaagcgtcaggaacaacgcaaatttctgaagggaaggctccttcagacccatttccagagccagggtcagggccagagccagaatccgaatcagaatcagagtcagaacccaaatccgaatgccaatcagaacctgactcagaatctgatgcagaatctgactcagagtttgagccagaaggagaaccgggaaagcccgaagcagaactcaggcaaggagcagaatgataacaccagcaatggcaccaacgactacataggcagtgtagagaaatggcgttaaatggctcaaaaaggcctgtacatacttctcccaaagcgccactgaaaagatggcatagcttaaaagatgaaagtgtccaaacacatcctgcttccttcattggggaagttttaaaaaaaagtttagatgttgcctttacagttgcctttcaattcagtgttatactgtgtgtaggtaaaacaaatctcaatatggaattaaattgtctttttggggttggactaaatatgaaatccgaaagccaaaccagactcaccagaaattgctgtttagatattttaagaagttcttaaattagttatggagacaaagtgaaaacataaaatgtgaccatttaacttatggctaagaaatggactttaaattattcatgatacactgttaaaacccaatcttggaatcaaatattttttccaggggtgagaataagtataaacataaagcaactaaaatgaaacataaaaccttttattttcttctgattttaacaaggaatctatttaaatagaataacaactgatggtgaatcttaccgagctgtagaaaataaaaaattcctctccaaacatgggtagttttatgtcaaaatattggcttttcaagaacaggactcatatcttgatatttaagagatgtttaaaattttaaactttttctaccttctactgtttaaaggttttacacagggtgtatctcacattaaacaaaacacctttttttcaaaatgaaataccaatgtaaagatctaatttccaggcgctttcagggcactgtaatttcaacaatactggaatcattttggcgctgcttctcattcattttaaggcttctctgaattgtgctcattccaaattaacccatgtatagaatctttcttcatcatctaaatggtgtgttgctgaagttattgtggtatataatcctggattaaagtcaggactttctttctatagaattattttatcaatatttgtgtagtgaggtcctaatcaagaaacttgaacaggataatgtgtctaaaaatattgctgaagttattcttgatcagatagaatttaacctaaaatgtgaactcttacttactttttgtacatctctattgtaatgtttccagttg

SEQ ID NO: 480009 - DNA, 601 bp, Homo sapiens
cctacgagcagcgagtgtgcagtttccaggcatggccacaggatggtgcagtgactgtgcagatggtgtatggcaccaggagggaaatcaaggccctctaaatattcagtgttcttgttcttgtttttccatatgggacctaaacatggggaagatagcaaacatggaagagagccaggaaatggaatttcctgtcgacactgaagtcaaaatgggccagcaactgggtctctacatcagtggcaaacaagcaagaggggtcaaacctgcagctttcttgctgaagggctctggctcatgcattcaagaggttcaagatactgaagctcagaattgggatggagttcaaggcatttctagggaaaccttgatgctcgtagcgtggtccatagaccagcagcaccgacatcacctggaactcattggaaatgcagagcctcaggctccttatcagatctacggaatctggatcttccttttaacaaaattcccagatgatttgtacacacattaaaattggagaaacagtgctttagattagtaattatcaaacttttcccttgacaatcacacattagatgataattctgtgcaggacaca

SEQ ID NO: 480010 - DNA, 1459 bp, Homo sapiens
cggccagagtgggcactgaggccgaggaggcaccgagagccagcgagggctgccagcacgctgtcacctctcaatatcaatcaatgtacttctgaaaaccaatttactgttcatcttgattttcgaattatttgaaaaactaagagtaatggtaatgcatttggcctggtccgctccactccagatcaccttctccccggtcagtgcagtgaggacgaatatttctaatgctggccctcatgaggaccaaaagccaaggagagagcctgagaaattcctaatgcttaaaggatggccagaagaagagagatcagaggagactgtgaagaagtggtttattgaagttggagaaggaagaaacacattggtgaaggctggagaaacggtgctgaacatctggtccaagggacaggtaaaaccaccatcagtaaaaggaataatgagatcagaagcagaaagagtcagaagtgatgtagctcaagccaagaaatgccaagaattgatggccacaaccagaagcttcaaagaaacaaggaaatattctacccagagtcacaaagggagcgtggtcctgctgatgataccttgcttttagatatctagtgtccagaattgtgagagaatacatttctgttgttttaagtcaatcagtttgtggtaatctgttttggcacccctaaacctctatttgtattggaaacgaatagagttagcaagtataaaagagtgtcattgctctagggacaagcttccagttaatagaataaatccccaaaaagaagggttattgcaaagattccattcaaacggaaacatctggctacctgatagaagaattgacaagctaagtgatacaaggcttagtgacattccaaggatttgagatgatctttgttcttggagagatttaagctacctgggttcataatttttaaagtttgaactggaaataaaaatttatgtctttgttttgagtgtgtttttcttattacaaatcaaatccagatttttagtctaggttgtatccttatagggataataaatagcaacaaccacaagataattaaaggggaaataaatttttagggagtacatggcctttttattgcctttttatctgcccttctcttttaattaatagactttatttttagagtagttaggtttacagaaaaaatgagcagaaagtacaaagagttcccttatattccctttccctacccctccaccttctgaccaggcgcacagtttccccttttattaacatcttgtattagtgtggtaaatttgttacaatttatgaaccaatattaatacattattattaacctgagtccatagttcactttatggttcactctttgtgttgtgcagttctaccggttatgacatatgcataatggcatgtacagtatcataaggaatagcttcactgccctaaatgtcatgacatatgcat

SEQ ID NO: 480011 - DNA, 862 bp, Homo sapiens
tttttttttttcttttttcccttttttgcccaataaaatcctgccctactcactcttcaatgcgtctgcagctctgagagagctttcatgtacaaatggaaaatggaaacggttcagagaaatggacaaggttagaaaaatacgtggcatctgagaatcatgaggccagaaagaaaggtcattctttggagctcagtgggtggggttatgaggccaaaaggatgcagtgatttactgagtgcaaactttcaaattatgttcagcttatttcctagaaaacttgttgcagctgcctatattggtataggtgtaaaatatgagccttttaaaaaaatgtcagaacatttgcatttttaccgaaaagtaaaacagtctttaaaaagaatccctcctagggtttattcctcaagaagttctgagattcctggatgtagcctgcagaaaaaggcttaccttcagaggggtttaagctctctacctgtgcaaaggctacggagtgttgaaggaggggttcaaatatgtgcacacattggtgaggaatgttctgagcatccccactctcagataggttggtgtggggagaattcagtaacaagggatggagaaaatatagtgaaaaggcagccatttacaaaccaagaagagagcctttaccacagtccaaccatactggcaccctcatcccaggtctccagcctctagaaatgaatattgttgttaccaatttggtgtatattcttccagatttattactatgcatatatctatacatgtgcattgctgaagtgcatatgcatatgtgcatgtgcatatgatgtgccaggcactgtactaagaccttgatgtgaattattttatttaa

SEQ ID NO: 480012 - DNA, 3291 bp, Homo sapiens
cctgagggggtgccactgaaggatttcaagcaggggagtaataggctgagttgtggtccgggtctggtttggggctgaagcaaagcctatgcattactcaccacccccaaaaaggcatctgactgactgggggcaccattcctttcttgaatcatcttggatctgggagaaggaaaatgcttctttcttatttctgtttctttctcaagagattctccccaatttctttgcaggtatctttttactcttcaaataaagaaggatttggctctaggaaggcttccatgcagtgacaactgtacagcgttgatggtatctcacatcttacaatcagaacttggagactttcatgaagaaacagataggaagcatctggcacaaactcggtacttaccaaaccaagactgtttagagggcaagatcatgcactttcatcagaagcacattggcaggagcccagctgaatctgacattctgctactggacatagcaaggaagctggatatgtatggcatcaggcctcaccccgccagtgatggtgaagggatgcagattcacctggctgttgctcacatgggagtactggtgttacggggaaatacaaagatcaatacttttaactgggctaaaatccgcaagttgagttttaagagaaagcattttctcatcaaacttcatgccaatatcttggtgttgtgcaaggataccttggagttcaccatggccagccgagatgcctgcaaggctttctggaagacttgtgtggaataccatgctttcttcaggctttcggaagagcccaaatcaaagcccaaaaccctactctgcagcaagggttccagtttccgctatagtggacgaacccaaaggcaacttttggaatatgggagaaaagggaggctgaagagcttgccatttgaaaggaaacattacccatctcagtaccatgaacgacagtgcaggtcctcaccagacctcctctctgatgtgtcaaaacaagtggaagatttgagactagcatatggtggtggctactaccaaaatgtgaatggagtgcacgcatctgagccagtgctggagagtaggaggaggaattctgcattggaggtgacatttgcaactgagctggagcattccaaaccagaggcggatcccacattgctacatcagtcccaaagcagttcctctttcccttttatttatatggaccctgtctttaacactgagcccaatcctaaccctgatcccagagacattttttcagagaggagttctctaagctccttccaaacaagctgtaagttttctggtaatcacatgagcatatattctggcctcacaagcaaagtgcgtccagcaaagcagctaacttacacggatgtgccctatattccttgtacaggtcagcaggttggtattatgcctccccaggtctttttttatgtggacaagccaccccaggtgcccagatggtccccaattagagcagaggaaaggacaagtccacatagctatgtagagcccactgcaatgaagccagctgaaagaagcccaaggaatatcagaatgaagagctttcagcaagacctgcaagtactccaagaagctatagccaggactagcggtaggagcaacatcaatgtaggtctagaagaggaagacccaaatttggaagatgcatttgtatgtaacattcaagagcaaacccctaaaaggtcccagagccaatcagacatgaaaactattcgttttccttttgggtcagaatttagacctttagggccttgtcctgctctcagtcataaagcagacctgtttacggatatgtttgcagagcaggagttgccagcagttctaatggatcaaagtacagcagaaaggtatgtagctagtgaatccagtgattctgaatcagagattcttaaaccagactactatgctttgtatggcaaagaaataaggtcacccatggccagaatccgcctgtcttctggtagtctacagttagatgaagaagatgaagatgcttatttcaacacaccaactgctgaagacaggacttcactaaaaccatgtaattactttttagcttaaaagtgtgaacctatggacatttctgagccagttccatgttaccgacttaggcagaaaataatgaagttgtagaaaccattttcttggttactacatattcattggtattaaggaaatctcattttggatgcctgccttatgaaagatccagctgttgcctcattccttgagtttcactcttccattacctctgaagggactttagaacatgccctctcctcaccagcactgtggcaaggcaaggtgggtatttgtcatctccactgcatacttcctcatagagacattgtgagtgaaggtcaggctcttcaatgctgaagaatggtgacagtatgggttggcatatggaattagcgtctaatggcatttagtgatttagtagattgtgactgtgttgatctttgtgctcttaaacaacactgaacaaatatttcagtctttactatttgtgtggggcccagtagaaatggtcttgtaatatgctaaatacttccatttttataacatataaaagcagagcatggccctcctacagcctcaggaaggaggtggtggcatagatcctctcaagagaatacaggtttagaattaatctaggacttggcagaattctaaacctaggaaattcatgaattaaatcaatttctagagccagacataaaccagatgaaagtatcatgttgttttacttataacttctatattcttatctactatatctagtaaaagagaaacattatcaggtcagtttgtttatctaatatttcctgccagaatttattttttgtcatagcttcttgcatgtatgcaggccaggaaatgaatgttattgtaataaagtgtgatggaaaatccaggtaattaaaaaataaattataactatgttcttccttttgttttaatcaatttcagaagtgattggttctggcctattactaaggaaagggacagttacagaacatggaaaaggagggaggcaagtgaaaatgtatggtcagggagaggaaaagtagtagaattgaagggtagctgaaacaaagaaggatggtactaataccagggtgagttaatgaaccaaaattccatttttgacccattcagaacttctctaatggtcctcctagaaggtatagcattctatttgagaagtttattttgtttgattttaaagtccaacatatttacaagataatgtta

SEQ ID NO: 480013 - DNA, 2301 bp, Homo sapiens
ctccttgcctctcacatccggctaagacgactgaagtttactcaaaatgtaccaatgtccagtattgaacacaatgaaagggttgccagtgcctttgtcattgccagaaggaattaatcctgaagtctgggcaacagaaggacaatatggacgagcgaagaatgcccatcccattcaagttaaactacaggattctgcctcctttccctaccaaaggcagtactcccttagacccgaggccgatcaaggactccaaaagattgttaaggacctaaaagcccaaggcctagtaaaaccatgcaatagcccctgcagtactccaattttaggagtacagaaacccaacggacagtggagtgaggaacgtattcagcctataccagcttatcctcatcccaaaaccccaaagcaattaagagggttccttggcataacaggcttctgccgaatatggattcccaggtacagcgaaatagccaggccattatacacactaattaagaaaactcagaaagctgatacccatttagtagaatggacacctgaagcagaagtggctttccaggctctaaaggaggccctaacccaagccccagtgttaagcttgccaatgggacaagacgttcctttatatgtcacagaaaaaacaggaatagctctaggagtcctaggagtcctgacacagaaaagaaaggaaagggaaatagaagggaactgccaagcggatattgaagccaaaagagccgcaaggtgggaccctccattacaaatgcttatagaaggactcctagtatggggtaatcccctccaggagaccaagccccagtactcagcagaagaaatagaatggggaacctcacgaagacatagtttcctcccctcaggatggctagccactgaagaaggaaaaataattttgcctgcagctaaccaatggaaattacttaaaacccttcaccagacctttcacttgggcattgatagcacccatcagatggccaaatcattatttactggacgaggccttttcaaaactatcaagcagatagtcagggcctgtgaagtgtgccaaataaataatcccctgccttatcaccaagctcctccaggagagcaaagaacaggccattactcaggagaagactggcaactagattttacccacatgcccaaatctcagggatttcagtatctactagtctgggtagatattttcactggttgggcagaggccttcccttgtaggacagaaaaggaccaagatgtaataaaggcactaattcatgaaataattcccagattcggacttccccgaggcttacagagtgacaatggccccgttttcaaggctacagtaacccagggagtatcccaggcattaggcatacaatatcacttacactgcgcctggaggccacaatcctcaggaaaagtcaagaaaatgaatgaagcactcaaacgacatttaaaaaagctaacccaagaaacccaccttgcatggcctgctctgttgcctacagccttactaagaatccaaaactctccccaaaaagcaggacttagcccatacaaaatgctgtatggatggcccttcctaaccaaggaccttgtgcttgaccgagagatggccagcttagttgcagacatcacctccttggccaaatatcaacaagttcttaaaacattacagggaaccttcaaactctgtatactgccaaaggaacccgaaaatccaggagacaacgctagctattcctgtgaacctctagaggatctgcacctgctcttcaagcgacaaccaatcgaagctgtaaaactacaaatgcttcttaaaatagagccccagatgcagtccatggctaagatctaccacggacccctggaccggcctgctagcccatgctctgatgttgatgacattgaaggcacggcttccgaggaaatctcaactgcacgacccctactacaccccaatttagcgggaagcaattagagcagtcattggccaacctccccaacagcacttactctaagcgatgtaactcaggaatggaaagccaaacatcctatctatgtccatgaatatttctcccttcacttcttgtatcattttttggactacctttctctggtccctccctgattagcttaataactaaccttctgaattctttttcagctggggtagagtgacacaagcacttctgtggccaccaccactcgtattacactgtgtcagacctgaagccagcacagcactgggtcttgctcaaggcctgctgtgaccactacctggctacc

SEQ ID NO: 480014 - DNA, 514 bp, Homo sapiens
agccgcacctccctgctgcagccggaatgatgaccgcagctactgccatcaataccaacatgggcgaagagattccggaattacagaggccacaaggagaagcatatggtctgctgctctgtgaacctctgatgaccctgtatttatgtgaatgtctggggaaattcagacatcagcatgagtatactctagtgctggcccagagggatgccactctcccctgcttcccaagacctttagccacacgaaaagtgctgcattgtacagtcatgtacaaagttccctttgaaatcatgtattgccgaacttttgttttagggcctacacccttagcagactctgagccactcgggagttacctcccctccttaatccagacacggtattttattcgtgaagcagtaaatgaggccatgcctctccctgtcgacacctccttgtcctctcaacataactgtcttgcaggcacagatgtgtttatctgccagcccgaccctcaataaaagctacaacc

SEQ ID NO: 480015 - DNA, 1618 bp, Homo sapiens
ggagaaactatgggtcaaggtgtaggaactggcccgtggggagggaagactaagtcggcctctggcaggaagtccaggcccaggaagttgtagggtggggtcttggtattctcccagtatgggcgggactggaggaagccaccaaccaacgaagtactgggcctgtgggtattcgtctctctccccgcccctgagagtctgggaaaggctgacacgtggtgccttcaggctctggggcctaggacctttgtggtagcagagtcactgcagagaaccagacaataccaggttgcttataaaaggatgccatgtgcttgctggaggtcccaggtgcaaccaaattgcttgcagctaggaggaccttgaagagaaatgggatcagcccgccaaaccaagaagggttagcacttttgctaggagagctgaccacgcacaaacagatgagaaccaaaaccgagtgaagaggattgaagatgaacccacattttaaaagttcttgtctgctggaggtggcattacctgtgacctcgcttcacttctccatacatggctgttatagcagaaaatccagctttctgaagcatatttcacgacatatgatgagacttatgtgatgtgagacctgagaaaactatgatagaaagaagcaactcaagttgcaaggatattcctcatgtatcatgcaaggatattcctcatatatcatattgtgtattctaagagatttttcaagaagctgataagatatttgtaatttgagagtcaacccagaacaaatatgtgcagaagaaattgttggtgaaaacttgatttgttggctatttgagacctaatatatttatatatttaactgatcacagaaaacaggtgtattcaagacacccacattttaaaaatccttatctgcttcagtgggcattacttgtggcctcactgcacttctttgtacaaggctaatgtgtctggttattttgtaaacaggcctggattcttgagtcttgaatccagaagcagacaacgtgataacttgggaaaatactggagatgtatgctgacggagagattgaacaggccctgacccgaaattgggcttccctgacttctctgaattattccgggagctctgggcaaagacttgatgctaatatgacaaaggtgatatccaagtgtaaaaacctgttgttggcgaggccggacagagccaacagctgccagaagtccgggcacaggaagttgtcgggtggggcttccgttgaggaaaactttcagggcccagtgcagggcttgtgcccattgtctcctgttcctgcccctgtccctcagaagatggttcaggccaattcaccttgttctggagccatagaacctgagctccttatccttcttgctctaggcaacagaggcaccagacttttggtgtccctgagacctccagctgctgttagatgccacctcgaatgagattcatttccccctcctcacattctaactcatgagataaatccaagttgatcatagtttattgtcttttacagaactatggattaaatatgctcatatctttcaatttttaagtcttcacttataattgaagtgagtttgtatttttctcttcagt

SEQ ID NO: 480016 - DNA, 807 bp, Homo sapiens
ggtttgactttgagctagttagttaacctctctctgctcaggtttccttacgtactcaatgaggattgtcatagcagcagcaagctgcggctctcaggcagcaatgtgatcatgagggtacacaactcatacccctatatgagatatttaacattttattataaaacaggcttcatgttagatgatttttcccaatgttacattaatgtcaatgttctgggcatgctatggagttcgctgattaactctcttgaacttccagattgtttcacctcaccatttccagtaatccacggaaagtcacatcctgcagtgtatggaatggcacttcatttgaggctggaagaagtggaaaagccagaccttgtgctgaagctgcataaagaaggatctgctggagggagtttggatctcagcccaggagaggccatgagcgttgttgatatttggagacaaagtgatagtggtgacagccagacatctcttttgagcaagcagccaagggtctggcaggccaaggactcctcttgtgtaaacagaataggggtataaattcaggctgacgcagtctaccccttgatacaataatttggagccatcattttatgagaacaacatgtcctcatttcttttcttggatgaagaagcaatccttcaaattggtggccagttacactctcctaaaaaggcttattgaatgaggattattatgccaacataaagttcctgttactatactgtgtcccagaaccatattgtttacatatttatatttattttttatttttattttttaaaatttacttt

SEQ ID NO: 480017 - DNA, 543 bp, Homo sapiens
agctgccttgcatctctgatcatgaaagacccagtgaaaatacagttcatcttatcccatctagaagtgtgcttcctgctgacagtggctctctacccaaaacaggctttttcatggctttctgtgatttttccaaggtgcaaccctgaatctttcactccctgcctaaagccctattgccttcaggaaaaagtccgactctttaagctggcttatagggccatccatgatctcatccctgcccatccagatttttctccttccaatccctttatacagcttcaagaatatgacaacctctctcccatctcttttcctttgcacaagctgttctctctggatgctcccctcctctgtctccaggcagatttagctgttttctcctttctgctctcacaatactttgtttatatcttggaggtctaacatcacaaggttttgtaaattgttgctaacttgtgtatctccttcactgcactgttaaatctttaaaaaaaaaaaaaaagaaatagtattaccttgctcatcctttcaatctttagc

SEQ ID NO: 480018 - DNA, 1280 bp, Homo sapiens
ttttaagtgtttttcaaaagatgatgtttattctttgtgttggaggtggtggttcttcctttgcttctccttctctcgatacctccccttccttcctcttcctcctttttctcttcctccttaattttcttggctattctaagtttgttgatttttcatacatgattttacattgccttatcaattttttgaaagctgctgagattttgaatagtattttcatgagtgcatacatcaaatttggaagaattgacatctttaatgatattaagtcttccttccatgaacctggcatattaaatttatttaggtcttcttcagtttccttggcagtattttgtagttttcactgtacagatcttataaaaaattttgtaaaatttatccctaattgttttctctgtttacatgctgttgtaaatagaattatcttcttaacatcatttttcatttttttcattgctactatacagaaatataattgatatttgtatattgccctattgtccagtgaccttgctaaattcacctattagttctagtagctttttggtaggttccttgaaattttctgtcgacttcatctgttgtgttgtttatatctttatataagtactgactttctgcattttctgatttactttgagaaatgtgttaatttttcatactacagttgtagatttgtctatttctgctttgttacatgaacttatgtgttatgtatttaaaaatgtgaaatttggggggaggggggagggatagcattgggagatatacctaatgctagatgacgagttagtgggtgcagcgcaccagcatggcacatgtatacatatgtaactaacctgcacaatgtgcacatgtaccctaaaacttaaagtataataaaaaaaatgtgaaattgtgtgcacaaacatttatgatttttacatctccctgttgaggttgtattatgcccctacgaactagtgatttttgtatcttccatttaattctttcttaatctttgaattctgttgttgaattcctttgccattatgaaatatccttctttcccattgagcattttttcatatgtttatttaccatccaaattatccttttgtgatgtctgttaaaatattttgcctattttattgttataagagatctttatgtattttgtgtacaattcctttatcagatatttgacttttatatacttgctcctaatctgtgatttgccatttaactttcttttttcatttcatttcattttatttttaactgacaaatagtaa

SEQ ID NO: 480019 - DNA, 676 bp, Homo sapiens
ctgggtgggtcatgttaaggaagcataaaggaactttggagagaagtgaaacaaccactgacctaccacccacttatctcgaagtttctgtgggtcagaagtctgggcacagtttagcaggccctctgctaaaggtcttaaaagagaccttcaaggcagtcaagagcatggaaagggtattagtggaaccaaagctcagtacttccagcagtgggaaggagaatactgaaaagctgcataatcctatatcaaggagcaaggtgcattctggctttgtattactttcctatgaagtggtagtttctggtgcatggaaagctgccctggagcagtggctgcaagggccttcagctgtcataggactcagtgtagacatcagccatcaggacccctaccctggttcttgtaccttagaggaccgcctctggccccatcaggcaaaggagttggagttggacataactgaatttgaagatagatattgcctggttccattccccgtgattgatctatactgacatagtttgcaaactaagagcacaacatcttgtgcacttaatatattctaatctggttcatctacctgatctgattaaaaatccaatatatggagaaaatgagaagtaaagcagcaaaggggaaagtaaaaagcaaatttcaggattgtggtggaata

SEQ ID NO: 480020 - DNA, 1839 bp, Homo sapiens
cccgctgcagtggtgagcccagccagagggaggcggcgtctctggtgcatgctcacttccctcttctcggcccagctcagccagaacctcaagggccccaagggagccacagtgaaggcccttgctcggcctctgaagggtcttttgtgtcctcatagtttgggccctgtcccctctcgcttggacgacggccccagcctcgcacccatcctccacatcaaggccagaggaagtgtccttgcccagatgcctggccacttctcctctcagcccccttcagtggcccctcgtggcctcaaggacaaagtccagctccacggccctgagccatctggctcctgctcgcttccccggagtcctctccccgacttcctccaggcccacattccagccccaactcgcgccttgcaatgccagtgtgggaaaggcctctgcccccaggatcccgcagccagcctggccagctgagccagcctaaggcagaggagggtcccccaactctccttccacctccttcagaccatgtggctccacagttggccctggggggaggtgctgccttggctcccgccctgccgtgaaggtggctcacagccccctttggcctggtcttttcccactggctcagtcctttgggggactcgctcacttcccatggacagcttggcttcaccctggacttccctgctgggcctctgggggcctgctgctgacctgtccccaggagggagctgcctctggcctggcaggtgcccccagcacagcgggcaggaccacagctgtgggacggcgcttgctcccctgtgccccggctacctcgcctgcccatcgtgggccagcctgggacaagaggagaacgggagactggagctggggggcagccaggccagccagactgggagggggtggccgggacccagggaggagaggggaactccccgctcccagaccccccgactcttcctccccagcccctcctcacccaccttcacactccagctctttctcctcccttggctctgccaggggctgtctcaccccctggactgctgacctgccgggcagtggccgctttgcaagtggcttctgggccaatgcccggaggggtggcgcgagaagactgaccaagaggaagagatttggctccagggcagtgagtggaaggctctttcccccgggtaccccgtctacccttcaaagagggggagggtacgccagccatgcctcaacaacagtcgtccatttcagaggctgcccagaccaccctctgctccctgcaggaaatactgaacctcttcattcattcattcattcattcaacacatattgaagcacctgtgctggtgatagaagagtggactcgaccaagtgtctgtcgccatgactttgatatcctagctggggagtcggaaggttacctgaatgaagaaggatgcctgtcattagatttggcaccccctgccccccgtcatgtaggcttactgtcatcacatctgcagataccctctttcctaaaagggtcccactcacaggctccagaatgtggacacatcttttggggaccagcacaccccgacaggcaccccatttctgaggacagcagcagatgtgtgtttttgtaagaaactgccaactgctttcccgagtggctgcccggtttgacatatccactagcgatggctggtgatgctgagccccttttcgtgtacctcttgacgacggtggggcaggaatagccagatagccatgtgagtcttctttctatacatcacccttcagagtcacaagccagtccccaacaacttctgcaagtgacccacaattaagaatattctgact

SEQ ID NO: 480021 - DNA, 1089 bp, Homo sapiens
tgggaactggacagtagagacatctggaagatgccaccttaaccacatgatcaaagtgatcatcatcagcaatgggacaaggggactggtgtcgtggcctcctgatgccatacacagagagggaagcagcacttctgagctattcccatggaaagtgcaaaacctggatggaatcatgaggaaacatcagccaagccccaacacacagaaatgctgcaaaatcactggcccatatgctcctgaaaactgtcgaaaaccacgaagaacaaagagctggtccagacttaaggagactaaagagctaggtcaactgcatagaacgtgtgatcagaggtgctccttttctggaaagaacattatagaaaagatattattggcacaatcaataaactctaagggcgtgagcagctgcaaacactggcctcgcctccctagcatcctgccctggaagttcttcatcctctttttgctctatgatgccttcaagcaggatgagattcagctacacagatgaccaaatatatatatatatacccatacacacacacacacacatacatatgtatatatgtatatatatatgtgtatatatgtatatatgtatatatgtgtatatatgtatatatatgtgtatatatgtatatatgtgtgtatatatgtatatatgtatatatatgtgtatatatgtatatatgtatatatgtgtatatatgtatatatgtgtatatatgtatatatgtgtgaatatatgtatatatgtatatatgtgtgtatatatgtatatatgtatatatgtgtatatatgtatatatgtgtatatatgtatatgtgtatatatgtatatatgtatatatgtgtgtatatatgtatatatgtatatatgtgtgtatatatgtatatatgtatatatgtgtgtgtatatatgtatatatgtgtgtgtatatatgtatatatgtgtgtgtatatatatgtatatacatatgtgtatatatatatgcaaacgaatgggggagagggagggagggaaggagtcctacagacctaacaagaatgggtgattatttgtaatagcaaagtactggaaacgac

SEQ ID NO: 480022 - DNA, 1700 bp, Homo sapiens
agccctagggaactgatctaccttcttaggcagaggatgctgactgtcatttcatggttgattgtcggtgtcaagctagggatgcggtccattcccattgccactgcttgcaccatttaccataagttcttttgcgagaccaacctggacgcctatgacccttacctgattgccatgtcttcaatttacttggccggcaaagtggaagagcagcacctgcggactcgtgacatcatcaatgtgtccaacaggtactttaacccaagcggtgagcccctggaattggactcccgcttctgggaactccgggacagcatcgtgcagtgtgagcttctcatgctgagagttctgcgcttccaggtctccttccagcatccacacaagaactggctgaaccgccacagctggcagcggacccctgttgccgtcaccgcctgggccctgctgcgggacagctaccatggggcgctgtgcctccgcttccaggcccagcacatcgccgtggcggtgctctacctggccctgcaggtctacggagttgaggtgcccgccgaggtcgaggctgagaagccgtggtggcagatttataccatggacacagagatcccctaaggtcctggcccaggcctgcccaaagagaagcccaggatggtcggctgcctggggacattgtcaccacgtcgccatgacggctggtccccacaggaccagctgggaggactggttgtgctgctggagaagggctggagaaggcaatggcatgctgccgctttgccagtccctagaagtcgcggtgcaggtgatggtgggagccgcgcctccagcgggcaggccgggagtgtactgtgtgcagctgacccaaggcagccacatctgcgtttgtcctttgagaggactttgactacaatacaggcatgacatcaatgaaaggaaagtcatgaaatcgatgagactgaatccctacggatttcttaaaagccagatttgtagggagaatgaatgtgcaacgtggctgaaatctattttgtgtaataaaaggtgatacaagtcaatagggacccttggctttgctctgcagcgcatgctgcacatgggggtgtgaggggccctcagagactggttccctcagagtgctctcaggtagagtgtgtcccagccatcaggcggcaggcctggggttagggaggatcacttgcattcagaaaagtgagtcctgatcgaacgtaactaaaagtaatgcgtttttaaatgtcaaggtagccagtctggatggggaggctggagaaactcagagctgtggcccccagcacccctctgactccttgctcaaaagccagtgggtaagaaatagaccagtccaggaggcgctctctaggtcccctttcaggctagacgtacgttcagcacgtggcgtagggccgggggactggtaggtttacacaggagggtgggctccggctcctgcaggtgtgggggcaggggtgatgcaggtcagggcagagtcttgcttgactttacagagcgactatgttcagtgtcttcagaatgaagtatctgagcagatgtcacaggcttccctggtgggcaggcttgccctggctgacctgcccttcatttcgtagaactcccctgtgggttttgatgattaacttctcctaaatgtgggctcctgctttacctgttgtaagccttttaagact

SEQ ID NO: 480023 - DNA, 526 bp, Homo sapiens
ccaccctggcgatggcactaagaccacactcccctcatttcattggacttctcttccccttttcgacttggcagcaccggaagacgcattttccaggaaggctgccaagagaggagaaaaatggcttcaaagtcattcaaagcatcagagtccatgcttctaaaactggcaaaaagaccaatcaggccgggcacgctggcccttcatggagagacatcatgctaccccaaaagaatcgcaaatttgtgtctgtgaatcccttgtccacaagcttctgcttcaaacatgacacaggttccacaggggaaaatcggaactcagtgaaacagctgagtcctgggagtaaaggcttgcgcaggggtctgggggaggcccgtgtccaagtggtctaactccagaacccactcttcgtttcttggaatgttaaaatgtatttgaatgctaaaatgtgtcttgtcttgtctttcctgtgtcttgtcttttgtcttgtcttgtctttcctgtgtcttgtcttttgtcttgtctt

SEQ ID NO: 480024 - DNA, 642 bp, Homo sapiens
acagctatgatcttactacttgttatttgccagttcagatatttgagaggacttgggtgttgtgatctaaggtgtatcaactttaagaggcaccataagcccagtgacactgtggtttttgcagacccatagaggtacgacttttatggtcttggaccaaatccaggctcaccaaggccctcgacatagtacctgggtatcactgtttgctattcaggacccaagggctcttcagttagcaggtgatgagtgctggcaagaccggattcttttcttcaaggctgcccagattcctgagaactgccaggaggaaaggctaagtctgctgctccacagagactgtggttacccctcctcctatgggctcatgcccagggacatcagggtcctgtccctgagcctctggatggagttgttcaagttcctgcagggaggcaccacccagcctgaagaggtggtctggctgcagtctgccacagcaggtgtgttgagctgtggggaaaacctcttgggaccaagccatctatcctccctggctccagcaggggaaaagagtggcctggagctatagagatggatgccaccttccccccaccccatcgcatagggagcttaagagtgttaggcagttatgagttttgt

SEQ ID NO: 480025 - DNA, 658 bp, Homo sapiens
gacagcttagtttacactgtgagggtaaaaccgcctacttaagcctcagcaatgatggatgcccctccccccacaaagctggagcatcccagtcgggcccctcttctgaaggtctgctggagtttgctggaggtccgctctagatcctgtttgcctgggtatcaccagcggaggctgcagaacagcaaagattgctgcctgctccttcctctggaagctttgtcccagaggggcacccaccagatgtcagctgaagctctcctgtatgaggtgtctgtcgacccctgctgggaggtgtctcctcgtcaggaggctcagggaaatgtggtctccgtcttcagacctccgaagagctgtcattgtaacgaagaagacaaggtctgctgtggcctgaatgtgtcctcccaaattcatgtgctaaaacataatggccaatgtgatagtattaaaagtatggagcccttgaagggtttagaatatggctgcaacatgatcaggcctgtgtttttggaagtttactctagctggcaggattggagcattgagagactggaacagagaaaccaattaagaggatcaatgagagaatatatgtgaaagcacttttcagctgtaatgcactatataaatatgagttattatggttataactcacatc

SEQ ID NO: 480026 - DNA, 1046 bp, Homo sapiens
cggtcctcggaacccttgtttcccagagcgtggtgtcaagctagggatgcggtccattcccattgccactgcttgcaccatttaccataagttcttttgcgagaccaacctggacgcctatgacccttacctgattgccatgtcttcaatttacttggccggcaaagtggaagagcagcacctgcggactcgtgacatcatcaatgtgtccaacaggtactttaacccaagcggtgagcccctggaattggactcccgcttctgggaactccgggacagcatcgtgcagtgtgagcttctcatgctgagagttctgcgcttccaggtctccttccagcatccacacaagaactggctgaaccgccacagctggcagcggacccctgttgccgtcaccgcctgggccctgctgcgggacagctaccatggggcgctgtgcctccgcttccaggcccagcacatcgccgtggcggtgctctacctggccctgcaggtctacggagttgaggtgcccgccgaggtcgaggctgagaagccgtggtggcagttgccatttaggggtcccggatgtcgaacaggagtgctggcctccaccgacgtcgccggtgtcccgggaggagggttgccccagcggagaaccgcttttactgaattgagtgggaacttgactgtgatcacaggttactaaacctggcttcccatcagaaacatctggggtgctttatggagagggctggatggctaggtggctggtgctgttctgcatagaggtagccctgcctctcttccctggcccgtgtgccttgtggaagaccacagcatttgctgatttttgcgtgtttattgtgtaatctcgtatccccagtcagctccttcctggaaaatgcgtcttccggtgctgccaagtcgaaaaggggaagagaagtccaatgaaatgaggggagtgtggtcttagtgccatcgccagggtggtcattggcaagtcttggccacaggattgccttcctggctcttctgggctcaagcagggatgggaccatggagca

SEQ ID NO: 480027 - DNA, 572 bp, Homo sapiens
ctctgtgagacacggatgcgcgtgcgcgcgcgatgcggggcgcagggtgcagggtgcggggcgctgcccgccggcctggggccccggggtgacgcgcggccgcagtgccgcaaggacacgcaggcccggcgcggggctcaggtgcctcgggcggggacccgtgtccccctacctgccgccgcaccacctgccgggtcatcctcccatccccacccgcgcctgtgcccgcgccgcgcccgcgcccaccccggcggcgcccgcgcgcccagagcaccacttacccgggcatgggcacggccgccgccgcggcctcggctccggcgggcgctgtcgctgcgggcgggcgtcaggcgggcaacgatccgctccaaggatggaaaggcctgggcacggggcggcctggccggcggcgcgggacgcgaccctctgcggcgggcgagggctgcggccgagtagaggctctgggcgggagcctgaggcaggtgcaagaggcctggacgcagcctcaaattctttcttgccttggacaaagagggccctggacatgctgtgtgccagaccagagctgaata

SEQ ID NO: 480028 - DNA, 643 bp, Homo sapiens
aaggttaaagcatctcatctgtcttgggggggcaacaaaggaagggaccttattaatggttgtagggtcttttgctcacctgctagagcctccaccccagagaatgcagtccatgggtggaaagggcagttccactgccgaggtagtggcagagaggctttcagttgcccctggaggctttgtccagggagcttttgaccagagaacaccagttggggtaacaggagaccctggttggaagtccccacctggttatgaggaatgggatgaagaacccactgtgcaatgctgctaccggtggctggctggaattccaagccagggagtcttatcctgcaagttcctgtggaagtgggatttgcaggctttcactgctcagccctttgattcagcctctttcctagaggttcatcaaggtgaacctgtcactggaatgggtcctgagcttgagtctgcaggctctggcaaggtactgagatgagcttagtgcctgaaacaactggcataggcttggatcctgagtccataaggactggtccggtactaagtcaggccttgaaacttattccatggaggtgggtgtaggtcctgggcacgtgagagctggcctgcagactgggcctgaagaggtggtgttagagcc

SEQ ID NO: 480029 - DNA, 1081 bp, Homo sapiens
agcttctgtaaacagggctgcaacaaacaaaggagtgtagatacctctttgatatactgatttcctctctttttgagtttctctctctctctctctcctctctcctgagccacctaaagctgagaatagagtgacacaagcacccctgtgaccaccaccactgtgactgtactgagtcaaatccgaagccactatgggggtttcacccaaggcctactataaccacttcctggctactgcttatgttagctctaggccctgggcctctacaatcagccagcagtctttaactcttcacctgccacattacccagagatgagcgtttctgaagttcatctaactgatgaattaacaagacatcagttggtgatccagacttcaagagcctgggtggaaggtagaccaattttaaaggagaggccactgatgcctggctctacctcaaatcatggacttcacacttcatacaccatcactgtgctccccagctgccttaggtgcagttctgacaggcctcagagcagcatgcactgtgcccggcaaagctgtggtcatggctgcctccacatagattttaaaggatgcccccagagagctgtggagctcctgtaggaaaccattgtggagttgaggccaccagagagaacccacaccagggtaaggcccagtggagccatggagtggggctgcccccaagactccagactagtatagtcagtgccgtttgattccagattgagagagccacaggcatgagactcaaacctgcaagagctgtaacatggactgcatctagtaaagccaagtgggtaaggccgcccaaatctgtagatgtgggaccttcactccagtgtgtctaaaaggtggaacgcccacccttgtgggcatggagggcagcacattgagtcaatgaagactattcttgagccttaagatttaatattacttgccatgctgaattttggactcatttggcacctttcactgcttccttcttttccagttctcatttttggaatggaatgtctgtcctgtgccttctctaccactgtattttgaaagcacatattttgtttgatt

SEQ ID NO: 480030 - DNA, 786 bp, Homo sapiens
ttgaagaggtggaatgggacaaggccatgagggcctcatacgctatccaaggagtttgaattttatctttaagatccttgacacaaatgaaaatgttccacagttgtcctggggcagtatggtcattttcacagtattgatgagtatccatgggcatggatgtgtttccatttgtttggtctttcgactcattggggacccagagagctcccagggcctttctgcttcttcctctacccctgtatttcacttggctctccaaattgactcagctccaggcccttcttctgcaggtctgctgcagtttgctggaggaccactccagacccttttcgcctgggtatcacaaatgggagctgcagaacaaaaaagattgcttcctgctacttcctctggaagctttgtcccagaggggcactggcttgatgccagctggagctctctggtggagcagaaaattcagccagccagatcttacctgaattcctaaccaaccaaaataataaggtataataaagtggttgtgttttaagttacaaaagcattggagaatagtttgatacacaataatacatagccagaacagtcagagatatgcaaagataaactgggctgcttctgatctgcctttggtccttggaggccaataactcttagatttgcccttttgaagatattttatagatcctgtaagcatgcttcatctttttattcttttctcttttgtgtcctctgtgtattttcaaatagtctgtcttcaagctgactaaatctttcttcttcttg

SEQ ID NO: 480031 - DNA, 859 bp, Homo sapiens
gtttaacagacctaaaacgtgcagagaactaaccagacaccgtgaatgatgggaggtggagggtgggcaagggatgtatccccactttctggcctttgacacaggcgcgtcgcgctcttcagctgaccgcgctgccgcctccaccaccaatgtgtccacacacgcgagcaatatcccaaccaaccttggatttcactccctgctctaccacgtggagcatgaccctttggaaaatgacaaactccaggtgcgatcccctccggagccgcggtgcgctgaccacttcgaccccagccttcagagcagcccagacagaaagcggaagtgcctcggggcgcgtggggagccaggccagacgcccctgtggggcgggcgcggggcgggccgccatccctctgcgccgcgcatgctccatgccccccccacaacgcgccccgttcccacgctgccgccgccccggccccgcccgctcccggcccgctcgtcggcgcaccagactgagactccccttcaggacgctcttcgcgagcggtacccagaggcgaagtcgagacaagcccaggagcccccaccccccgcccgcgtttcctggggacgcggcctcggagggcttctaggaggaggcggcggccttggcctcgggcctgccgggagcaggaagggaggccgactccctcggctgcccgccgagcccagccaccggtcccgaggctggctaaagagcatcctgtcgctgatctgcctggtgcttctgtcctcagatgcacggagtagtgcccacctgggtgttatttgagttctatgggcacagggtttgtcgtgtctttctttccaggagttgaaattgtagatgattttc

SEQ ID NO: 480032 - DNA, 1576 bp, Homo sapiens
gacaaaacaaggaggcagaggaactccagccctgccccctcacccccacacacgctgtgtcggagactgcaacagtcagcacacattcctgattgatcaggctccctccctcaagtcctctgcgatggctctggcgatgcttcgggactggtgcaggtggatgggtgcgaacgcagagcgctccctgctcatcctgggtatccctgatgactgcaaggaacatgagttccaggaggccgtgcgggctgccctgtcgcccctgggcaggagggagcagccaggctgcgaggaagagtcctttgagagctgggtggagcatgccaaggatatgctgcagctgtggtgccatgcgtcggaaagggagaagaagaggtggctgctggagagcttgggcggcccggccctggaagtcgtgagcggcctcctggaggaagataccaacttgtccgcgctggactgcctggcggcgctggggcaggtatttaggaaccaggacactcgaatgacttcgaggctgaagttcctgacctgcacgcaggggccccaggaggggctgtttgccttcgtggtgcgcctggaaggcctgctgcagagggctgtggagaagggggccgtctgcccagccttggccaattacctgcgactacagcaggtgctgtcttgggcccgccccagcgaggcactccaggataccctgagagggatgcagctggagaagaggccacctggcttcctggggctgctccggctcatccgggagatggaggcatgggcagccttcccagcgaggagccagcagggtgtggcctgggcagcggccccagtggagagtgaagacccagctgctgcccaggcctccccagcccaggggaatgccagcgaggctggtcccggagcagaagatgctgccgaggccgcttctgccaccaaagaggctgcaaggggagcccctgccgctggggaaggtgaaagtgcccctgcaggccccgaaggcctaggtcaggcaaggcccatagaggtcccctggggctcctccccagcccggatgagcagtgctgtctgggtgttcccaagaggtcttagctggggtccagagggcctcatccaggtgagaggccaggaagccaggaaacccccactggaggggctccagaccatcttggaggagccggaaaacgaggatgaggatggggccggggacgagggccagcccaagtcctcccagggcaaataggctcctagggccccggggcctcctctcctctcaggcagcagcgccttggaggcagacagaggccaggccagggccagtccctcaccccacattcaggagtaagggccccccacctcccccaaggggctctggtcaccacccccattccttccctgtgacccggatgaccacgtttgatacaaaatggggtggggagaggcgcccccccgctcccttgcacccagcacacccagccccagccccaaaccctgccgccacggggggctggcctggagggagccctgagtgggcagctgtggcctgggtgggggcacctgaagatgtctgcccccaacccaggcc

SEQ ID NO: 480033 - DNA, 581 bp, Homo sapiens
cacagcagaatcttcaacaggccattttatcattggccagatcaacggctgcctacagaatgttggaagagcgggaacagaagtacaaccttaggactatatctattctctggctcactgtcataatccacgttgaatggagcttgattgttgtgaatgttgtgctggtttattacactgatgacatatgtactggacctgatgatctagagagcctgaacctcagcaaagtttttagatggtctggaccacgttgggtattcaacatgttgttgtaccgcttaccacctaccactcagaaagaggcacggcatttggtgtggatgtttgaattttgtaggcaacatatgctacatttaattgtgccgcaccaatgcactcagcaagtcatctgtagggttgcatgttttcggggagagatccagggcaagaaaaggctctgtgacaggtccaggccacttgacccttatgaccatgtagattcaacaggtacaggacctttgacacactgggaggctacacggagcctctggcaagtcccagtaggagaaacacacagcaaagccctagagttttgaagt

SEQ ID NO: 480034 - DNA, 850 bp, Homo sapiens
tttcgggtcacaacctagatacacctttatcagcgcctgggaatgttcaagggaggcaaggacggaagcagaaagacagagatgatggtgggtagcagtggaggtggtgtgaagtggcaggattctggatacgttttgcgggagtccatggaaccccagaagctgctgataattggatttctgctatgctctctaacttgcctcttgttggagacagtagcttcctctcctttgcctttgtctgccttgggaatacaagaaaaaacaggatcgaaaccacgctcagggggtaatcacaggtcctggctgaacaacttcagggattacttatggcaacttatcaagagtgccttacctccagcagccattgttgcttttcttctcacctcagcactaatggggatcctctgctgcttcaccattcttgtagttgatccagtccactgaagaactagaagattcaacagggcaagtgtggtctctccagttggactccaaaagagtggggcatttgctatctgcttaaaatgaggaagtatctatcagttgaaattaaatcgtcttccaacttgaatcatcctttgccttcattttctccttcaaaagttgcaattttaaaatgtgaatatccttattactgttttggttataatagtaatacatatttattgcaaaaaaaatttgagaaatacagagaaaagagtaagtttccataattctagcaaccagaaataaacatcattaacatcttgatgtacctcccttcaatttttttctatatatgtattacaagttttccaaagtctgttctgtgaaacaatagttctgttttaataaaagtcacaaaaca

SEQ ID NO: 480035 - DNA, 498 bp, Homo sapiens
gttaccagagagactggggggccacattttgctctggaaagggaaagaaagtccagtgattttcttcgtcagacttagaatgagtacaagacttttctatgctatatttcaggccattattcgcatcttccaaaatgaggaaactgaggcactgagagcgtacataacttccctgagatcatacaactgtgttagaaagatcaatctggctgaagtatcaatagactgtggggctagagtaaaacaggatcagtcatccagagagagggcagagtataatggcaaaatagaaggctccaatgattgtcccccttcacaaagacaccactataacaactatctacataaaaatagcaccttcataagaaccaaaaatcagagcagaaaggaaaaccagacccaactcagctggcagccacccacagcactgaaaccagtgctaagcgaggggaattgccaattccagcagccagaacttgagtttatgtgagcctcact

SEQ ID NO: 480036 - DNA, 1415 bp, Homo sapiens
ctcgggacaggctaaccaggaggacaggagccccaagaggccccagagcagcactgacgaagacctgtaagtcagcctttgttagaacctccaaggttcggttctcagctgaagtctctcacacactccctctctccccaggcctgtgggtctccatcgcccagctcctgcccacgctcctgactgctgccctgaccagagtcatcatgtctctcgagcagaggagtccgcactgcaagcctgatgaagaccttgaagcccaaggagaggacttgggcctgatgggtgcacaggaacccacaggcgaggaggaggagactacctcctcctctgacagcaaggaggaggaggtgtctgctgctgggtcatcaagtcctccccagagtcctcagggaggcgcttcctcctccatttccgtctactacactttatggagccaattcgatgagggctccagcagtcaagaagaggaagagccaagctcctcggtcgacccagctcagctggagttcatgttccaagaagcactgaaattgaaggtggctgagttggttcatttcctgctccacaaatatcgagtcaaggagccggtcacaaaggcagaaatgctggagagcgtcatcaaaaattacaagcgctactttcctgtgatcttcggcaaagcctccgagttcatgcaggtgatctttggcactgatgtgaaagaggtggaccccgccggccactcctacatccttgtcactgctcttggcctctcgtgcgatagcatgctgggtgatggtcatagcatgcccaaggccgccctcctgatcattgtcctgggtgtgatcctaaccaaagacaactgcgcccctgaagaggttatctgggaagcgttgagtgtgatgggggtgtatgttgggaaggagcacatgttctacggggagcccaggaagctgctcacccaagattgggtgcaggaaaactacctggagtaccggcaggtgcccggcagtgatcctgcgcactacgagttcctgtggggttccaaggcccacgctgaaaccagctatgagaaggtcataaattatttggtcatgctcaatgcaagagagcccatctgctacccatccctttatgaagaggttttgggagaggagcaagagggagtctgagcaccagccgcagccggggccaaagtttgtggggtcagggccccatccagcagctgccctgccccatgtgacatgaggcccattcttggctctgtgtttgaagagagcaatcagtgttctcagtggcagtgggtggaagtgagcacactgtatgtcatctctgggttccttgtctattgggtgatttggagatttatccttgctcccttttggaattgttcaaatgttcttttaatggtcagtttaatgaacttcaccatc

SEQ ID NO: 480037 - DNA, 574 bp, Homo sapiens
gtgaagacggacatgtttgcttccccttctgccatgattatctcacaaagtctttgctagtccaatttggagctctgaagcaaagattgcttggaggaggggtcccttttatgggactttctaagccattttaccctcgacttgctcagtcattggctggtggcctttctgagaagttgtgttcacctggaggactctcccttgcagagctctggggtgtgagattggatgcagggagggtgagcctggaggaattcttcaaagcaactctcacagacctatgtgttgatctaggtcctggttcaatagccctggttattgccccaagcaggactagaacaagttatatcatgtctatacagctcaaagatgtgggattaaacaatccaagaaaatatttggagcaggctacaaagaagtacgtaacacagcaagataaaatgcattacacacaaataaaacaaagggatcccagagataaatcaagtgagaagatggtggagcctgaagcaggcttagaacctcaaatatatgccaggaagtccagcctccaggaagacttccattgaccttt

SEQ ID NO: 480038 - DNA, 1422 bp, Homo sapiens
agtgaacagcaaggtgaagaaattgaatcatgccactgccctttatcatatcctgtctcccttctcactttctgtgtatgcctagatcacagcttcaggcccaaagcccacttaacgtttttctgctatcaaagtacactgtacccacagcattgtatccaaagaataattgggcttgcctttcacctggggaagctcttcatgagagtcagaggccagcactgcagaaaggacccccaggcctctcaaaaagtatcaagaaactgaaactcaccaggccaccacatctagacaatgagattccaggcccctcattcatcatgattgctctcttgcccctcccaagttcctgttttcccacacgtagttacatttgttccctgccatataaacttctaatttcagttggtcagagagatggatttgagactgatctttcatctcctaggctgcagcaaccaattaaagacttctctggcaatacttgtctcagcgattggctggctgtgtgaccagcaggacctagaccaaatacctggcattttggtaacataactagtctgttactctgggaaccggaactttgactaattatcaagtgtcgttgatctgtcccagatcactttcaataaaaaatgtcacagggtctctttaaacatataacttcatggagacaacaaaaatattaacttggaattactgaagaaacactatagaatgacagttttctaaattgttaagcatatatgcatacacatactgcaaatttttagtgctctgatactaatatttaattttcctgcagaaagtggtgtgtgtgtgcacgcgtgtgttttaaaagctttaaccacttgaggaaaagaacatttctatggtcctatctgatccacatttctttaatttgggtttaatttgggtttaatttgagttgtccaagttcttctgaaccttgttaaagtggcctgagctgttcttgccctgtgctgctctgccctaggggtattctatactaggtcccattatttcagcccctctgattaaatacttgctcaaaaatcattttcagtttggaatattatcagttttattcctaaagaattatggattctctcggaaacatctgctgtgcgttacttattacgttgggaatattttccatgtttcttcggccctttagctttctaattctctttcttgtgaatgtattttctacctagcagcctctgtccacactgtgtagaaacagtgttttaaataccacatatcctggtggagaaattaacttccagattgaatctaagttgtaatgtctgaagcttgcatgctatagcatttcctatttaacactattaaacattcccctctggctacaccagttcaggattttatttttatcctctgatgtgaactaagcttgattgt

SEQ ID NO: 480039 - DNA, 3042 bp, Homo sapiens
aaggaaccacttcaaaaggtgtcctatatctctcccctggagaaatgtacatcaaatacaccttgaaatacaaccaggaagctattagaggggccactgtgacaatgactgaccatgtccggggctgcagaaaatgtggagcagctggaacactccgacagtgctgtttaaacaaatattatttatcatctgtcaatattacaggcctgatggtggatagtggagatggggtcacttgcactgtccacatctatgagggttactccctgcctcatgcagtcactgagctctttgtagcagggagggacatcataaagcacctcacctggctcctctttgctagtgggtgtacttttccttgcatactctacaaggctttggtaaataacatcaacgggaagctgtgcaacatcgccttggagccacataaaaagctatgcgagaggccggagacatcctgagagaatacaaactgtcagatgggaatgtcatccacattggggaccaactgtatcaagtgcccgaagttctttttgcccctgaccagctgggaatccacagcccgggactctcaataatggcctccagcaacataatgaactgtgacactgacatccagaagaaagtttttgcagagattgtactgtctgggggcaccactctcttttctgggccagaggaaaggctcatgaaagaactggaacagctagcttccaaaggtacttacatcaaaattatggcttctgttgttcgatgcttctttgtgtggattggtatatccattcgtgacctctctgagcagtttcaaacaaatgtgggttacctctgcagattttagtgattatgggacatctgtggttcagagaagatgcttttaaagatccttgagctcagggaacaacccgataggtgagatcacagaagcaccagtgggaggtgccactgtccttaaggctttttcaggatgttgaataaaagtgttttcacattttatgtttctatatatttttctttgcacattgttgtaaatgttgtgcaagtatctatttgagtccccgctgaattcttttggctatatactgcctgggtttgattcctaaatcaagccctttcttgtttgatatttggtacttctgaaatagcagccatttgtcctagctgaaatatggaaatgaaatttaaaaatcttttcttcaagacgtataatagttaaaagtcagcttaattaaaaactaacatccaagatgtgcgtgtgtatgtgtgcgtgtgtatgtgtgcatgtgtgcgtgtttgtatttaaaaggccttcatgtctttgttttttatttacctcctaaaaccttgtctttttttgagcaaagtttttttcttctcagttgactgaattctgttttcttcatttacttctgctgtctctcctttcttttgcaccctctgctgcatgagggacctaaaatagtttataatagcctgagcttccttaaagaaaatggagaaggcaccagactccctttgtgaggagaaacatctgtttttccttatggaaccccaataatgtaaacagagaagtttatctcagttcttaaactgcttgattttgtattgcgttacctgatattttaactaaaatagttattgcagcagagcatacttgggtttttaaggaagagtgtagacacttagaaatgtctttgttaaaaaatttaagtgcactataaaagcatcatgttgtctagcctcataataattctccctttttggagacccaggattcagtgtgggctctgcccagagctcagtgatccagctaaaagataggcagtctctatctaaataaaattggtctctttataaaatcctatcatagatttctatacattttatgtttgacttggtaccaacctttaatctccccctgcaaccaccagacttattctttctatacattgagatgtaaattttgctatctgattttttatctaagagttgtttccttcaatatgcagatttagggctatttacttgacaactgacagagtaatgaaacaggtcatcaagagtttgctagtctaaggaaacaaaggaggttgtaggaatctataatatgtacttctatctgtatgcctaatacagctatgtatttatgttttgtgtacacaatgttttattactgaaaatatataaaagagatctaactaattggcttaagaaaataaaagtgcttgaatcaaatactttatcaggaaaaaagaaaagactagtcaaatgcttttttaagtttatgtaacttaagtaaaatcttttataaataagctagctttaaaattacttgttaggtaatattagaaatgtcttaagaattgccagcatacatttttgtttgcatttattaatcaggaaatttcatacttatccctgccaaataataaaaggtgtcaaaatttggcacaggggttacaaaactataaacccaaccccaaacaaaatatctttgtttgtgtaatttttataaataaggcattgatattggtttaataataatagctacattttgaatttagtaagattactgtaacttctaacattgtggctttaggtgattcagtccacaggcagtaaggtttgttatcctctctgtttcaaagctaaactataaactaaatttctcccaaagttagttcagcctacacccaggactgaacaaggacagcttggaggttaaaagcaagatagagtaagttatgtcaaatgtttttcactatctcacttataattttgcaatagtggttcaataacttcaaatgatgactattgcagttttcataaataatctaggtaaacaattaaaataaaataatgaagtaagtgtaatgggataaatacttgtggacaaatgtcataatatattaaattaaatactatacattttatttgagtatttcccaataaaaatatatttgtagaaaaacattctttctaaaaaaagtgtgtccttttaaaaaataatttaaaggtttttaaacgtcatgtataaaacaaggt

SEQ ID NO: 480040 - DNA, 644 bp, Homo sapiens
gattttgctttctgctatgacagtgcaggattgaaatgatagatccactgacagcttgcaccgtgcacctgtataagctgcagacactcaatgctagcccatgaaagcagccgggagggaggctgtactctacaaagccacaggggcacagctgcccaagaccatgggaactcatctcttacatcagcatgacctggatgtgagacatggagtcaaaggagatcattttggagctttaagatttgactgccctactggattctggacttgcatggggcctcctgacaatgtgatagaaaaggaaaactcatttttcaaggagaaattcaagctggctgcagaaatttgcataaataacgaggagccaagtgttaatctccaagacaatgataaaaatgtctccagggcatgtcagagacctgtgtgccagttcctcccatcacaggactggaggcctaggaggaaaaatggtttcatgggccaggcccagggtccctgctctatgcagtctcaggactgggtaccctgcatctcagttgctccagccatggctaaaaagccaaggtacagctcgggccatggcttcagagggtacaagccccaagccttggcagttttcacgtggtgttgagcctgtgggtgga

SEQ ID NO: 480041 - DNA, 2427 bp, Homo sapiens
cctaacaacacctgggtgtatttgagcttcatctgcagctggaatagggggaacgatgtttttggcagtagattctcatcccatttccaccaacacaacaggcccagagggaatactgccaggataccaccgatgctcacttaaggcccaagaactcttcaatcagcttgtagtgaatgctgccagacgtgggacttgcccttcagggaagtgggctcccctcttgcccacagaaggtgcagaaatgccatccaatagccaaatcctggaactggggactccaacacagaatgagtctcattatagtcaccacagttgggaatatgctgggtctcacctgaaggcagcacatctcaaaatctcacccaagacctatggcctactacctgagtatgactgctggttattcagggcccaaggatactatacaataaattatgtgagatattcaacactttattataaaataggatttgtgttagatgattttgctcaactgaaggctaattgatttctgagataaatagaaaattcttaccttatattgccatgttcagatgggtatcatagtatgcattttccatgtattttgcaaaactaatatttttgagtattaaaaaaattcttggaatatatgtaattattggggaaatgtgtatatgtatacatttttaagttatcaatttgtccatagtatgtttcttcaattattaaagtctttttatccccctttactaaaagtaaagccttttagtgatttcctaaactgctgaatattcctttgatgaatccatccccactgagagctgtcattttatcatttcagaactgactatggcctcatagtactgaattaaaaaaaaaatcaagcaatgttatattgtttttcctttctgtgcaattgtgatttttgacatgtctcatcaaaacattgaaaatttcacatgataaggcaaaagaaaatgtggactacttttcacttgctagaattagaaagtttacctaacctttctaaggaccaaaccaatatttttttttaaaaaagggaactggtgcttttacacaaagcaatgagagtcttgtaaaaaacaataatataaactaataaaggcagttttgattctgtcatatttatttcccagaactagtgccttttttttttttagtttttaaaacactttatgaaacaacttgaattacttttaaaggtcaccatttgcatttgcttttttaagcctcattcctcttatgtgagatcagcatgtgtgtccaccaagctttgattttctgtaacaaacatggaagaacactgacaattggaaggacttacttattcccaaatactgtatcatctattccactgatctgaggcattttctggttgaactggtacctgaatgctgagcatacagagggaaagccatttttccatttgaaaaatctgaacattacacaatagagataacaccacatatctgcagatgcctttctagtcaagctgtaatagctcttgacaaagaacagtaaacatcaataatattttaaagggaccaaaaagttattaaatccagagactgcagcttctttaaaccttgagtagcattttgcttggcattcaatacacccaagcttcattagtataaactcccatacttgagaatttaatagaatttgacaggatttcatctaaaatctcagctaattatgctaaatttaaacttcttatcatcttattaaaactaagactctatcctggagtttatattattaaactgattttctttatatactaaaaagaaattaattttataaaaatgaattattcaaattcttgccaaaaactgttgatattggtgaagattttattaaatgccattttgctacctttgttacatgtgtgtacatgggtgtatgctttatataattggcaattttatttacattgacacagttcaggagacaaggatcatgtgaaaatttttatataatgtatagttcagggaaatgtttcattctttgaaacagtttagctaaggaggcaaagagaaaaaatcatatttatgcaatattctattcattgtattgatttcttttgaaacttgatcatatttaatttctcagattaactgcaacaactattagtttcatagaaggtcatctgcatgtctttatgaaacttagaattgcagtttaaaaaatattttgactctgccactgattccctaggtgaccttaaataggtaatttacctctcttcattcctgatatcccaatagagataaggttaatgataattgccatctatttacctcacagttgtgttgaagatgtgatcactgtaaaatgcttttggaagctaagtgagaaataaatgcctattaaaattagtaatttacatgtgagtaactgataaataaaacaggttaa

SEQ ID NO: 480042 - DNA, 656 bp, Homo sapiens
actgacaccatacacggcctgtgtggccttctgcatcagggaaatggcctcaaagtggtgctccttccagaagcgattcctgtgggtctcagcccagctattcccaaagaagtggcccccagactgtttcctgcccttgtcctcatacttgtacttgccggtcagcagacccccagccagaggagggtacagatctcggccacttcccccagccggcatagttggagaggccaagctccacgaacttgccctcctggtgtcgctggtggcaagcacacagcgtctcttccactggggtgccgtggtcaggtgcatggttggccttggtggccaatttcactcagcagtcgccgccgcccagccccagcctcaggccgcccaggatgattttggactggccatcgctgtacatgaaggccatgtccagctcggtgtggccacgctccaggaaagcgtgcacggccgtggcgctggcagatgtgtccatgaccagagtatgctggtccagcacagagtatgctgatatcccaaggttttatataaagggaggataatgttttaaaatcttattttctgtgagaaaacattttaaatggtccattttcaaggtatgataaatctaagtactggcagccagcctgcggacgtgacaaacc

SEQ ID NO: 480043 - DNA, 1116 bp, Homo sapiens
tttaaatctttcatgcatctagaattattttgagataatgcactctgccaggactgggtccttcccttcaaggcagcaggtttgcttctggcccaaggaaagtctagaaatgtcatcccggagtaaaacaaaaagaattttagttgagcaaattgtcactcagctaaaagacaatttctcagctttctttgcatgtgttcatgtgactaagttctggttaatgagattaaagtggtcacgttatgtgatacttttcgaggaatctcctttaaaaggtagagatcacacatttcctttcttctttctccagtacactgtcaggaatatggatgtaatggctggaataccaatattcatcttgcgccatgaaggcacataccttaggaatggcagagtgcacaccgagaaggaatctgggtccctgaagatttcatggtactgccatactagctctggactgcttacttttgagattctatcttatttaagccaaccttattttatgtctatgctcacagaggaaatagggtttttttgaggcaatagttttgaggaggaagaggatgagtttgattttgggcatgtgaatatgaagtattggcaggtcactcaggtagacatgtagaagagttagagttatggagagatggtagggctgaattaaaccatgcaactttctgtgcttctgctctcatgctgtctggtgttattgaaatccagaagaaatagagttagctctacagagttcactctgggaaatgtttgcctacattagaaggccaatagccttctaacaggtgtcttcacttccagtccttgctttttgaaactactttatacattgtcctcaaagtaactccttaaaactggtttgatctgtgactactgactagagtctgacttttttatgctgacactcaaggacttccacaatctggtttgaatctactttcccagtttgtttattcactgtgttttctcaggcacctgtgctttactcagactgatgtactctctctgttctatttatgctccacaattttctcttttatgcttttgcacatactcaggatcattgccagcccatatggattcttggcacaaaatagaaaaagg

SEQ ID NO: 480044 - DNA, 568 bp, Homo sapiens
actgggtgatcaaagttgactggggtgatcaaagaaggcttcatggaagaggcggatcttgagttggaccttgaaagtttcaagtctgcctatcagaggttaaaggagttagagaggagaggttatatctggcaaagggaccaatgtgagcaaattcacacagacagaagaagaagaaaagaagaaaggaagaaaagaagaagaagaaaagaaaaagaagaaaagaagaagaagaagaagaagaagaagaagaagaagaagaagaagaagaagaagaagaagaagaagaagaagaaggaggaggaggaggaggaggaggagaaggaagaagaagaagaagaagaagaagaagaagaagaagaagaagaaggaggaggaggaggaggaggaggaggaggaggaggaggaggaggagaaggagaagaaaagaagaaggagaagaagaagaagaagaagaggaagaagaaggagaagtaggaggaggaggaggagaggaggaggaggggagggggaggaagaggaaggaggagggggagaggaaggggaggggggaggaggaggaggaggc

SEQ ID NO: 480045 - DNA, 1027 bp, Homo sapiens
gaatatgctttgagtcctgctggatagagccctcatggagaacctatgctagggcagtgaagaagggaaatgtggggtcagagcccccacacagagtccctgctagggcactgcctagtggagctgtgtgaagagggctaccatcctccagattccaaaatggtagatccactgacagcttgcactgtgccaactggaaaagtcacagacactcaatggcagcttgtgaaagcagccaggagaggagctgtaccctgccaagccacaggagcagagctgcccaagtttgtgggagcccacctcttacatcagtgtgacctgggtgtgagacatggagtaaaaggagatcatgttggagctttaagatttgactgccccgctggatttcagacttgcataggcttctcttacatctccatttttatctttgatcaacacaaatattttgagcgcccttctatacaacaagtactgtgctataggtatctagagtacctctactgagtatagagcaatgaacaaaactgacaaggccctcacccttatgagtcttgtggggaagagaaaacctaatcaagtaatcacacaaatgtcaaaagtataactgttgtgagtgtaaagtatgaaagctacatggtcctataaccttgttacaaaggtgaggcaactcaggtgtctagagtttgcttccacattcaaggttacacaatgattagcagaacaagaacttgactgcccctctgagtactgtgctttttctattacactaagttgcctctttttgccctcaccagtattaagcagggtcccttgtcatctgtttgcattggggtctttcagaaggcttggcaaatgataggtattcaacatatattagttcctctgcatgtaaactttctgaaagctctggagtcagaaaaacctgagtttcagtcctatctctgccattttttatgtatgtgactgtagcaagttatgtgttcattcactcaattaatttgatcaataatttttatatttgttgact

SEQ ID NO: 480046 - DNA, 631 bp, Homo sapiens
aaccagtgacatttgcccaggttgtcagggaatatgatgaaacctgagctgaatcggaaagttcagtgtgaggagggtactctaggcagaaaaagctatatatgtaaaagtatggaccggaaatacagatatagtgatgattgctatgaagaaaaatggaaggagatagggtggtcatgcaagtaccctccaaggactttgaatgtgacattggagtatgttgatgaagggacaaagaaaggtttggcagattacagcattgatcatctgtgctgtgtgctgcatttgaagcctgaaaaggcaggccatcaatattgggatgatgatgatgacaacaatgacaatgaagatgatgatggcgtccatccaataaaaatcaaggacatgcaggtttgttacataggtaaatgtgttccatggcagtttgctgcacctatcaacctatcactagatttgttatataggtaaacttctgtcatgagggtttattgcacagatttcatcactcaggtattaagcctagtacccattagttatttttcctgatctcctccctcctcccaccctccatcttccaataggtcccagtgtgtgtcactttcttctatgtgtccatgtgttctcatcattt

SEQ ID NO: 480047 - DNA, 4156 bp, Homo sapiens
ggcacccgcactacctgtcattccagatgcttaccgctttagtgcctctttcagcaatatgaagttaaatccaggtctggtgcctgcatccacaggggtggacctggagcctgtgtccactggagcaggtctagatcttgggttcatggtggccagcctgacagtaaggctcactgaagttgtcctaatgagataccctgcccagagaggagaaatctggcagcctggccacagtggctatgccaagctttggtgggctctacccagtttgaacttccaggtggctttgtttacactgagggtaaaacctcctactcaagcctcagtaatggcagacgcccttcccccaccaagttcaatatcccaggttgatctcagtctgctgctgttctggcagcgagaatttcaagccagtggatctagtttgctgggctccatggggcagcaatccctgccagctcaagtgtccttgggggtcatggtgtttcctgctaccaggattccagatgttcatggcaagagcatgacactctttgcctgttcaacttaccccttccccaggagtcactgagggccaggaatgagccctggtgcttgatttattagagcaaatttccttgagtcatttgggatataacactaaatcatactaatgaaataaaatcaaccaattgcacttatatcagatgctatacaaccataaattatgacatataattacctattgagattattatttacaatttatagtaactctgatttggaatttattttgctaatttaaaagaatatatttaatatggaagtagaatgtgatagaaggtgatgggatagaatgccagttaagtgcatggatttttaaagtaaggtctattggtttaaatatttgttacaatattgtggaaccattgggcaaattatattttgtaacttatctcagcctcagttttctcatctatgtgacagaaaaaaaagtctaccttatagtattctcagtgaagattaaatcaatgaaataagtcatatagaacatttagctcatggctaaattgccaaactatcaaaggtaaataaacataactggtgctcaataaatgtaagttatttctgctgccactactactgtttttagtcatttgaacatcataaaacaatctttaaaaatcatcatttggataaaaaatcaagtatattctttctatttgaatctgaccttttattggattatgacttatatgtctatttagcatattaatgtttacactttgtccactctagtacgttggtcatttaggaaatggtgctagtaaaaatatttgtgcataacactgcatgagaatcaacaattcagaatatacagctggacaatcaaaatgagcagtggccctaacaattcacaaggccttaatatctgactgaatattagcttacttttgacacataataaaggtgtggcaaaaatttaggtatttcaaaagccaaaattatatagcatgatcaggcaggtctgagtatggacagattcacaaagataaatgtctaatgtgtgctgtggcatattattctttactacaatccttggaaatagtatgaatttatgttctagttttccatacattaaactcttggggatgagtatagtctgggatagaatgactatgtggctaagttggaaacaggtgtgatttctgctttcttcagttatttaggtagtaataaaggcagtaggttggctcaagattgaagtggaaaatctgtgtctttacactaccaaatcatcaattaattttacttccaaagcattttgaacctggcctataaatgccccttaagttaacaatagtgatattcaagccttgtttgacatcccagagtaactctacatatttagagacattggccagattcttagatcaaatatattttaactataaaaagtatctataacatatagtacattttcttagggaaggaaaaaagtattataaatcaaatttaaaagggaattataactccaaaataattaggaatccctggcagtgtttttgagtggtagaggaataacagctaatttgattgaggcaaaggggaaatgaggaaagattgaacacattttcagaaacagaaaaaaaaaagccattgaaggagagtgttgattgatggaaaaggactcttttatgctcttaaaaataattgaggacctcaaagagctttggtttatgtgagttatatttatcaatgcttaatgttagaaatttaaaaatatttattaatttaaaataataaacatgtttacatgcatatttaatgacaaataactatatttccaccaatacaaaagtctaggttctctagagggacaaaacaatggaatatatgtgtgtgtgtatatatatatatatatatatggaatatatatatggaatatatacatatggaatatatatatggaatatatacatatggaatatatatatggaatatatacatatggaatatatatatggaatatatacatatggaatatatatatggaatatatacatatggaatatatatatggaatatatacatatggaatatatatatggaatatatacatatggaatatatacatatggaatatacacatggaatatatacatatggaatatacacatggaatatatacatatggaatatacacatatggaatatatacatatggaatatacacatatggaatatatacatagggaatatacacatatggaatatatacatagggaatatacacatacggaatatatacatagggaatatacacatacggaatatatgcatggaatatacacatacggaatatatacgtatggaatatacacatacggaatatatacatggaatatatatatggaatatatacatggaatatatatatggaatatatacatggaatatatatatacggaatatatacatggaatatatatatacggaatatatacatggaatatatatatatacggaatatatacatggaatatatatatacggaatatatatatacggaatatataaacggaatatatatatacggaatatatatacatggaatatatatacatggaatatatacatggaatatatatacatggaatatatatacatggaatatatacatggaatatatatggaatatatacatggaatatatatggaatatatacatggaatatatacatggaatatatatacatggaatatatatatggaatacatatggtatacatatggaatatatatatggtatacatatagaatacatatggtatacatatatatggaatacatatggaatacatgtggaatacatatatatggaatacatatggaatatatatggaatacatatggaatacatatggaatacatatatatggaatacatatggaatacatatggaatatatatatatggaatttatatggaatatatatggaatacatatatacggaatacatatatacgggatacatatatacggaatacatatatatgggatacatatatatggaatacatatggaatacatatatatggaatacatatggaatacatatatatggaatacatatatatggaatacatatggaatacatatatatggaatacatatatggaatacatatggaatacatatatatggaatacatatggaatacatatatatggaatacatatatggaatacatatggaatacatatggaatacatatatggaatacatatatatggaatacatatatatggaatacatatatggaatacatatatatggaatatatatataatatatgtggaatatatatatggaatatatatatatggaacatatatataatatatatggaatatatatataatatatataggaatatatatatggaatatatatatttggaatatatatatatggaatatatatatttggaatatatatatatggaatatatatatttggaatatatatatatggaatatatatatttggaatatatatatatggaatatatatatttggaatatatatatatggaatatatatatttggaatatatatatatggaatatatatatttggaatatatatatggaagattattacatattaact

SEQ ID NO: 480048 - DNA, 691 bp, Homo sapiens
tcctgccttgcttttctctgttctccgtgggtatatttcctaatgctatccctgcccccttcccccaccccacaacaggccccggtgtttaatgttccccttcctgtgtccaagtgttctcattgttcaattccgacctatgaagcaatgagtcagcaatctggggaaagtaatacactgaaggaccaaactactgaaaagcaaacccaacagctggtcaaaaggtcaatgtcagaagagcctcaagcaatgacaaggcaaaatgaattagaaaacactcttgaggaatatgaagagtatgaggaagcaattcctgttccaaatgaaggaaaaaagggaacgaggaacacagaaggctataaagaacagaggaaagatcttccagttaggccacaaactctattggatcttataagaactctttctcagttctgctgctgtcaaagtcagataaagtgcaaagaagggctatgaggcagttttgggcaatggcctccagctacattcatgtttcaatctagaatgggtgttgtctgttctctaggcatgggccacaattgtcccataacctcctttcatcattctgtgttggatcacctgttcaatagattccattgtctctctaggtttattctctcactttgataaagcatatgccacctaagaaaagacacatggaaaacaaaatttc

SEQ ID NO: 480049 - DNA, 1199 bp, Homo sapiens
agccattgggtcagggtttcttcactatagtcccttctgtggtggccagaaatatgtcccaggaaaggggacccgaccccatgtcccaagagagggttcttggatctcacacaagaaagaatttcagggcgagtccgcagtgcaaagtgaaagcaagtttactaagaaaattcaccaggacagtgctgaagagaagtccgcagatcagtcctcctgggaatttagttgtgagtgaatgtgaaggggagccagcgggctttggacaggtcctgcggcacagaaaccacagtccgtggcttctgagagaaaagggcctcgccgtcgacgtccggctcctcccaggtcgcgacgccccatgggcctttgtcgtcgtttctgggccaggacgacggaggaaggtggaccgtagaggggaggaatcacgtgaagatggggcgagtgctgggcgtgctgttggagtggacatcaaagaacaagatccagatctagagaaagaagagatgatcaagactctaatcatccagtaggggctgtggttgcccaggagctgcccagtaatgaccagcttcaacaagaggaaccaccaattgaaagtcaggattatacacctggtcaagagagagacgagggagcactggacttccaagtgctaggcctggcagcctatctctgggaactgactcggtcaaagactgggggtgaacgtggagatggtcctaatgtcaagggagaatttctgccaaatctggagcctgttaaaataccagaagcaggtgaagggcaaccatcggtttaaatgaagacaagctgaaaccatacatgcagtctttatgttggaaacttcaccagtaaaattctctcaataaagtttcacaattgtctgcaaagaagtcttgtgcaacttatgtgttgtattaagtcttaatgattaagtctttaatccattttcatttgatttttatgtatggtataagagtgctttggttatttggggtcttttgtggtttcacataaatggctatcagtggatttctcagctgaaatcttgcaggccaggtgagagtgggatgatatattcaaagtgttaactgcccctctccacatgtaaaccaataatactttatctagaaaagttgttcttcagaaatgagggagaaatatagaatttcccaggcaaacaaaagctgaaggagtccatc

SEQ ID NO: 480050 - DNA, 618 bp, Homo sapiens
cacccccttgtgttatctggcacatgatcctgttgctctgggactgattatgggatctgcctttggctgtgtgggcggctacattgccagcacccgtgacttggtggacatggtgcgctcctatgctgcaggcttcatctttaccacttctctgccccccatggtgctctctggagctctagaatctgtgcggctgctcaagggagaggagggccaagccctgaggcgagcccaccagcgcaatgtcaagcacatgcgccagctactcatggacaggggccttcctgtcatcccctgccccagccacatcatccccatccgggtgggcaatgcagcactcaacagcaagctctgtgatctcctgctctccaagcatggcatctatgtgcaggccatcaactacccaactgtcccccggggtgaagagctcctgcgcttggcaccctccccccaccacagccctcagatgatggaagattttgtgggtctaccacctctctgagctgatgacccagactcctgggccttttgttcagtattctcttttgctctgggcttcaattgtagagctctcagtattcttggttctctgaatgtccacctaggctaggcttttgt

SEQ ID NO: 480051 - DNA, 713 bp, Homo sapiens
tgcaactctgagacctgaagttcagccagagcttttcagagaagtctgcaaggtgctgcaattgatgtgcgcgccttcctgtgcacccaaggaagagggggcagtcagtggaaaggccttgagacaagagcatgctgacaagttcaaggaacaagaaagagacggttttcaaagggagtacttccagcttttgtccattcagtgtgatgtcggctgtgggtttgtcatagatggctcttattattttgaggtgtatgattgtagcaggacaagccacagacaaaacccctcagacaccgagttaaagaaggaagcagtttattcggctgggagcatgggcaagactcctgtctcaagagccgagctccccgagtcagcatcagccgctgctatcagccaagagtattctttacattcaaggatactgagagttctctggtcatcacgtcttcatttgtactcttgtaccattgttaagtggaagcaatagctgttgcatatacactgtgatgagaagaataacctttgagagttattttaaataacattttctctattttaactgaaattgtgtgattaggatttttagttacccatatgaccaagaaggggagctcctccatgtttttcaaacttagacgttcaatgtttagattcaaatatgatatctaatgtaggagtttttcttgtacacaagacgtgagatatggatc

SEQ ID NO: 480052 - DNA, 608 bp, Homo sapiens
atctttagaaatgctttggtagcgaacagtaatttataaatatggaagagaaaacccaaaatggatctgccgagcagcgagtggaagttagcatccgccaaaacctgttctcgctccccggctcccgggggaaccggcttggagaaattgaccatgataatagcaattatgaggatgaggatgatgagcgaccaggggtgaaacccacgtggtcgttgggaaggttcccgcagcagcagagagaaagtttgctagccacgcggcttgctgaagcacgtctgggcttcggagcggcgctcgccgagcggcccagagcctgtaagactgagccggagcggtccgcggcgaggctcggggtaccgggttccgccgggaccgaaggctctgctttcttggcatttgcggcgcgtactgcctcttcaggttctctaggctgcggctcggcagagcgctgcaaggatcctacagtctaagcagaaaataacaccacttatgtttcaatttatgctgcaagcttcacacctgttatatatttatatcatttatatgtaatttcatttgaaattaaaatgttattcactcagtaaagattataagatgctttctac

SEQ ID NO: 480053 - DNA, 782 bp, Homo sapiens
cacagataaacaagagggaggctttatgatcctggaggagtgaatataggagaaaggaaggaggaggaggattttagcctcttctacaaaaggaaagaaagtcaaaagggctgagaggttcagtgcaaggttcctggatgccctgctaggatgtggcttggaaacctgagaagttcaaggaaaatccaagaacaaactggcaaagacaactgtttaaagtcctggaaggagtcaggcccctctgctgcaggtctgctggagtttgctggtagtctgctccagaccctgtttgcctgggtatcaccagcagaggctgcagaacagcaaagattgctgactgttccttcctctggaagctttgtcctagaagggcacccaccagctggagctctcctctatgaggtagatgccttgcccaaagaggagaactctagagaggcagtctggctaaagcggctttgccaagttgcagtgggctccacccagtttgaacttcccagtggctttgtttatactgtgagggggaaaaagcctactcaagcctcagtaatggcagatgcccctccccccaccaagctggagcatcccaggtcaacttcagactgctgtgttggcagcgagaatttcaagccagtggatcttagcttgctgggctctgtggggatggggtccactgagctagaccacttgtcttgctggtgttccaggcgccactggggtatgaaaagagactccctgtagctagcttggtgtctgcccaaatggccgcctggttttgtgct

SEQ ID NO: 480054 - DNA, 753 bp, Homo sapiens
cccagccatctggaactaagaagacaggaaaatgtgggaaagtttggaacttcctagagacttgttgaatggctttgatcaaaatgctgatagtgatatggacaatgaaatccaggctgaggtggtctcagatggagatgaggaacctatcaggaactggagcaaaggtgactcttgttatgtgttagcaaagagactggcagcattttgcccccaccctagggatttgtggaactttgaacttgagagagatgatttagggtttctggtggaagaaatttataagcagcaaagcattcaagagaacatgccaccccaaaatatagcaacttggtatactaaatattttaaactgaaggaaattgagaaaactgaagcaggaaggccactctctcaccttctctcacctttcttctctgaagcaagccataaagaattctctggcctacctagccagaaagtaggtcataagaccttcattccagaagtgtcctgctctatacctacagaccaagaagaagctaaataaacagaccttgctgatttctccttggtttattaccattaggtcatacccattttgtccaatcatacttctccataactatccatctctccatcaaacctaagcatgaaaatacacaagtttacttttttctttgaatcttcatttctgaaggcttccatttcatataaaactaatattaaataaatttgtatacttttctcatattagtctgtcatttgttataa

SEQ ID NO: 480055 - DNA, 864 bp, Homo sapiens
ctaaatgagcatggtaaacgatggtgtctgctggggtctcatagatacctggggacttcattccagtgaagtggttctccttgatgtcaatacggcccaagctgtacttgcccacgtcttcgttcaggtacaggaagagctccaaggaggtctggtgggtggtgccatccttgacgttggtcactttcatggggactccttatttgaactcgatctcgagaatgtcaggggttctgggggctttggccgggtcctgggtcttcgtggagagacctggaaatgcttggttcttagggttctccaagattccagcctcattgctgatctgcatgaggttctcgtccatgttccacaggttcttgggagtgactgggatgggaatcccgtgttgctttgtgtgttccataaggtcatttcggaccttgaacctgttgtagaacttgggcatcctccagggagcaatgacctttatctgggggggccagagagtagcaggcctggtgagagaggtgcccaggaggtagtggtcctcatacagtgcgctggactggatggccagccagatgaactccttcacaaactccttgctgacttcctcaatgaacacctttttgcccccaagcttcagtgccttcttcctggcttcctcaaagtcttccttctggccagtgttggccacgtaggcaatgatgtcatagccttgttccttcattatgattttttaacctaaaaaaatggatgcttagctcattagtattcagcctttcttctctcgtatgaacttaatggtcactgagcacccacaatttctgatacatgctatatgattgttaacgtagggaaaaatacctaattatagtggat

SEQ ID NO: 480056 - DNA, 1032 bp, Homo sapiens
ggagctgatttcttgggtggttcactatacagggcccacagcctgtaggaatgccgggaactcgtgcctccaattccagatgctatgtccagcaaaggctctgtggttctggcctacagtggcggcctggacacctcctgcatcctcgtgttactgaaggaacaaggctatgacatcattgcctacgtggccaacactggccagaaggaagactttgaggaagccaggaagaaggcactgaagcttgggggcaaaaaggtgttcattgaggaagtcagcaaggagtttgtgaaggagttcatctggctggccatccagtccagcgcactgtatgaggaccactacctcctgggcacctctctcaccaggccctgcatcgcccgaaaacaagtggaaatcgcccagcaggagagggccaagatgcccaagttctacaacaggttcaaggtccgaaatgaccttatggaacacacaaagcaacacgggattcccatcccagtcactcccaagaacctgtggaacatggacgagaacctcatgcagatcagcaatgaggctggaatcttggagaaccctaagaaccaagcatttccaggagtccccatgaaagtgaccaacgtcaaggatggcaccacccaccagacctccttggagctcttcctgtacctgaacgaagacgtgggcaagtacagcttgggccgtattgacatcaaggagaaccacttcactggaatgaagtccccaggtatctatgagaccccagcagacaccatcgtttaccatgctcatttagacatcagggccttcaccatggaccgggaagagctggtgagcatgaacgtgcaggttgattatgagccaatcgatgccaccattctggaggatgggaagtccaagatcaaggtgctgacatcttgtgagggctttgtgttgcttcatttcatggaggaaggctgaaaaggaagagagcatgagagagcaaaagggaaggatgccaaactcattgtttcatgaggaacccaatcctatgat

SEQ ID NO: 480057 - DNA, 2435 bp, Homo sapiens
ctcacagtaacaatcaaaggtaaatagtttattatttatgatgtattcttctttgtggttttaataatacatgcttactgtgggcaatttagaaagttatatgcatttcatgagaaagtcattagagtactttcaaacctttctattggcttccaatcttgaatggatcagcacacacactctcttggtaacttgggcaaatcctgaagccaaggttcagcagacattggcttgttgtgctgtgtaccaggtccttatgattatgttttatttatcaaaagtattgggggcagggagagataaggggaccagaaatggagctgatattgttggttccaaagaggatgacactggcgaaggcattcttcctcagcttgtccagtcactggaacattccagtgatgagattgcagctcatgaaggtctgagtgaattcttcagggaagcgacactctgagtaccacagggaccagcagtccttatcaaagtgctcccagaaatatggcagtgccacagagagtgtgtctcattggagtacttgagcttcaattcatccaacacaaaggtactcttgggcagcctggggcttctgcttctcttcccgtgaacgcttctctttccgtggtgtgtcctttttaggctggctttccacaaactttttagcatcagactgggccatcttctcacatagttttgctttccccaagacagtgcagaactgaggctggttaatgcagatataggatttacaaaaattttctcccattgtgtgaattttgttttcactttcttgatggtgtcctttgaagcatagaagttttaaattttgatgttatttggtatatatatatatatattcagtatatatatagtatatatatatatattcagtatatatatagtatatatatatattcagtatatatatagtatatatatatattcagtatatatatagtatatatatattcagtatatatatagtatatatatattcagtatatatagtatatatatattcagtatatatatagtatatatatattcagtatatatatactatatatatattcagtatatatatagtatatatatatattcagtatatatatagtatatatattcagtatatatacactatatatattcagtatatatatactatatatatattcagtatatatatactatatatatattcagtatatatagtatatatatattcagtatatatatagtatatatatattcagtatatatatagtatatatatattcagtatatatagtatatatatattcagtatatatatagtatatatatattcagtatatatatagtatatatatattcagtatatatatagtatatatatattcagtatatatatagtatatatatattcagtatatatatagtatatatatattcagtatatatatagtatatatatatattcagtatatatatagtatatatatatattcagtatatatatagtatatatatatattcagtatatatatagtatatatatattcagtatatatatagtatatatatattcagtatatatatagtatatatattcagtatatatatagtatatatattcagtatatatatagtatatatatattcagtatatatagtatatatattcagtatatatagtatataaattcagtatatatatagtatatataaattcagcatatatatagtatatatatattcagcatatatatagtatatatatattcagcatatatatagtatatatatattcagcatatatatagtatatatatattcagcatatatatagtatatatatattcagcatatatatagtatatatatattcagtatatatatagtatatatatattcagtatatatatagtatatatatattcagtatatatatagtatatatattcagtatatatatagtatatatatattcagtatatatactatatatattcagtgtatatatagtatatatatattcagtatatatactatatatattcagtatatatatagtatatatatatattcagtatatatatagtacatatatattcagtatatatggtacatatatattcagtatatatatatagtacatatatatagtacatatatagtacacacacatatatagtacacatatatagtacatatatatagtacacacacacacatatatatatagtacacacacacacacacacacacatatatatatatatatatatatatatatatatattttagattttccattttctttattttttccttcctggaggcagctacgatcacctgaacgggtacttttctcaagtgtattgttcatgtgattgctacctagtatgaattttctctagatttttatttgaaaactaaaacattttaccaaaaaa

SEQ ID NO: 480058 - DNA, 1993 bp, Homo sapiens
acaagaaaggaaattggtcaatcactttgaattgggaacaaccattacttcttttgaaagatgatcttaaactctggtccacagcaactgtccaatggcattatgaatattaaaaaggaaagaaagaagatccaaataaacacaattagaaacaagaaggatgctaccactgaccccacagaaacacaaataaccaccagagaatattatgaattcctctatgcacatgaactagaaaatgtagaagaaatcgacaagttcctaggcacatacaccctcctaagactgaactggaaagaaataaaatcccatcatcctcataccaaaatctggcggagacaaaaaacaaaacaaaaacaaacaaacaaaaaaaccttcaggccaatatccttgttgagcatcaatgcaaaaatccttaacaaaatactggcaaatctaatccagcagcagatcaaaaagccacatcttcatgttaaaaactgttagtaatctaggtcaaattctcacttatgagctcagttttgtaaggtgcatattaataagcacatgctaaagtgccatctataaaatgccaataattttattagttgtgattagtacatagattcatttctattaattttctgtttttctttaccatttttctctttgttctttttttccctttcttgtcatgtattgaattgaccaaattttcatcatttatctcttacatttttttctttcctctatttgtctggaatttatattttctattttattttgatgattttctttacatttcaacaggtgcacttaagctgaaattgttatagtcagtgtctatattttctttcctcagagacaaagatcttagaatactttgattcaaatatatctcttccaatctttcatactattgtctagctttctaggtgcacattgttattaagcctcacagtaattattattataattgattggtacttttatttacagtttgattggaactttcgtgtagcgttaaccattactgattcaaatttaccaactagttttaccaatttctttcttcatcattgctcttgcctccaagcccttcatttcttttttcaaacttaagtacattttatagtagtaaacccacacattttgtctgtacttctttaagaagcattagttttttcttaagtttcttctgttataaaatacaattaaaatgtatttaaatatgtaaacacttgtactgacaggaatggcatataaagcctgatgagtaagggaatggttgttcttcatcccttctggctgtttttaacttgatattttactcaaaatacatttgatgtttttgttccttgcatatgggtggagagggggattttctaaatacctacatttgattatatgtctatcattatgtatttttaaattaatacctctattctcaaataaagaattagctctatgagggtaaagaacattgactaattttgttaatcgtcatatcaccagtaactagcactgtattttgcacatagattttgctaagtatttgctgaataaataaataataagcaaaattcaataaaatcaccacagttaggcagcaatcctgagagctaaaggcttaagtggaggtttataaagttaggtatgaaagtttagaaacagatgcagaggaaaagtaattatgaactaaagcatggcttataagtttttatctctgtgttgaagaggttggccacgtgactcactttgtccaatgggacatcagcaaatgtgatgcaagcataggtttgacaagcacctgtaactgagtccaaagctgatactgctgacggcatgacagccgtgctttgtaaaaagaaatactcttttacacatggaaaagcctcaactaactcctgtttttactgaagcaaatgaaagtaaaactttgttgtccattggagaacttagaatagaaaatctgaaagtgtttaattattgcaaaagtaatggcttatttatt

SEQ ID NO: 480059 - DNA, 2004 bp, Homo sapiens
atcatcaattgtgctgtgataaacatagaagtgcagggtttgtttttttttttttttgatataatgacttattttcttttgaatggagacgaggaatttattgagggctggagcaaaggtgacacttgttgtattttagcaaagagactggtggcatttttcccctgccctagagatttgtggaactttgaacttgagagagatgatttagggtatctggtggaagaaatttctaagcagcagaggattcaaaaggtgccctgggtgctattaaaagcattccattttaaaagggaaacagagcataaaagttcagaaaatttgcagcctgacaatgcagtagaaaaacaaaaacaaaaacaaaaaccatgttttgaggagaaatccaagctggctgcagaaatttgtataagtagcaaggagcctaatggtaatccccaagaccatggggaaagtgtttccaggccatgtcagagaccttcatggaaacccctcccatcacaggcccagaggcccaggagggaaaagtggtttggtgggctgggcccaaggtctctgtactgtgtgcagcctagggacttggtgcccagtgtcccagacactccagatgtggctgaaaggggccaatatagagctctagctatggcttcagagggtagaagtcccaagccttggcagcttccatgtggtgttgagcctatgggtacacaagaaataaagaattgaggtttcagaacctctgcctagatttcagaagatgtatggaaatgcctggattcccaagcaaaataaatgaggccataaggagagcccaatatgtagttaatgtttaatacaagttttgataatgatgatgatgatgatattaaacattcataaaattttcaaacaaataagttttgtaatatatgatataggaaaaaactgttatatttctgctgcaaaaaataaggcaaatattcagagataaaatgtaatggcttataagatttggagactgacagaataattcaaaatgaagctacactacatgtttcacagtaaatggtttcaacaattttttcttctcttatacacaagaaagaggtcatgtacataattttacactcccgtagggcttactccaacatatactcaattccatctctagtctccaaactctacctttttttttacttcagtcaaaatgttaaattgtgagtatgaatggcataattttataataatcttgagctgactctattttgttcgagtgaagcactgtggtctgcctcttggaatggtaagctgaatgttgtgggccaacactcttattgagaactaaaatggataaaaaataatttaaaaatccatgtgaaataactagtgcatgacatttcagtgagttactgttcaaccatgatacatgttttagtgagttattgtttatgatacagatgaaagagaaggaaagcccacagatatgaacttagaatttggggtaacattttcccagaggcatttgcagattctgaaagttaagcttaatggttaagttgagcattggtttcaataaacccactgacatgccaggtcatcaatgttaaagaccagggctttccaaggaggaatcaccttagtcaaaccatcctcatctgactgaagactctgagggagtataatttaagggaaaagagaagtagaactagaccagatttcacagagactaaactttatctttgaatgacaacaaccctgatggggttattggtaagggattactactttctgtagctagtctcctgtcaaaatatacttctaaatctaatgtgtaatattcctagggacagagataatatcattcaacatcttcaaataactctataatttttgaaacataatttatgatacacaatgaaaattaccaggcatataagtagttacagcaagtcaccaaaagctaaagaatattacagacatatgaaaaaaccccataagttatttaaataatagaggatttttttc

SEQ ID NO: 480060 - DNA, 676 bp, Homo sapiens
ggcgtatgctaataagttgtctgagaagacctacccctaatgtctttctttgcttttagacctataactaggcacaagtcccagcaggccctaaaggcaagtgcttttttatttacgtctgttaataaagaccaccagaagcagttgactttccgccgacaagaccggcaatacccctttactgttatactccatgggtatatcaatgctccagccctatgccatcatagatgcaggactaccagtagccaagaccctacaagaatgaaggtttgtgttacccaccagacaaagaaccatggccaactgacattcttgctgagaacaaagaatgcaagcaatggaaagtgggaaaagcatgacatcctgtttcgtcggaatgatttgtctgctgttattgacaattgcatcaaaatcacgttaaaatctggcctgcaagggcaattgcattttccaggcactaatatgtcctcacctgatagatgttctgatcatataattttactgtgcatgtaaacttctgcaagcatattcaatgttgtataatttttgttgtagagattgttcacttctttggttaagttaattccttggtatttaattctatttctagcttttgtgaataaagttagttttcttttttatacttttaagttttagggtacatgtgcacaac

SEQ ID NO: 480061 - DNA, 715 bp, Homo sapiens
tcttccccagaagagaagaggcatgaggagcccacgttgtccaggtgacaatttatacttccagttcaatgaaattattgctgtatctcctggtaaaatcattcctccttttggagctaagacctctgggccaacagagtataaggtcatgggaataagaaacaaaaactttcctagtgggtcactgagtctgctaagccaagaagatctgggaaggagtcagagagccttgggccagagttccagggtctctgagagtggctaccaggtgagttggacagtccgatttccagaggggtcccacacagatgggacacggcttaggagcagtcccgggctgcaggcattccttggcctggtggccagatttctggcacttgtagcaagcttctgggagaggcgggcctggaggaatgcctggccgctgcggtttaggcgtttggagttcttgtgtgctggagatgtgactggggtttgtctcacagtggaggtgggaattgaacaatgagaactcatggacacaggaaggggaacatcacactctggggactgttgtggggtggggggaggggggagggatagcattgggagatatacctaatgctagatgacgagttagtgggtgcagcgcaccagcatggcacgtgtatacatatgtaactaacctgcacattgtgcacatataccctaaaacttaaagtataataataataat

SEQ ID NO: 480062 - DNA, 4749 bp, Homo sapiens
ttctaactggtgtgagatgagaaccctgactaatacagattttggtccaggagtggttctagaggaacaaaattttaaggatggatttcttcagttggttttggggtttctaggttggctgcttaacatgattagactccaaaatgctaaggactctatttctaatagtatggagaacactgatagtcattggtgtaagctgtttagagaaatatgcagaataaatgcatttgatacttctgattcaccgcttttgagaggcaagaagtttagtgactctatacacaatatctttgaccgtatgtggaaaatcaagggatataatgaagttgtttggttgcttctaagttcactggacaaagtgatgaacgaaaacctttcagaaggaatggtagcagctccttcttgtacctctggtagaatttggctgtgaatccatctggtcctggactttttttggttgtattaactttcaaaattatatttttgcttaagttttaataagtacatttcttgtcttttttttctttgtctggaagtgaaatgtttatttattctcaataatcatagcttaatgttttactccaaataaaatgtaatacacttgttcctcactgatttcccactaggccttttataaacttttatattatgtattttgttaatatgtgatgaatttatatttgctatctttcagatgctaattattatcaaaaagtcttatgtggagaagaataacatctgattaatttaaaaaaaatacttaaaactgcacattccctgaaagcaatgctaaaagtacttaaaactacaaattccctaaaagcaattccctaaaagcacatacaaatattgaaacattgtgttttaattataatttatttaaacatttttctaatttcccttttacatatacgtatgtgttttgaccagtaagttagtgagaatgctgttgcttgccgtccaaatactcaaagattttctagatattttactgttacttatttctaatcagctctttaccaagagaatattttttcagttctatttttactacaaatatttcataatgttattatattttaacctttatttcagtttcagggatacatgtgcaggtacaccaacaatgtccaagctgagagccaaatcatgcattcaatatcattcacaatagccacaacaataaaatatctaggaatacaactaaccagggaggtgaaagatctctaccacaagaattacaaaacactgctgaaagaaatcagagatgacacaaacaaagggaaaaacattccatactcatgaattggaaaatcaatattgtcaaaatggccatactgcccaagcaaattacagattcaatgctattcctatcaaactatcaatgacattcttcacagagctagaaaaaactattttaaaattcatatggaaccaaaaaagagcccaaatagccaagctattttgaaatatacattagacttttgtaaactctattcaccctgctgttcttttaacactaaatctttcttcaaactgcatatttgtacccattaatcaacttgtcttcatcccctcacccactaccctccctggcttctggtaactgccaatcaactctctattttcatgaccacttttatacccacatatgtataaaaatgtgtgatatttgtctttctgtgcttgacttatttcatttaacataatgaccttcagttccatccattttgctgcaaatactaggatttcattcctttaatggccgaatacaatttgtgtatatgtacaatgctttctttatcctttcttcctttgataggtatttacgtcatttctatattttggctattgcaaatagtgctttacatgagagcgaagatgtcttttcaatatattgattttcttttcatgaatatatgcccagtagtgaaattgctgtatttgtaagcataaaagaaaagacttttttcataatcatgaaccataagggacctaaatttatgctacaatcaagcataccatagacaattttttttatgtatattgtaatatgtatatttgttctgtttttacaaatgtttaaagacctgtgcttggttattggcttgtaactttagagggatgacagttacatagatcttcaaataacaataaagaaagaaactagtcaaatggaaaattgcagtcacaaatttgaatagaaagccttacaaaattaagaactgttagctattacaaaacttggactcataaattaagtttctgtttggttacatggtaagttaggttgcactttgttgcataaaaattcaaattgtgaagacagactcagtctagtgacatactgcttagataatacaccgaaagcacaaagagcaacatcaaaataatttgggccttttcaacattttaaaaagaaatttttcctaaatgggcactatcatggaagtgaaaaggcaatcacagaatgaaaaaagtatattttcaaattataaaaggtatattgtccaggatatataaacagcctttacaattcagtagtaaagaatgtataactctattaaaaatgggcaaaggatttaaatagacatttctatgaagaggatatgcaaggaattaataagcacataaaatgctcaatatcatcagacattacagaaatgtaaatcaaaactacaattagatatcacttcacacctattagaatagctatggaaaaactaaaacaaaagtttcaaatagagtttggaaatattggaactgtcatggattgacattgaaaaagtaaagtaatgtaactactgtggagtactgtttctcagttcctcaaaatttagtcttggagttaccatataatccagcagttctactcctagatatacagacaagaaaagttataatataatgaccgcataaaaaggtgcatatgaatgtttatagtgacattattcacaataaccaaaaagtagaaacaatccaagtatcattcaagagatggacaagacaaatgaagtatatacatacaatgaactattatttatcaatatagataaatgacattctgatacatcctacaacatggatgaaccttgaaaatattatactaaatgatacaagccaaacataaaggggtacatatgaatgtgaagttcacaagtacttctgactctacatttcgtttttggcagcttagtcaagaaagcttgaaaattttcagaagcgtccatatggtgacttcagaatttttaatgatttatctcattcatttggttaaaaatacctgtcaggatgttgataatatcaatttggaggagatctttatatatacaaattttagctttttgtctctaaggccaaaattatcagtaagccttttgtttgtattttataattgtgtatagtatttttaccatgcaagcttttaaaaaactgtatatagaacaatgtttcattatcttcatttattatttctggatttggggtcatcatttgaaagattactctacaccttcctatgataaagaatttgacacatgttttcttctaatacttatatatttttatttttacttatggatctctgatacatttggaatttatattagtgcatcatatgaatactatattcagttttatattattccatataactatctggctttttaaaatatcacttattaaaatgtccctcttttctctaaagagtgaagattttgtcttcatcatttattgaatttccatgtgagcttgagccaattggggaagttgaaaaattctatttcattaattcgtctattgaagcaccaaagtcacttgattttaaaagaaattttcagtctgtttaaaggtttattagggttggcccgctctcattattctttattacagatttttatgtcattctttctcgttcactctttcaaataaactccataatcacttgtcaagctaatgttatttttaattgttttacattaaaatatatttctcttctgatcatttcaattttcttggtaaaacagaatgaaagatcaactaaaagtaaagatggaagagatattggaatttgaggaggaaaaatgtataaagtagctatctagaagaaaggagagctgtcattatatgacatcattaagagctcattttaggtttgtgttcttgaatttaaagggagatcagtctatagattgtgtattttcctctagtcacattcagctgcactgtactgatgggcaataaacaggtaattgcatttggtttggccaattttgtttaggaaaggcaaagagtagaagctgaagtataaataaaaagaatgattaaaataattaactatggagtttaattttataagaaaagagacaaggatatcaaaggaataaagggcgtatcaataaattttattgctagttttggtgtattagaggaaatgagctcatgttattagtgtgagttataataattaaacatttgtaccatttatttagctcttaatgttttccagacactctgagagttgctatatatgtagtatgtatttcttagttatttgaggtaagtactgttataatactcatttttaaatgagtagatcagtctattatgaaataagaagccaagagacacctataaaaaatctatacctaacatcatgtttaatggtgaaaggttgaatgcatttcttctaaatttgagaacaagaaaaggatatctgcttttgccacttcagtgttttattggagg

SEQ ID NO: 480063 - DNA, 593 bp, Homo sapiens
gcatactacttgatatggtttggatctgtgtccctgccaaaatctcatgttgaattcttaaacaataccttctatgaagaacgccgtagatggaattacccctatcatacaagattatctgaaaaagctgctggctcattattccctgcacaagcctccgcaactgccctatattccccgcaaagaaaccaagtgggagaggatggaggtttttgcaggacttgcgaaagacctacaagagacaccactggataatgctgagatagaatggtatacagatgggtcttatataagagaagaggatggaaattttacagcaggatatgctgtggttttattactagaggtaattgaagccagtcctcttccccaagccagatcagctcaagcggccaaattgattgccctgacccgagcttgtcaactggcaaaagacaagactgcaaacatttacactgacagccactatggggttgctcatgactttgggatactatgaaaagagagagtatatttaacctcctcagggcaacccataaaaatggacaacaagtatcacagctgttagaagctattctaaaaccaaaatgttt

SEQ ID NO: 480064 - DNA, 2076 bp, Homo sapiens
tttgttacctctgtggcacacaataatttaatgaggaaagaagaatacattcaagaaaacatgattatcaccgtgaatctttcttccacactgaccattggctgttctcctccaggtaacgtcaagaacttctccaaacagaacttcagcttctctagtgggggtgtgtgttcaaaaaacgggggtctcccattcccacttccacagctggggcactatcagtatttgagatgtctcctgggtcctgcaggagcagtctgctgccttcagagggtctgtggttactctcaggattgctggtttgttcttgcagtcgatctggagctaaaattcacagtgcaagcctttgcaatgctgctctatctggagctgcaatctagtcctacctcctgtctgccattatctgcagaagctccaggactacattacaatgtgacatttggaggggacaaatatccgaatgataaaaaccatttttttaacttttgttgatttaacgtctgttttatcaaatataagcatagctacttcttcttgctttttgtttctatttgtgtggaatatatttttgaccctttaaatttgtgtctgcagtgtctttaccagttagctgagttttttataagcagtatatacttggattctgtttttttgttttttttttaaatccatttcatcaatctgtgcttttcagtggagcatttaacacacttacattcaaagttaatattgaaatgtgaggttttgttcctgtcttaatgttaatttttaccttgttcctttgtagtctcaattgtgtaattgttttataatatctgttagttttaaacttttgtatgttttgatgattgtgggtagtgacctttcactacaatgtttagaagtcccttgagcatttcttgtaagactggtctagttgtaatgaactcctttagtgtttgcttaagtggaaaaggttttatttctcttttatttataaagcttagtttagctgaaacaatattcttggctgaaattttttcttttagaacgctggaagtagaaacccagtctcttctgtttttcttttaggtttttgctgagaaatccactgtcagtctgataagacttccttcattggtgattagacacttctttcttgctgcttttggatttttttttccttcacattgattttgggtagaatgaaggcaatataccttgatgaggttcttcttgcaatatatcttccaggagttcaggtgttctctgagcttcttgcatctggaattctaaaactctggcaagaccagggaaattttcttgaattatttccttcaataggttttttatactttttatttttttctccctatggaatacctgtaaatcatactttggatactttgcataatcccgtatttcacaaatgctttgttcatttttaaaaattgtttttctttatttttatctgactgggttaattcaaaacacctgtcttccagctctgaaattccttcatctgtttagtctagcatatttttaaagctttaacatgtgttttataatttcttcaaaatttttttgtttctataaattctgttttcatttaaaaatatttatgtcttctttcatattctgaattgttattctgatttctttgtgttggtttttaactttctcttggatctcactgagtttccttccaatccatattttgaattctttatctcttatttcagaattctcattttgattagatctattgctagagaggtggtgatgctttgtggggatcataacactatgttttttcatactgccagagttcttacactggttccttctcactgtaaaagctgtctcttcttattttttaatttactttcatttccctggaatatgtgactataatgtttgttgtgcatggtcatttggcttcactcattatagataggtgttgtggagtggctttctcaaatgtttcatgtactagtgatttactgggcatatgagcaggcacgctgacttctgaagtaccaggattgtggaggtctcagaaagcttctttctttccttagtactgtgtgcttgtgt

SEQ ID NO: 480065 - DNA, 500 bp, Homo sapiens
tacccttcacagcatctattgcacgtggctggggaggcctcacaatcatggcagaaggcaaaggaggagaaaagtcacttcttacatggtggcagtcaagagagaagggcaaagcaaaaggggaaaaacccctcacgaagccatcagatctcatagatggaacagcatgtggagattcacattgtgaacttttgcttcaaggactaccacaggaacatagcaggaaaaccaaaagaattcacagaacctttgaaggaagcagcttgccactgcaagcttcctgtgacagccaaaaaactgtgagtgcccaaggtgtgagagaagaaaggtccacttctgaacacaaatcatccctggggaacctgaaaatccacatcatggagaaggatttaatcttccctagagctaaaacaaatttagagtgtgaagcaaaatataaaggtagaagaagcagcagaaagagccctgtgggtactcgcaatccccaatgaagccatttt

SEQ ID NO: 480066 - DNA, 921 bp, Homo sapiens
cagttaaagaagactaactttggcagggagaaaagtttaattgctgtagaatggagcagaactctttggctgggagagggggagactccatgagggcctggcggggaactccagctagccgtgcagggcccttgggccatttgtcccaacctggtcaggaagaggagagtgactgctcacctgtctgtcccaaaaaaggaaggaaaaggccatggaaaggctgggttggactgaaaccaacatttctgacacccaggagcaataggggatggggcacagttgcctctaccctccgaagaaatccgcgggacccgaagcttaggagcaaaagagagaaaggtttttttgtgtgtgcttctggcatctttactgagaatcagttggatgcagatgcatggaattattttgttcagtttatccatgtgtttggctttatgcctgtggcatgctgctttggttactttgtagtatattttgaagttaggtagtgttatgcttatagcttcataatttttgcttaattgctttggctattgaaagtattttgtggttctaaatgaattgtagaatgttttttgctatttctttgatgaatgttattgatattttgatagagattgcattgagtctgtacatcactttgggtcattggtacattttaacgataatatttatctctattcaagggcacaggatatctttttatttatttatgccttcaattttttgtcagtgatttatacattttagtggagtgacctctcaccttcttggttaaatttatttctaagtatcttatatttttatagctattattttgactctgcttattttatgtttaaatgttaaacatctttattgaggtatagttgatgtacaataaactgcatatattaaagtatacaatttgttaagttttga

SEQ ID NO: 480067 - DNA, 828 bp, Homo sapiens
cactagtgacaataaagcaatataagcatggaaatgttaaatacaaaatgtctccctagagacttgttaaatggctttcaacaaaatgctgataatgatgtggacaatgaaatccaggctgaggtgatctcagatggagatgaggaacttgttgctgctccagctgtgcctgaaaggagcaaatgtagagcttgggtcatggcttcagagggtgcaagccccaagccttggcagcttccatgtggtgttgagcctgcgagtgcacagaagtcaagaattgtggtttgggaacttccgtctagatttcacaagatgtatggaaatgcctggatacccaggcagaagattgctgcaggggcagggccctcatggagaacctctgctctgacagtgcggaagggaaatgtggggttggagtccccacacagagtccctactggagtactgcctagtggagctgtgagaaaaggaccaccatccttcagaccccagaatggtagatccactgacagcttgcaccgtgcacctggaaaagccgcagacactcaacgccagccatcaaggcagccagagggaggctgtaccttgcaaagccatgtgggcagagctgcccaagagcatgggaacctacctcttgcatcagcccgggaatggactaatacaataataattcataaatgtaagatagcagcaaaattagaagtcaacagatcttgtgtagaggtgatagatcaaggctagaggcaaagtatattacggtatgaagacaaccacaagaactaaaagtagaaactcttaatggtgtttatttatgtgtagtgaggctaa

SEQ ID NO: 480068 - DNA, 823 bp, Homo sapiens
ttctcctatctgtgcagctgattccatatgtgcctgagcagctgcttgtctgagacgctaggtagctctgtgtgtcagactgaaggccctggtggagtgggttcacagggttatctcttgaccttaggcttgcaaagatccatagaagaagcatggtttcccaaggctgcacatttattcaccacttcactgggttgtggaggttccattaactccatgtcactcccaggaaaaatgtataatttggtttggctttgtgaagagacccattctctgtgcataaactctccaaattatagtgacttcagtattcaactgaaacttaagggagaactttctcatactagtataactgtattatataaagatactattgctgattctgtgataccaatattatggaattgcagagaagaaatatttctattcaagtttataatgttttctaatgtataaatacttaacagactgaaaatttcaattttaaagcagataaattaataattgataactcacattataaaataatcacattacaaagtaacctttacttaataactgactttttttaaagtagtgagatttttttagactaatgatactttgcctataagtgagtttaaaatttcagttcctatatttatatagaaacttttcaagtttagcctattttgatctcattttacatcctatctccacaagtattatatctgtaactaaagcaatatgaacaatttcaaagatatttttgcttgatttctatataaaaagcaaatagatataaatttcacttctaactaatatagaataataaatatgattt

SEQ ID NO: 480069 - DNA, 687 bp, Homo sapiens
ttgaagatgagatttaggtcttcgaagaattgccacagtcttccacaatgattgaactaatgtacattcccaccaacagttctgatgatggcaagggcagttccactgcagaggcagtggcagagaggccttcagttgctcctggaggctctgcacagggagttacctgtgtcttgatggttctggtggaggatggctggaatctgaagcctggagcacctgcctggtgcccaaacagcaaagatggtggcccacccttccccctaggaagctccttcttagggaagggcaatgccactaccagtggctggctggaattccaagccagtgggtcttatcttgtgaggtgccacggaagtagagccttcaggctgtcactgctcagccccctggattcagcctctttcctggggaacagatgtggggatcatgactacactttttcccaacagagaacttacacaagattacatgatccttattcccaactcaatcaaaaaggttggtgttaatggcatccggtcttgcaaaataattttcaaatctcatcacaatggaaaaagaaaactctggaagcttactatataacattttgcaataatatgcttcctaaacaaatagctaagccttggttttctttttgaattttctgacaaaatgttattttaattgaaggctttaaagttc

SEQ ID NO: 480070 - DNA, 587 bp, Homo sapiens
agctcaaggtttgtaaaggtaccagtcaaaatggaccaatcagctctctgtaaaatggaccaatcagcaggatgtgggtggggtcagataagggaataaaagcaggctgcctgagccagcagctgcaacccccttgggtccttttccacgctgtggaagctttgttctttcactcttcagctgtaacactcaccctgaaggtctgcagcttcactcctgaagccagcgagaccatgaacccaccggtagcgagaccacgaacccaccagaaggaagaaactccagacacgtctgaacatcagaaggaacaaactccggacacaccatctttaagaactgtaacactcaccatgagggtccacagcttcattcttgaagtcagtgagaccaagaacccaccaattctggacacaggtagcaagaccacagaagtaatggaaggatacaggatgccatacttcagtgactgtcaatgcctgactcagaaaaaaacaaactgacaattcaccttgtttaacagagagtctatatatacacgatgttgtcacactgactttgtgaaatagaactattacatttctgatctt

SEQ ID NO: 480071 - DNA, 1320 bp, Homo sapiens
gcgtagtgccgtggaaaagaactgtatctccacttcctcggttctctggaataaattacaaccttatgactcatgagtccaaacaggacagtctttacgtctacccatcttatgactgatgtggctctcaaggaacaataaaacctaagcaaattatgggaacaagcatttatcaaccacgcaaatgaagccattctttgtatgtattatgcatctcaatctccatatatggttatcaacgtaataattcaagtaaagagtttttctacaccaggagttccaaaatcaagctacattcaaagagagaaacaacacattggatactcaagttatgaaccgtgagaagagtcagaaattccttataggatagaacatgtgcaattgaaatctaatattaagttttctgtggaaaaacacatatatgtgtactatatggctatctgatcattttaaaaacatactcagaatactttaataaaacactgtgagtatgaattatctatgctttaaacactttacttctctttctgcatttatgccatcacttcttatctcttcataccttgaactttttcttttccccctctctcactctatgactcctgaacaaaactgtcatttccaatatctaacttcattaactaagtagggatggcagatgtttattatcaccaaaatgcagcataacatttgcaaactggtttatgacatgcatctttataaagtgctcagtgaaatgcataaacgattgattgaaaattggtcaaagagaatattgagtactttattagttactggctaaagctaaggagttacagaaaagcatcatatctaaataaggagttttatttgaaatatgtaatttcattatgaataaattccataaaataaactaagaattgctaaatgatttctaaggctccaccaatcgctgcacattacccccagcaaggacaccaatttaacaactatctacacagaaaaaaacacccatataagaaccgaaattcaggagttgaggaggagatcaaaaggaacactcctagttccgataagtggcaaaggaagaccttgaattcagatctgactctaatgtcagtgctcttaactattgtattagtttcctgtggctgccataacaaattaccacaaattgggttacataaaacagcagctatttattctctcacggttctggaggccagaagttttaaatcaaggtgtcagcagggtcacgctccctccagaggctctaggggaaaatccattccttacctcttccaacttctgatggcttcggtatttcttggcttgtagcca

SEQ ID NO: 480072 - DNA, 1728 bp, Homo sapiens
tgttacctggactccttgccttctgtcatgatttttttacaagggtgttctttgcaataccttattgggaacagctcccgtcgacagttcccagcgtgagcaacgccaaagatggtgatttctgcatttccatctgaggtaccggcttcatctcactagggggtgccagacagtgggcgcaggtcagtgggtgcgcgcacggtgcgggagccgaagcagggtgaggcattgcctcacttgggaagcacaaggggtcagggagttccctttcctagtcaaagaaaagggtgacagacggcacctggaaaatcgggtcactcccacccgaatactccgcttttccgacgggcttaaaaaactgcacaccaggagattataaaccacacctggctcggaggctcctatgcccatggagtctcgctgattgctagcacagcagtctgagatcaaactgcaaggcggcagcgaggctgggggaggggcgcccaccattgcccaggcttgcttaggtaaacaaagcagcagggaagctcgaactgggtggagcccaccacagctcaaggaggcctgcctgcctctgtaggctccacctctgggggcagggcacagacaaacaaaaagacagcagtaacctctgcagacttaaatgtccctgtctgacagctttgaagagagcagtggttctcccagcatgcagctggagatctgagaacgggcagactgcctcctcaagtgggtccctgacccctgacccccgagcagcctaactgggaggcaccccccagcaggggcaaactgacacctcacacagagtactccaacagacctgcagatgagggccctgtctgttagaaggaaaactaacaaacagaaaggacatccacaccaaaaacccatctgtacatcaccatcatcaaagaccaaaagtagataaaaccacaaagatggggaaaaaacagagcagaagaactggaaactctaaaacgcagagcgcctctcctcctccaaaggaacgcagttcctcaccagcaacggaacaaagctggatggagaatgactttgacgagcggagagaaggcttcagacgatcaaattactccgagctactggaggacattcaaaccaaaggcaaagaagttgaaaactttgaaaaaaatttagaagaatgtataactacaataaccaatacagagaagtgcttaaaggagctgatggagctgaaaaccaaggctcaagaactaccaaggcaggccaacattcagattcaggaaatacagagaacaccacaaagatactcctcgagaagagcaactccaagacacataattgtcagattcaccaaagttgaaatgaaggaaaaaatgttaagggcagccagagagaaaggtcgggttaccctcaaagggaagccgatcagactaacagcagatctttcggcagaaactctacacgccagaagagagtgggggccaatattcaactttcttaaagaaaagaattttcaagccagaatttcatatccagccaaactaagcttcataagtgaaggagaaataaaatactttacagacaagcaaatgttgagagattttgtcaccaccaggcctgccctaaaagagctcctgaaggaagcgctaaacatagaaaggaacaaccagtaccagccactgcaaaatcatgccaaaatgtaaagatcatcgagactaggaagaaactgcatcaactaac

SEQ ID NO: 480073 - DNA, 737 bp, Homo sapiens
ttatcaaaatgagtccaggaacgtccaccctgcaaagaaatttaaatttacatgcagttccggaaacttcaaggactaaaactaggagttacattccagagagagaaacaaatggctcagccccagggagatccaggttctgtctctgagcctctggatggagttattggagttcctgcagaaaagcctcacccactgaggaagaatgaatcagggtctagcctgaagaggcattctgtctgcagtctgccacgccagtgtgttgagctgtggaggacaaatctgagcagctctggagtttggacgctaggccccggtggcataggatcgctagtgggatcttccgatccatgggttgcacagttccatggaagaagcacagtttccccagttcttgttacttatgataatgccctttcctcaaaaaaaaaacagaggaattttaaactttatgatagtgtcaaaatgatacatcatcagtagaaacaatacttcaagtactcatacaaccattctggttttcactttcagtacgttattcaataaattacataagatattcaacactttgtaataaaatagactgcattagatgattttgtctagttgtaggctaatgtaagtgttctgagcatgtttaaggtatgtttggctaagctatcatgttcagtaggttaagtgtattaaaagcattttcaacttagtatattttcaacttacaatgagtttattgtgac

SEQ ID NO: 480074 - DNA, 739 bp, Homo sapiens
cagttattaacctactaggcaatgatattatccagatcagcttatcccaggaccttatcaaacaccttgatgaaatctagggatgtggcttcctacaagcaggactgcagtgattattatttctctcctgggtctagccatccagcagagcttatgggctctgggctggtactggggagtgtctgcaaaaagtcctgtgatgtgatctgtcttcaggtctctcagctgtggataacagcacctgctccagtggaggtgagtctagctgtggccgctgtgggggatgggagtgtgtttctcaggccaatggagttacgttcccaggggaattatggctgcctctgctgcatcttacaggtcaccagggaaatgggaaaccaagcagagctttcaggttttgcccctcctggtcgcagcttctatgctcctatctgcactttctgtttgcccccatacctccagattctgccctggaaaatttgtgctcagtcaaaattactacaaagttcagctggaattttccttctctctgtggtcttttcccagttccactggccgccctcctcaaggacccctgtgagataaagtcagaaatagttccttgggcttccttggggaccaggagtgcctaaagggcttttcccatggcttcttctacttttatatttcatttggctgtctaaatttgtttcagctctgggtaaagttaaatctttctcctgtgatctggattttcagg

SEQ ID NO: 480075 - DNA, 452 bp, Homo sapiens
aggtgctttatgtacactgtctcatttaattatctcaacactgtgaggcgcagtagatctatacagcctcatcatatggttccctgtgtcccagctgctccatctcgagccatagctaaaaggggtgaaggtgtgcagaagacaggagttgaggtttgggaacctctgcctaggtttcagaggatgtatggaaatgcctggatgtccaggcagaagtcttctgcagaagcagagacctcatggagaacctctgctatggcagtgcagagggtaaatatgagcttagagcccccatacagagtccccactgggcactgccaagtggagctgttagaaaagggccaccatcctccaggccccagaatggtagatctaccaacagcttgcaccatgcacctggaagagccacagacactcaacaccagcccatgaaaacagctatgagggctgtg

SEQ ID NO: 480076 - DNA, 1058 bp, Homo sapiens
gcaaagatccctaggaaggtcctgggcctggagcgagtgtccctggcacccaggcctctgtgggcatccctcagcatgcagaccctccccaagggggatgggctgccctccgtggcccaccagcccagctccagaagtccagaagctgaccctgaggccaaggcccagcagcatgaggggacttctgcagagccccgggcagcaggacactctctgggggctcagccgcccagagtgcagcaagtctgttcctatctcaggacagaccccaggattttgggcgatttctgtgtgggtgtcctctcccaaaactccccatgtacctggacatccagggctcatggtttctacagtgcagctttgagcaggcatgctgaactcctattccttccacatctgctctggacatcgccaggaccaatggacaggcccatccctgcaaccccagcagggctccaacaaccagacccggcccaccccactgaaaacccagagagccatggggctgcgatccagcccaagccctccccaaccaaagccctaagagaaaaaggacccaggggagccatgggtgccccagaaacagctaagatggatacacaggggactgagttcctgggacactggccagaactagactgtggcccaaggcagggcaagccccttaaagcagtgtgtgggtacgcagggcctgtgcatgcctggcagagccaagccagtgacgttaccaggctcaaagagcaaccatccacgacggccatggtggggcaggagcaggtgcattttgccactgggaaaagtcagaaaaggtggcctcagtccatgtaagcaggctccaaagtaggcaccatagctgcagggggagaaggagctcctggcggcactggaataggctctggcaggatcccagattctgtgattctgtcccccgcaacctgttttttgttttgtttttttttttgttttttttttttttttttccccttgagtgcttggaatcgtccccattttacacggagtctgcagccattgacaatcagtttattagaggacttgtc

SEQ ID NO: 480077 - DNA, 447 bp, Homo sapiens
caagttaacatttgtccacggatgtggacaaatatagctatcctctcaagtgcattttcccaatcacagtactctgtttgcagagtgaaatatgagttggagcccagtgtgccagagcctcaacaagaagaaccaccagctgaaagttgggatcctacacctggtcagaagagagaagaagatcagggtgcagctgagattcaaggtgctgggaagggaaaaaaagaatgtttattgggagaaggaggcctatatgggcatcatggcttatgccatgaccaagaagaagactggggtcctcctcaagttgaagaaattctgcctccaccctgcccttggatttgggctctcatatcacctctgccctggctctccagcctgacatcctgctctgggagatttggacttgccagtcgcaacagctgcatgagctaggtcttcaaaacc

SEQ ID NO: 480078 - DNA, 525 bp, Homo sapiens
gtccctgatattgtttatttgttgtcttcttttttttaagctgtcagttgtgcttaagttttatcaattttgtttgatgtataggtaaactcgtgtcatggggatttgttgtatagatgattttgtcacccagggcagtgtggaagcaaaatgtggggtggagcctctacacagagtccccactgggacactgcctagtggagctgtgagaagagggccactgtcctccagaccccagaatggtagatccaccaacagcttgcaccatgcgactggaaaagccacagacactcaatgccagcccgtgaaagcagctaagaggaaggctctacactgcaaagccataggggtggagctgcccagagctgtgggagcataccccttgcatcagtgtgacctagatgtgagacatggagtcaaaggagatcattttagaactttaaggtttaatgactgccctattggattttacacttgcatggggcttgtagcccctttgttctggccaatttctcccatttagaa

SEQ ID NO: 480079 - DNA, 597 bp, Homo sapiens
tgtaaaacttcaatttctaacatggactacaaagctctgtgtgatctcgtcatttcctgtttccatccacatcttgggctatcaaaatgttcaactgtaaagagtcaagcaacaggcaaatatctacctccctctatcttttccatcctgttctttcactccttttccgcaaacgagaaaggccttggggaatttttgtcccgggactcctcattctttcttcccatctcaaagccttttgatttatattgggaggaccatggtgtggttgcaggtaatggcaagcaggacacattcttccaaggctctgaagctgcagaggcctgcacaaggagctgtatggctaccaagatcctcttcaaaacccataagcagaagatcgtagttttcatctctgcagagattgaggaggttggacttaaagaaactctggacttgcagaagctagatgcagttcagggtgaagtaccagatttaacatagggtaaaaatttttcagtgtcaacacattttcagggcaaacttttaacttgacaatgctgtgagacatgttttgtatgttctgctctctacttcactgattttcaaagcacaaaa

SEQ ID NO: 480080 - DNA, 693 bp, Homo sapiens
cccagcaggggagctgaggtggctccaaccctttacccgataagacctcagtgcaactcactgagagctcctcaagcaacctcggtcaaggctggggcctctgcccagcattggtcattccatctccagccatggctaaatgggtcccagatgtgtctcaggccactgctccagagggtgcaagccataagccttggaggcttccaagtggtgttaagcctgcaagtgctcagaggaaaagaattgaagcttgggagcttctgcctagatttcagaggatgtatggaaccaactggatgtccaggcagaagtctgctgcaggggcaaagtcctcatggagaacctctagtggggcagtgcagatgggaaatatgggattggaacccccacacagagttcccactcaggtactgcctagtggagctgcgagaagagggccaccatcctccagaccacagaatattagatccaccaacagtcttcactgggctcctagaaaagccacaggtactcaacgccagcccatgaaagcagccaaggaggctataccctgcaaagccacagggcagagctacccaagtctttgggagaccccctcttgcatcgtgtggcctggatgtgagacatggaatcaaaggagagtattttgaagcattaaaatttaatgattgccctggtgtttcttggactagt

SEQ ID NO: 480081 - DNA, 999 bp, Homo sapiens
ccctgtagcctttttttttttttttttttgaccaatttctcccttttggaatgagaatttacagaaatcctttctctctcggtctgtaccgtccatgacaactattacaaatccagttagcatatatcaagtagtggggcagttttggaggcgattaagtcacgagcacactgtcctcatgaataaggttagtgttcttacaaaagagattgaagggaatgccctgccctgcttcacctcttcaaatgtgaggatgatggaaaagctgcctatgagaaatgggtcctcactagacatcaaatctgctggtgccttcagtttggacttcttagcctctagaattcaaagaaaactatcaggaacagagagattctttaatgttaaaagtggcaattcaccacaacgacctaaatgtgctaaatatacacccataaaggaacaaaacttcaaattgtataacacaaaactgatagaactgaaagaaaaaaatacacattagaaattagaaagaaaattagaaagaaaaggatgttaacgtccgatgagtaatcatctgacactacaaaactcactaagaatatagtaagtacacagaaaaacactgagtattatgaaactgtaactgtgatgtgtaaacaacacttatcctgagtagaaagactaaataatgaacaaatcaaaaatagtaagtacaacaactttgcaaaacatggacaacccgataagatataaataggaacaacaaaaagttaaaatgcggggagataaagtaaaggtgtatagaatttaacagtttcatttttgcttgttttttgattatgtaaagagtgttcagttgttatcagttttaagtaatgggttataaggtagtatttgcaagtctcatagtaacctcaaaataaaaaacatacaaaggatgcacaaaaaataaaaagcaataaagtaaatcatattacctgagaaaatcacctgctctaaaggaagacagggagaaacatt

SEQ ID NO: 480082 - DNA, 687 bp, Homo sapiens
tcctgcctaaaggtttgcagacaagaaagaaaacccatacccagaacaggaaactctcatatttcttctgccatgctcgatgtcaatttggaacttccaagaagcagattttcccctgtgtcttctcatgcagaagaagtctttcactctagccaccacagctgggaatgtgctgcatcacccaaaagccagcatgtctcagagcccaaggcccacagcactccctggatattgctcctggttattcaaggccaaagagctctttattcaggagttgatcaattctgccagaactgggctcttgctttcaaggcggtgtgttcccttttagcccaggagatatctagaaatgttatcttggggataggacctggaaagggtacctcacatctctgcctggtaccctatcctactatggctaagctggtatccaagatgcaaaacaaaatcctctttactctgttctcctctactaaagcagaaggaaagagtcacctttgttactgtgagctgcactgcctggggttggaggagggagggcaagagcactcccatagccatgccagctggtgtctccctaggtcatgtgccactctagtacactggctctaagcccagcctagtactaggaattgcctaggaattgcagttcttgtgtgctagactgccttccaagtttacctagga

SEQ ID NO: 480083 - DNA, 509 bp, Homo sapiens
ataactgctgtgctgtgctcactcaagtcccgtgtcacctggagcttcccttggatgtcccacaagtacctcaaattcaatttgttcaacagtaagcctattatctctcctcctccaatgtactgcttatcaatgtccccagttacagtgctgaaagctctccaatggctacccgtgaacattaaacaagaagtcagtcagtgtgcaactcagaagataagagaatcctcatcagaaataaacaatgctggcatcctgattcccaacttgcagacttcagaactggcaagccccttctgcctacaagcctgtaaaattaaaaagcaagttagttacttcctcgagacaatggaggtacaagtattgggtaaatacaactattcccaatgggagaaattggccagaataaaggagctaaaggccccatacaagtccaaaatccagcgaggcagtcaaatcttaaagctccaaaatgatctcctttgactccatgcctcacatccaggtca

SEQ ID NO: 480084 - DNA, 638 bp, Homo sapiens
ggaagctgaagtctgagagcagggtgccagcattattatgttctgaagagggctgctctcttccagaatgttgaatattggctaccaatttcttctggcctgtagagtttctgctgagaggtctactgttagtctgatgggtttccctttttttgagtgtggtccagaacgggagaaagctctgcaacaggtccaggctgctgtgcaggctgctgggcaagctgctctgccacttgagccatatgacccagcagatccaatggtgcttgcagtgtcagtggaagataggaatgctgtttggagcctttggcagctccccataggagaaccacagaagggatctctaggattttggagcaaggccttgccttcttctgcagataactactctccttttgagagacagctcttggcccgttactgggctttggtggaaaccgaatgtttgactacgggtcatcaagtcaccatgtgaacttaactgcctatcataaactgggtgctttctaacccatctagtcataaagtggctcatgcacagtaatgttccatcatcaaataaaagtggtatatatgtgattgggcttgatcaggtcctgaaggcacaaataagttatatgaggaagtggatcaaatgc

SEQ ID NO: 480085 - DNA, 593 bp, Homo sapiens
tgcttttctccattctcctctcatgagatctgacggttttataaagggcagtttcctgcacatgctctcttggctgctgccatgtaagatgtgcctttgttccctcttcaccttccaccataattgtgaggcctcaccagccacgtggaacttgtcatttacagtgcccctgccagtaaatctaagatgggtagagaaaaaatattttccttccctgcactataatgtacagcaaagcctacccacaagaaagaattatccaaccctaaatgtcaataatgctatgatcctatttgcctggtctcttccacacctggaggtgtcaccagtggaggctgcagagctgcaaagatggctgaatgctccttcttctgggatctctttcccagaggggcaccgacctgatgctggcatgaacactcctgtaaaagatcaatgacctggatacttctcctgatgttttcttgtaaaattttcatagtttgaggtcttaggtttaagtatttagcctattttaatttgattttcatatatgagtcatagaggtactgccttgatggtcttggacaagatccaggagatttctctgcatt

SEQ ID NO: 480086 - DNA, 770 bp, Homo sapiens
aattatgtcgtataaatatgatccatgtactacgtgggacatacttatattaagcaattatttattgttcatctgaaattcatatttaactgggcatcctgcattttatccagcagctgcattcctgcggcccacgtggtgaatttgagaacagtcagtgtgtgcgacagtcattactccttggagactcccactccgccagccgggcgcccttcgtgcgttcttggtgccacagcggcctccagtggttctctgaggaaccacacgctgtctccaccgccaggctccagcttgtccctaaagccagggcggaaggcggcggcgccctgtggctgcccaggggcctgggctgtgtggccggatcagagctgtaaggcacaaatccaagtgcgcgccgccgtggaaacaaagcccttccctgttgctgtgaagctcagaccagacagggttctatttcatcttccacgccaacgtgtaacgtatctgctgacccaattttacagatgttctcttcaaaacggactcggctttgtgaatatttttctctatcaagctgtggtgatagaaatgtcaaaaagcagtgggaaaggtaaaaccactggaattaggaccccctacccctgcccagtgcctcttaccgccaacctagcaacagcctcgcttcatttcctagaaagggcggcaccagcgatccattattgaaaacacgcgactcccataaccttgttcattttcatatgtgtagctcagggcaagaggttctctgctac

SEQ ID NO: 480087 - DNA, 563 bp, Homo sapiens
acttcttttgtggatcttcagttacttcaggccatctgggtgtatacgtgcaagtcacaggggatgcaatggcttggcttgggctcagaggcctgacacttatcaccagtataattgacggccattctagcctcccactgcatgaaggagtgagaaccacttcccaacataaagttgccaaaaaccaaaggagacgtcagcttatgcaggacttccaatctgcagccctctcccctggaacagctttggagaagttctcacttctttacctctttttcccgcagctcttcagagtgagcaatgccagtttcttgaatgctattgctgatgctgaagggaacgtggtcatgatggtcaaaggaaatgcacattggagcattttggattttgaattttcagatcaggcatgctcaaacaactggaatgtagagaaactgggggagcaagagagaacaatcatggctttggtcaccaggcaattgacagaagttcaatatctggtagccccatatgattggtcattttcttttcagcactgggagtccactaacctgttctagact

SEQ ID NO: 480088 - DNA, 594 bp, Homo sapiens
ctgatttacacacccaccagcacgtctgattatgttggctttgagtttgtcatgagtttgtcatggatggctcttactactctgcgaagaagacaaaaaagagggaaagtttggaacttactagagacttggagggctcagaagacaagatgtgggaaactttggaacttcttagagacttgttgaatgtctttgaccagaatactgatagtgatatggacaataaagtccaggctaaggtggtctcagatggaaatgaagaacttgttgggaactggagtaaagatcactcttgttatagagagagactggcagcattttgcctctgccctagagatttgtggaactttaaacttgagagagttgatttagggtatctggcagaagaaatttctaagcagaaaagtgttgaagaggaagcagaacataaaaatttggaaaatgtgcagcctgactatgtgataaagaagaaaaccccattttctggggagaaattcaagcttgctgcagaaatttgcatgagtgactaggtgcaaaatgttaatcaccaagacaatggggaaaatgtctccagggcatgtcagagtcctttac

SEQ ID NO: 480089 - DNA, 584 bp, Homo sapiens
acaaggtgtaccagagacaaggcctgtagttcatctgctcctcagcaccatgggtgtagtcactatcctgggggcatgcaagctggagctggggtgcttagggattcaaggaccttgggctccatggaggcctgagcagcagctctttccagcttccatgcagctctcaattcagtctggaggccctgggaggagggagcaagggagaatttcctatgcccaggattgcaaaagtctgtggcagaagtgtcagtctctaggggttctcactcactcatttcccacggtgaaaaagaagggaacttcctcaacctactgcatctatgaaaaacctacaaatgtcattatacataatggtgagggactgaatgctgtcccccaagatcaggaagaagaaaaatatgttcactctttccacttccattcaacactgtactgaagtttcaagccaggacaatcaggcaataaaacaaaatagagtattctggcagtcgttcaaattattaaacatagagttacctcgtatgacacaaatttcaccatctccttgactctctttttaattgtcattctaatccagattt

SEQ ID NO: 480090 - DNA, 614 bp, Homo sapiens
gagggtccgtggcttccttcttgaagtcagcagcaccctaccccatcattccccctgagaatctcactaccgtcctcctatttacagccctgactgaatgcatctctctcaaccacccatcagttgtttggaacttgagaagcatttttcccatggaaacaatgttacaaatggtgagaaggttcccaggccagtccacaaaggcctatttaaccaagaatatggctggactatagggcccatagcactagaaagccagccgccattaagattattgtttctatgggaaaatgtgctcccggggctaattgtggatgccagcagcaattccatagccctgtctagcctctggcagctggagcctggactaccccagtctcctctttccttcaggcttgcaaggtggaaaggtgaaaagtcccaggggaatcagagagagagcgtgggagaactactcagcttcaaaatacactataaggctacagtaaccacaacagcatggtactagtacaataacagacacatagacaaatggaacagaatagaaaactcagaaataaagatgcacacctacaaccatcagctcttccacaaggccaacaaaaccaagcaat

SEQ ID NO: 480091 - DNA, 680 bp, Homo sapiens
cccaccggaaggaacgaactctggacacatcagcattccaaggatggggcttccagagagccagaatgcagtgattgttatttctcttctggctgtggataccagcacctgctccggtggaggtggcaggggagtgaagtggactttgcgtgggaccttggttgtagttttgtttcgtgtgctggttttctcaaatgctggttgtcctggcagtaaagttgtcgtgtggacagactcaggacctctggctagccaggatgttacaggtgttgaggtagctggtgagcagggctgggaatttgccccaggctataagcctccccacaggactttcaggcttcactccctccatggcatggcttctgtgctcatacctgcacttccaattcgccctgaacccccggattctgccctggaaaattcacgcccagtcaaaattattataaagttcaactggaagtttccttctccctgtggtctttccccaattccactggaagcctcccaaaggatccctgtgagataaagtcagaaatgggtttcattggcttcgctcaggtctgggaatgcctgcagggctcttcctgctgcttcttctacttttatatttctctcagctctctaaatttgtttcagctctaggtaaggttaaatccttctcccatgatctggattttcag

SEQ ID NO: 480092 - DNA, 2368 bp, Homo sapiens
ttcagctaaagccaatttccaaagagagctgacagctgaaaactataagcccagcagctccagtggaagctagggaaataaatccttcagtcctgaaggcacatttggattgtacatttttaacaaccactagagtccatctcttctgccacttggacccccttctttatagaaattctgggagcatcaactccagaactctgagttgtcccacattacagcaaggtgtctgtgcccacaaaccttaccaatggcaagtcactggatgcaggctgcacctgaaaagggtaaagccctcctgaactggattagtgcccttataaaagaggccacagagagcttgcttgctatctttctgctttgtgaggacacaagaagacagcattctgtgaccaagaagagggtcctcaccagaattcaaccatgctggcaccctgatctcagactgccagactctggaactgggacatgggaatgctggtatggtttggagctgtcatgccacaagacacgtaggaagtgggaccctcatgctcatcttcagccctggaagaagcttagcacaagaggcaatgcagaaaggaacacctttaggcaattcctaaaagctggtcacagtggccagatactgttggcctgctctctttctcatgttttcttaaagaggtgactataaaacagtatcagaagcatcaagtttggaaaagaactaaaactgtgtttatttgcagatggcttgatcatttatgtagaatatccaatgaaatctacaaaaaaactactaaaactggtaagtgattttagcaaagttgcaagataaaaatcaatatataaattcatttttaaatatactaggacaaataatcaaaatatttttaaaaagtaaaggcatttccactagcattaacgtatgaaatacttagggatatatctcacaaaatatgtggaagacaacaacataaaaaaatagacaacagatttgtacagccaattcattgaaaaagatataggaatgtaagtaagcactacacacctgcatggatggctatgatgaagaaacagaaaacatcaagtgtgacaaggatgttgagaaattgaaactttcatacattgctggtgggaaagtaaaatggtgcaatctctgtggaaaatattttggaatttccttaggaagttaacatagggatatcatatgatccagaaattccactcctaggcgtctaccaaagaaaactgaaaacgtatgcatacacaaagacttgaacacaaatgttcatagcagcattatttctaataaccaacaagtgaaagcaacccaaagatccatcaactgaataaacgaaacttggtatatccgtacaataaaatattatctggccataaaaggactggagttttgatgcatgctacaacatgctacagttctgaaataattatgttaatttaaagaagacagacacaaaaagctatatattgtgtgattacactcatatgaaatatccatactaggcaattctatagagacagaaaatacattagtggatgccagggcctaggacagggggaggtggaaggaaggtgactgctaaccagtagtcttattgtgtctcttcttaaggtaatgaaaattttctagaattaggcagtgatgatggttgcaaaagctatgcatatactaaaaaccactaaattgtacactttaaatgatgaattttctcccaaaccaccaacatagaattctatgttcagcaaaattatcctttaaaactgaaagagaaatagacattcttatataaacaaaaattcagggaattcactcttggcagacctgttatgcaagaaatattaaaagttattcacacagaagccaaatgatattggacagaatctagattctacataaaggaaggaagagtgtcataaaatgaatacatgaagggcatagattatttatttaataatatatattataaaccataggacaacactaaaattttttacaaatcatgtataaattatatgcaaataaaatgaataaattggaatcatataaaatgctcacctaaaactagagaaaacagaaagagagggagaaaaagaaataaataaaaagaaaatatttgcaaaaatggtagatcaataaccactgccaatatgaattctctaaatatgccagttaagagcagaagttgtcagaataaattttaaatagaaaggtaaagtgcatattgtttataaaattaattatgaagattcaaataggttaaaagtaaagatgaagaaagttaccttatgtgaacactaatcaaaagaaagctggagtagctctcttaattttagacaagcaaactttagaataatgaagatt

SEQ ID NO: 480093 - DNA, 538 bp, Homo sapiens
gcagccctgtgggaaatcgagatgtttagtgtcatccctgaccttcactcactggatgccagtagcaccaccctcccctcagtaataacaaccaaaaatgtctgtagacattgctcagtgtcccctgaatcctttgcttcacactcagcagtgaccattatcatcatcatcacaggcatggaagagatttcaggttttgaagattatctgttttctagagctaggcctcattatctttctggatgtctgggtttcaactacagccaaatagaaagaaaaggagtgaaacaccaggaagattgggttctgatcttgtgtaactttggacaaatccttgcccttctctgtacctcatttggacatgtgtgcaaggagaaggtattttattatggtctcacaaatacagattctgatgtgagtccaaaatgaccacattaatgtttgcaaggtactggagaggtgagggtgagggtaaatataagagtgcttttagaaaactcttttgtaatgtttccaggtttgcactctgttcattatc

SEQ ID NO: 480094 - DNA, 683 bp, Homo sapiens
ctgtccactcagcctttttcctgctattttcatttatgtccaaaatgcaagagacaaagaactgtaagttctggcccttggctgtgctctccttagcctggctcacctatgattggaacacccacagtcaaggtggcaggcgttcagcttgggtacgaaactggaccctatggaagtatttccgaaattacttcccagtaaagctggtgaagactcatgatctttctcccaaacacaactacatcattgccaatcacccccatggcattctctcttttggtgtcttcatcaactttgccactgaggccactggcattgctcggattttcccatccatcactccctttgtagggaccttagaaaggatattttggatcccaattgtgcgagaatatgtgatgtcaatggcttcaagtcagggcactgtgacaaatgtctctctctctggacaaatagtcatccttctggacaccagaaaacaactgaagccaaacatccaaagcatggccctggagcaggaatacttctcaatggctagagtctggaggcaatttctgccatcacagtagacaatagaagggatgtttgggcctccagatacatttcagtgggcacttttcttacttgaagttggagaaagaacagcagaagaaaaccttttactttctgcccattggcctggt

SEQ ID NO: 480095 - DNA, 760 bp, Homo sapiens
gttaaatcctcacaatacactgaagagatagtctgttctctctctctctctctctcacattctctctctctctctctctctctcgcttgcgcacacacacacacacacacacgcacacctctttttagtttagctcagaggtatggggtggtcgctgagtcaaggctctacagaaaaggtagctcaagaagttgctgtgggggctggtccttatgataaaaaactgagtactctgtgtaccctcagaatagtgggcaatggatgctggaaatgtgaacaactgttctctacatgtgtctcgcagactgtcatctttgtgtgtttgcctaatggggttccctctacctggaatgcccttgccttcagcattgcccacctaaatctaagctggcctttcaagtctccccatttcccttgctctgtgattcctccaccccaagctggcccagggcatccccacttcatttcctcatcttcttattggaccacagcacttactgttgggccttggattgggggtcacttggatttatgttggtctcacctctgaggctaggcctccttggagagcaccaaggcagtcttaactgttttgaggccttcctgggccccaacccagcaagcagtgcctgtcattggagatacttgatacattttgtttaactgaataggctacttaaagagaacaagctgtttttaagccccctcaaatatttcaaaagcactatttacacacttgagaatgtgttccagtcactct

SEQ ID NO: 480096 - DNA, 823 bp, Homo sapiens
atctgggcctgcagctcctgcctctcgcgttggtggcggcgcagtatgcgctgctgttcactcttcggatcatccatgatgttgaatggcaagcgggagttgaaatttgctggcagttcaagtaccgaacagaccagaagtcctcagcctgtcctaacggtcgctctctttcacctcaccggctctaaccgccgctctaggctcacctcagcctccgcttcccctcccccattcgcattcttctctgcctttggtcactgtgtctccatggccacgcccccgcaagtgctaggccacttgctgggccacccgcaaatgcccagtgctaggattggctgttgggagaccggaagtatgagcccattggaccccacagcaaaggtttttggcgggattcaaatatggccttcctgcaatgtgtgtggcagttgggcctgtagagtctttcgctgattgagagccgacttcatttccaagtctgcacacaatgcaggcagtagccatgcctgacagccacatgacagatactacaccgctgaatgtgctctaaccctggacttggcattgcccctactgttgaggaagcagtgcgtttttctccagtctttcaggtcccttcaccagggaaccattaacttattctgcagaaggaatgacaggtccctctgaatgtcaaatcccattgtgtgggtttgtttttgtggcctgaagtgcagaaaaaccagctttgcaaatgttgagctttcctgtctgtagtttgtgttaaggaaaccatagttattataatatcgaatgtgccttttccagctctgaactgaagcct

SEQ ID NO: 480097 - DNA, 680 bp, Homo sapiens
aaaaagggggtgttgctaaaggagagagagtgaagcaaataaaacaccatcagggaagcagagagcggccctcagacaacgaacatgccagaccttgatcttggacttccttttaaaaagcgtccaggcccagatggtttcactcacaaattctacgaaacacttaagaaagaaataatgtcagttgtacataatcttaaaaagaagaagaagaagaagaagaagaagaagaagaagaagaagaagaaagaagaaggaggaggaagaggagaaggacaagaacaggagggagaacttcccaactcattgccctgtggtgctagaagtgaggaagagaaagcagcaccatttaaaagggtttcagagagtgaagaccttagaggagaatttgatttcagtaaagcacaaaaaatgaagggaacgtataaagaagcagttgtggatacaggggaatggggacttccttctatatttcttgtagtgcaggtggtgatgaattcttttggctattaaatttatccaacacaaatactaccacttctaccaaaatatgtgtaccaaaatatttattgtaaagtcattgtaataaaaacaattcggacacataaatggccagcagtagtggattgtacatccatacaatgcaaccatcaaagagaatgtgaagatatatgctgatc

SEQ ID NO: 480098 - DNA, 567 bp, Homo sapiens
gtaaaggttctccaagtccccaccagactcaggagcccagctggctttacccagtggatcccgcactggggccacaggtggagctgcctgtcagtcccatacgcggcactcctcaacccttgggtggtctatgggactgggcgccatggagcagggagtaaagcttgcatggcaggctgcaggttccgagccctgccctgcggggaggcagctaaggcctgtcgagaaatcgagcacagcagctgctggcccaggtgctcagcccctcactgcccggggcttgcgggccagccggctgctccgagtgttgggtggccaagcccatgcccacccggaactcgcgctggccccggttcccacgtgcgcctctccctccacacctccccacaacctgagggagccagctccggccttggctggcccaaaggggctcccacagtgcagtggggggctgaagggctcctcaagcacggccagagtgggcgccaaggccgaggaggcgctgagagcaagcgagggctgcgaggactgccagcagctgtcacttctcaacactacttgactttg

SEQ ID NO: 480099 - DNA, 918 bp, Homo sapiens
ctgtggggccccagggggcagagatgcctgggcaaaagccacagggaaacagagttcttcagcttaatccaaaaaataattgtcttaagaactgtccaagcatgaaattggagaggaaggagatagtgagtgccccattactggagatgtgtgaacaagggctggacagccacattgtggatattcaaagagtagaggcggatggtctcttggcatcctctggcgaccctgtcatgagactgcctggctccatgaatgaggttactcacctgtgtgagatgcaacccaaggaaagagcactcactccttggagctctccaagggatggtgacttgagtctgtacctcccaagacacctagctcgatgtgataacatcatgtgagcatttgcttatgtggctgtgctgttctttcatcattggatccacaggccttgggcctcttacaatatcagcaacatcagcatctcaacacactgagtagagtggacatgtttgatgatacattttttttcataccgcatggctcctaatagcttcctatggggctcaatccagaaagcagcgattggtttcaacttcatgggcaattgaagggattctccggggtgattttgactacctgcaattgagtcttatagactgacttaagatgctaagctcatactcagaccatttttttccatctcaccagtttcattttggtccaagccaccatcatctcattggagcaatcccaagagcttcctcactgctttctctgcattcactcctgccttccatgctgtttgttcaccccaaagtggctagatcatttctgttaagatctatctggcttataatgtctgttttattatttttctcctccccttcactgtcattctcaccttctctgtgtgtatattttccccttcctctg

SEQ ID NO: 480100 - DNA, 1340 bp, Homo sapiens
agtgatgtgggacactgacatccacagaagttcagtgagttgcccaaggccacaaagtaatttccaaacccaaaatttcaacttagagattccttccacccctcctgggcactggttgcttcccagtgcccaatctacccttgaaccatagtagacaaaacattttctgagcctctccactgacactgaacatgcagaagatagccgaaagacatgatagtctccacctgctggatctggggtgcaaggcagaggcacaagttgctgtgaaaccagttgcaggtgatgatgacacccaagccaggggtctaagagtccaggtgaagcttcagctgagtttaaaggtcaaccccaggggccagggtgctggctctgtggccacagctgtagccataaggggctgcaggccgaagaaaccaggaggggccctgctagctctggctgatgatgacccagggccccacctgctgtgccccattgtgccaggcctcccgatcccactagtggtgcccaaggactcagttccttttctcaaggcactgtcctttgaaaccttccccacgcagccagccacaccaagtcagccagggctgtgtggtgggctcaggcccaggccattgtgatgacaatggcaaagcgtgacagagctcactcattcatttatctaataatcatagattgccacccacagggtgtcaggcaatgtccaatctcataaagcccaagagacttatcaaattcatagctctttgcttggggacctctgcctggcctctctccagctcagcaatttcttccccaagctctagagaggctgcccccagcttccatcccttgcctacctccagtctagactaatgtccagtggcccccgaactgacattttctggatggctgccaggctactcttccaggacctcatcccagctttgtcagaatggggctccagcccctccactcctgagcttaccttgcgtgggctatttagcccttgtctcccgttccctctccaaacactagagagtcttccccttgctttgctctatccaaggtgtggctgagccccatgtctcccagccggagccttctggatccagtctacattcatacgactcccccaacccccgctccacacacccctccctgtctcctctgccccagcacctcctctgtgcagctgtgggtagtcatatcaacaaagggagacccagggcagccagcggggaggggcctgtgaatcagtgtgggtgcgcctgtgtgaggggatggtgaggaggggatgggatgggcagttgcaggcgagtgggcgaatggggatggtggagtgtgtatctggggac

SEQ ID NO: 480101 - DNA, 505 bp, Homo sapiens
ggggaaatgtttggagccaagtctcctgaacttaacttttggttcactacttagtagctctgtgacttaggggtttagcatgggccacagagcacacacccatttgctgacccctggccccagacctggagaaagggagacatacattgccagagatcagggagaccctggtttgactggtgtgggaagaagccatctggtgtggagacatgcaaacacatatgcacacgcactaaggcacccaaatgagttggagcggactgtggggggtcttgtgacttcctatgtgactgtgccacacaaagacgctcttgcccaagtgtccagggtcttaatgaacacagggaaggacaaacgggaattgggtgctcttggtcttcagagatctggtggtgaccaggccttctgtgtcctcctccgaatcactgataaccttggtgtgcaggatgggatcaaggcccagggccctgtggcagctgctaaataactgcttccaggttgacat

SEQ ID NO: 480102 - DNA, 910 bp, Homo sapiens
cacccgatattgctgcaggggccaaatcagggctgtgagatgagcagcactctagtatggtggattagccccaatgctgtctgccattgatgagctggcattatgccaccagcctcttgctcgggctccttcgtccctgcattggccacagcagctcatcggtgatccgtgggcatgcagatttgacaagggagaggcttgacctcatcaagttgctggcatgtgttggtcacagagctgggatgtcagagatcctgcagagcagctgctcagaaccaatagtcctggatgaatactcagggccagattggaaggaccccaagatctcccttcaggctacagaggcccaaagcaggggaggaatgtggccccagtcaggcagcctgtcagtggcttacctgggactcaaactcggagatactgtcttccagtccagtgcctacatcaccacatcactccctaggcccactctgtggcctttggcaagtcctaccctgttggggacatacacatgtttgtggtggtggccctgagtctgcttgattttctgatgtctgtggcttggcaagacttaagaaaacccactctcggttgcctctgcatgcatgtgcgtgtgcgtgggtgtgtgcttgcatgtgtgtatgtgatgtacccttacctaccaaggctccgtcctcacttaggcctcgaatccactgccctgctactttttcctcacccatgcactcctccagcttctgcctcatcactctgctttccttcacagtgggacctctcacaccagatttctacactcaatgtgtctgcttcctcacagcccattctcacctctagctaccctagaggacttccatcctcactgaaattgctcttgtcaaagatcaccaatgacccaacattgccaacccca

SEQ ID NO: 480103 - DNA, 1104 bp, Homo sapiens
acggcccctcccctgagccttgtgggtaattggagggctgcctgctctgggctagtcggtcagcatgggctctccagtgcccactcatcgcctcatcacagaaggatcattaaggcaagaaaacaggctggggcacgtgcctgacaccccaggtggcacctcatgcaccacccaccgtctgcccttctccctggtgttccacagctcctggcccagcccaaagccagccaacagacctagcagggcaggatggggcaggttgaagggagaaggaggtgcagaaagaccgccatgcagccagcatggctgcctgccagctggatatggattcctccaacctcggcttctcaggaacacccgcttccctgggccttgctgccgggacccctgcctgctggggactgtgcttcaagagaaggaacagagagggctttttggtgttcttttcagggggtcttgctcccccttgccccatccagggcatgttattactatcagaaatatcagacatttcaactcaaattaaagtcaggttaaatgtctccactgcagaaattccacatggttccagatggagaggagaaattcactctcagccttttgccttctctccctccctccccaagagtagaataaaagcgttaacttatagtctgttttcagaccattcaatccagtcttctcagcttatagatgggcaaaatgaggcctagaatgagggatggccctgtccaagttcactcagcaagttagtggcagagctaggaccaggacccaggtgtcctgatctctagcccacagagttattttcatagcacacatctgcagccctgtcagacctagaacttctcttgaccttgtaaacttcgaaattgccaccagagatggcctagcatttctgatgttgggacaaaagcaggaagcagggcctcttaactcctggccagcaaaagtcccataacattccttgctacagaggctatataatcatgggcaagtccctaccctactctgggcctcactttcctcatctatgaaatgagaaatgcagaggcccattgttttcattcgctcagcatccattccttcttttctgtaactgcc

SEQ ID NO: 480104 - DNA, 688 bp, Homo sapiens
tgctccttgtgagcatctggtatgtaccaggccctgtggatgaaaacaaacatggtgccaccctcaaggagcttccagaagacaggtgtggatccacaggggagccagcacggcgggagaactgggaaacctcaatgtggagacccactctggagcaggacaccactctcatccctgagctgggggcacagggctagagcccagaagccctttgtctctgaccacagctatccccctggcttcccctccccctgcctgctgaccttgcctaccttagttgaacccaccgcacagcctcgaattgcagataaaattccttctcttttcttccccctcatcgtggccaggaaagctgaggaaggagtgtgtgtgagcaagactctgttcgtgtgcatgtacatgcttgtgtccagcaggggtgaagacaggtccaggcggggtaggggctgtgcctctgtgggtctgctgggaagaggcattgcaaatatatagaggatgtgtgatttcatgtttgtggggctgcacagggcctgggccactaaacatgagcaaaatttgtagcatgaatgtgtgtgtgcacaatgcatgtgtctgtgcacatacaaatcccttgtggcagaaaaagctgctagctcttgtcagagaggcagtacattagagtggtcaaaagcatggactttgggacaga

SEQ ID NO: 480105 - DNA, 969 bp, Homo sapiens
cgtgttgaattttaattgccattgtaatattagcaaggggctcatcttccaactaggacctcctccaagaagtccagtctccccttacccagggtactccaggtccccaattctgccaccaaatacctactctgtgctgggctctggatatacagaagccaagtggggaatggcaggaaacaactagtgacaggaaataaggatacaagcgggttgaggaatggcggcagccggggtgacaacagggagtggtgggggctgtggtgaagtgatctctcctttcgtctttggggaaagaagacacttatgaacggaaaaatgcctacagcaaatgccacccacttggtggcaactcagccctctttcctggtctctgccattcagggcatggcctgttgggaaacctccaagtttctgcttggaaacttgcagctgatcaaacacatgctaggaggtctgcgtttgaactccggctcaaggggtggctggtatgtggtccccaccaatgaattgcaggcagcagctgcctgctgtgggtcgccccacgaggaggagctaacaggactgagctttgtgggtgggggccaggcagggcccatgctgacttgggggagaaggacgcatgtgagaaagaaggctatccatgcgggcttgagggctgtgaggcctcagacactgagcccgtgtcatgcgggcagagagtaccatcaatatctgcagctgtcaaaactctcaactcagcaaaaacccgactcagacttcagcctggctggggcaggaaagccatgtccctgaagggcggcctcttggcagatgcaaagctggaggcagaaccacaaaggcccacatcctgggtcacctcccactcagaaccacaaagaatctggacaagaactctaacatttctctaaactgccagaatgcattgcctcttctcttccctgcccttcttttctcatctcctcaccc

SEQ ID NO: 480106 - DNA, 747 bp, Homo sapiens
ggtgtgcggcacatgtgcggtggtgtgagtgaggccgtgtgcctacacagagtggagaaggggtggtttatgtgtgggtgtgtgatgggggcatcagataaggaaattgagacatggggaggtaaacggattgcccaaggtcatgcagctgcccaggggctgctgggagtgaagactggagaggccacagcttggccagagtctgatggtaaagctgcaaggaagcagcaagaggatgaatgcccagagctgcattgcatctgggacatgctgcaccgggccttgtggatagagcacccagagagccagggtgctgggaagcgggcccaggcccctgctcctgatgccaagcaggctagacagcctggctcggcagtcacagacattccttattctctcaatgaatcctcacaaaaggccctgtcagacagcaggcctctgaatgccatcctccccagcattcttggcaaggcggctgaaactccagcacttttgctctctttccaggaagcatatctgaatgcaagaccctccatggctctcacccaaggcatttcaaacccttgcctgccccagagaagggaggagagagctggggatgtgaagaagagagagacctatctattgtttgtgggcctttgaaggtggggaccacaatgatacatttcattaatggtaaaaatggtagtggtgagcatattactgccaataaagatgttgacagtgtcaatggtagtgatgaaggtg

SEQ ID NO: 480107 - DNA, 530 bp, Homo sapiens
acaagtctatgagttaggaccaagatgtgctattggctgtgctgtgtgggaacatgtgggaagtgctcttgttccttatccctgacctggcagggcccttgggagaaggatacaatgaccaatcccttgtgtctgggttctggaaagagagccaaccacatcctggacttagagcatcctcctaccctgcccactgggctctgcctgcttgggaaggaacagagattctgccctctgtcacaggaggggtagagagtgagagagagaaattcacagagggtgcaagatccagacaccaagaagaggaagccccagcaactgagaggaagaaagaaggagaaagagaggaaaagatgtggaaaaacagaaaccaggcagacaaaaacagagagatagtaagagtgggagagagcctgcgagacacttgtgcaatggagagagagagagtgtgtgcatgagagcccaagtttttccatgttctgtgcttcctcctccttacctcactttgcaggcctgcctttcactctcct

SEQ ID NO: 480108 - DNA, 802 bp, Homo sapiens
gaagctccccaagtgaaagctgtcccttgtgaaaacggagcagcaatgggtggttgggagcgggcatgttctctccagactgcagtgggtatcaggcccctgctgctggagaggaaatggctgtgccattcttggtggcctttggtgaccatgggtctctcagagggcagaaggagggggaggtcagtggaggaataagcgtgtctgcccagggccacttctcactaagagggagggctgggcccccgagggcatggactctggggacctggaacttagacttcagagaagccaaagaaaagaatgagggacagtacccacgtgagaagaggcccagtctctacccctatccatcagaggctgcccgaaaacctgcccctaccccagccaccagttcctccctggatacctctgagtatccagagcccagccctcggctcctgacatttttggaccccccaaaaaagcaagcaggaggcagaagcattgaagtggctgctgacaagttggaacagcttaacaaattactcctaataaactaccgggggcgagaggagaggaggccggaagccagtctgctcccggagaggcacctccatctgtgccctggtgcaccgggctgccccctcagccagtctgcctacctggcctggcttccaggagagccacaggctttcctgcagtcccaggaagttcccttaggcctggagagggaggcaagccagaccctgggccttgtggagctacagcaggggctcctgacagctccctgggatgtcatcactgctgcctcttagagaag

SEQ ID NO: 480109 - DNA, 3339 bp, Homo sapiens
gtgaaaaagtcaagaatccaggaccgaagagggagattccaacagagatcctgccagtctctcccaggaataagcatagtggagttttttaaaaaaacatgaaaagatgttggattttatcaaatgcttcttctgtgtctattcatatgattatgtgatttttgccctttattctgataatacttcacagaatgaattgggaagcattatttccttgtatcagtcagggttcaccagagaaacaattggagagagatcatgcgtgcaagagagactgatttattataaggaatcagctcatgtgattagggtgcatgaagaggaggtaaagtccttgcatgatatctactcttcttctaatatccagaaaattaaatattatgatgtgaagctgccccaaagaatcccagagaggcccaagcccctgctctcttgtttctacctcttggcagcaggctcaggccctgtgactgtgaaggaggcagagagagggaggaagtataggagatctgcaggatcttctctgggatatgaaagagtaaatcccttgcgttggcccacaggagagataaaacgggaggtggaacaggcccagcagattcggtgatagatggggaagagaaaagctcctctcttcctttctacatcccatctttcatcacgtatacttttaatttcacattgtcaagattgatgacatttccataagcctaattaagtcttccgtggcttctctgcatgttgattttaaaagttgaaaacaagcaataatggcattatggtggctatgtacattgtgtttccttcatatccaagtagtttatgatgcaaccatttccctttcttagccttttttagacagctttttgttttcctggagctttcctttcttttcttttttttttaaattaggacaaaatacacataacataaatttaccattttaaccattgttaacatgtacaattcattggcaactagtccattcatagttttgttcaaccatcaccactatctagctccagaacattttaatcttcctaatggaaaacttgtaacattcccctctccctccaacccctggcagcccctctactttctgtctgtggatttatctatcctgggtacctcatataaatgaaatgatatgatatgtggtcttttgcgcctgccttgtttcaaagttcatccatgttgtagcaagtatcagtacttcatttcattttgtgactaaaaaatattatattttatggatatgccacattttgtttatccattgacagacatttgagctgtttccaccttttggctactgtgaatagtgctgctataaacattcgtttacaaatttttatttgaacatttctttttaattctttagagtatatatgtaggagtaggattgcttggtcatatggtaattttctgtttaatatattgagtagtcaccaaattgtttttcacagtgtgtgtaccattttacatttacaccagcaatgtacacaggtctcaatttcttcacctatcattttctattttttaaattatgcccaatctagtggaagtgaaataagctctttagctttgatttgcattcccataatgattagtgacactgacaaatttttaatgtacatgttgaccatttgtatgtcttatttggagaaatgtctattcaagtgctttgtccatttttaaattgggttgtttgtctttctcttgagttgtaagagttcttcatatagtccagatagacccttacaggcacatgattcacaagtattttctcccactgtgtggaatgtctttttactctcttgatagtattccttgatgcacaacagtttttaattttgatgaaattctattaatctattttttattttactgcttgtgcttttagtgtcacatctaaaaaaacattgccaaatccagtcataaaaatttacttctgtgttttcttctgagagttttaaaaaataatcttcactcttatatttaggtatttgatccatttttagttaatttttgtattcggtttgaggtaagggtccaacttcattcttttgcatgtagatatctagctgccccagcatcatttgttgaaaagatctttcttccctgttgagtagtgttgacacctttgtcaaaaattagttgaccatagacatttgggtttatttctggactttaaatttgattccaatcatcaatgtatctatccttaggccaggaccagactgttgtaaatactgtagctttctagtaagttttgaaagggtgttgaattttgtcaaattatttttcaacataagttgagattagaatgtggatttttccccttcattctgttaatacggtatattacattggttggtttttgtacattgaaagatacttgcattcctgggataaatcacccttggtaacatgtataaagcttttaatatgctgttgaatttagcttactgttaatgtgttgaatatttttcatctatattcacaagtgttatttatctgtttttttaacgtgatatttttgtctgactttagtatcagagtaatactgacataattaaattagttagaaagtgttcctttatcctccattttttggaaggttttgagaagaattggcctgtgcttaaatgtcaccttttcagggatgccttccttgatctccctactgatcatcgaaacacatgctcccttaggaagttcttagctcccttccatacttaatgattgtccatagatttataaccacctaacattctagatattttatttacattctcaattgtctgtcttcctccactggaatataagctgcatgagagaagggatttttgtacattttagtctcttatattcactgctatgctcctcggtgtctagaacagtacctggcacatcatgagtgttcaacaaatattttggggagtgaatgaggtctcacagccaacttcaccctctgccagccaaccaactgcaaacaccacggtgggtacaatcatgctgctagccccatgtagcacaggagggatgaacagattttaagtgtggttgcagaggactgcctggtgcactggaagcactaacgctgtctttccttagggtttccatataatgacatacaccccactttcctaaaggtgtctttccttagggtttccatataatgacatacacccccacctccaccctcccctgcaggccaaacaggcttctccttctctcaactcatgtagtccttcctagcagaaacttcagattccagccaaaattgtgctccactaccttaaactctttcccaatactaccccccatttcattgct

SEQ ID NO: 480110 - DNA, 889 bp, Homo sapiens
aggcagggactgatgcaattgggcctatgtttcggaaggctccctctggatgctgtgtgggttgtggactggagagggagagagaagcagcagggagatggggaaatagattactgccattgtccaggcaggagaaatgagagtcctgcacatagcaagggtgcagcatgggtggccatggcattggagcctgtctcgtctttgaattgggctcagtcaatgcaccctgaagcctgcccatattcaagaactgagccccttgatcaggccagtttcaccctagaggctttggtggctttttctacccagacatctgccacttcccaggaccttctgcagggtccagatctcaagtcagacctcaattcctccaggaaactttccttggtcttcttccccaatctcagtctgtggtcggtgcccctgtgctttcttcacgtagcactgacaccactgcattttcatcactgatttttgtggctgtcttctcaactaactatgtatctttgggagttccctggaaaccactaatctgttttctgtccctaggatttgccttttctgaatattttatataaacggaatcatataatatatggctctttgtgtttggttactttcacttaatgtttctgaggttcatccaggttctagtgtgtatcagtccttcatgcccattttatgattcaataatatttcattgtatggttataccacaactagtttattcattcatccattgatagacatttgagttgtttctaccttttggttattgtgaatggtgctgctatgaagattttaatgtttgagtgtttctcttggacttttgtaaagtactttgctaagacttatctcaagtgtttctcataataagctttggagctct

SEQ ID NO: 480111 - DNA, 521 bp, Homo sapiens
tcgcctcggaagcccccctacatcatggacgctgagcttcagataactctcacagtggaagatacctctactccctccttggcgaccgatcatgcaccccttaccatcccattaaaacctcatcacccttaccccgctcaatgccaatatcccatcccacagcatgctttgaaaggattaaagcctgttatcactcgcctgctacagcatggccttttaaagcctataaactctccttacaattcccccattttacctgtcctaaaaccagacaagccttacaagttagttcaggatctgcgccttatcaaccaaattgttttgcctatccaccccgtgctgccaaacccatatactctcctatcctcaatacctgcctctacaacccattattctgttctagatctcaaacgtgctttctttactattcctttgcacccttaatcccagcctctcttcgctttcactttgactgaccctgacacccatcaagctcagcaaattacctgggctgtactgcc

SEQ ID NO: 480112 - DNA, 659 bp, Homo sapiens
gctataccctgcaaagtcacaggggcagagctgcctgaggccatgagagcccaccttttgcatcaaaataacctggattatgggttaatttacttgatattttgggctcttttgctgggagcgacactccctggctctagacagtacttacacctgagtttctcgtccctgaatgttttgttgatatctaaggtttattttgtccctgaaactcaggtgaagatgaattttcctgcttctatgatgatggatggcaactcttttttgaagtttcagctcacttccaacaggaatggagagtttgaatttttcctgcttctaagattgtatagagcagtcttcagccagggcttcattcttaggtcgatgacatctgagacgagtcaaggtaacagaggcagctgtttgaatagatttactggggagtctaaggcagctctctggaccaaactgcaaacaagccagatcaagcttattctgggaacactttgtccacaaggaatttccttgtgggcaaatttaccaagtgagcaaaaaatctagcaaaggctttttcatgcgcgtccgtgtgaagagaccaccaaacaggctttgtgtgagcaacaaggctgtttatttcacctgggtgcaggcgggctgagtccgaaaagagagtcagc

SEQ ID NO: 480113 - DNA, 514 bp, Homo sapiens
ggggatgcgatggcttggcttgggctcagaggcctgacactgagaaagacggctgaggcagtcattatggggagtgggatcaaacatggctcattatatcctccttccttttggaattctggaaaagccaaccagcattcacttaaacacggatgtcgcaaaacctccaaagtagggaagccgatagacagtgcagccttcagtctgtggccaaaggcccgagagcccctggcaaaccactggtatacgtgctgcaaatgcgtccacagttctcttcgaagatattggtcaaggacattatctgttctcccagaagtcctccatcctgactcaggttacggcagacaactaaaacacactgagaagagtcaagatcaaactgtgctggtcttatccaaagccttggatggtcccagaactctgaaaggatgccagtggttcagcagctcctggtttcttcatatgtcatttatctttcaatttgttcagtacacagactagaagcagcaacagc

SEQ ID NO: 480114 - DNA, 984 bp, Homo sapiens
tgtggcacctgacatgcttactgcagcccaaggaggagtacacactaagtgctgtgtatatatcccagacaattcccgccatgtcacccttcttgcgaaaggtatgtgggcgcgagtacaacgtctagaatctagccgtcaggaccccatcgtggactggctttccaactggcattggcgttggccatggtggtctgtgcgggacaggcagccgactctggagcccaggctgttgcttcccggtctggtgaagcttcctccatggtctgaagaattagatatgagagaagaaaaatggactgatgatgcaaaaatgtacgcattagaagagaaaaccaagacatactatgaagtttttaaaaattatattgcaataactaattttatactgataaatatgaaaatagatgaaatggatacttggaaagtagtgaaattactcaagaagaaacagaaaccttcaatagacccacaatcaggagagaagcttatgggatctgcaggagggaaatcctaagaaaatacctgcttaaggaggctgtacactgaatccatgcttttctgtcccttttccgccattgctagagtgcttaagtgttatttttatgttcattttaaagattagcctctccaaagtttatttctaaatgttgtagaattggattttaaaacaaaatttgtttgtaatgatcgtgtaaaggacatgatcagaatttcattaataaactatttggagtagcagataattcttggtgttgaaggaaggttacttattgtgctaatttgctgagagcttttaccatgaacgtcggtagatgtttgtcaaatactttctcttttacatctgagatgagcatacattttctcttcaattaataaggtatatgagatgtaaatttattcagtgaaagatgtgaatgctcagtgatttaactaattcacattttattatatctgtataaaatatttaactgctaccaagaa

SEQ ID NO: 480115 - DNA, 1045 bp, Homo sapiens
tgactaaaacaatttctcagcttcttacccatctcctcggcagccggaaatctctggatcgtcatgcaagacattgtgagggatgatgatgatagtgttgatgatagcaatgatgatagtgatggtgatggtgatgatgataacgatggtgatgtaagtggggatgatggcgatggtgatgatgatagtgatggggatgatgctgatgatgctgataattattgggatgatgatgatgatggtgataatggtgatgatgatggtgatgataatagtgatgtgatggtggtgatgattatgataatgatggcaaagatgatgatgatgatagtggtgatgatggtaatgatgatgattgtattgatggtggtgatgataataataatgatggtggtgatgaggatgatggtgatggatgatggtggatggctaaacagtcgaaagaagagctttattggtgataattggtttgcgaactgggaagagatagtttctggggtggactgaagatactctctttttgaagaggggaagggcaggttgggttttatgcctcacagggtccatattacacaatagagtcgcacatattcagcagccttgggaggaaagctatccatatttatgagaggagccaagctcatgcagattgggtagacatatatgtaacatacatcccatgttcactttggtgtgaagttttagcatttaaaatggtggtggtggtgatgatgatgatgacaatgatgatggggatgttgataatgatgatgacggttatgatggcgataaggtagaattaagctctttatgtcaaaaagtggacaataggacacaaagacaatttgtgtacagcctctgtaagctgctgaaactgatgatacctgatttggtagaaatgattgtttcttttttttacctagtttcagaaatcataatcaattgacataatattacattttttatttaaatttttttaaaaatccttttggaaattacaaaattctatgttctaatcactcactttatctcatttaaaaggtat

SEQ ID NO: 480116 - DNA, 618 bp, Homo sapiens
gcaagggggtcacgggaactctcctgtctcagtggggttttttgatgaaacatgtcacttttcatccgattatggtctcctaacgtgtccggaattggtggattcttggtctcgctgacttcaagaatgaagctacggaccgtcacggtgagtgtgttacagttcttaaagatggtgtgtccggagtttgttccttctgatgttcggacatgtccggagtttcttccttctggtgggttcgtggtctcgctgactgcaggagtgacgctgcagaccttcgaggtgagtggtacagttcataaagatggcgcgtctggagttgttcgttcctccccgtgggttcgtggtcttgctgacttcaggagtggagctgcagacctccacgtgttacagctcataaaggcagcgcggacccaaagagtaagcagcagcaagttttattgtgaagaggaaagaacaaaacccccatagagtggaaggggacctgagcacattgctgctgctagctcgggtggcctgcttttattcccttatttggccccacccacattctgctgattggtccattttacagagagctgattggtctgttttacagagagctgattggtccatttt

SEQ ID NO: 480117 - DNA, 703 bp, Homo sapiens
agtgttagtggagaaacaagcactatggtggaagcatcaacaagtttggccactgctgccacctcatgcaagtacggaagcatgctaggtagggccttttggctttgcttctgccgccgtatgcacttctgccagcaggttttatgttgggtgtgtggtatgacctacaagccagtagatggcgccatgggtaagagctggctgttgccagtgctgctggctgtgtacttcatccttgtttattgggaggagctctctgttgccccaggcaatgggctgaaatcccgagtacacattaatctgagctccctcagccctaggggtagggggattgggggcacaagatgggtgcagccagatagggaagattcccccagtgttgtcctgctcccagtccaggtttgggaaaatgctggcagcgtttccctgtgtctttcccccacaaagtctccaagtctcttctcaaatgagctccaaggcttgggaaaaacaatctcttcctctgcccgggttgcatggatctccagtggaaagggaggattactatgagtaatagacaagttatctgtgctctatttgggacacaaagtttctgtgttactgttttctttccttttacaatcaaaacagagaagttcacatctcagattttaagatgtgtactagatgctggaaaaacaggtgtttattcaccttcattttt

SEQ ID NO: 480118 - DNA, 948 bp, Homo sapiens
agccctagttcttaattcctatagcccttggtttatcaccagtttcttgataaaataatccatccacattctctagacttccggtactatgttggacaacagtggtaaaagtggaaatcctcattgtgtcctagatcgcagagaaaagcttttcatttgttcaccattcagtacggtattgactgtgggatggcaagttctcctagcctccaggtggatccaaaggtgctgtctgggaatcagggctagatcaaaaagtgtaaaagtctacctagtgttttattgtgctatggctgtcgctcaaaccacaagatgcagtccctcccactctttccaccactgtccaaaggcagaggagcatcaatccatggccaactcaaacacaggccatggggggctactgccagactaccaccaatgttctcataaggcccaaaggctcttaagtcagtttgtagtgaacgctcctgttattttaaaatgcttttttttttttttggcggggggaggggggggatggagtcttgccctgtgaattagtctttgaagtacttttttaaaaacttgcagctcaaattcaaatattattaattcaaaaggcaacaattatattgcataaatctatatcatggtatgaaatcttaatcttatgtagagaagagtctacgtaaattatttccagaattaaggagtaattccagatgtataagatatatttaatatatagtgttttctgtgtctcacatactcaaatgcaaaggatgatacaattgaatgcacaattttcttaatcttgctgctgcaaaaagaagtaaaaataaaattaatcagatttcctctaacatatattgtaaatttaaccaaaaaacaaagggccttataaatataattttgaaagaaaattattcagaagttgtataacaaaatgcttcttactaatagctaaaa

SEQ ID NO: 480119 - DNA, 730 bp, Homo sapiens
ggggcgagcacccaggccattttcacgagcagcaaaacaaaaacaaaacttcagcttgtttccaatcactcaccatgcttcttgctgtacaactagggcaggaggcttttgcaactattctgctgccaaatggcgccgatccaaatattatggatttctttggaaggactgctctacactatgctgtgtataatgaagatacatccatgatagaaaaacttcttttacatggtacaaatattgaagaatgcagcaaggcccagattgccttcctacagggagaaaggaagggccaagaaaatttgaagaaggatcttgtgaggaggatcaaaatgttggagtatgctcttaaacagaaaagagtgcgctatcatgttgtaagacggcctatgaatgagccacctggcaagaaaccctggggaccactaggagctgatggaaaccctcagctgacagccagaacaaggcagggacctccatcctatggcttcagaacataccccccaaaaaaacctcttgcagatgaggactgggaagcaagtacagaaatgatcgaaacagtacaaatcaggggagaatgcgcccaagacatggagaactgataatacattgtggtttatccttgcaatggaacactatatggcagtgaaaatgattgaaatagagctatacacatcatcacagacaaatttcagaaacaacgctgagtgaaaaagtctctggaacatat

SEQ ID NO: 480120 - DNA, 856 bp, Homo sapiens
ggcctgtgccagtagtgttgcagcgtgcttacttatattaccctgtctctgttattaatctttgaggaattgccacactgtcttcgacaatggttggactaatttacgcttccactgacggcatcatgcactggtacctgaatgagtgtttagaatcatcaacgtctttaaagtggttagcatatccagaacaaacagtgtgtccagaaggctttctggatcctggggtttcctgccttggtgtagctgaagaattggctcacacgtgggcttggagagtaagtgcaggtttcattgagtggaagctgtcagcagatggatggggagccagaagggagacggagcgggaaggtggttttcccttgaaatggggcaggattcgggtcactacatggaaaatggaaacacagagagcatgtcctgcaggcatggaatcactgtggaaacataccctgctgagaaggaaggcgacacaaactggcttctctcatctttttgttctctaatctctgcagtgtcatcccttgactgagctgaaacaggaagtaatttttatgagagcctaggaaccctgcctcccaggggccaggcctctctattacagaatagtgccagggagagaatcttttgggagaaatataatctaatctagccctgtaaacaattgaattaatcaatgaaatcattatgactgtagtctcacaatttcattgtccttctctttttggtgtatacatatctctttaaaattcaaaagcccctagaaagcatgtgataaataataatgactgaaacagttgaaaaataaaaaccgagcagcagatgtgtttcaaggtttcctttatgagaatgctac

SEQ ID NO: 480121 - DNA, 532 bp, Homo sapiens
ctgccacagctgggcatggcggatttcaatgccagagaacttgatcctggttgtagaaggtgtacctctccttcaggtcacattatgctgacaccctccttaacccagatggactccttgtcctcactacatggtgttggctggaagtgttactcctggtgccccagccgctgtttcaagttgcagagactgaccagcagacccctgagtccttgtcctcctgtccaagtcatatccatagaaatagtcctggcctacactgatcttttgatcactgactttttgatggctctggcagaaagacttcctgatccaaattcaccccttatcatcatcacagtatatacatgttcagggattacggggaaagagcatctaatcctactgctttcctgcgttggttcccatacacaagcaaatgtcctgtgttagtgactatcaaatattcatttatttgatcaaggaaatttgtgtttccaaactgtaaaacaaaaatattactatcagttgtatttttcttatttatttactt

SEQ ID NO: 480122 - DNA, 896 bp, Homo sapiens
acaggttatcctcaggcattacattcaggccacagacagcacaatggtagaagcagattgtcatggcaagcttttcattggtggcctcaatagagaagccaatgaaaaggtgcttaaagaagtatttgcaaaacatggtccccttttggaaggtcgaaccagtaagtccagagattttgtggtcattatttttgagaatgctgcagatgctaagaatgctgccagagatatgaatggaaaggaagcagccatgcgcaaatctggggaaaatattttgggcccagaaataacagcagaagtttcaaggggagccattccaattaaaagaggtccatcttcacgaagtggaggtcctcctcctaaaacatctgctccttctgctatggcaagaagcaatagttggatgggaggccaagacagaggatgtcactacattgtcaaaactgacataaaagccagcggctcaagcagtccagctgtctctgccttccacactgactcgcactgtgagctgctgagcctgaccatccagcttctgagacctcaataatgtttatgtgcaaggcattcttactgcttctatgaagattcaaaagaactacaagagcatttagcagaaaaggagtcactgggcttacctattatttaaaaataaaatcaagtcttgaaaggtagacatgaaggagtccaatattcttaaattaagtggatatcatagaagtgcagagatgtgaaatataaggtcatgtaaatcaataattaagattttaccgggatgtttaaacattaacacaagatccttagcgtaagactggaaattatttgaggagagaatttagaactaagcaacctgagatgcagatgctggcaccacagatcttttacagcctgcagaa

SEQ ID NO: 480123 - DNA, 1072 bp, Homo sapiens
gggctcagaggaggaaatgtgaagagactgcaaaatggctgactcctctggaagatcaacccaggtcctagaggtcccttgggacctaaatagggcatggcatgctcaaaggttacaatctcagcttgggcaggatcctggaggtcaataagccccactcggaccacagccagggcttctgcatttttttgggggaaaaaaaaatcaaggaaaaaatcttattatttccacatttcagtgtgaaaaaaccctggagttcacgtgaatcacatgaagtccagatcttcagttgctacaggccatctggatgtacacgtgcaggtcacaagggatatgatggcttagcttgggctcagaggcctgacaccagcttcagtgtggggccaaggagagagtggctgactttcaggatgaacctagggtctaattgtatcacactgagtcttctgtatccaggtaattcctactggaggcctgcagcatgcagccacagtataattgtgtcagatactgcctgtgtggaggtatttactgatggacattcaacctgggtccaaggtacgactgtggaaagtataggctgtgtccgtggaattactgctggagatacagcctgggcccatggtgtgactgtggaagttccagcctctgtgaacggatttactgttggagactcagcttgtgtccacaggataatggtatcagattcaggataaatgcaactttgattttatgatgagatttatatttagtgttgaggacttgtttgattaacgagactggtgagtctattaggaaaaataaccaagaccctcagggagaactacaagcctgaagatctagatcagcataattagggaatccaaatgagcctcaagccctaagtgggaatccaaatgagcctcaagccctaagttagacgatattgctcccagacttttatcactgccttcatattcatctctggactagtcattttcaatgcatggaaaaaaaatgggtgcatgtatttttaaattattgaggacagtatcctacttaagcacaatactgtattcatgcatttaagtgt

SEQ ID NO: 480124 - DNA, 504 bp, Homo sapiens
ctggatttacagcagtatttttggcctacatcatgactttgtctgtaggagccatctgctttctgcctggatcccaactgctgctgacagatgcacagattattttggatgttggggatgtcatcaacaggagtcctgtgacccaaggagcaccactgggagaacttcagcctggaggggagatcagccattttgtgacctcgtgcccctaccaagcagtgcaatggtacctaatgggttataggacgattccaggaacagctcacttcagaaaccacagtaaggttataaccggtaatccaacccagaggtgctgcaggccgcaagagtggttcaccaattcagaagaaacttacacctcaaccaacacagcatgtgacagtggctcactaaatcagctcagaaggaaactggaggtggtgaaagtgactcgccaccccaaccaggaacatgagaactggtagaaggatgatgtgtgagtggtgaggcctaactaggctaatc

SEQ ID NO: 480125 - DNA, 943 bp, Homo sapiens
ccggcagccatttgtcacagacctgggaaagggactgaaacaagaatggaaatgtcaccagctgaggagatagtgaaggcaaatgccaagcaaggaagctacagccatagtcagaccccagaaaatggggaatgcctggtgcagatgaccacaggtttctcgcaggcagagactgaattcacagagagccttgacagggctgtttcagtattccaggcagatgatgaggaagacccctcttgcagccacaggacagagagtgtgaatgcaggaattcagcaacctagacgagagggtgatatagaggcttggcagctccctgttaggatacatgccccaggtcaacagggaaatattatcactacttttgagccttttccttttaaattactcaaagaatttaaaccagctattaatcaatatggaccaggttcttctttggtaatggtactgttaaagaatgttgctgtccccagtcagatgattcctactgaatgggatgctcttacagggaaagcacatttaattgactatatcaaggcctgtgatggtatcagaggtaatctgcataaagctactttggtggtgcaagccatgacaggactgaaagtgggtaaaggaaatactccatttcctggagcttgttttaactgtgggaagcatggtcacactggaaaagaatgtgaaaaaaatcagtgagtcaggccacaagttgagggataaaaggaaaactgctgagcctggaatatgtccaaaatgcaaaaagaaaattactcggataatcagtgtcactctaagtttgataaagatggaaacctgattttgggaaatgccaggaggggccgtcccagtccgctttctaaaccagggcatttccagctcaggaaatgccctatatttcatctcaaaaggtggagtttgcagctgtaattgaggtatggac

SEQ ID NO: 480126 - DNA, 502 bp, Homo sapiens
aagttcatgtccttttcagagacatgaatgaagtggaaaccgtcattctcagcaagctaacacaggaacagaaaagcaaacactacctattctcatgcataagtgggaatggaacaatgaggacacaatggggcctgtcagggagtaggggatatgggaaggttggctgtatctcacttccacttcgtgagatgaccgcctggattaacccaccccaaatttcagagattttccaaggctaccaccagagggtgcacggagctgatgcactgagcctgcaaaccaactctctgagaagcaggttatcttcacaaaacagtatttctacaattgaaaacacagttagtgatgaactcgatgatcgttcaaagatgagaaacaaaattgtgagaggtgcaataattttgacttactgagattaacatccctggttatcatttcaactatcacgctttctttttcggtataggtttggcaaagatcagatggttgtagatatgtc

SEQ ID NO: 480127 - DNA, 549 bp, Homo sapiens
tgttgaaggattggggtgtacagggtacactcaagtatcagatggaagttaagagtctgcaaatgggtctggctaaccatcagtttcacttggaagctgaggaaagaaacatttttctagaacacactggccttcttgtctatgggtcaggatcctcggctgcaggtctgttggagtttgctggaggtccactccattccctgtttgcctgcgtatcagcagcagaggctgtagaacagcgaatgctgctgaatagcaaatgttgctgcctgatcattcctctgtttttaacttctttgcgatgggttcaagcttcctgctttaactcagagaagtttgatcatctgaagccttcttctttcatcttatcaaagtcattctgcgtccagctttgttccattgctgatgaggagctgcattcctttggagtgggagaggcactcgatttttcaaattttcagcttctctgctctgttttttccccatctttttggtttttatctacctttggcctttgctgatggtgacatactaatggggttttggtgt

SEQ ID NO: 480128 - DNA, 715 bp, Homo sapiens
tttatgacactccccagtgagatgaacccgctgatagataggagctgatcatggggaaagataagctggcaaagcttggatctgggagtatgtttatgacaaagagggtgcagaaaagcaaagattgctgcctattccttcctctgaaagtttcctcccacaggggcacctgccaggtgccagccagagcactcctgtatgaagtgtctgtggatccctgcagggaggagtctcccagtcaagaggcatgggcttcatggacccacttgaggaaggtaaactgccattgcccacagcttactgggatgcaagggagcctctgcccccaacaccggtcccggatttcagcacccaatccagatgaccaagatgtcttagatgggcataagacctgtccaacagaagatgctccattatttcctcattcaacaggctctatgtatcaacaggtgggaattgaacaatgagatcacatggacacaggaaggggaatatcacactctggggactgtggtggggtggggggagggggcagggatagcattaggagatatacctaatgctaaatgacgagttagtgggtgcagcgcaccagcatggcacatgtatacatatgtaactaacctgcacaatgtgcacatgtaccccaaaacttaaagtataataaaaaaaaaaagaaaagaaaaaaaaagaaaatgaaaaaaaaaaaaaaaaa

SEQ ID NO: 480129 - DNA, 733 bp, Homo sapiens
tgttgaaggattggggtgtacagggtacactcaagtatcagatatctggagagactggcatgtggaagaataaagatggtccaggagtgcagaactacaggatgagatttcaagtggagactggaaatcaaaggcagtgtgctgccattggatggagccatggaaatgagcaagaggtacatgtgcacaatgtgcaggttgagttaatgtctccattcccaaggactgctgagagtgtgttcctgttactatccccgggaactctgccatcctttgtgggtaacctgcataagtcactctctattaaaaagatcttagatgattttgactgtggggcccatcttctttctgcctggatcccagtggctgctgccagatgcacagattatattagatcttgggtctgtcatcaaaagcaaatcatttgtcatgttttaaaaatggtttatcagttccagcaaatacagttgggccatgctaactcattgttgtaattttcagtcccttatagatatatgagtttgagcatcttattgtttgcttgccatctgtgtattttcattggtgagttcagctctttacaccttattaattgggtaatcaatcttatttttaagtttcaagatttgtgtattttcagtgcaaattctcgcttagatctgtattttgcagatttttttttcagtctgttgcttatctttctatttcctgaacaagatcttgctcagagtat

SEQ ID NO: 480130 - DNA, 1016 bp, Homo sapiens
aatttaggtgatgagttgatgggggcagagttaagttaagggtaaaatggttaggattagtgtgctcttagcatggggttctggtccctccacagtccagaactgtctcggccagtacagccacatactaagcacgtactccagtcacactgtccaccagctccttgacttgttactagtagaagaaaagctgagaaataaaacatccagcttctggctgtttcctggagagcatgcccaatgtctggggaacccttggaccctggaggaaagtagtgacagtgtgataatcagttactatcggatgaaacgaatgggggtgaattcagaaatgaagacaaagaccaaaaagatctgttctaaaacatggctgtgcattgctactaaggaccccacaacaaatgttattaatatacctaaggagactttcacagaaattatcatgcctaaggctctacaagcacaatgcataagctgagtaagaaaaaggtttacaaaatgtaaaccagaggtggccacccaaatctcagacagatttacaggaatccataatcttggattgtgacctagcattattaagggggatatgctgtatgtttgtattgtgctatgattaacggaatgatacagttgacaggaatcataagtcaattgggcatcatttacctggacttttttttttttttctgctagaaaaacaaaagttttaaaaacacaaattgtaaattggtaatattttctaccaaagtaacattaaaactgtgttgagcacaattcctaaaattaaatagtgttctgacacaaatgctgccattcataaagggagtgctgccttccctattgactcctgaattggacttctctttccttgataatgccattgaggcaaagatgggctcaagcctcttccatgccaagcaagctatgctgcagattgggattgaattccagtgcaatgtagtgaagagttgctaaagtttcttcaccagtgtcatcgaagttctcacaacgaggtc

SEQ ID NO: 480131 - DNA, 767 bp, Homo sapiens
ataccatctcatacctgtaaggtttatgtttacgtttggtgttggtgttcatgtaggggcagagttaagttaagggtaaaatggttaggattagtgaaaagctgagaaataaaacatccagcttctggctgtttcctggagagcatgcccaatgtctggggaacccttggaccctggaggaaagtagtgacagtgtgataatcagttactatcggatgaaacgaatgggggtgaattcagaaatgaagacaaagaccaaaaagatctgttctaaaacatggtgcttgtcaaagtttcttatgtcaagtcatcaacactgcccaagaagtctgtgcaaggacttcttcaaggtcctcagtgctgatgttttatcacaggaggtcaaatttctcatcagtcatttcagctggccatctcattcctgccttttcaatcagaaaccaattaggtgttgttacgggaatgagggtgggaaacattttcctgtttgggatttctggcaccataaaggttgctggcttttagattttcacaccccacaaacaagtgactggaccaccttcagattagaccagtggtggattcaaaatagctaccctgcagacctctttgctgacatcttctatcatcccataacttttcctgtgcccttaagaagggaactaggcagagaaacctagccccgtactgctttactccatctggaatcttattctattcccctgtggctactctcctaccttaggaaagatccaagtggccccttt

SEQ ID NO: 480132 - DNA, 1446 bp, Homo sapiens
gctaagctgagtagcctttatgaatattgacttttgcaactaataggctttgatgctaaagagagctgcagcccatttgaaagcctgtccttgcctgaacccagcgactttctaccaggggaaacttgagaagatgaacatgattgtgaacagctcttttgtgctggttattcctatttctcatggatttatctacctgggatattttatgccgatggtctttggattgggtttttgtatgagcgccctttttgttgatgttgatcagtcaggcatctcttctgcaggtctgctggagtttgcaagaggtctacttcagatgctgctttactggggaatctcctggtctgtgggttgcaaaaaccctgtgaaaagtgcaggatacgggcttgatgacacagccccagatggctttccttggctgtgggaggaagtttctagccccttgcgcttcctgggtgaggcaacaatcaccctgcttctgcttgccttctgtgggcctcactcaatgtctaaccagtcccaatgagatgaactgggtacctcaggtggaaacacagaaatcacttgtcttttgtgttgatctcactggaagctgcagaccagagctgctctttttcaaccatcttgctagatgccaactgtcttttattcttatttaaaatgtgcactgttgaagtttccagcaatttcacatgtaatgtgtaaaagcaacaatgaaaaggacagtgaaaaatattttaataaattagtctctgtcttcaaatatcaatcaaaggaagtgccatgttttgaaaggtgaagaaaaactaacagaccaaatacatgtgattttacactttgtctcatttttgaaaaagcagattcaagaaggtaaacctccagagttctaatctgtatcatgtattaagcaatgaatatatgtactgaaattgaaatcaatggctttttcaattcccagagaaactagtttgtactccagaaattcttattgcagctttgacatctgtgtgggttcagtcaggatggtggggaaaattatcagatgcaaaccttcttggaaggctttggggattggcataagctccagtaataaacttggctaaaggcagccttttccatttagttaaataagttagagtagaaacaaaggaatatggggtgtttatcttaatagcttgtttgttcatgtggtcctaagactaatctttgacttaccacagtgattaattgctttctaattgggaagtccacactgtcatttaccctttagtggtgttgacttaaagccttggtcaattaatctttacttaataaatgcgagtctcactagctggtacgggtcacagtcaaaactgtttacaacactctgcctggggtctgtaatcagcccaatgctcagctggactggcaaggcagaatatttgtgtgtcagtgtactttatt

SEQ ID NO: 480133 - DNA, 607 bp, Homo sapiens
atctgagcacatagtttgagagggaatgctgtgtggaatgctatgttggtggatgaggtatttagcgtgtccacagatggtagtcttggcagaagcattggatgcagaataggcaaacgcatatccagtgtaagcaccctgagaaacggtgccatatggacggatcagtgttggactctgttgcttgcaaatggggcatgcagcagtggccatagccaggttagctttgtgtggaacacaaaaataagaggacagctgtggcccttcagggtgcacagacttaggggctctcgatgccatgactgtgacaccctcttaggggctttgcattttctggcatctccaagcttctgggccccactacgtttcacagtatcagctgtggatgctgcctgcagtatgcctggcccagctgctgcttctcaaaatgagaatataaaatatacaatatagttatttgttttttacttagtgacacacctgtcaatacatgaagatctgtttatttctgttctgtgctacataacttggcattcaatgtactctaatttatgcagtccacatctaagatggattgatgtatttttttacgcagtcaatagctggc

SEQ ID NO: 480134 - DNA, 964 bp, Homo sapiens
ctgcctcttcaagtgggtccctgaaccccacatagcctaactgggaggcaccccccagtagctgcagactgacacctcacatggctgggtactcctctgaggcaaaacttccagaggaacaatcagccagcaacatttgctgttcaccaatatctgctgttctgcaggctccgccgctgatacccagggaaacagggtctggagtggacctccagcaaactccaacagacctgcagctgagggtcctgactgttagaaggaaaactaacaaacagaaaggacatccacaccaaaaccccatctgtatgtcaccgtcatcaaagaccaaagaagacttagatcactatgagatgaaagaagagcctactagtgagaagaagttggaagatgaaggaactgaaaaagaaaattgggcaatattagagaaaattaggaagactgaaaggcaaggccatttaaatgtgtgtataaatatctggactttttggtaagtaaactattacccctggatattcatctttctatgtaactggttgagaaatgggagtaagagtaaagaaactgttttcgaataaatctggtgacagtagaagagaatatgagacacattgtgctcacagagcctagaagagtgtgacggtagaatacttctcaagataattttgtatgtttccttttttctttttaaggtatgtattgggtggaggagcattatgtatggaacctctcacaaaattggtgattattttattattatactcaattttcaccctcaattgagtgttttgattattaaggttggacattctgatctacttggtgttttattatagaactgctagtgtgcttgagtcttacattgtgaagatacttttttaaaacttgagatgtaagaggatgtaaatggttttgtaggcgatcaggctggatgagaacggacacttgtaaacatactttttagact

SEQ ID NO: 480135 - DNA, 581 bp, Homo sapiens
tgctagaggcgaggcaatcggccatgtgtagagaatacagcaaaagtaacatcacttctgaggtgaggctacaaagagactacgatgcctgccttggtcacccttctcctgctctttccattgctccctctgatggaagccagttgccatgtgatgaggtgccctatggagaggcccacatgacaaggtcctttgtttctcctccattctgctggttttatactaatttcaaggcctgtgaggatgaagttgtctgtgacagctaccacaaaggttactataagcagacaaatttccagcaagtttatcaccactaccatccccaccataaaacggtctcaagcaagggcaacacaattgaaggaagtcaatttacaggcttccatcaagcccttagagacctttttgtactatccatgacaagttcttgatgttatgtctgcacttttgacaaattcttagcagttaacttacaaggcagttaagattttttttcaagcacaatataggtagaataggctcatacatccaataaaacaaatatttactaagcatttattgagtggaagataaaaagcaca

SEQ ID NO: 480136 - DNA, 811 bp, Homo sapiens
cttctctggtgaccatgtcttccaacccactggcccagggccacctcttgcttggagagccctatccaacagccaccagacctgatagagaaggaacactgcctgaaccaaaatggtggagctataagggatggctggctggagtggtcgccagaggcccctctgggccatcagaaaacccagggtcctctgagggaccctggggaaggcatggagggcagccaatcctgtttaaggagaaactaacaatgaaaatggactcgttggtggaggagaagttggaatgcagcctctggtgctgtttgagcgatccctcttccctggtcgctgctgtgttctggaaaggcgcattgtaccctggatgcggcagattatataaccttcctaagcacctggatgttgccatgccagatcaaccactacccatgggtcagtcaggaccctcagctgcaggtctgttggagtttactggaggtccacttcagaccctgtttgcctgggtgtcagcagcgttggctgcagaaaagcagatattggtgaactgcaaatgctgctgcctgattgttcctctggaagttttgtctcagaggagtacctggcagtatgaggtgtcagtctgcccctactgggggggtgcctcctagttaggctaatctgagaacaataaaacaatttgaaacaaaaatgtctccagatctcttaaaaggaagctagggcagctttctgtagtgcacttcccaaaaatgggctgatttacctcaagaggtcatggcccccaacccagccacagatcccctctgatgacaagacc

SEQ ID NO: 480137 - DNA, 535 bp, Homo sapiens
atccgacaaatgacacatactaaccaacttaaaagcattaatgccccacagggcggttttctcctatctcaaaataaaacgaatgtacaatcgggttttacacggagacactccattcccagaggcatacaagagatggaggccttcctcttactaatcctcctcaatacagaccctttatgggtgtcggactggaagacggtcaggtctttcctttcccataaggccatatctcagaccatctcagtggggaaaaaccttggacaatacctagactttcttgggcagaggtccctgaagctttccgcagtgtattgtgcccctgacaccaggcttcccttcccctggagcagccagaccttctgtggtatcttgagcaagcccctggtcctgtctgggcctctgcagactcaaggggctcttcctacttgttcagcacttcttctttctgccacctcgtgaagtttccttgcttccccttcaccttccgttgtgattgtacctatggattaaatcacatactggcatatttaaa

SEQ ID NO: 480138 - DNA, 591 bp, Homo sapiens
aagttgtatcagaatgtcattaaccctgacgctccaaggatacaccctctctctctggaccacagctgataaagagaaacatctggattctccaggttcactggtctgggaggaggagagggtggagatctgggctgagagtgaagacacctggattctgtcttctgaccctgaactcagtgcttttaccatcaatacaacagaaccaggaagtccattcaaatctacatccccatataagcaggaagaactctgtgaatacttcttggtcaatgatctcgtgattcatcagcccaattttcttgacaatatcatttttatagccatgaggaaaatgatgagagagattaagtggcttacccaaagtcacccagagtcaggatatgaaactgtgccatctggttccagagatcatatggttgataatggaaggaacaaccagtaccaagatgagaagatgagagtgatattataaattttattccgttaatgtgttttaaagtctaagatttcttctagcttgtattccatgttcattgttgttattttatcactaactaattagttacagccagagactttaactcagtc

SEQ ID NO: 480139 - DNA, 859 bp, Homo sapiens
ctgagctaatggtgaaccactcaaatatgctggaatgcctattccctggggtataggatgctgcatgatttccatcaccatggacccaaccacattgctgcatccagctgacatcatgacactgaggcctctgggtggacaagagggcatgtcagcaaggacccaagacacggagatgcaggggatattggacccctgggcaaaaggctctctgatgcaagatagtagccagccccatgatatgcagatacaggctgtaaaatttgtgatgcatgatgtatgcagaagctacttccagggaggttctacagacattgatttctcaccagagcaagccagggagaaggtagtgcagactgcctgctttctccttctgcattgccaaagtcgcacaagcttcttccaggaagaacctgcaaggcagatttcttgctgtggcaaggcagagaagaaagcaagaaggcctgagaggggttcactgtcacatttatacttcaccaaaaatctgtccagggagaatagcaggagggatttattgctagaacaagcctgtgaagcaagcttgctatgtctggtgacagaaggggagtgctacctcttccattcaggatttcagagatctaactgcctgattttctctggcgagtgatggcagaaatctgctattagagcaagccagggaagttataatttttcttatgtttattccctgactccctggggttgcaagtctctcttgccttgctctctaatctgactggaaattgtttcctgatttccaagtctgcaactctttttttgtcagctttgcttcatgtttgagattattcctgtatgttctgtgttgtgtacccttctt

SEQ ID NO: 480140 - DNA, 1109 bp, Homo sapiens
aggttatgcgactttcctctcctgactgcacgctgattaaagcaaagagtgtggcatttctaagcacgcatccaaatgatatgaccctttttcctgggccattacaacagaaggcattatgatatatctctgcacccatcatctaggtgatatgactctcctctcctgcccggacactcttcacaacatgcccacaaaaattattgtgacatatttctgtgtccacctcataggtgatgtaactttcctctctggaatgggccctgctcaaagaaaagcccatcattttggtgatatgactctcctcacctgcctggacattgtccacaagaggcattatgcgatagagctgggactggcaccaaagttttctgacttttcgatcacagaagaaattgtgccatatgtcgaacaagcatctgagcaatatgtaacacatcccttggctctttctatgaagggcactattacatatcactgggaccattacccagatgatgcgaattatctgcctgaaaactgcctaccaagagaattgtgtcttatatgtgatgtaactctcttctttggaatgggccctgcccgaaggaaggatagtgacatattgcaatgccagtcacacagtaaacataaaatagttcatactggagagaaaccccacatccatgaagaatgtggcaaagcctttacccgctcctcaacccttattaaccacaagagaattcgtatggaagagagaccttacaaatacaaagaatgtggcaaaacctttaagtgcttctcagaccttactagtcataagacaattcacactggtgagaaaccccacaaatgtgaagaatgtggcaaagcattgagctcattctcacacctcattagacataagataactcatatagagagaagctccacaagtgttcaaaatgtggaaaagccttcaataagtcatcaatccctcggtgcagtcagccctggatggaaaatatgtgctttcagccaagttaggggctcactgtctggtgaggagcactggggagtttgtgagccccatggaggatggtctaacctcctctccttgggcataatgcagctcgtttgaggtgtgaata

SEQ ID NO: 480141 - DNA, 613 bp, Homo sapiens
agcaagcgagggctgccagcacgctctcccaagcacgtcccatctgaatactggaaactatgtgtaaatcttaaacagcagggtgtggaggagaatccgttcaaattagagtcgaatgttatgaagacatcccaggatcctcctggggaaggagatctgaaccatcaggcacctgaagaactgcttggtggcgaggtagtgtcgaggcatttcagtgtggttagtgctacacatagcctctatgcagatggcatccctccttttagacagcagatacctcccagtgtagctccaatgggagaaagcccttggggtgaaaatagtgaggaaatcaggacccgcgcatcaccttggtgtgcagtgggtgtctggctcctctcatgcctgggtcttgtccaggccctcagagttagaaaacatactgccagcaggcccaaggctcatcctgtatggtcaaatacagtcaagcagagagagaaaaatcttctggattcaatgcaaatgcaacaacttcctgttgcattaggagtagcaagactggctggctttctaaaagcttagagatattatttttgaagctatctgtgtatactttattccctttcatacatac

SEQ ID NO: 480142 - DNA, 788 bp, Homo sapiens
taatttaaaaggcagaggacatttttctccttgtttttacctatgctgatcccctacctggtgttggagcagcttcactgtgcacagaagaagaagaaaagctacagttgtgtggagcatggatggctaaactcctggttaactcgatggggtcaaaaggacaaatgtggggcagagttcagatcttttgacagggtcaacggatctggcatcagtccctggctgctctcttctaagttttcagtcgtgctcttctccattcctcaccagacccctggcctctttggagctgcctggacaggagctctcctggcctctggcaaactcctggctgggttgcggatggaaattcctgaagaaaagaaaaaagaagaagaagaagaggaagaaggggaagaagaagagaaggaagcggaagaggaagaagaagaaggagaagaggaagaagaagaagaagcagaagaagaagaagaggaggaagaagaagaagaagagagaaaagcatgtttttcaggttactctcaagaagttggtgtctagtagaggcagccaagaaagacctctgccaggaccctcctgatccggggacctctgcatggacgtatctgggctgggaatgcaggtatgtgtaagaacataagtgcggggggacgtgagtctttgatacaactcccctaggggactgtgtgctctggttctggttgtgcaccgaggccggtggggaggacccatggaacaaacttgtgttgagtatttttatgatctatttttatctcctttatagactt

SEQ ID NO: 480143 - DNA, 2504 bp, Homo sapiens
tgcatttctgtgagtttggtaaatgcccagcgttcattgagcgccatcacagatgtggctctgaatacgctgaccaaacactgagtcacaaacacgcgtgttacatgctgtgtgctcgtcatgtgcagccacgtcctttggtagttaatcctcctcctccaccacagtttcagaacgtctggcggaatccaaacactgaaacctacctgcagccccaaatcacgccgaatcctgtaactcagcacgttcagattccactgcactggcctgttggggcgcaaaggagttatgttgttcctccggcatttcctgcttatccaaattcaccatttcaagtcgccactggatatcagttccctgtatacaattatcaggcatttcctgcttatccaaattcaccagttcaggtcaccactggatatcagttgcctgtatacaattatcaggcatttcctgcttatccaaattcaccatttcaagtcgccactggatatcagttccctgtatacaattatcaggtttttatgtgcttaagcaatggcaggtctacataatgatagactatataatcaaagaaagggagtattcacgtgactttagaattagcatgtgtctgcacagaatatgcctctggctttaccagcagtagaaaatttatagaagagaaacagaaatgctttgctgttaatgacgcctaaataagaataggagtaaaggagagtattacctccaactcaccggagctgctttcccccttataagcagttcctaaagtgaatgaaagcagctctccttatgtgtctgcctactttattcttcggtttttatgtgcttaagcaatggcaggtctacataatgatagactatataatcaaagaaagggagtattcacgtgactttagaattagcatgtgtctgcacagaatatgcctctggctttaccagcagtagaaaatttatagaagagaaacagaaatgctttgctgttaatgacgcctaaataagaataggagtaaaggagagtattacctccaactcaccggagctgctttcccccttataagcagttcctaaagtgaatgaaagcagctctccttatgtgtctgcctactttattcttcggtattattgaggcctttaacttgtttatagaaatttcctgaatagttggtcatttttaactagtgaagtgtccctaaaatttaaggaaagacttagtgtagaatgaagacctctgtcttatttagaagtaatgaagtaatatttttacaggaatatccttggcaataacatttgtgtagaagagatttctgagatttggtgtccccttcttcatttgtggatatagttttcatctttgctgtcaaatagctgaatgaaacatccaaactgactttcatgaatttttttagggagatagagtgaaataaaattatgatccacttttcagagcacagaattccaattatattttcattttagctggctgtttgacggtagtcattctcaggatctcttctcatagatacaagtatatctatgacccataactatatctatggtaataaactgaaagagctagtatttttgaggtttccacattgccaactcccaaaaatttggagaaaggtgaagattcaaatttaaagtaacaagaatgtcatggacaagaaacataaagtacttaagttttcctttctgttacttttattataataaaaaaggagacagcggaataagtacttcaatactgtgtttctcatgtgtgtttgaaaatatgtaggaatagtttaatagttttggtttcctttttttttttttttttttaaagatgccaccttaggggcctgttggggagcaaagggattatgttgtccttgacgttaagggaattagccaaacatagacttcctgttcattcttgattttttttccatgtcatatatgcctataaatatttttaagtgactctctatattaatgtttgttgttgttgttgttactttcttgttaacccgagtataaactcccatggcagcaacagtgccttttttgccctcagggttttatgtgcttaagcaatggcagctccacataatgatagactatataatcaaagaaaggtaatattcacgtgactttagaattagcatgtagctgcatagaatctgcctctggctttaccagcagtagtaaatttatagaagagaaacagaaatgctttgctgttaattatgcttaaataagaatagaagtaaaggagagtattacctgcaaatcaccagagcagctttcccccgtataagcagttcctaaagtgaatgaaagcagctctccttatgtgtctgcctactttattcttccgtaagtttagcaattcatctagctatcctttatttgaaatgatttccagatgcctcctcatataaattgctgacttctggatatattctggttctggaatgggtagatttctgatgtgatttagtatatatatataaacc

SEQ ID NO: 480144 - DNA, 769 bp, Homo sapiens
taagaaagaatttctgggtgggcttaggtagtgcctgtgaggaccgtagggcacctctgccatggtgaggtctgtggatgtccaaggtgttgatcggggtgcacagaagaagaagaaaagctacagttgtgtggagcatggatggctaaactcctggttaactcgatggggtcaaaaggacaaatgtggggcagagttcagatcttttgacagggtcaacggatctggcatcagtccctggctgctctcttctaagttttcagtcgtgctcttctccattcctcaccagacccctggcctctttggagctgcctggacaggagctctcctggcctctggcaaactcctggctgggttgcggatggaaattcctgaagaaaagaaaaaagaagaagaagaagaggaagaaggggaagaagaagagaaggaagcggaagaggaagaagaagaaggagaagaggaagaagaagaagaagcagaagaagaagaagaggaggaagaagaagaagaagagagaaaagcatgtttttcaggttactctcaagaagttggtgtctagtagaggcagccaagaaagacctctgccaggaccctcctgatccggggacctctgcatggacgtatctgggctgggaatgcagtcatgcctgtctaactacgtgtaactagttagctcagcttactgttataatttttctcactgatagaatttttgcaaagacactttcaatactaccaaaataaatagtaatcaaccacttggaaagca

SEQ ID NO: 480145 - DNA, 539 bp, Homo sapiens
gctctgtaaaacagaccaatcggctctctctaaaatggaccaatcagcaggatgtggctctattccttcccctgggtgagttcttgcaatattaaattggtaggatctgaattcatacctgttttggataaatctatcaaatttaagaaggaacctaggaaagaacaacttgagagggattttccattgtgtggggctttgggaggtgagaacacagctggggaagaagactctaccacttgggctcaactttccctgaagactctgaatcctgtaaacacggggcaagcagtggccttggtacatctcggactgaggagaagctcagatcagatatcctccaattacccttcttttcattcaggagagccaaaaatcggcttttatttgccactggagtggggaggcccaggtgcgcccacaaaagaggctgttgttgggctttcctcacatgagttttgtgcctacgctcacaaggataagggatcttcttcctcaaggcatgccaggaaggcttatgggagccagtgaagaaaaaa

SEQ ID NO: 480146 - DNA, 690 bp, Homo sapiens
ccctgcctatagatgtcgactatcaaacgtggtttagagcaatatgcaagattggtacctgtgcacaacgtgcaggtttgttacatatgtatacatgtgccatgtttgtgtgctgcacccattaactcgtcatttagcattagcaaaacctgtcaacctaataaataaggcaaagcttttgagttgtgctcaaacttcactgaacataaaaaaagttttggtggagacaagtgctgaaaatgtgaagaatgtggcaaagaccttccatcccagggagatgcagtgctgctaccaatggttggctggaattctaagccagtacatcttaccctgtgaggcactgagaaaatgcgtcctacagaccatcaatgctaagcgccctgaattctgcctttttcctatggatatgttcaagattgtaacctcctgctttgctggagttccagcgaatttttctgggaaggctggaaaaaattatgaaagtgactttgataaaatgtaacgctattcggaaaataatttttacatattgaggataagatgaaaaataatttatgtaaataacataaactaagtttactgaaattatttacttatttaagaaacttgattaaattttaaataaattgctgtcacctatcagcatttgtgcagcattttttttaagatttggtgtctaaaacaggtaac

SEQ ID NO: 480147 - DNA, 727 bp, Homo sapiens
ataagggtttgaaagatgtctgatttcagaagccttttcctgtaaacaccaggcagcatctcgtactatgcctcactgctgtcattctatcatttacttgactaagatacaagggtttgtgggtaaaattggtcccaatggcttaggatgcattgcaagagtgggtctgttaatgcctgagtgtttcccatccgaaagagaaaacggcccactctttttgtttgtttgtttctccacctgcccaagaacccacaatggatcctggaccctgctgatcagaatagttgtgctcactgatgcagcagcagaaacactggttttcctcctggaccacaacaaaacctgcagccttgcctgtccacccagaccacaaagaggactgagaaaaatcggatttaggagtctgtcgcattcctcactcttcctctacagctttcctcatgagggtggttctcacacttccttcacagactgcctcacacaatgggctccaactgcagacctggcgatgggtgaataaactacctgacacacagatatcctgctttgccagcagcagaggaaatttttcatgtatattagatttcagttttcttagtcttccattgcaaaatagataaatctgtccatctaatatggaagaacctctcataactctggtggagcaacaattgtccatgttctttcccatatattttagatatgaagacatagcaacaaatgtaag

SEQ ID NO: 480148 - DNA, 851 bp, Homo sapiens
ccggttggagaccagggggtagatagaagaatggatgatgagaggtttgaaggaggatatgtcaaagaattcaaggaagacatgaaaactggggatggcagcagtatagagagggaccaaagcagccagctggaattggctcaaaaccaaaaggaattctccactgtgggagaaagaaagactgcatttgcaatcctagatgcagagaatccccttggccctgtgaggacagatcctaagcctaataacagagacctgcctgacgtccacacaactacactgtcccagagagggaactcatgcaagacccggtgcccacagaggcccaccctgctggtgcatggcccagtattgagggtgatattgagcaaaaggctgtctagaacctacatcagagagccttttgcccaggggtccaatatcccctgcatctccgtgtcttgggtccttgctgacatgccctcttgtccacccagaggcctcagtgtcatgatgtcagctggatgcagcaatgtggttgggtccatggtgatggaaatcatgcagcatcctataccccagggaataggcattccagcatatttgagtggctgcgtcaaaacatagggaacaaaaatgtgtgatccatagaacgtgggaaatacctgcctgaggatgctgccactgaggcaccaacttctcccagcccctcagcagcaagacaaccacacacctgtattcatgtcctcatctcctcttctaaaaaggatgccagtcatattgaaataaggccccatcctaatgcctcacttaaccttaattacctctttgaagactgtgtctccaaatatagtcgcattatgaaataataa

SEQ ID NO: 480149 - DNA, 523 bp, Homo sapiens
cggagagcaatgcctcctggacagaggctcttccccacagggcaaattgcttggtctcaaattgataaaaaagaaaaaaataaaatagccatcaccccattgaccctgaaaggaatggctctgttaagtatccattacgtaccagccactgctgtcggcaccttatgtgttttaagtcatgacatacatcatcatagtaaccccaacgaggcagctgctgtcattgtttctactttgcatgtgaagaggcgtctggtgttccatgtttctgctcctgtggcctccacggtgcaacaagctagcggtttacttggacttctgcctcatctttcttctttggcgcttcagcctgagcgttcgcttcttcctccacttggctctcatggcgcagaggtttccaagaaaatggcgctaagatcacaaacagcagtggaagagtatcctggtctgggctaaaagctttgtaaaatagtttctgagcaaattatttcacttctgctaagccttgggttatttatctatt

SEQ ID NO: 480150 - DNA, 491 bp, Homo sapiens
gtgggagagtgacgatttttgaaaagtcattgtgtcaggactctttttgttatgaggaaaatgatgagagagattaagtggcttacccaaagtcacccagagtcaggatatgaaactgtgccatctggttccagagatcatatggttgataatggaaggaacaaccagtaccaagatgagaagaatccatcaaaaccacagctcagttttgcagcttggagaattcagatggacaaatgccttcacaggaaaggtggctttgatgttccacttacttctctggaggtcacctatgtggacacactctgtggcctcagagatctcatggggcctgtggcccagagggttggctccatgaacttcacagtatggtcacctgccaatccccatggcattctgtcttggggctgtgaggacacagtgggatatcagggcccagtctgtgcatctctcattccagggaggccggggccctgaatccactgtccctt

SEQ ID NO: 480151 - DNA, 536 bp, Homo sapiens
tctccctgacaaaaaactaaaaaaaaaagacactgaaaggcatacaagagatggaggccttcctcttactaatcctcctcaatacagaccctttatgggtgtcggactggaagacggtcaggtctttcctttcccataaggccatatctcagaccatctcagtggggaaaaaccttggacaatacctagactttcttgggcagaggtccctgaagctttccgcagtgtattgtgcccctgacaccaggcttcccttcccctggagcagccagaccttctgtggtatcttgagcaagcccctggtcctgtctgggcctctgcagactcaaggtctggtgcctgacttacaccctgttatcatatcctgccatctggccccatatggagtcctacaggggactctcagacccaggcgtgaccactggctcaggcccctctcagaggtctggcggcccagcatctgcccacgggcctcctctccccctccttttctccaggctcctgtctctgccacagttccctggaggtgacctcta

SEQ ID NO: 480152 - DNA, 582 bp, Homo sapiens
cagctgcagcctgagggcaggtgaccccagcaccctccagtgcagtcctatgactgtttctgcttccggccctctgacttttagaggattaaatgagataatacgtggaaacattaggcatgtagcacacttagcagatggtggttggctccccctgcttttccatcagtctttggtctacagtttaaatgctgggaaaaaggatggctggagcaagggtccacggcctgggcaggccacagagccccacggtgcccttgctaccctattaatgggccaggaatctggaagccagccaccacatgccctcatgcccagggtcttccggcaggtgaagctgaagagccaagaggctccaagtctgcggcagcagcaagaccagtacctgtgtaccgctctaggagccctgatcccacaggagcttggtgagctcttcattagctcaatatgtggtctgccctcaagtgcacggtctattactttgtaatatgccactggagtaaagaatcaaaacacctatttaaagactgcaaaatatgataattatttttaaagtaattgattaaacctggtaggttttcc

SEQ ID NO: 480153 - DNA, 516 bp, Homo sapiens
agattagtagctacaccggtaatggtaatagagctaaggcctaatagctgtaactcagcttcagcctccttagacaaaccagcaactgggttgtctcctaagcccattgctcctaatgaagaatttccatggaggtacagtaaggaaataatctttgagatctgctacgatgggaggtacacagaatgtgcctaccaggaatctgctttatatccattgaaagcaagaaataatacagtaaaactttgcctggctagagtatttgaaagaatggcatattctgctttaattctattactttggaagtatgaaggtgaaaaaaattcaaaacttaaatttcctgttgaatgcaatttgaaaatatggccaatgattgcacttttcttctctagtaaggttggacattctgatctacttggtgttttattatagaactgctagtgtgcttgagtcttacattgtgaagatacttttttaaaacttgagatgtaagaggatgtaaatggttttgtaggc

SEQ ID NO: 480154 - DNA, 658 bp, Homo sapiens
cagcaaataacttgcggtttttggacctgtggtgtttatcagtcactggctctgtcgtctattaaaatcatgtacacatttttcacagttcatgaggtgctgctctggttcccaagtgtcatcctgtttgtcataacctttccaccgaaccaaatactgtgtattcccatttttatcctgtcttttgtcaacaatagcttcaacctcaaactcctgggaagccatgaggaaagacacgggattggaacagttgctgtgccacctttgtttcagttgcgtctccacatagacacttctttctgcctccagctcttcaccaggttctgtgtatggatgaacctcttctattttgtcaccactggtgtagtgaaaattgtgcgaaatagcagctatgccatgtgcctgaacctctccatacttactgcctggtgggacagcttgggctttgtctcatggtgcatgacaacttgctcagtagcctcagggagttaggctttatagattagttaaatttaaacctgattttgatgggtgcattttacaatgattgcagaacaactatttactaaatatttctgaaagtctaaattgtcattttctaagaagacataatacacctttgtttttaaagaaatgaagagtatttactaattagtaa

SEQ ID NO: 480155 - DNA, 780 bp, Homo sapiens
ggtcctcatccatgcctcagaaccacgaagagaggaggctcacatgcttgatagaaaacctatttgggactgtgagattgagagtgttaagcacccttgctcctcacctgggacagaggcatgtctctgaggccagggattccccctcatcttggccttgcagcctggactgggcagtcaactcggcccatagcggggccagtgaggcggcttgggaggcagctagtgactggaggaagctggcgcctgatgactcaggaatacacaactgcccctcatcggggacaagtagaaatgaagtattgttgatagtccttaatacccctttccctgctaggccactcagggtgtccccagagaccagtgatcttttttcctcaggatcctcggctgcaggtctgttggagtttgctggaggtccactccattccctgtttgcctgcgtatcagcagcagaggctgtagaacagcgaatgctgctgaatagcaaatgttgctgcctgatcattcctctgtatcaacttgaattaatggatgactacatcattagaactaactgactgattgaagagcaaaggaagaataaaggtgaggtttgggtgggggagaggggtgggtcaaagttaatgtgatgattaattacagggttagaaaaggcactgggcagctgggtactgtattatgtcatcactgtggtttgcagaagggaggactgaacattgcacccagaacttattggatctgagatcagggacatcttaattgctcattgtacagcct

SEQ ID NO: 480156 - DNA, 1575 bp, Homo sapiens
cagcagaagcagcaggctttccgcaagcagtgtttggacactcgagagaggccgtggtttcagggcacttggggacatctgtggccacgttcatgaagaagactaagcctacttcatctcaggacccgcccaagagtggccgcggctttgggacacctggggtcgggtccaccatgaggataaaacctccttctcttctggacatgtccaggagtggccgttgctacaagtcacctggtgctacgaccagggtgagaataaagacgtctcctcaggaccctcccaggagagtacatggcattgagacatctggcggccaagaagtgaagcaattttggaatgctcttgatcaaaaggaggggtccattcagatggctgtggttggcggggggacaggagaaaacagtatttctacaattgaaaacacagttagtgatgaactcgatgatcgttcaaagatgagaaacaaaattgtgagatctgatagatcacaccacgcaggcattaaaaccttggtagcatttcttttagtagaatgtccatatgggacgttcgctaacacttggttaatagtcactaataaacaacaacaacaacaaaaagtaaaatttagttccttgtactagtaatgtttatgcctgagattatgtataataatcacctcagaaatccatattactcatcatcaaataagcatttttattatcaaataaaccttttaatcactgacaaaaaagtactgcttcctagtcctgcaagataaaatatatatgatatacttttatataaatatataatctataacttcatgtaatatacacataatttttgcaagcctgaatgtaatctcatagattttgagcctcttacaaaagtgaccaataacacttggcctaaccagctaattttatttctttgcaatttgactaggatatataatggtaaaatgtctttgaagatattatatattaaatgacaggtatgtttttttatatatgtatatatttgtatattttttgtatatgtattttttatatttgtatatgttttatatttgtatatttttgtttgtatatttttgtatatttatttgtatatgtttgttatattttacatttttgtaaaaaatttatttatatatttatatttatatatattgtaaaaaatatttatatatttatatattatattattcatatattatatatttgtataatgtgtatatattatttacatatttgtatattttatttttttatatttgtatatttttatatttgtatattttttgtatatttatttgcatatttttctaaatatattgtatatatttttatatatatttgtatattttattatactttaagttctaggttacatgtgcacaacgttcaggtacaccaatcagacgtagatttggtcttttcacatagtcccatatttcttggaggctttgttcatttctttttattcattttttctctaaacttctcttctcacttcatttcattcattttatcttcaatctctgataccctttcttccagttgattggattagttaatgaagcttgtg

SEQ ID NO: 480157 - DNA, 598 bp, Homo sapiens
taatggtttgctgaccatctgcctcagtgtctagaaattcaggatgacacgagcttggtttgattcactgttgtatgatcagccccaaggaaactgcccagcagagacaggctctagatcaggtcttacagagtggtttccaaaacgcatttattctggaataagcaaaatcaaacttctcaaaatcccttgcctctttaagatgaaatactttggtcccaaaagaaaagagcctggctgtttgctcatccctgaaacaaaggacaaagctcccactcttgtgggaattaagggacaggagagaccaatgggtggaacaggaggattttattgggcttttgaaacaaataaaagccacctacctatgagattaacaaggcttaaacttgtgcaaattacaagcaatcagtgcccatgtgtagttgtttatttttcaaatcgatggtataaaaattgaaagatttactcagaaatatagagcaaccagttctaacaattactctctagagttgcagagctaaatatgttactcagagtattattatataatgtttttcaactccttatttgtcaatataattctgaatttggattgtcc

SEQ ID NO: 480158 - DNA, 663 bp, Homo sapiens
ttggcttcagggtgggtgcagggttgaatttcagaatctttacaattggaggctaagattgtatcatgggatttctagctggaaattcagcctggttccaagtgataacgggtgtatattttgcttgggtccatagtttgactgtgccaggcagaggttacaaccagaaactgattgctggtgattttgtctgtgtccatattatgactgtatcagctagagcctctctcctgggaattattactagagatacagccatgtactgcagtgtgactataccaggtacagccactgttaagggatttattgctggcaacagatcctgggcccatgatgtatttactgatggacattcaacctgggtccaaggtacgactgtggaaagtataggctgtgtccgtggaattactgctggagatacagcctgggcccatggtgtgactgtggaagttccagcctctatttttggaaaaaataaaagatttggaagcaacctaaatgtccatcagcagataaagcgataaagaaaatgggggagggatagcattgggagatatacctaatgctagatgacgagttagtgggtgcagcgcaccagcatggcacatgtatacatatgtaactaatgtgcacaatgtgcacatgtaccctaaaacttaaagt

SEQ ID NO: 480159 - DNA, 1145 bp, Homo sapiens
tcctcaggcattacattcaggccacagacagcacaatggtagaagcagattgtcatggcaagcttttcattggtggcctcaatagagaagccaatgaaaaggtgcttaaagaagtatttgcaaaacatggtccccttttggaagttcttttgataaaaggtcgaaccagtaagtccagagattttgtggtcattatttttgagaatgctgcagatgctaagaatgctgccagagatatgaatggaaagtctttggatggaaaagaaataaaagtagaacaagcaaagaaaccatcttttccaagtggtggtaggcggagaccaccaccttcttcaagaaacagaagcccttcaggaagtctgagatctgcaagaggaagtagtggaggaacaagaccgtggctgccctcacatgaaggacacttggatgatggtggatacgctcttgatctcaacacgagttcttctaggggagccattccaattaaaagaggtccatcttcacgaagtggaggtcctcctcctaaaacatctgctccttctgctatggcaagaagcaatagttggatgggaggccaagacagaggatgtcactacattgtcaaaactgacataaaagccagcggctcaagcagtccagctgtctctgccttccacactgactcgcactgtgagctgctgagcctgaccatccagcttctgagacctcaataatgtttatgtgcaaggcattcttactgcttctatgaagattcaaaagaactacaagagcatttagcagaaaaggagtcactgggcttacctattatttaaaaataaaatcaagtcttgaaagtgattgtgatggctgtggtgaggtgatgttagagatcattctgaacgtccaagtggaagttcttatagagatgcatttcagagatagggtaagggtccgggatggatttgtaaattatagaattgtgtttaatagaccagatcgttattttaatgaaattctaaggaaaattacgagggacaaatataacatgtctaaatattgagtattcttaacagaagaaagcatagggaatgatatgaaggagtctaaagtgcttttcaaaattatgtaaaacttaatggcttaaaacaataattataatttactaa

SEQ ID NO: 480160 - DNA, 1685 bp, Homo sapiens
cacgtctggataggtatatccttaaaatatacgtgaggccatgcacttctgttttcttgcccaaattggtgaggacatgcgcttctgtttttttgcccaagtgttgcattttccaagagcaccctggcctgccatacccccatcctgtgctatcagaaaccccgagaccctagcgggcagagacacagtagctgacgtcgagaagaaccatcagcagaagaagacacaagcaattggacctggagaagacaccggaggaaggagagcgcaaggacagaggcggcaggccatccaccgcagaagaacacagagttgcgtggggctgtggaaggagagcgctcacctgccccatttcaagggaaaaccaccttcccgctccgtctcccttctggctccccatccatctgctgacagcttccactcaatgaaacctgcacttactctccaagcccacgtgtgagccaattcttcagctacaccaaggcaggaaaccccaggatccagaaagccttctgtctttgcagaaaggcagagtgtctaattgagctgacacaagccgtctacagattgataaactaaaattatgggttgaaaagtgtctataaacgcatggtgtaatcataaagccttgtattctgtgattgggaccacagtctaaaagtgatatccagaaatccagaatatagaaggctgaggaaaaaaaccagctgctacttcaaaaggtaatacttagttacattaagaaaactatgcctgaagatgacattttcacagatttaatatgtgaatttggaaaaattgaacatataattctgagatgattggctttttattgacatcaaattactgttttttaaaaacaatcgtgtacatttttaattctaatttttctgcacttaagaaatatgcatcagtaattgttagtatattagctccattagctacagaagaaattccaaaataattgaataatgccatctagatgtttcaaacagaaaattggattaaaaaatggtttgatttttaatcaatcattggaaccaaaataaagctgttgaaatattattgtgtcaggaaaaaaaacattgaacaatatgatactttttttaaaaaagttcacttgaaaagctaaacattgtggataacttttattggtgacaagaaaaagcaactttggaaaagtttttgcaagtaactttatttaaaaatcaatataaaattaaaacaaatgcattttcctaaaaaaactacaggtaattattaagaaacagattaatacatataaatatgttctagaataattattcttcctcttatttgtaatacttcaataataaatacaaagaagttatttttctattttgcctcaagatatgtaattgtgaatttaaatttctgaagggatttcattttcagaagtaattggaagatattcatttcctccaatgaaaactgtaaaagagcacgtttttcaaagcaactttatttcaatgtccactgaacaattttaacttaaggtaacttcatacttctttgtaacattaaagagtctttggattcaactttaaatcttgaaatacagtggatttaactatttagagtaagaacagatatatttaaggtaataatattggttgaaatgtctaatttatgacagaagatatgctgtctacactcatcatttc

SEQ ID NO: 480161 - DNA, 793 bp, Homo sapiens
gtaggcttgtgtttacaccccctcaagtcctctttggattccagcacgaggcatcaaaccataacatggcatggctagggtccaatctagtaccggaattgaaagagttaacccagctcaactacactatagcctttattcatactcacactgatcagtgcctggtttgcactacccatccatatgttttccttacaggaactaacatttccattacacctggaaatgccacatttgtgacccgggtgcagggacaggcttggtttgcctcatgtatcactggtcatgatatgtctagtttaaaaacttccagtgtcgtggtattaaggagacaatctgaggcacttctaccagccaatttgacatgcaattggcaagattcttctgcccttgccaccttagaaagtgccctgtcccaggtcagacacaaaagattcacatttacacttatggtctttacaggctcagccatagtcattatggcaactgttagcattgctgttgtatctattactgaatcagtacaaacaactgcttttgtagataatctggccaaaaatatatgtgatgaacttctcctacagtaaggaaagagtatgcgggagagccacaagatgcactagcattctgtcaacagtgaaaatgtgaatggcaacataaacatacctgtgtcacttctctaccatggaaccaattaatgtatagctagggtgaggtgaaacaacacctctggggaaccttttataacagtttaactgcagacatgaagcaagttaaaactaaaattttaaaa

SEQ ID NO: 480162 - DNA, 777 bp, Homo sapiens
ctactttcctcaccctttctgcctcatctccctgctgcctgtggtagtgattgctgggcactgggtgcttgatgcatgtgcatcctgaccctccttcccacactaggatagcggaggaggtgtgtggtttgaaggtggccaaatggccattaactgggtgctgcgtccagcagtatcactcaattccacatgtagaaaaagttagccaagggataagagctaaaacacctacagaatgggacgaagatatgtcaaaataccctctgtggctctggcacaggcaggacagtagcatcatcaggctgctgggcccaccagtatgcaataattccctctttattcagtgtcgtagcagaagtgtaacatcctctgtgtgcaaatcgtcaaaatttttctttgtgggcacggttcagataaaaacaggagagtcacatgacctaaatgctgtgctcagcaatatgtcacaattccaccatttgaaaggcccaggcagggaaagagagtcatgtcagttaggttatggcctcagagatatgtcccagtgtccccattaggcaggactcaggcagaaaaggagagtcttatcacctaggttcttctttagaacagtgcacaattgaaaatgtatgaattgtttattgatggaagttttcatttaatattttcagaccacagttcaccatgggctactgaaaccacaaaaagcaaaaccacagataaggggagcaactgtaataacttggattctgtaatgtttgctgatggttgatagcatat

SEQ ID NO: 480163 - DNA, 551 bp, Homo sapiens
tgaatacgtacacagtataagcaatggcaggtccacttaatgatagaccatatcatcaaagaaaggcatttcctgcttatccaaattcagcagttcaggtcaccactggatatcagttccatgtatacaattaccaggcccatctagcattcagtgtcacgggccggttttgctgctttcagaagccccctgcaagcctcagtgttgctaggccaagacctgactgcctcttcattagtgtcccaatggatcccacaaacataatccaaggtcctgactgttcttctcctttcccagaacaggatcatacacactttactccaccaggacattatgacatgctgaacaagaccctgaaattgtggttcactgtgaccaggctgaggctgcgctttaaaaggcagaactgccagcttggtgccttattttccttgtcattctaatgcatcttttgataaggagaccagaaaagagtattttagtacggagaccagaaaagggtctgaatatgtgacagccctcctcatagagttggtactatttattcatga

SEQ ID NO: 480164 - DNA, 481 bp, Homo sapiens
ggtccctggggtgaaggagtcaccagggctgcaaaggtcatccatgtggccatttgatctggtcatctgggaagtaactggacaagagaaaatgactttgtctgtaggagccatctgctttctgcctggatcccaactgctgctgacagatgcacagattattttggatgttggggatgtcatcaacagaatgccccagcagtcacccactgagtcaaggcacagcctctccaaccctccagaccaaaagtttcggagtcctgtgacccaaggagcaccactgggagaacttcagcctggaggggagatcagccattttgtgacctcgtgcccctaccaagcagtgcaatggtacctaatgggttataggacgattccaggaacagctcacttcagaaaccacagtaaggtattgggacccaaggcaggacacatcccacaaggaccaaaagggagcctaatcacctcctaggttataacc

SEQ ID NO: 480165 - DNA, 943 bp, Homo sapiens
ccggcagccatttgtcacagacctgggaaagggactgaaacaagaatggaaatgtcaccagctgaggagatagtgaaggcaaatgccaagcaaggaagctacagccatagtcagaccccagaaaatggggaatgcctggtgcagatgaccacaggtttctcgcaggcagagactgaattcacagagagccttgacagggctgtttcagtattccaggcagatgatgaggaagacccctcttgcagccacaggacagagagtgtgaatgcaggaattcagcaacctagacgagagggtgatatagaggcttggcagctccctgttaggatacatgccccaggtcaacagggaaatattatcactacttttgagccttttccttttaaattactcaaagaatttaaaccagctattaatcaatatggaccaggttcttctttggtaatggtaccgttaaagaatgttgctgtccccagtcagatgattcctactgaatgggatgctcttacagggaaagcacatttaattgactatatcaaggcctgtgatggtatcagaggtaatctgcataaagctactttggtggtgcaagccatgacaggactgaaagtgggtaaaggaaatactccatttcctggagcttgttttaactgtgggaagcatggtcacactggaaaagaatgtgaaaaaaatcagtgagtcaggccacaagttgagggataaaaggaaaactgctgagcctggaatatgtccaaaatgcaaaaagaaaattactcggataatcagtgtcactctaagtttgataaagatggaaacctgattttgggaaatgccaggaggggccgtcccagtccgctttctaaaccagggcatttccagctcaggaaatgccctatatttcatctcaaaaggtggagtttgcagctgtaattgaggtatggac

SEQ ID NO: 480166 - DNA, 582 bp, Homo sapiens
ccaccacagctctgatggtgccctccacgccagacagagacagaggacctggaagggaaggtgccctgccccacactctccgtgctcttgcaaagttgcagggtgtttccttgcacgcccacccaatcatccggcggctccttgaccagaggcagattgtgcggcacaccgagatgttggccgggatcacaaatgatgatgaagtcctgctaagctacgtacgtgatggatttgcaggtaaggggaggaaagcaactcttccgggtaccggcagcaggatgaagttttccttttatcacagtctctacttccacaatgaagtgatcattcaggagtactgccttggcatcctcgcctccagctgcaggccgtacagctcctacctgaccttcttcagctggttggctgaccatgactgcccaggttctggcaggattgctgaggagcccccgaccagtacatcacgcagtctaacaccctgataacactatgcagaagggacatccaatggagagactcaaagaaacagaacaagatgtctgagcatctcagcagtccagcccctgctatttgagtcacgct

SEQ ID NO: 480167 - DNA, 575 bp, Homo sapiens
ccaccacagctctgatggtgccctccacgccagacagagacagaggacctggaagggaaggtgccctgccccacactctccgtgctcttgcaaagttgcagggtgtttccttgcacgcccacccaatcatccggcggctccttgaccagaggcagattgtgcggcacaccgagatgttggccgggatcacaaatgatgatgaagtcctgctaagctacgtacgtgatggatttgcaggtaaggggaggaaagcaactcttccgggtaccggcagcaggatgaagttttccttttatcacagtctctacttccacaatgaagtgatcattcaggagtactgccttggcatcctcgctgcaggccgtacagctcctacctgaccttcttcagctggttggctgaccatgactgcccaggttctggcaggattgctgaggagcccccgaccagtacatcacgcagtctaacaccctgataacactatgcagaagggacatccaatggagagactcaaagaaacagaacaagatgtctgagcatctcagcagtccagcccctgctatttgagtcacgct

SEQ ID NO: 480168 - DNA, 1337 bp, Homo sapiens
gtgactgaagaggataacggtaatgaaaactttttttttcacctaaatcagaagtgaaccagctaagtttctcagggagaatgccaccctccctggagactcaggccctgccggacccacatgctgtcctctctcatgggccggagactctggtgcacagggattcccgaatagcgaatcccaaagccctgcaggtttcactgattcttacctgaatgccccagccgaacacacaggtagcttgtgccagccacccttttcctcctccctctgccatttgtgagaaccatgaggactctttgcttctccctagcatgcagacttcacgggtcctgaagttggattgccaaacccagcggcaccctgcttgccagcttaagagctgagtttgaggcacacctgtgggcaggagtgtcggccctcccaaaaccaagtccagggatggcctgggatttctcactgcaggctcctccctgagccttgagttctccatgtgtgtcacagctgcaggacccacaggcctttgagcccccagctgtgggctgcttacctggcctcctctctgttccctctctgaggacctaatccttaggtagtgctgcaggggattgagacggaagccctgactgatgatctggaggagtggggaaagtggtctgtgaaaggtcaggtcatagttcaaagccagttcccaagatgccaaggaaagaccagcaaggtcctttcccatgacgccccacagcggcccctgcctcagcagtcctggctgaccctgagtggtcacagtcagccaactagctgaggaagctcaggactttctcatggaaacatgcccttcaagtttctgctggcacccccaagcaagctgccctcctatctgcaggaccctggcctcagctcccttcgctatcccccatcccctgcctcctggttgtccccgtgtgccccttgcttggctcccctgctccccaccccaagaagccagatgcccaccccctgctgccagtcattccgaatgggcagctgcaaagatgtgcctctggcccagaagctggagatgccctggctgatggcccctgctccatgtcaggcttctcctcaaccaccacctggaccatgccatgatgttgtccaccaccagcaccttctcctcccccaagagtgccttcgaactctgcgccctggctgccctctcctgcagagcctccaatttgaatggggtgcctcctttggaggtcccactgaccatgacctgcactgtccactcactgtccactccacgtccagataagtatatccttatagtatacttaaaaaaaaaaaaccttaaaagcatt

SEQ ID NO: 480169 - DNA, 1772 bp, Homo sapiens
ggagagcccagacaagagttgcatcacctcggtgatcagtgcagagatatgtctcaattagtcctgtcggcaaagcccagagaagagttacatcatgtcggtgatcagtgcagagatatgtcaaaatgcccctgtgagcagagcctagacaaaatttacatcacctgggtgatcagtgcagagacatgttacaatgtccataaaggaatggaatgcaatggagtgaaatggaatggaatggagtggagtggagtggagtggaatgcaatggaatggagtggagtggaatggaatggagtggaatggaatggtatggaatggagtggagtggaatggaatggagaggaatggagtggagtggagtggaatgcaatcgaatggaatgtaatggaagggaatggaatggaagggaatggaatggagtggaatggaatgaaatggaatggagtggagtggagaggagtggaatggaatggaatagagtggaatggagtggaaaagagtggaatggaatgtggtggaatgaaatggagtggagtggactggagtagagtggaatggaatgcagtggaatggaatggagtcctgggtgacacagtgatatcctgtcgaaagaaaggaatggaatgcaatggagtgaagtggaatggaatgaaagggagtggagtggagtggagtggagcagaatggagtggaatgcaatggaatggaatggagtggagtggaatggaatggcatggaatggagtggagtggaatggaatggaatggagaggaatggagtggagtggagtggaatgcaatggaatgtaataatggaacggtctcgaatggaatggaatcgaatggaatgcaatcgagtggaatggaatggactcgaatggaaaggaatggaatcaaaaggaatggaaacggaatggactcaaatggaatggactggaatggaaggcaatcgaatggaatggaatcgaatggaatggaatcaaatgtaatggactggaatggaatggattcaaatggaatggacagtaatggaatgaatttaatggaatggaatggaatggattggaatggaaaggaattgaatcgaatcaaatgttatggaatcaaatggaaggaaacggaatggaatggaatggattcgaagggaatggaatggaatggaatgacatggaatggaatggaatggaatggaatgacatggaatggaatggaatggattcgaaaggaatggaatggaatggactcaaaaggaatggactggaatggcatggaatcgaatggaattgaatgcaatggaatgcaatggaatggactcgaatggaatggaatggaaaggaatggaatggactggaatgaaatggaattgaatggaatggaatggacaggaatggaatggactcaaatggaatggaatcgaaaggaatggaattgaatggaatggaatagaatggaatggaatagactcgaaggtaatggactggaatggaatggacttgaatggaatggactcgaatggaatggaaacgaatggaatggaatctaattgaatggaatcgaatggaatgcaaacgaatggaatggaatcaaatgaaagggaatcaattggaatggactcgaatggaatggactcgaatgtaatggactggactggaatggtatggaatggaattcaaagcaatggaatgaaatggaatggatccgaatggaatggactggactggaatggactggaatggaaaggaatggaagggaagggaatgcattggactc

SEQ ID NO: 480170 - DNA, 1086 bp, Homo sapiens
cgagtgcaatggaatcgaatggaatggaatcaaatggaatgtactggaatggaatggactgcaatgtaatggaaggaaaaaatggaatcgaacagattggaaccgaacggaacggaatggaatggaagggacaaaaatggaatggagtcgaatggaatggaatcaaatggaatggattggaattgagtggaaacgaaaggaatagaatggaatggagtgtaacggaaatatatcgaatggaatggaatggagtggaatcgaatgtaatggaattgaatggattggaggaatcagatggaacggaatggaatgggaacagaacggaatttaatggaatggaatgtattggaatagacctgaatggattgttgtcgactgtaatggaaccaaatggaatggaatcaaatggaatggaagtgaatggaatcgaaaggaatagaatggaatggaataatggaatagtctcaaatggaatgaactggaatggaatggactcaaatggcatggacaggagtggtatggactcgaatggaatggaaatgaatggaatggaatggaatggaatggaatggaatggaatggaatggaatggaatgcaatggaatggaaaggattaccatggaatggaatcggatgaaaagaaactgaacggaatggagttgaatggaatggcatcaaatggaatggaatggaatgactcgaatggaatggactcgaatggagtagaattctgtggaatacaatcgcgtggaatggaagggaatggaatggtatggacccaaatggaatggaatcgaatagaatggactcaaatacaatgcactcgaaaggaaaggtctcaaatggaatttattcgaaacgaatggaatcaaatggaatgcaatagtatggaatggaatcgaaaggaattgacaaggatggaatggactagaacagaacgtacacgaatgtaatggattgcaatataatagaaatagaaaggaaccgtatggaaggtaatcaaatgaaatggaatggaatgcaatggaatggaatacaatggaatgcaatggaatggaacaaagtggaattgagtggaaggaaatc

SEQ ID NO: 480171 - DNA, 3282 bp, Homo sapiens
ggaacggaacggaacggaatggaatggaatggaatggaatggaatggaatggaatggaatggaatcgacccaaaaaatggaatgcaatggaatggaacggagtgaaatcgagtggaacagaattgaatggaatagaatcgaatggattggaattgattggaatagacaggaatgcaatggacttgaatggaatttactggaacaaaatggaatcaaacggattggaactgaacgaaacagaatggaatcaaatatatcgaatccaatggaatggaatggaatggactcgaatggaatggaatggaatggactcgaatggaatggaatggaatggacttgaatggaatggactggagtggaatggactcgaatggaatggaaaagaatggaatggaatggaatggaatggaatggaatggaatggaatggaatggaatggaatggaaatgaatggaatggaatggaataggatggaactaaatggaatggaatggaaatggaatggcatcaaatggaatggaacagaagggagtgtaaaggcaagatatcgaatggaatggaatggaatggaatggaatggaatggaatggaatggaattgactcgaatggaatggactggaatggaatggactataatggaatggcccggagtggaatggactcgagtggaattgactggaatggaattgacttgaatggaacagaatggagtggaatggagtcgaaagaaatagaattgaatggaatgcaatcgaatggaatggaatgcaatggactcgaatggaatggactcgcatggaatagaattgaatggaatggcatggaatggaatggaatagaatggaatgcaataaatgcaaaggagtggaatcaagtggaatggaatggaatggaatggaatggaatggaatggaatggaatggaagggaatggacccaaatggaatggattcgagtggaatgtaaccgacgaatggaatggaattgaatgcaatcgaaacgaatagatagaatggaaaattgtgaaaattatgtaataaaagtccttatgtgaagacagcattaagaatcctgccaaactgacttgtactgaatatgtagcatgagtaataaatgaatcctgataacagtaagacattgagttgtacatgtatacaccctataacacagcagtttcatgcatacatcagaaagattctttcacatgttcattaaggaaacatgcacaagtattttagttaataatattatttgcagcaataaatggcaatcagctcaaatgctcaccaattgtaggttgaaataaataaataacttttatatacatgaactgaacaacatacagcaatgaaaatgaatggattataaacacaaatatcaatatggataatttttaaaacatcatattaagcagttatagaaaaactacacacgtttgattgaaattttataattcagtctgaattaatggacatattgcataaggatataaaaatctatagtaataacagtggaaaacaccagggaacaaaattcagctaattactacctctggtggatatgaagtataatgcaattgaagaatgcacacagagagctcctacagtatgataattcattttctaacattgtttgcaggcacatgatatttgttttattattggtcttcaaaccccacatatatgcttttatgtactttttgcaatctatacttcacaactgttaaaaataaagcaaatcttaggtaaaatatgttttatatatatataaatatatattatatatatttttatatataaatatatattatatatatttttatatataatatatattatatatatttttatatataattatataatatatatttaagtataaatatataataaatataaatatatttttatataatatattttatgtatttatatataatatattctatataatatatattttatattatattctatataatatatattttatattatattctatataatatatattttatattatattatatactatatattttatattatattatataagatatattttatattatataatataatatatatttaatattatattatataagatatattttatattatattatatataatatatattttatattatgttatatgtaatatatattttataatatattatatgtaagatatattttatattatatattatatatatttttatattatattatatatattatattatatatattttatatattatatataaattttatatataatatataaagcacattatagaatgcccttgtagaagttgatctatagaagttaatttatacaagttaacttctagcaatgttaattcgtggttaagaaagtaattccaaggctattttttctgtaaaatgaagtataaattttttgcataagtaattattttctcacatctaactctctgcatctcttagctttattaaagcagggctggcctttcactttttaaatttttgtccctttccctttatgggattaaagaggaaaaatagaaaatcacaaatatatgaaggcctcttttgggaaagggggattttcttcccatgctagtgaagcagctactcgatcagtatatttccattttgtatctttatatgtttttactattttaatggtttttccttaaaatgtttaccataaatacttccttgtagcaagataaaaattaatatctaaccaccttccacaatgttttagaactttttaactctcatatctttcttgttgaattttaattatcatatcctcccctgctcgttttaagaatattggttcattccatttttaaactctataaattatattaacaatactagtataaatttacttacaggtgggaattgaacaatgagatcacatggacacaggaaggggaatatcacactctggggactgtggtggggtcgggggaggggggagggatagcattgggagatatacctaatgctagatgacacgttagtggttgcagtgcaccagcatggcacatgtatacatatgtaactaacctgcacaatgtgcacatgtaccctaaaacttagagtataataaaaaataaataaataaataaataaaaaataaaatgtaaaagaaaaaaaaaaagaaatcttgaatgtggaatgaaaggcaacgggaaaaaaggcaaaaattcaaaatatctggaaaaacttggcatggctggaagaatggctgcaaaatggaaagaaatggtgtc

SEQ ID NO: 480172 - DNA, 893 bp, Homo sapiens
cagaatactatagaccagacagcttatatgcgacagaaatgtgtttcacacagttctagagatagcgaagtccaaggtcaagtggtctgtcctggggttactgtgtcagcagcctatgggtggagccacaacccagtgttgctggaagtgggcactgcatttgcctttggaaagaacaagatgcagaaggtggggcttggtcgtcagacagatgcagttcctagccctgcgcagaagatgtggcctgtagagctaaccacatgctggtcctggactcccagaagcacatcttcttctgacacggggtggctattgctggctggaccatgtggagcagaaaaacgagatggtccacctcccacaagcggtttggctttcctggaatggggtccccagatctatgctggttatgcctggtcctttgctgtcagtgaagagggtgacgtgtttttctgggaggccaccaacacttcccatgagtctatcatgtacctgaaagcagtgctgaacatccaggggactcacaagcccacatctcccactgcggtccaagacatgaagacgctgcatggtgtcttctcagagcaggctgccatgggttactcccgctccttggtgatggcagcattgagccccagaatccaggctttccaggcacatgactgcctcaccttacctggggaaattgagctttcggagtcaaatgacaacacatttgatgaagaggcagtgcacactgcctcttcgccctcacatccatggttcagaaacggggcttaccggtaatctgcagggttttccttttatctgtctggggaatgtgtagcacattgctggcctgtagcagacttttaaattataatacttgttgtgttgaattaaatgaatacaaa

SEQ ID NO: 480173 - DNA, 538 bp, Homo sapiens
gagccaagggagatgggcttccctggctgtgttgtgctacgcatactcctacagcaaaccctctgggctctatttcagctattatgctgctcctaccacctctctaagcagctctccctgccaactcaggtgtctgtggtggtcaaggggtctcctcctgccaggattccagaggcctatggtataaggttgacaatgggagaagcagagattctgatttattctgtagataccctaacctccaaagctcttgcaaaggctcaggaatcaccaagatcagatgcctctggaaatgaggtcgaggtgaaggttgaagcattggttgatggaggtgcacagtcagagaacaaaagccacaccctcattcttcacagcagcacgtcaatagataatgccaaaaactgactagtcatgatttattcagagatacagaggagcacaatccgttccagtacaatggaatctcctcattgtaatggctgttcaaaattaacggtttacttacaaaattttctgaacttatgccattgaattattg

SEQ ID NO: 480174 - DNA, 496 bp, Homo sapiens
agaaggaaccagcaactccagacatgctgcctttaagagctgtaacactcactgcgaaggtctgcagcttcactcctgaggccagcgagactacaaacccacaagaaggaaattactctgaacacgtccgaacatcagaaggaacaaactttagacacaccatcttaagaaaagtaacactcactgggaggttctgcggcttcgttcttaaagtcagagagaccaagaacccaccaattttggacacagtatcacaaaataccatggacggggtggattataaacaacagacattattctctcacagtgctggaggctggaagtctggtataaagctggcactcattccattcaggaggcttttcttaaaccttcagagtaagaatttcaacattgaattttaggaggacacaagcatttagacgatatcataagtccacgagttgtattaaattagggtctggcctaatgacctcagcaacttaattacctcgtg

SEQ ID NO: 480175 - DNA, 813 bp, Homo sapiens
ggtatcgtgtacttgtacaaccaatcttgtctgctgagatgcccctgagatgcccctgaagcagtgtacaccacaacactctccacacagtgtctgagcatggctcatgggcctggagtcagtgctgacccaaactcctgggaactcgcacctccaatcccagatgctatgtccagcaaaggatccatggttctggcccacagtggtggcctggacacctcctgcatgcttgtgtggctgaaggaacaaggacatgttgtcattgcctacctggccaacattggccagaaggaagacttcgagaaagacaggaagaaggcatgcaagcttggggccaaaaaggtgttcattgaggaagtcagcagggagtttgtggaggagttcatctggccggccatccagtccagcgccctgtatgaggactactacctcctgggcacctctctggctaggctctgcatcgcccacaaacaagtggaaattacccagcaggagggggccaagatgcccgagttctactactggctcaatggctgcaatgatctgatggaatacacaaagcaacatcggattcccatcccagtcactctcaagaacccgtggatcatggacgagaacctcatgtgtatcagctatgaggctggaatcctggagaaacacaagtaccataagcacctccagattgagttcaaaaaagaggtccccgtgaaggtgaccaacgtcaaggatggcgccacccaccagacctcctaggagctctgcgtgtacctgaacgaagctgcgagcaagcatggcctgggccatattgacatc

SEQ ID NO: 480176 - DNA, 5110 bp, Homo sapiens
ggccggaaaggtggagaaaattccagaggatttcatatccaggagaccaagaggataatgaattctgaagtgtaaaaaggacaaagcttatgaaggcggtcagttgtgtgcaatgtgcttcagtccaaagaagttgtacaaacatgagattcacaagctgaaggacctgacttgtctgaagccttccatagagtctcctctgagacagaacaggagcaggagtattgaggaggagcaaaaacaagaagagaatggtgacagccagctcatcctggagaaaatccaacttccccagtggagcatctctttgaatatgactgatgagcacgggaacctggtgaacttggtgtgtgacatcaagaaaccaatggatgtgtacaaaattcacttgaaccaaacagatcctccagatattgacataaatgcaatggttgccttggactttgagtatccaatgacccaggaaaactatgaaaatctatggaaattgatagcatactacagtgaagttcccatgaagctacacagagagctcatgctcagcaaacaccccagagtcagctaccagtacaggcaagatgccgatgaagaagctctttactacacaggtgtgagagcccagattcttgcagaaccagaatggatcatgcagccatccatagatatccagctgaaccgacctcagagtacggccaagaaggtgctactttcctactacaaccagtattctcaaacaatagccaccaaagatacaaggcaggctcggggcagaagctgggtaatgattgagcctagtagagctgtgcaaaaagatcagactgtcctggaagggggtcgatgccagttgagctgcaatgtgaaagcttctgagagtccatctatcttctgggtgcttccagatggctccatcctgaaagtgcctgtggatgacccagacagcaagttctccattctcagcagtggctggctgaggatcaagtccatggagccatctgactcgggcttgtaccagtgcattgctcaagtgagggatgaaatggaccgcatggtatatagggtacttgtgcagtctccctccactcagccagccgagaaagacacagtgacaattggcaagaacccaggggagccagtgatgttgccttgcaatgctttagctatacccgaagcccaccttagctggattcttccaaacagaaggataattaatgatttggctaacacatcacatgtatacatgctgccaaatggaactctttccatcccaaaggtccaagtcagtgacagtggttaccacagatgtgtggctgtcaaccagcatggggcagaccatatcacgatgagagaagacatcgtggaggatgaaggggtctcaggcacgggagatgaagagaacacttcaaggagacttctacatccaaagcaccaagaggcgttcctcaaaacaaaggatgatgccatcaatggagataagaaagccaagaaagggagaagaaagctgaaactctggaagcattcagaaaaagaaccagagaccagtgttgcagaagatctcagagtgtttgaatcaagacgaaggataaacgtggcaaacaaacagattaatccggagcactgggctgatattttagccaaagtctttgggaaaaatctccctacaggcacagaagtatccccaattattaaaaccacaagttctccattcttgagcctagtagtcacaccacctttgcctgctgtttctccccccttggcatctccaatacagacagcaacaagtgctgaagaatcctcagcagatgtacctctactcagcgaaggaaagcacattttgagtaccatttcctcagccagcatgggactagaacaccacaacaatggagttattcttgttgaacctgaagtaacaagcacacctctggaagaagttgttgatgagtattccaagaagactgaggagatgacttccactgaaggcgacctgaaggggactgcagcctctacacttatatctgagccttatgaacaatctcctactctacacaccttagacacagtctatgaagagcccacccatgaagagacggaaacagagggttggtctgcagcagatgttggatcctcaccagatcccacatccagtgagtatgagcttccattggttgttgtctccttggctgagtctaagcctgtgcaatactttgacccagatttggagactaattcacaaccacatgaggataacataaaagaatacagttttgcacaccttactccaaccgccatcatctggtttaatgactctagtacatcactgtcatttgaggattctactgtaggggaacaaggtgtcccaggcaaatcacatctacaaggaccgacagagaacatccagcttgtgaaaagtagttttagcactcaagacaccttattgattaaaaaaggtatgaaagagatgtctcagacactacagggaggaaatatgctagagggagaccctacacactccagaagttctgagaatgagggccaagagagcaaatccatcactttacctgactccacactgggtataacgagcagtacgtctccagttaagaagcctgcggaaaccacagttgtcaccctgctacacaaagacaccacaacagaaacaactccaaggcaaaaagtggcttcatcatccaccatgagcactcacccttctcgaaggagacccaatgggagaaaattacaccctcacaaattccaccaccggcacaagcaaaccccacccacaacttttgctccattagagactttttctactcaaccaactcaagcaactgacattaagatttcaaatcaaatggagagttctctggttcctacatcttgggagattaacacagttaatacccccaaacagctggaaatggagaagaatgtagagctcatatcaaagggaactccacggagaaaacacgggaagaggccaaacaaacatcgatataccccttctacagtgagttcaagagcatctgcatccaagcccagcccttctccagaaaataaacatagaaacattgttactcccagttcagaaactacacttttgcctagaaatgtttctctgaaaactgagggcgtttatgattccttagattacacgacaaccaccagaaaaatacattcatctcaccataaagtccaagacacacttccagtcatgtataaacccacatcagatggaaaagaaattcaggatgatgttgccacaaatgttgacaaacataaaagtgacattttagtccctggtgagtcaattacaaatgtcacacaaacttctcgctccttggtctccactatgggagaatttaaggaagaatcctctcctgtgggctttccaggaattccaacctggaatccctcaaggaaagctcagcctgggaggctacagacagacatacatgttaccacttctggggaaacccctacagaccctccccttgttaacgagcttgaggatgtggattttacttctgagtttttgtcctctgtgacagtctccacaccatttcaccaggaagaagctggtttttccacaattctctcaagcataaaagtggagatggcttcaagtcaggtagaaactaccacccttggtcaagatcatcatgaaaccactgtggctattctccactctgaaactagaccacagaatcacatccttactgctgcctggatgaaggagccagcatctttgtcccctcccatgattctcctgtctttgggacaaaccaccaccactaagccagaacttctcagtccaagaacatctcaaatatgtaaagattccaaggaaaatgttttcttgaattacatggggaatccagaaacagaagcaaccccagtgaaaaatgaaggaacacagcgtatgtcagggccaaatgaattatcaacaccatcttctgaccacgatgcatttaacttgtctacaaagctagaattggaaaagcaagtatttgatagtaggagtctaacacgtggcccagatagccaccaccaggatggaagagttcatgcttctcatcaactaaccagaatccctgccaaacccatcctaccaacaggaacagtgaggctgcctgaaatgtccacacaaagcacttccagatactttgtaactttccagccacctcatcacgggaccaacaaaccagaaataactacatatccttctagggctttgccagagagcaaacagtttacaactccaagagtagcaagtacaactcctctcctatcacacatgtccaaacccagcatttctagtaagtttgctgacctaagaactgaccaatccaatggctcctacaaagtgtttggaaatagcaacatccctgaggcaagaaactcagttggaaagcctctcagtccaagaatttatcattattccaatggaagactccctttctttaccaacaggactctttctttttcacagttgggagtcacccggagaccccagataccctcttctcctgtcccagtaatgagagagagaaaagttaatccaggttcctacaataggatatattcccatagcaccttccatctggactttggccttccagcacctccactgttgcacactccatggaccatggtatcacccccaactaacttacagaatatccctatggtctcatccacccagagttctgtctcctttataacatcttctgtccagtcctcaggaagcatccaccaaagcggctcaaagttctttgcaggaggaccgcctgcatccaaattctggcctcttggggaaaagccccaaatcctcaccaagtccccacagactgtgtctgtcactgctgaaacggacgctgtgttcccgtgtgaggcaataggaaaaccaaagcctttcgttacttggacaaaagtttccacatgtaagatttttaagcatctactcttttttgggtcaatttttattttattggctagcaatattacaatacactaaaagagcatgaggtacaaaacataaacacgttaggagaaatatttacaacaaatttggggaatttttttttacttgaagaagtgtttatttttataattt

SEQ ID NO: 480177 - DNA, 937 bp, Homo sapiens
agttaattaattaagttgagacagggtgttgctctgtcacccagactgcagtgcagtggtgtgcaccatgaggcacgactcttcttcttcttcttcctcttctccttcttcttcttcctcttcttcttcttttcttctttcttcttcttcttcctcttcttcttcctctccttcttctccttcttcttcttcctttcttcttcctcttcttcttcttttctttctttctttttctttcttcttctttcttcttcttcctcttctttcttcttcttttcttctttcttcttcttctccttcttcttcttcttcttcttcttcttcttcttcttcttcttcttcttcttcttctttcttctctcttcctcttcctattcttcttcttctttcttcctcttcctcctcttcctcttcctcttcttcttctttcttcaatttatgtagagatgggatctgctatgttgccaagtatgatcttgaacacttaacctcaagcagtcctcctgccctgacctaccaaagtgctgagatgacaggcttgagccaccgcgcctgaccctgtgtgtgatttttatgcaatgacattttgtatctctaaacttggatctacaacgaatgcttaacttcctcttaacaaatacttaacttcctcctctcttgtcccattcaaaaaaaaaaaaaaaggaaaaaaataaatcaagaaactgttgttttaatgattatatgtttaactataatgttagggcaaacaattcagcttgcttctatttccattgtagatttcaacaatatacatagatgtgttaggctttattttaatatggcattattggtacaatcaaagtgtacacattgttttaaaagcatcattaccacaccaacatagtgcacttgaaatgatacaaatgtacttgggctatgaagaaagccaccttct

SEQ ID NO: 480178 - DNA, 572 bp, Homo sapiens
agagtcatacttttaggctttatgcctggctttggggaaaaaggtgtcttgtttcttggatccaccttgggaaggagggattctagtttttacggtgccttggatgagaatgggactgagatactcaagatggtagtagagggtgtttatgcagactccagtagcttccaaggaggaacaggattcagcagatcaaagtttcccagcatctgtgatagtctgaagccagcaggagggaagacagggtctcactctgtcacccagactggacaatcacagctcactgaagcttcaaccttctgggctcaagtgatcctcctatctcagcctcccaaagaggatgagtgttcacaaattgtaaaaacttccatgaaacatgaacaggaaaagaataaggaaatcatttttttctgggaagagtgaagtttctgtgagtgttttgtggggttagagactgaataaatcaggaaggggacagatgtttggtgtgattagcaggtttgattgaatggaaccagctttgaagtctaattgaagacatttgacattaaaatgctaagattatgtttttc

SEQ ID NO: 480179 - DNA, 1151 bp, Homo sapiens
ttgattgatggatatttgggctggttccacatttttccaactgtgaattttgctgctataaacaatgtatgtgcaagtgtcttcattttttgtgtttttgttgtttgagatggagccttggtccatcactcaagctgaaatacagagccccttggtcttcatgtctttggtgtgtgcactcttgaacacttgccaggcacacagggtgcatgacaacaagcctaatattatcctgatcatggttgataacctgggtattggagatctgggctgctatggcaatgacaccatcagtgaggtttggatacgcacaatgtatagtgatcagatcagggtaatcagtgcatccagtgtctctaccattaacgaggatggtcaaagtaaaagcgtggctgtccggacccaagtcctagctctgtatttactacctctgaagtcttggagaaagaaggctttatatccctgagtttatatgtgtaaagaacttagaatagtacctaacacacaactatcctctattatgcagtctattatgaagcatgatgattgtatatacatgtgcatatacagatataaacatataaatattatataaatatgtgatatatttcatttatgaatatattctataatatataaaatatatatcatacatttattgtattatatatcatatattatgaatatatgaacatatattcaatatataaacatatatgagtatatattacaaatatataaatgttattcatatatacatgaatatatacatatttatatgtctatgaatatatattcatttttatataaatgtataaataaaatttatatacatttatatataaatatatttaaataaatatataaacatctatatactttagaaaagtataaataaatatatgtaaacatatttatttattttatataaatatttatataaaatgaatatatattcataacataaaattatatattataaacatatttatatattcatatttataatatataaatatgttcatataaatatattcataaatatgtataaattaataagtatatatttatatattcaagcatatatattcataaatatataaatgtgaatatgtacattcagcagaattcattctgtttcctaatttggc

SEQ ID NO: 480180 - DNA, 578 bp, Homo sapiens
aaaatttgaagcatgtgtgactgcagactacaaaagacaaagagaagatctacagatggaaacagggcaaatcccccagggcaaaagagaaacccctccttcactgacccttccagtaactgtgcagacagttacaggatgcggttcacatgtgtgttaacctcgcataacaaagccggcaagaaacatctccagggtgaggtcaagacagctgcacccctgactcagatccccaaccccgacccagttctcctgcacccccgactcagctccggcaccccaacctggttctggccctataaaaccctacagtctctcctcctagccaaacttctccttccagaatctgctagagacccgaggatttcatacagcttttccattgctagcaataacatccaacaccggggccgtgtcaggcctgagtaaaggagacttttgtcttcagtctggaacccttgtccgctctttccttcccgaaagacccagcgctgggccaagggttcccccctcccagcctctaggccctcggtatctctctttcagggacgcctgaacggggggatatccacttatcc

SEQ ID NO: 480181 - DNA, 1313 bp, Homo sapiens
tcgggggaggccggggccccatggggcgcaggcagccacgctgtcgcccccaggcctggaaatccacgcggcttcccaaagacggcgcctctgttctgcgggttcgtgacgaggatttatttccacccactgcgcctgggcgcaggtctgcgggtccgcgcccactgcgtgcggcgccacggaccatgtcggggtctcactctgtcacccaggctggagtagagtggtacaatcacagctcactgcagcctcaaactcccaggctcaagtatcctcctacctcagcctcccaagtagctgtaactacagtgactgatcaggcttttgtcacactggccacagatgacatctactgccagggcgccctggtcctggggcagtcactgaggagacacaggctgacgaggaagctggtggtgttgatcactcctcaggtgtccagcctgctcagggtctcactcgtcgcccaggcttgagtgcagtgataccatctcggctcactgcaacctctccctcactggcccaagtgatcttccctcctcagccttctaagcagctgggaccacaagtatgtgcccgcatgcttggctatttttatttttattttttgtatttttggtagagacagggtttcgtcacattgcctaggctgatcttgaactcctggactcactcagtccacccaggttggcctcccaaagtgctgggattacaggcatgagccacggcgccctgccaaggagtctttttaaaaataatttccttttacaattccctttgtctttaattctcaaataaagcaaatacataaataaatgcatctaatgaataaagcataaggcttctcttaaatgtcatacattatgtaagcaataatctttttctttcatcaaccatggaccacttagaaaaagtgattttatatgaatgggacgaggaggcatttaatatgtagatgtagcaggaattgaatgtcatattctttgacaacgaaataataaatccagacattaatagctaaactaaaaagagaacaaataaaaaaccaaccagtgtgtcctcagacattttaaactagaagtgctctcctaaataacttgatctgggtataaatgaaagcttgaattacgtactatttcagaaaatgattccaatctgttgcaaaacctggcatcgtatcaattggagacttgttgctgtggtttaaatgcctttttcttggtattattggtgcagtcccttttcagcaactctcaggactgtttattttgcaaggctttgcaatatgtcaaggttcagaggaaagtgggggt

SEQ ID NO: 480182 - DNA, 655 bp, Homo sapiens
ttaagaaccatttttggagaatcagtgtgtttgtaggaaagcagcctcaagggcatgcagtcaagtaagaatcttttgatctatatttgctgtaagagaagtttattagacacatttctggacatattatctacaaaagcagctgtttgtgctgatttaggaatagatgccacagtaacactagcagttgccagaatgactgtggctgagactaaaaaggccctaagtccgcagccagtggctgctgccggctgggcagaccttcccacgtacacctcctgcccctccctaggagaccagttccagcccactgagcctagctgtccgatgccaccactgccacgaaggctgagttcccaggagtatttgctggctccaggtccgcttccacactgtcttctgctcttcgcaataaatcttgctgctgctcactttttggctacactctacttttatgagctgatgatattttttaatacttatagcttattctagactaatttggcactttctgctttcaggggtgcagactgagaaaatttttatgtaatagctttctcagatgctggttgtagtagaagtgtactgagtgtgagagcaagttcactgttacctataagtttgaaatgacagaggtctctttaagctcaccttg

SEQ ID NO: 480183 - DNA, 1373 bp, Homo sapiens
catgtacagaacgggcagatgtgtccagagtttcttccatctggcaggttcatggccttgcttacttcaagaatgaagctgcagacctttactgttcatggtcttgctcacttcaagaaagaagctgaagacctttacgatgtgttcagagtttcttccttctggcaggttcatggtcttgctcacttcaagaatgaagctgcagacctttacgatgtgtccggactttcttccttctggcaggttcatggtctttctcacttcaagaatgaagctgcagaccttagtgatgtgtccggagtttcttccgtctggcaggttcatggtcttgctcacttcaagaatgaagctgcagaccttagtaatgtgtccagatattcttccttctggcaggttcatggtcttgctcacttcaagaatgaagctgcagaccttagtgatgtgtccagagtttcctccttctggcaggttcatggtcttgctgacttcaagaataaagctgcagacctgtacgatgtgtccagagtcaattccttctggcaggctcatggtcctgctcacttgaagaatgaagctgcagacctcactgatgtgaccggagtttctttcttctggcaggttcatggtcttgctcacctcaagaatgaagctgcagaccttagtgatgtgtccggagtttcttccgtctggcaggttcatggtcttgctcacttcaagaacgaagctgcagaccttagtgatgtgtccagatattcttccttctggcaggttcatggtcttactcacttcaagaatgaagctgcagaccttagtgatgtgtccagagtttcctccttctggcaggttcatggtcttgctgacttcaagaataaagctgcagacctgtacgatgtgtccggagtttcttccgtctggcagattcatggtcttgctcacttcaagaatgaagctgcagaccttagtgatgtgtccagatattcttccttctggcaggttcatggtcttgctcacttcaagaatgaagccgcagaccttagtggtgagtctcacagcactgaaaaggtgttatgtccagagtttgttcattcagatgtgtccggagtttcttccttctggcaggtttatggtcttgttctcttcaagaatgaagctgcagaaattagtgatgtgtccagagtttcctccttctggcaggttcatggtcttgctgacttcaagaataaagctgcagacctgtacgatgtgtccagagttaattccttctggcaggctcatggtcctgctcacttgaagaatgaagctgcagacctcactggtgagtgttaccgcacttaaagttgttatgtcctgagtttgttcatgcagatgtgacc

SEQ ID NO: 480184 - DNA, 2843 bp, Homo sapiens
tcatggtcttgctcacttcaagaaagaatgaagatgcagaccgttacggtgagtgttacagcatataaaggtgttgtggacggagtttggtccttcagatgtatccagagtttcttcttcgagcaggttcatggtcttgctcaattcaagaataaagctgcagaccttggtgatatttccagagtttcttccatctggcaggttcatggtcttggtcacttcaagaatgaaactgcagaccttagtgatgtgtccagagtttcttccttctggcaggttcatggtcttgctcacttcaagaatgaagctgcagacatttacgatgtgtccagagtttcttccttctggcaggttcatggtcttgctcacttcaagaatgaagctgcagacctaggtgatgtgtccggagtttcttccatctggcaggttcaaggtcttgctcacttcaagagtgaagctgcagaatttagtgatgtgtccagagtttccttcttctctcaggttcatggccttgttcaattcaagattgaatctccagacctttacgatatttccagagtttcttccatctcgcacgttcatggtcttggtcacttcaagaatgaagctgcagaccttagtgatgtgtccagagtttcttccttctggcaggttcatggtcttgcacacttcaagaatgaagctgcagaactttacgatgtgttcagagtttcttccttctggcaggttcatggtcttgctcacttcaagaatgaagctgcagaccttagtgatgtgtccagagtttcttccttctggcaggttcgtggtcttgctcacttcaagaatgaagctgcagaccttagttataagtccagagattcttccttctggcaggttcatggtcttgctcacttcaagaatgaaactgcagacccttacgatgtgtccagagtttcttccttctggcaggttcttggtcttgctcacttcaagaatgaagctgcagaccttagcgaggctcttgattcagatgtgttcggagtttcttccgtctggcaggttcatggtcttgctcacttcaagaatgaagctgcagaccttagtaatgtgtccagagtttcttccttctggcaggttcatggtcttgctcacttcaagaatgaaactgcagaccttgacgatgtgtccagaatttcttccttctggcaggttcatggtcttccttacttcaagaatgaagctgcagacctttatgatgtgtccagagtttcttccttctggcaggttcatggtcttgctcacttcaagaatgaagctgcagaatttgatgatgtgtccagagtttcttccttctggcaggttcatggtcttgctcacttcaagaatcaagctgcagaccttagtgatgtgtatagagtttcttccttctggcaggttcatggtcttgctcacttccagaatgaagctgcagacctttacgatgtgtccagagtttcttccttctggcaggttcatggtcttgctcagttcaagaatgaagctgcagacctttacgatgtgtccagagtttcttccttctggctggttcatgatcttcctcacttcaacaatgaagctgcagaccttagtgatgtgtccagagtttcttccttctggcagattcatggtcttgctcacttcaagaatgaaactgcagacccttacggtgagtgttacagcactgaaacatgtcatgtccagagtttgttccttcagatatgtccagagtttcttccttctggcaggttcatggtcttgctcacttcaagaatgaagctgcacacctttatggttcatggtcttactgccttcaagaatgaagctgcagacctaggtgatgtgtccagagtttcttcattctggcaggttcatggtcttgttctcttcaagaatgaagccgcagaccttagtgatgtgtccggaatttcttctttcgggcaggttcatggtcatgctcacttcaacaatgaagctgaagaccttggtggtgagtgttacagcagttacagttgttatgttcatggtcttgctcacttcaagaatgaagctgcagaccttagtggtgagtgtcacagcactttaaggtgttatgtccagagtttgttcattcagatgtgtccagaatttcttccttctggcaggttcattgtcttgctcacttcaagaaagaagctgcagacatttagggttcatggtcttgctcacttcaagaatgaagctgcagaccttagtgatatgtccagagtttcttcattctggcaggttcatggtcttgttctcttcaagaatgaagctgcagaccttagcgagtttgttccatcagatgtgtctagagtttcttccttctggcaggttcatggtcttgctcacttcaaggatgatgctgcagaccttagtgatgtgtccagggtttctgtcttctggcaggttcatggtcttgctcacttcaagaatgaagctgcagaccttagtggaatgaagctgcagaccttagcgatatgtccagaatttcttccttcgggctggttcatggtcttcctcacttcaagaatgaagctgcagaccttggtggttcatggtctttctcacttcaagtatgaagctgcagaccttggtgatgtgtccagattttctttcttcttgcagtttcatggtcttgctcacttcaagaatgaagctccagaccatgaacctgccagaaggaagaaactacggacacatctgaatgaacaatctctggacataacacctttaagtgctgcaacactaaccactaacgtctgcagcttcattctttaagtgagcaagaccatgaacctgcc

SEQ ID NO: 480185 - DNA, 12830 bp, Homo sapiens
ttaagtgctgtaaaactcaccatgtgtccagagtttcttccttctggcaggttcatggtcttgctcaattcaggaatgaagctgcagaccttagtgatgtgtccagatttttttccttctggcatgttcatggtcttgcttacttcaagaaataaggaagatgcagaactctacgatgtgtacagagtttcttccttccggcacgttcatgatcttgctcacttcaagaatgaagctgcagaagttagttatgtgtccggagtttcttccgtctggcagattcatcgtcttgctcacttcaagaatggagctgcagaccgtagtgatgtgaccggagtttctttcttctggcagcttcatggtcttgctcacctcaagaatgaagctgcagaccttagtgatgtgtgcagagtttcttccttctggcaggttcatggtcgtgctcacttcaagaatgaagctgcagacctttacgatgtgtccagagtttcttccttctggcaggttcatggtcttgctcacttcaagaatgaagctgcagacctttacgatgtgtccagagtttcttccttctggcaggttcatggtcttgctcacttcaagaatgaagctgcagaccttagtggtgtgtccagagtttcttccttctccaggttcatggtcttgctcacttcaagaatgaagctgcagaccttagtgaagtgtccagagtttcttccttctgacaagttcatggtcttgctcacttcaagaatgaagctgcagacctttacggtgagtgttacagcattaatggtgttatgtacagagtttgttccttcagatgtttccagagtttcttccttctggcaggttcattgtcttgctcacttcaagaatgaagctgcagaccttagtgatgtgtccagagtttcttccttctggcaggttcatcgtgttgctcacttcaagaatgaagctgcagaccttagtgatgtgtccagagtttcttccttctggcaggttcatggtcttgctcacttcaagaatgacgcggcagacctttacgatgtgtccagagtttcctccttctggcaggttcatggtcttgctcacttcaagaatgaagctgcagaccttagtgataagtccagagattcttccttctggcaggtccatggtcttgctcacttcaagaatgaaactgcagacccttacgatgtgtccagagtttcttccttctggcaggttcatggtcttgctcacttcaagaatgaagctgcagaccttagtgatgtgtccagagtttcttccttctggcaggttcatggtcttgctcacttcaagaatgaagatgcagacctttacgataagtccagagtttcttccttctggcaggttcatggtcttgctcacttcaagaatgaagctgcggaccttagtgataagtccagagattcttccttccggcaggtccatggtcttgctcacttcaagaatgaaactgcagacccttacggaatgaagctgcagaccttagcggtgagcgttacagcacttaaaggttttatgtccagagttgttccatcagatgtgtctagagtttcttccttctggcaggttcatggtcttgctctcttcaaggatgaagctgcagacttcagtgatgtgtccaaagtttcttcaatctggcaggttcatcgtcatgctcacttcaagagtgaagctgcagaatttagtgcaagttcatggtcttgctcagttcaagaaagaatgaagctgcagaccttagtggttcatggtcttgctcacttcaagaatgaacctgcagaccttggtcgtgagtgttacagcacttacaggtgttatgttccgagtttgttccatcagatgtgtccagagtttcttccttttggcaggtacatggtcttgctcatttcaagaatgacgctgcagatcttagtgatgtgtgcagagtttcttccttctggcaggttcatggtattgctcacttcaagaatgaagctgcagaccttagtggttcatggtcttgctcacttcaagaatgaacctgcagaccttggtcgtgagtgttacagcacttacaggtgttatgttccgagtttgttccatcagatgtgtccagagtttcttccttttggcaggtacatggtcttgctcatttcaagaatgacgctgcagatcttagtgatgtgtctagagtttcttccttctggcaggttcatggtcttgctcaattcaggaatgaagctgcagaccttagtgatgtgtccaaagtttcttcaatctggcaggttcatggtcttgctcacttcaagaatgaagctgcagacctttagggttcatggtcttgctcacttcaagaatgaagctgcagacctttacgatgtgtccagagtttcttccttctggcaggttcatggtcttgctcacttcaagaatgaagctgcagaccttagtgatgtgtccagagtttcttccttctggcaggttcatggtcttgctcaattcaagattgaagctgcagaccttagtgatgtgtccagagtttcttccttctggcagattcatggtcctggtcacttcaagaatgaaactgcagaccattaccatgtgtccagagtttcgtccttctggcaagttcaaggtcttgctaacttcaagaatgaagctgcagacatttacgctgagtgttacaatgtgtccagaatttcttccttctggcagtttcatggtcttgctcccttcaagaatgaagctgcagacattagtgatgtggccagagtttcttccttctggcaggttcatggtcttgctcacttcaagaatgaagctgccgacctttgcgatgtgtccagagtttcttccttctggcaggttcatgttcttgctcacttcaagaatgaggctgcagacctaggtgatgtgtccagagtttcttccttctggcaggttcatggtcttgctcacttcaaaaatgaaactggagaccattacgatatttccagagtttcttccatctggcaggatcatggtcttggtcacttcaagaatgaagctgcagaccttagtgatgtggccagagtttcttccttctgggaggttcacggtcttgctcacttcaagaatgaagctgcagacctaggtgagtttcttccctctggcaggttcatggtcttgctcacttcaagaatgaagctgcagaccttggtggtgattgttacagcagttaaaggtgtttgtcctgagtttgttccatcggatgtgtatagagtttcttccttctggcaggttgatggtcttgctcacttcaagaatgaagctgcagacctttacgatgtggccagagtttcttccttctggcaggttcatggtcttgctcacttcaagaatgaagctgcagacctaggtgatgtttccagagtttcttccatctggcaggttcatggtcttgctcacttcaagaatgaagctgcagaccttagtgatgtgtccagagtttcttccttctggcaggttcatggtcttgctcacttcaaaaatgaaactgcagacgattacgatatttccagagtttcttccatctggcaggatcatggtcttggtcacttcaagaatgaagctgcagaccttagtgatgtgtccagagtttcttccttctggcaggttcatggtcttgcacacttcaagaatgaagctgcagaactttacgatgtctccggagtttcttccatctggcaggttcatggtcttgctcacttcaagagtgaagctgcagaatttagtgggtcaaggtcttgctcacttcaagaaagaatgaagatgcagacctttacggtgagtgttacagcatataaagttgttatgtacggatttagtccttcagatttgtccagagtttcttccttcgggcatgttcatggtattgctcacttcaaaaataaagctgcagacattggtgttcatggacttgttcacttcaagaacgaagctgcagaccttagtgatgtgtccagatattcttccttctggcaggttcatggtgtagctcatttcaaaaaagaattaagatgcaaacctttacggttcatggtcttgctcacttcaagaaagaatgaagctgcacacctttactgtgagtgttacagcatagaaaggtgttatatcgagagtttggtccttcagatgtgtccagagtttctatcttcgggcaggttcatggtcttgctcaatacaagaatgaagctgcagaccttggtgttgagtgttacaacacttaaaggtgttatgtcccagagtttgttccatgcagatttgcatagagtttcttccttatggcaggttcatggtcttgctcacttcaagaatgaagctgcagaccttagtgagtttctcccttttggcaagttcgtggtcttgctcacctcaagaatgaagctgcaggccttggttcatcgtcttgctcacttcaagaatgaagctgcagaccttagtgatttgtccacagtttcttccttctggcaggttcatggtcttgctctcttcaagaatgaagctgcagaccttggtgatgagtgttgcagcacttacaggcgttatgtcgcgagtttgttccatcagatgtgtccagagtttcttccttttggcaggttcatggtcttgctcacttcaagaatgaagctgcagacctcagtgatgtgtccagaatttcttccttcgggccggttcatggtcttgctcacttcaagaatgaagctgcagaccttggtggttcatggtcttcctcacttcaagaatgaagctgcagaccttagtgatgtgtccagagtttcttcattctggcaggttcatggtcttgttctcttcaagaatgaagctgcagaccttagtgtgttacagcatataacggtgttaagtccagagtttggtccttcagatgtgtccagaattttttcctacgggctggttcaaggtcttgctcacttcaagaatgaagctgcagaccttggtgatgtgtccagagtttcttccttctggcaagttcattgtcttgctcacttcaagaatgaagctgcagatcttggtgactttgttccatctattgtgtatagagtttcttccttctggcagtttcatggcattgctcacttcaagaatgaagctgcagaccttagtgatatatctagagtttcttccttctggcaggttcatggtcttgctcaattcaagaatgaaactgcagaccttccggttcatggtcttgctcacttcaagaatgaagctgcagaccttggtgatgtgtccagagattctttcttctggctggttcatggacttgctcacttccagaatgaagttccagaccttattgatgtgtccagagtttcttccttctggcaggctcatggtcttgctcacttcaagaatgaagctgcagaccttagtgatgtgtccagagtttcttccatctggcaggttcatggtcttgctcatttcaagaatgaagctgcagaccttagtgatgtgtccagagtttcctccttctggcaggttcatggtcttgctcacttcaagaatgaagctgcagaccttagtgatattcttccttctggcaggttcatggtgttgctcacttcaacaatgaatgaagctgcagacctttacgaatttcttccttctggcaggttcatggtcttgctcacttcaagaatgaagctgcagacctttagggttcatcgtcttcctcacttcaagaatgaagctgtagacctttacgatgtgtccagagtttcttccttctggcaggttcatggtcttgctcccttcaagaatgaagctgcagaccttagtgatgtgtccagattttcttctatctggcaggttcatggtcttgctcacttcaagagtgaagctgcagaattcagcgaaagaatgaagctgcagacctttaagatgtgtccaaaatttctaccttctggcaggttcatggccttgctgacttcaaagaatgatgctgcagaccttagtggtgaggttcatggcattgctgacttcaagaatctcgctgcagacctgtccgatgtgtccagaatttcttcattctggctggttcatggtcttgttctcttcaagaatgaagctgcagaccttattgatatgtccagagtttcttccttctggcaggttcatggtcttgctcaattcaagaatgaagctgccgaccttagtggtgagtgttacagcactttaaggtgttatgtccagagtttgttccttcagatgtgtccagagtttcttcctactggcacgttcatggtcttgctcacttcaagaaagaagctgcagaccttagtgatgtgtgaagagtttcttccttctggaaggttcatggtcttgctcacttcaagaatgaagctgcagaccttagtggttcatggtcttgctcacttgaagaatgaagctgcagaccttggtgttgagtgttacagcattttaaggtgttatgtgcagagtttgttccatcagatgtgtatagagtttcttccttctggcaggttcatggtcttgctcacttcaagagtgaagctgcagaatttagtgatgtgtccagaagttcttccttcgggcagggtcatggtcttactcacttcaagaatgaacctgcagaccttgatgatgtgtccagtttcttccttctggcaggttcatggtcttactcacttcaagaaggaatctgtagacctttacgatgtgtccagagtttcttcctactggcaggttcatggacttgctcacttcaagaatgaagctgcagaccttagtgatgtgtccagagtttcttccttctggcagtttcatggtcttgctcaattcaagaatgaagctgcagactttagtgatgtgtccagaatttcttcattctggcaggttcatggtcttgttctcttcaagaatgaagctgcagacattagtgatgtgtccagagtttctttcttctggcaggttcaaggtctttctcacttcaataatgaagctccagtcctttacgatgtgtccagagtttcttccttctggcaggttcatggtcttcctcacttcaagaatgaagctgcagaacttagtgatgtgtccagagtttcttccttctggcaggttcatggtcttgctcactttaagaatgaagctgcagaccttagtgatgtgtccagagtttcttccctctggcaggttcatggtcttgctcacttcaagaatgaagatgcagacctttacggttcatggtttgctcacttcaagaatgaagctgcagaccttagtgataagtccagagtttcttccttctggcaggttcatggtcttgctcacttcaagaatgaagctgcggaccttagtgatgtgtccagagtttcctccttctggcaggttcatggtcttgctcacttcaagaatgaagctgcagaccttagtgatgtgtccagagtttcttccttctggcaggttcatggtcttgctcacttcaagaatgaagctgcagaccttagtgatgtgtccagagtttcttccttctggcaggttcatggtcttgctcacttcaagaatgaagatgcagacctttacgatgtgtccagagtttcttccttctccaggttcatggtcttgctcacttcacgaatgaagctgcagaccttagtggtgagcgttacagcagttaagtttttatgtccagagtttgttccttcagataagtccagagtttcttccttctggcgggttcatggtcttgctcacttcaagaatgaagctgcggaccttagtgataagtccagagattcttccttctggcaggttcatggtcttgctcacttcaagaatgaagctgcagacctttacgatgtgtccagagtttcttccctctggctggttcttggtcttgctcacttcaagaatgaagctgcagacctttacgatgtgtccagagtttcttccttctggcaggttcatggtcttgctcacttcaagaatgaagctgcagaccttagtgatgtgtccagagtttcttccttctggcaggttcatggtctagctcaattcaagaatgaaactgcagacctttacgatgtgtccagagtttcttccttctccaggttcatggtcttgctcacttcaagaatgaagctgcagaccttagtgataagtccagagtttcttccttgtggcaggttcatggtcttgctcacttcaagaatgaagctgcagaccttagtgatgtgtccagagtttcttccttctggcatgttcatggtcttggtcacttcaagaaagaatgaagctgcagaacattacgatatgtccagagtttcttccttctggcaggttcatggtcttgcgcacttcaagaatgaagctgcagacctaggtgctgcagacctttacgctgagtgtcacagcaatttaaggtgttatgtccagagtttgttcattcagatgtgtccagaatttcttccttctggcaggttcatggtcttgctcacttcaagaatgaagctgcagaccttggtgttgagtgttacagcagttaaaggtgtttgtcctgagtttgttccatcagatgtgtccaaagtttcttccttctggcaggttgatggtcttgcttacttcaagaatgaagctgcagacctttacgatgtgtccagagtttcttccttcaggcaggttcatggtcttgctcatttcaagaatgaagctgcagacctaggtgatgtgtccagagtttcttccaactggcaggttcatggtcttgctcacttcaagaatgatgttgcagacctttacggtcgtggtcttgctcacttccttaatgaagctgcagacctttacatgtgtccagagtttcttccttctgacaggtttgtcgtcttgctcacttcaagaatgaagctgcacaccttagtggtgagcgttacagcacttaagtttttaagtccagagtttgttccttcagatgtgtccagggtttcttccttctggcaggttcatggtcttgctgacctcaagaatgaagctgcagacctttacgatgtgtccagagtttcttcattctggcagtttcatggtcttgctcacttcaagaatgaagctgcagaacgtagtgatgtgtccagagtttcttccttctcgccggttcatgctcttgctcacttcaagaatgaagctgcagaccttagtgatgtgtccagagtttcttccttctggcaggttcatggtcttgctcacttccagaatgaagctgcagacctttacgatgtgtgcagagtttcttccttctggcaggttcatggtcttgctcacttcaagaatgaagctgcagaccttagtgatgtgtccagggtttctgtcttctggcaggttcatggtcttgctcacttcaagaatgaagctgcagaccttagtgatgtgtccagagtttcttccttctggcaggttcatggtcttgctcacttcaagaatgaagctgcagaccttagtgatattcttccttctggcaggttcatggtgttcctcacttcaacaatgaatgaaactgcagacctttacgatgtgtccagagtttctttcttctggcaggttcatggatttgctcacttcaagaatgaagctccagagctttatgatgtgtccagagtttcttccttctggcaggttcatggtcttgctcaattcaggaatgaagctgcagaccttagtgatgtgtccaaagtttcttcaatctggcaggttcatggtcttgctcacttcaagaatgaaactgcagaccttagtgatgtgtccagagtttcttccttctggcaggttcatggtcttgctcacttcaagaatgaagctgcagacctttacgatatgtacagagtttcttccttctggcaggttcattgtctttctcacttcaagaatgaagctgcagacctttacggtgagtgttacagccctgaaaggtgttatgtccagagtttgttccttcagatgtgtccagagtttattcggtctggcaggttcattgtcttgctcacttcaagaatgaagctgcagaacttaacgatgtgtccagagtttcttccttcgggctggttcatggtcttgctcacttcaagaatgaagctgcagaccttggtggttcatggtcttgctcacttcaagaatgaagctgcagaccttagtgatatgtccagagtttcttcattctggcaggttcatggtcttgttctcttcaagaatgaagctgcagaccttagcgatgtgtccagagtttcttccttctggcaggttcatggtcttgctcacttcaagaatgaagctgcagaccttagtgatgtgtccagagtttcttccttctggcaggttcatggtcttgctgaccacaagaatgaatctgcagacctttacggtgtgtccagaatttctaccttctggcaggtttatggtcttgctcacttcaagaatgaagctgcagaccatcacgagattgttccttcatatgtgtccagactttcttccttctggcagtttcacggtcttgcttacttcaagaatgaaactgcagaccattacggtgagcgttacagcactgaaagatgttatgtccagagtttgttccttcagatgtgtccagagtttcttcctactggcaggttcatggtcttgctcacttcaagaatgaagctgcagatattagtgatgggtccagagtttcttccttctagcaggttcatggtctttctaccttcaagagtgaagctgcagacctttaagatgtgtccagagtttcttccttctggcaagttcaaggtcttgctaacttcaagaatgaagctgcagacctttacggtgagtgttacagttcatggtcctgctcacttcaacaatgtagctgcagacctttacgatgtgtccagagtttcttccttctggcaggttcatggtcttgctcacttcaagaatgaagctgcagaccttagtgatgtgtctagagtttcttccttcaggcaggttcatggtcttgctcacttcaagaatgaagctgcagacctaggtgatgtgtccggagtttcttccatctggcaggttcatggtcttgctcacttcaagagtgaagctgcagaatttagtgatgtgtatagagtttcttgcgactggcaggttcatggtcttgctcacttcaagaatgaagctgcagacctaggtgatgtggccagagtttcttccttctgtcaggttcatggtcttactcccttcaagaatgaagctgcagacctaggtgatgtgtccaaagtttcttcaatctggcaggttcatggtctttctcacttcaagagtgaagctgcagaatttagtgatgtgtccagagtttctttcttctggcagtttcatggtcttgctcacttcaagaatgaagctccagacctttacgatgtgtccacagtttattccttctggcaggttcatggtcttgctcacttcaagaatgaaactgcagacctttacggaatgaagctgcagaccttagcgatgtgtccagatattcttccttctagcaagttcatggtcttgctcagttcaagaaagaatgaagctgcagaccttagtgatgtgtctagagtttcttccttctggcaggttcatggtcttgctcacttcaaggatgctgctgcagaccttagtgatgtgtccaaaatttcttcaatctggcgggttcatggtcttgctcacttcaagagtgaagctgcagaatttactggtgagtgttacagcactaaaaggtgtcatgtccagagttttttacttcagttgtgtccagatattcttccttctggcaggttcatggtcttgctcacttcaagaaagaatgaagctgcagacctttacgatgtgtccaaattttcttcaatctggcaggttcatggtcttgctcacttcaagagtgaagctgcagaatttagtgatgtgtccagagtttcttccttctggcaggttcatggtattgctcatttcaagaatgaagctgcagaccttagtgatgtgtccagagtttcttccttctggcaggttcttggtcttgctcacttcaagaatgaagctgcagacctttacgatgtgtccagagtgtcttctttctggcaggttcatggtcttgctcacttcaagaatgaagctgcagaccgtagtgatgtgtccagagtttcttccttctggcaggttcatggtcttgctcacctcaagaatgacgcggcagacctttacgtttcttccttctggcaggttcatggtcttgcccccttcaagaatgaatctgtagacctttacggtgagtgttacagcaatgaaagatgttatgtccagagtttgttccttcagatgtgtccagtgtttcttccttctggcaggttcatggtcttgctcacttcaagaatgaagctgcagacctttacgttacggcacttaaaggtgttatgtccagagtttgttcctacagatgtatccagagtttcttccttctggcaggttcttggtcttgctcacctcaagaatgaagctgcagacctttacgatgtgtccagagtttcttccttctggcaagttcattgtcttgctcacttcaagaatgaagctgcagatcttggtgatgtgtccaaagtttcttcaatctggcaggttcatggtcttgctcacttcaagaatgaagctgcagaccttagtgatgtgtctagagtttcttccttctggcatgttcatggtcctgctcacgtcaagtaagaatgaagctgcagaccttattg

SEQ ID NO: 480186 - DNA, 2942 bp, Homo sapiens
ttaagtccagagtttggtccttcagatgtgtccagaatttcttccttcgggccggttcatggtcttgctcacttcaagaatgaagctgcagaccttggtggttcatggtcttgttctcttcaagaatgaagctgcagaccttagtgatgtgtccagaattttttcctacgggctggttcaaggtcttgctcacttcaagaatgaagctgcagaccttggtgatgtgtccagagtttcttccttctggcaagttcattgtcttgctcacttcaagaatgaagctgcagatcttggtgatgtgtccagagtttcttccttctggcaggttcatggtcttgctcaattcaagaatgaagctgcagaccttagtgatgtgtccagaatttcttctttcgggcaggttcatggtcttgctcacttcaagaatgaagctgcagaccttggtgatgtgtccagaatttcttcattctggctggttcatggtcttgttctcttcaagaatgaagctgcagaccttattgatgtgtccaaagtttcttcaatctggcaggttcatggtcttgcacacttcaagagtgaaggtgcagaatttagtgatgtgtccagagtttcttccttcttgcatgttcgtggtcttgctcacttccttaatgaagctgcagaccttaccgatgtgtccagagtgtcttccttctggcaggttcgtggtcttgctcacttcactaatgaagctgcagaccttactgatgtgtccagcgtttcttccttctggcaggttcatggtcttcctcacttcaagaatgaagctgcagaccttactggtccagagtttgtttcttcagatgtgtccagggtttctgtcttctggcagtttcgtggtcttcctcacttcaagaatgaagctgcagaccttactgatgtgtccagagtgtcttccttctggcaggttcatggtcttgctcacttcactaatgaagctgcagaccttactgatgtgtccagcgtttcttccttctggcaggttcatggtcttcctcacttcaagaatgaagctgcagaccttactgatgtgtccagggtttctgtcttctggcagtttcgtggtcttcctcacttcaagaatgaagctgcagaccttactgatgtgtccagagtgtcttccttctggcaggttcatggtcttactcacttcaagaatgaagctgcagaccttactgatgtgtccagagtttcttccttctggcaggttcgtggtcttgctcacttccttaatgaagctgcagaccttactgatgtgtccagtgtttcttccttctggcaggttcatggtgttgctcacttcaagaatgaagctgcagaccttactgatgtgtccagagtttcttccttcttgcaggttcgtggtcttgctcacttccttaatgaagctgtagaccttaatgatgtgtccagagtttcttccttcttgcaggttcgtggtctggctcacttccttaatgaagctgcagaccttaccgatgtgtccagggtttctgtcttctggcaggttcatggtcttgctcacttcactaatgaagctgcagaccttactgatgtgtccagagttttttccttctggcaggttcgtggtcttgctcacttccttaatgaagctgcagaccttactgatgtgtccagagtttcttcattcttgcaggttcgtggtcttgctcacttccttaatgaagctgcagaccttaatgatgtgtccagagtttcttccttcttgcaggttcgtggtctggctcacttccttaatgaagctgcagaccttaatgatgtgtccagagtttcttccttcttgcaggttcgtggtcttgctcacttccttaatgaagctgcagaccttactgatgtgtccagagttacttccttctggcaggttcatggtgttgctcacttcaagaatcaagctgcagaccttactgatgtgtccagagtgtcttccttctggcaggttcatggtcttgctcacttcactaatgaagctgcagaccttacagatgtgtccagagtttcttccttctggcagtttcgtggtcttcctcacttcaagaatgaagctgcagaccttactgatgtgtccagagttgcttccttctggcaggttcgtggtcttgctcacttccttaatgaagctgcagaccttactgatgtttccagagtttcttccttcttgcaggttcgtggtcttgctcacttccttaatgaagctgcagaccttaatgatgtttccagagtttcttccttctggcaggttcgtggtcttgctcacatctttaatgaagctgcagaccttactgatgtgtccagagtttcttccttctggcagtttcgtggtcttcctcacttcaagaacgaagctgcagaccttactgatgtgtccagagtttcttccttctggcatgttcatggtcttgctcacttcaagaatgaagctgcagaccttactgatgtgtccagagtttcttccttctggcagtttcgtggtcttcctcacttcaagaatgaagctgcagaccttagtgatgtttccagagtttcttccttcttgcaggttcgtggtcttgctcacttccttaatgaagctgcagaccttaatgatgtgtccagtgtttcttccttctggcaggttcatggtcttgctcacttcaagaatgaagctgcagaccttactgatgtgtccagagtttcttccttctggcagtttcgtggtcttcctcacttcaagaacgaagctgcagaccttactgatgtgtccagcgtttcttcctactggcaggttcatggtcttgctcacttcaagaatgaagctgcagaccttactattcagtgttaaagcacttaaaggtgttatatccagagttagatccttcagatgtgtccagagtttcttccttctc

SEQ ID NO: 480187 - DNA, 12834 bp, Homo sapiens
gaagctgcagacctttacggttcattgtcttgctcacttcaagaatgaagctgcagaccttgctggtgagtgttacagcagttaaagtgttatgtccattgtttcttccatcagatgtgtatagagtttcttccttctggcaggttcatggtcttgctcacttccagaatgaagctgcagacctttacgatgtgtccagagtttcttccttctggcaggttcatggtcttgctcagttcaagaatgaagctgcagacctttacgatgtgtccagagtttcttccttctggcaggttcatggtcttgctcacttcaagaatgaagctgcagaacttagtgatgtgtccagagtttcttccttctggcaggttcgtggtcttgctcacttcaagaatgacgcggcagacctttacgatgtgtccagagtttcctccttctggcaggttcatggtcttgctcacttcaagaatgaagctgcagaccttagtgatgtgtccagagtttcttccttctggcaggttcatggtcttgctcacttcaagagtgaagctgcagaccttagtgatgtgtccagagtttcttccttctggcaggttcatggtcttgctcacttcaagaatgaagatgcagacctttacgatgtgtccagagtttcttccttctccaggttcatggtcttgctcacttcaagaatgaagctgcagaccttggtggttcatggtcttgctcacttcaagaatgaagctgcagaccttagtgataagtccagagtttcttccttctggcaggttcatggtcttgctcacttcaagaatgaagctgcagaccttagtgataagtccagactttcttccttctggcaggttcatggtcttgctcacttcaagaatgaagctgcagacctttacgatgtgtacagagtttcttccctctggctggttcttggtcttgctcacttcaagaatgaagctgcagacctttacgatgtgtccagagtttcttccttctggcaggttcatggtgttgctcacttcaagaatgaagctgcagaccttagtgataagtccagagtttcttccttgtggcaggttcatggtcttgctcacttcaagaatgaagctgcagaccttagtgatgtgtccagagtttcttccttctggcaggctcatggtcttgctcacttcaagaaagaagctgcagaacttagtgatgtgtccagagtttcttccttctggcaggttcatggtcttgctcacttcaagaatgaagctgcagaccttagtgatgtgtccagagtttcttccttctggcaggttcatggtcttgctcacttcaagaatgaagatgcagacctttacgatgtgtccagagtttcttccttctccaggttcatggtcttgctcacttcaagaatgaagctgcagaccttagtggtgagcgttacagcagttaagtttttatgtccagagtttgttccttcagataagtccagagtttcttccttctggcaggttcatggtcttgctcacttcaagaatgaagctgcggaccttagtgataagtccagactttcttccttctggcaggttcacggtcttgctcacttcaagaatgaagctgcagacctttacgataagtccagactttcttccttctggcaggttcatggtcttgctcacttcaagaatgaagctgcagacctttacgatgtgtacagactttcttccctctggctggttcttggtcttgctcacttcaagaatgaagctgcagacctttacgatgtgtccagagtttcttccttctggcaggttcatggtcttgctcacttcaagaatgaagctgcagaacttagtgataagtccagagattcttccttctggcaggttcatggtcttgctcacttcaagaatgaaactgcagacccttacgatgtgtccagagtttcttccttctggcaggttcatggtattgctcatttcaagaatgaagctgcagaccttagtgatgtgtccagagtttcttccttctggcaggttcttggtcttgctcacttcaagaatgaagctgcagacctttacgatgtgtccagagtgtcttctttctggcaggttcatggtcttgctcacttcaagaatgaagctgcagaccgtagtgatgtgtccagagtttcttccttctggcaggttcatggtcttgctcacctcaagaatgacgcggcagacctttacgtttcttccttctggcaggttcatggtcttgcccccttcaagaatgaatctgtagacctttacggtgagtgttacagcaatgaaagatgttatgtccagagtttgttccttcagatgtgtccagtgtttcttccttctggcaggttcatggtcttgctcacttcaagaatgaagctgcagacctttacgttacggcacttaaaggtgttatgtccagagtttgttcctacagatgtatccagagtttcttccttctggcaggttcttggtcttgctcacctcaagaatgaagctgcagacctttacgatatatctagagtttcttccttctggcaggttcatggtcttgctcaattcaagaatgaaactgcagacccttccgatgtgtgcagagtttcttccttctggcaggttcttggtcttgctcacttcaagaatgaagctacagacctttacggtcgtggtcttgctcacttccttaatgaagctgcagacctttacatgtgtccagagtttcttccttctgacaggtttgtcgtcttgctcacttcaagaatgaagctgcacaccttagtggtgagcgttacagcacttaagtttttaagtccagagtttgttccttcagatgtgtccagggtttcttccttctggcaggttcatggtcttgctgacctcaagaatgaagctgcagacctttacgatgtgtccagagtttcttcattctggcagtttcatggtcttgctcacttcaagaatgaagctgcagaacgtagtgatgtgtccagagtttcttccttctcgccggttcatgctcttgctcacttcaagaatgaagctgcagaccttagtgatgtgtccagagtttcttccttctggcaggttcatggtcttgctcacttccagaatgaagctgcagacctttacgatgtgtgcagagtttcttccttctggcaggttcatggtcttgctcacttcaagaatgaagctgcagaccttagtgatatgtttagagtttcttccttctggcaggttcatggtcctgctcacttcaaaaatgaagctgcagacctttacgatgtgtgcagagtttcttccttctggcagtaccatggtattgctcacctcaagaatgaagctgcagaacttagtgatgtgtccagagtttcttccttctggcaggttcatgggcttgctcacttcaagaatgaagctgcagacctttacgatgtgtccagagtttcttccttctggcagtttcatggtcttgctcacttcaagaatgacgcagcagacctttacgatgtgtgcagagtttcttccttccggcaggttcatggtattgctcacttcaagaatgaagctgcagaccttagtgatgtgtgcagagtttcttccttccggcaggctcatggtattgctcacttcaagaatgaagctgcagaccttagtgatgtgtgcagagttttttccttccggcaggttcatggtatttctcacttcaagaatgaagctgcggaccttagtgatgtgtcaagagtttcttctttctggcaggatcatggtcttgctcacttcaagaatgaagctgcagaccttagtgatgtgtccagagtttcttccttctggcaggttcatggtcttgctcacctcaagaatgaagctgcagacctttacgatgtgtccagagtttcttccttctggctggttcatggtcttgctcacctcaagaatgaagctgcagacatttacgatgtgtccagagtttctcccttctggcaagttcatggtcttgctcacttcaagagtgaagctgcagacatttacgatgtgtccagagcttcttccctctggcaggttcttggtcttgctcacttcaagagtgaagctgcagacctttacgatatgtttagagtttcttccttctggcaggttcatggtcgtgctcacttcaaaaatgaagctgcagacctttacgatgtgtgcagagtttcttccttctggcagtaccatggtattgctcacctcaagaatgaagctgcagaacttagtgatgtgtccagcatttcttccttctggcaggttcatggtcttgctcccctcaagaatgaaaatgcagacctttacgatgtgtccagagtttcttccttctggcaggttcatggtcttgctcacctcaagaatgaagctgcagacctttacgatgtgtccaaagtttcttccttctggctggttcatggtcttgctcacctcaagaatgaagctgcagacctttacgatgtgtccagagtttcttccttctggcaagttcatggtcttgctcacttcaagaatgaagctgcagacatttacgatgtgtccagagtttcttccctctggcaggttcttggtcttgctcacttcaagaatgaagctgcagacatttacgatatgtttagagtttcttccttctggcaggttcatggtcctgctcacttcaaaaatgaagctgcagacctttacgatgtgtccagagtttcttccttctggctggttcatggtcttgctcacctcaagaatgaagctgcagacatttacgatgtttccagagtttcttccctctggcaggttcttggtcttgctcacttcaagaatgaagctgcagacctttacgatgtgtgcagagtttcttccttctggcaggttcatggtgttgctcacttcaagaatgaagctgcagaccttagtgatgtgtccagagtttcttccttctggcaggttcttggtcttgctcacttcaagaatgaagctgcagacctttacgatctgtccagagattcttccttctggcaggttcattgtcttgctcacttcaagaatgaagctgcagaccttagtgatgtgtccagagtttcttctttctggcaggttcatcgtcttgctcacttcaagaatgaagctgcagaacttagtgatgtgtccagagtttcttccttctggcaggttcatggtcttgctcacttcaagaatgaagctgcagaccttagtgatgtgtccagagtttcttccttctggcagtttcatggtcttgctcacttcaagaatgaagctgcagacctttacgatgtttgcagagtttcttccttctggcaggttcttggtcttgctcacttcaagaatgaagctgcagacctttacgatgtgtccagactttcttccttctggcagtttcgtggtcttcctcacttcaagaatgaagctgcagaccttagtgatgtgtccagagtttcttccttctggcagtttcgtggtcttcctcacttcaagaatgaagctgcagaacttactgatgtgtccagggtttctgttttctggcaggttcatggtctccctcacttcaagaatgaagctgccgaccttagtgatgtgtccagcgtttcttccttctggcaggttcatggtcttcctcacttcaagaatgaagctgcagaccttactgatgtttccagagtttcttccttctggcaggttcgtggtcttgctcacttctttaatgcagctgcagaccttactgaggtgtccagagtttcttccttctggcagtttcgtggtcttcctcacttcaagaatgaagctgcagaccttactgatgtgtccagagttttttccttctggcaggttcgtggtcttgctcacttccttaatgaagctgcagaccttactgatgtgtccagagtttcttccttcttgcagatgtgtcctgagtgtcttccttctggcaggttcatggtcttgctcacttcactaatgaagctgcagaccttactggttcgtggtcttgctcacttccttaatgaagctgcagaccttactgagtttgatccttcagatatttccagagtttcttccttctggcaggttcgtgttcttgctcacttctttaatgaagctgcagaccttactgatgtgtccagagtttcttccttctggcagtttcgtggtcttcctcacttcaagaatgaagctgcagaccttagtgttgagtgttacagcacagtttcttccttctggcaggttcgtggtcttgctcacttctttaatgaagctgcagaccttactgatgtgtccagggtttctgtcttctggcaggttcatggtcttcctcacttcaagaatgaagctgccgaccttagtgatgtttccagagtttcttccttctggcaggttcgtggtcttgctcacatctttaatgaagctgcagaccttactgatgtgtccagagtttcttccttcttgcagtttcgtggtcttcctcacttcaagaatgaagctgcagaccttactggtgagtgttacagcactttaaggtgttatgtccagagtttgttccttcagttgtgtccagagtgtcttccttctggcaggttcatggtcttgctcacttcaagaatgaagctgcagaccttactgatgtgtccagagtttcttccttcttgcaggttcgtggtcttgctcacttccttaatgaagctgcagaccttactggttcgtggtcttgctcacttccttaatgaagctgcagaccttactgatgtgtccagagtttcttccttcttgcaggttcgtggtcttgctcacttccttaatgaagctgcagaccttaatgatgtgtccagagtttcttccttctggcatgttcatggtgttgctcacttcaagaatgaagctgcagactttagtgttgagtgttacagcacttataggtgttatgtccagtgtttgttccttcagatgtgcccagagtttcttccttcttgcaggttcgtgttcttgctcacttccttaatgaagctgcagaccttactggttcgtgttcttgctcacttctttaatgaagctgcagaacttactgatgtgtccagagtttcttccttctggcagtttcgtggtcttcctcacttcaagaatgaagctgcagaccttagtgatgtttccagagtttcttccttctggcaggttcgtggtcttgctcacttctttaatgaagctgcagaccttactgatgtttccagagtttcttccttctggcaggttcgtggtcttgctcacatctttaatgaagctgcagaccttactgatgtgtccagagtttcttccttctggcagtttcgtggtcttcctcacttcaagaatgaagccgcagaccttagtgttgagtgttacagcacagtgtcttccttctggcaggttcatggtcttgctcacttcaagaatgaagctgcagaccttactgatgtgtccagaatttcttccttccggcagtttcgtggtcttcctcacttcaagaatgaagctgcagaccttagtgttgagtgtgtgtccagggtttctgtcttctggcaggttcatcgtcttgctcacttcaagaatgaagctgccgacctttgtgatgtgtccagagtttcttccttcttggaggttcgtggtcttgttcacttccttaatgaagctgcagaccttaccgatgtgtccagagtgtcttccttctggcagcttcatggtcttgctcacttcactaatgaagctgcagaccttactgatgtgtccagggtttctgtcttctggcaggttcatgttatggctcacttcaagaatgaagctgcagaccttagtgatgtgtccagaggttcttccttctggcaggttcatggtgttgctcacttcaagaatgaagctgcagaccttagtgatgattccagagtttcttccttcttgcaggttcgtggtcttgctcacttccttaatgaagctgcagaccttactgatgtgtccagagtttcttctttctggcagtttcgtggtcttcctcacttcaagaatgaagctgcagaccttactgatgtgtccagggtttctatcttctggcaggttcatggtgttgctcacttcaagaatgaatctgccgaccttagtgatatgtccagcgtttcttccttctggcaggttcatggtcttgctcatttcaagaatgaagctgcagacttttacgatgtgtccagagtttctttcttctggcaggttcatggtgttgctcacttcaagaatgaagctgcagaccttactgatgtgtccagagattcttccttctggcagtttcctggtcttcctcacttcaagaatgaagctgccgaccttagtgatgtttccagagtttcttccttctggcaggttcgtggtcttgctcacatctttaatgaagctgcagaccttactgatgtgtccagagtttcttccttcttgcagtttcgtggtcttcctcacttcaagaatgaagctgcagaccttactgatgtttgcagagtttcttccttctggcaggttcttggtcttgctcacttcaagaatgaagctgcagacctttacgatctgtccagagattcttctttctggcaggttcattgtcttgctcacttcaagaatgaagctgcagaccttagtgatgtgtccagagtttcttccttctggctggttcatggtcttgctcacttcaagaatgaagctgcagacctttacgatacgtccagagtttcttccttctggcaggttcatggtcttgctcacttcaagaatgaagctgcagacctttacgatgtgtccagagtttcttccttctggcaggttcatggtcttgctcacttcaagaatgaagctgcataccttagtgatgtgtctagagttccttccttctgggaggttcatggatttgctcatttcaagaatgaagctgcagaccttagtggtgagttttacagcaacgtaaaggtgttatgtccagagtttgttccttcagatgtgtccagagtttcttccttctggcaggttcatggtcttggtcacttcaagaatgaagctgcagaacttagtgatgtgtccagagtttcttccttctggcaggttcattgtcttgctcacttcaagaatgaagctgcggaccttagtgatgtgtccagagtttcttccttctggcaggttcatggtcttgctcacttcaagaaagaagctgcagaacttagtgatgtgtctagagttccttacttctgggaggttcatggacttgttcatttcaagaatgaagctgcagaccgtagtgataagtccagagtttcttccttctggcaggttcatggtcttgctcacttcaagaatgaagctgcggaccttagtgatgtgtccagagtttcttccttctggcaggttcatcgtcttgctcacttcaagaatgaagctgcagacctttacgatgtgtccagagtttcttccttcttgcaggttcatggtcttgttcacttcaagaatgaagctgcagacctttacgatgtgtgcagagtttcttctttctggcaggatcatggtcttgctcacttcaagaatgaagctgcagaccttagtgatgtgtccagagtttcttccttctggcaggttcatggtcttgctcacttcaagaatgaagctgcagacctttacgtttcttccttctggaaggttcatggtcttgctcacttcaagaatgaaactatagacttttacggtgagtgttacagcactgaaagattttatgtccagagtttgttccttcagatgtgtccagagtttcttccttctggcaggttcatggtcttgctcacttcaagaatgaagctgcagaccttttcgatgtgtccagagtttcttcctgctggcaggttcatggtcttgctcacttcaagaatgaagctgcagaccttagtgttgagcgttacagcagttaagtttttatgtccagagtttgttcctgcagataagtccggagttacttccttctggcaggttcatggtcttgctcacttcaagaatgaagctgcagacctttacgatgtgtccagactttcttccttctggcaggttcatggtcttgctcacttccagaatgaagctgcagacgttagtgatatgtccagagtttcttccttctggcaggttcatggtattacacacttcaagaatgaagctgcagacctttacgatgtgtccagagattcctccttctggcatgttcatggtcttgctcacttccttaatgaagctgcagaccttactgatgtgtccagagtttcttccttcttgcagtttcgtggtcttgctcacttccttaatgaagctgcaggctttactgatgtgtccagagtttcttccttctggcaggttcatggacttcctcatttcaagaatgaagctgcagaccttactgagtttgttccttcagataagtccagagtctcttccttctggcagattcatggtcttgctcacttcaagaatgaagctgcggaccttagtgaagtgtccacagtttcttccttctggcaggttcatggtcttgctcacttcaagaatgacgcagcagacctttacgatgtttccagggtttcttccttctttcaggttcatggtcttgctcacttcaagaatgaagctgcagacctttacggtccagaagttgttccttcagatgtgtccagagtttcttacttctggcaggttcatggtcttgctcacttcaaaaatgaagctgcagacctcagtgatgtgtcccgagtttcttccttctggcagattcatggtcttggtagcttcaacaatgaagctgcagacctttacgatgtgtccagagtttcttccttctggcaggttcatggtcttcctcacttcaacaatgaagctgcagaccttagtgatgtctccagagtttcttccttctggcaggttcgtggtcttgttcacttcaagaatgatgctgcagaccttagtggtgagtgttacagcactaaaaggtgttatgtccagagtttgttcctgcagaaatatccagagtttcttccttctggcaggtttatggtcttgctcactttaagaatgaagctgcagaccttactggttcatggtcttgctcacttcaagaatgaagctgcagaccttagtgatgtctccagagtttcttccttctggcaggttcgtggtcttgctcacttcaagaatgaagctgcagaccttaccgagtttgttccttcagatatgtccagagtttcttccttctggcaggttcatggtcttgctcacttcaagaatgaagctgcagacctttgcgatgtgtccagagtttcttccttctggcaggttcatggtcttcctcacttcaacaatgaagctgcagaccttagtgatgtgtccagagtttctttcttctggcaggttcatggtcttgctcacttcaagaatgacgcagcagacctttacgatgtgtccagagtttcttccatctggcaggttcatgtccttgctcacttcaagaatgaagctgcagaacttagtgatgtgtccagagtttcttccttctggcaggttcatggtcttcctcacttcaacaatgaagctgcagaccttagtgatatctccagagtttcttccttctggcaggttcgtggtcttgttcatttcaagaatggtgctgcagaccttagtgatgtgtccagagtttcttccttctggcaggttcatggtcttgctcacttcaagaatgaagctgcagaccttagtgatgtctccagagtttcttccttctggcaggttcgtggtcttgctcacttcaagaatgaagctgcagaccttaccgatgtgtccagagtttcttccttctggcaggttcgtggtcttcctcacttccttaatgaagctgcagaccatactgatatgtccagagtttcttccttctggcaggttcatggtcttgctcacttcaagaatgaacctgcagacctttgcgatgtgtccagagtttcttccttctggcaggtacatggtcttgctcacttcaagaatgaagctgcagacctttacgatgtttccagagtttcttccttctggcaggttcatgatcttgctcacttcaagaatgaagctgcagaactttgtgatgtgtccagagtttcttccttctggcaggttcgtggtctttctcacttccttaatgaagctgcagaccatactgagtttgttacttcagatatgtccagagtttcttccttctggcaggttcatggtcttgctcacttcaagaacgaagctgcagacctttgcgatgtgtccagagtttcttccttcttgcagattcatggtgttgctcacttcaagaatgaagctgcagaccttagtgatgagtgttacagcacgttaaggtgttatgtccagagttttttccttcagatgtgtccagcgtttcttccttctggcaggttcatcgtcttgctcacttcaagaatgaagctgcagaccttactgttgagtgttaaagcacttaaagctgttcgtggtcttgctcaattccttaatgaagctgcagaccttcctgatgtctccagagtttcttccttctggcaggttcgtggtcttgttcacttcaagaatgatgctgcagaccttagtgatatgtcaagagtttcttccttctggcaggttcgtggtcttgctcacttctttaatgaagctgcagaccttactggtgagtgttatagcacttaaaggtgttatgtcc

SEQ ID NO: 480188 - DNA, 1612 bp, Homo sapiens
tccttcagatgtgtccagactttcttccttctggcaggttcatcgtgttgctcacttcaacaatgaagctgcagaccttagtgttgagtgttacagcacttaaagctgttatgtccagagtttgttccttcagaagtgtccagaatgtcttccttcttgcagatgtgtccagtgttccttccttctggcaggttcatggtcttgctcacttcaagaatgaagctgcagaccttaccgatgtgtccggcgtttcttccttctggcaggttcatcgtcttgctcacttcaagaatgaagctgcagaccttacctatgtctccagagtttcttccttctggaaggttcgtggtcttgttcacttcaagaatgatgctgcagaccttagtgaaatatccagagtttcttccttctggcaggtttatggtcttgctcactttaagaatgaagctgcagaccttactgatgtgtccagagtttcttccttctggcaggttcgtggtcttcctcacttccttaatgaagctgcagaccatactgatgtttccagagtttcttccttctggcaggttcgtggtcttgctcacatctttaatgaagctgcagaccttactgatgtgtccagagtttcttccttcttgcagtttcgtggtcttcctcacttcaagaatgaagctgcagaccttactgatgtgtccagagtttcttccttcttgcaggttcgtggtcttgctcacttccttaatgaagctgcagaccttactgatgtgtccagtgtttcttccttctggcaggttcatggtcttgctcacttcaagaatgaagctgcagaccttactgatgtgtccagagtttcttccttctggcagtttcgtggtcttcctcacttcaagaacgaagctgcagaccttactgatgtgtccagaatttcttcattcttggaggttcgtggtcttgctcacttccttaatgaagctgcagaccttaccgatgtgtccagagtgtcttccttctggcagcttcatggtcttgctcacttcactaatgaagctgcagaccttactgatgtgtccagagtgtcttccttctggcagattcatggtcttgttcacttcactaatgaagctgcagaccttactgatgtttccagagtttcttcattctggcactttcgtggtcttcctcacttcaagaatgaagctgcagaccttaccgatgtgtccagagtttcttccttctggcagtttcgtggtcttcctcacttcaagaacgaagctgcagaccttactgatgtgtccagagtttctttcttctggcaggttcatggtgttgctcacttcaagaatgaagctgcagaccttactgatgtgtccagagattcttccttctggcagtttcctggtcttcctcacttcaagaatgaagctgcagactttactgatgtgtccggcgtttcttccttctggcaggttcatggtcttgctcacttcaagaatgaagctgcagaccttactattcagtgttaaagcacttagaggtgttatatccagagtttgatccttcagatgtgtccagagtttcttccttcttgcaggttcatggtgttgctcacttc

SEQ ID NO: 480189 - DNA, 616 bp, Homo sapiens
tttgaaatggtaacatttacccaatgcctgtattaccattatattttagaaaggtatcacctgtgaagactgaaaaacaacaaagatgccaacatgccccttcttccaggagttttaccccagatgggtattggtttgttacccactcaaacttggctgtagaaagtggctggggattctacttggaaggtcttaccctattgggtggaatagaatcagggacctacttaaagaagcagttttgctgctttttggtagagcagccatgctgtattagggatccctttaccccacaattacttcaaagttcaagtctggactcatctttagctagctgcacatgtcatggaataaactgccttctggtgggtaccagtattaacgggaccactctcacgttgaagttgggtaataaaccatttgcagtctgtactccccttgactgcattctgaatccctgaaactcctttggacctaaaatcctgaaaataaaatcgcttatattctattgcccataaggcttataaaacaatattaccatattggaaatgaataaacttagccttctaaaggaagtcttgatttctatattatttaacaactagatattttctct

SEQ ID NO: 480190 - DNA, 508 bp, Homo sapiens
cctgcagcacctgtcacctggaagtcatatgtggaagctgactggtccatgcatggctgaagcatgaggaaactcatcatgggcctcattttccttaaaatttggacttgtacagtaaggacttcaactgatcttcctcggactgaggacttttcccagtgtatacatcaagttactgaggccacctggaaaaaagatgagaaggacactgttcaccttcaaaaaggaaagagtaactcttcctgtactagtgctcactgtaacccattagaactactaattgccaatcccctcgatctctgttggaaaacaggagagtatgtaactctaggaatcaatggaactggactggatccccaaggaaatattttagtccaagggtacgtccacaggtgctgtcccaaaccagtgtttcagaccttttatgatgagctgaatctgccagcaccagagcttctgaaaaagacaacttatttccccagttagcagaaaatgtagctcatttctt

SEQ ID NO: 480191 - DNA, 578 bp, Homo sapiens
ccatctttttatatcccaatttggctcctttttctttgtggccatgaataggaaggagtcatgctttgtgactacttccagctgcctggggactgcaggtctcttggatcttgctggaggtccactccagactctgtttgcctgggtatcaccagtgcaggctgcagaacagcaaatattgcagaacagcaaaaattgctgcctgatcctttctccggaagcttcatcccagagaggcacccagctgtatgaggtgtcagtcagccactactgggaggtgtcttccactatgctctgccctcaggggtggattcaatggaggcagcaggccttgccatactgcagtgagctccacccacttcgagcttcctcagacactttgtttacctactcaagcctcagcaatggtggacaacccaccacctgcccagctgctgctttgcaggttgatctcagactgctgcactagcaatatgctgttgcttcatgcagagagggagaagaccgccattttttggtatgtgtgaatgtgtgtcagctatgtgatatgagcttgttgggtttgcctgatgtcagac

SEQ ID NO: 480192 - DNA, 594 bp, Homo sapiens
ctcactgattgcatgtgctcctttctcttccccatttactgttgcctctccattctttggtggattttgctgggaaagggcatctggtgtcatggttgccacctttgccatggctgctgcctctgcggctgctgcactggcttgttgctgagagagcttctctccgaacttctgctgctgcgtctgcaccacgtcaggagtcacggcgtctgtcagggacagggactctatgggtcggctgtcgaacaccaccatccaggggaagcaacccaagggacagccatcaactctcgcggtgattctcaacaggggtgtgactgtgcctccttgggggatattatgcaatgtctggagacactattggttgtcgcaactaagagaggatgtgtggtcctggcatctgtctttcagtggctgtttccttgtggctccttggaaattgaaggcaattgtctgaggtcaatagtttcaaattgttatggagtgttttacccgaaattttggttcacagctttcattggattatctattggggcacagtaaaactgacttatggaggtaacacctgattgtctcagacaggacacagaagaa

SEQ ID NO: 480193 - DNA, 808 bp, Homo sapiens
gtgttgcagcgccgaagcattggatgctggataaactaactggtgtatttgaatagactcaagtatgcattgactggagatgaggtaaagaagatatgtatgcaacacttcctcaaaattgatggcaaggttcgagtggacatcacataccctgctggattcatagatgtcatcagcattgagaaaacaggtgagcatttccgcctggtctataataccaagggctgttttgctgttcatcgtatcacagtggaagaggcaaagtacaagttgtgcaaagtgaggaagattactgtggggacaaagggaattccacacctggtgactcatgatgctcgaaccattcgctacccagatcctctcatcaaggtgaacgatactgtgcagattgatttagggactgggaagataaccagctttatcaaatttgacacaggcaatgtatgtatggtgattgctggagctaacctcggtcgtgttggtgtgatcacaaacagggaaagacatcctggttcttgcgatgtggtacatgtgaaggatgccaacggcaacagctttgccacaaggatttccaacatttttgtcattggcaatagcagggcagttcttctcagcagtggcttggttttgccacaaaatcagtcatgttggatgatctgcgtcctgctgactggtccactggtcctgggcagccagcttcagttggctgtggcgaatccagggtatgatagctgcaacttcaacagcagtgggagtagacaagattacagtgtgggtcccatcccatgtgggccgtaaggtggttggg

SEQ ID NO: 480194 - DNA, 723 bp, Homo sapiens
tgcttaaggtgtacaccggcccagcagacatcatgatgcatcaaaccatggggttactaggacccaacccagaaataaagaaaatgaccctacaggacccacagctgcgcctgtacctgctacacctctattgggctcatctcttacacccatctttctttcgccttgtcacctgggcagacacccccttcccagcctctaataatgtaactgcttggctaggagggatagatttactcccactggggttcctcattaatggcacacattggactaaggtgcggggtaacactacatatcatcccactatcctcccactgtatgtaaattgtaaaagttctaccccttactgtgtacccgcccaaacacaagtatggctacatcatggcaaaggaaatgtcttaacaggcttacttgcatatagccttaaactaggcaatgcaatcaatgccactttctcaaacattcctcactgtgctaaagaacaaaagcaagaaagtaatggattccactttagctgagaggtctgtcatggggaataagctcgtagcctccagttaggcaattgtaacatcttaaactggagcccccatagctgtttgtagggtaatcatactgatgtccttgtctgtcgtgatatcaatgacagttttgtagccacgtcccattcccctataatttggttcaaaatggggatggcatgtctccatcctcaagtaaagt

SEQ ID NO: 480195 - DNA, 1427 bp, Homo sapiens
gtattttctcacctagattgtcatcaatactaaaggagtacagttggaggagccaagatggctgaataggaacagctctggtctacagctcccagcgtgagcgacgcagaagacaggtgatttctgcatttccatctgaggtaccgggttcatatcactagggagtgccagacagtgggcacaggtcagtgggtgcgtgcaccgtgtgcgagccgaagcagggcgaggcattgcctcacttgggaagctcaaggggtcaaggagttccctttccgagtcaaagaaaagggtgacggacgcacctggaaaatcgggtcactcccacccaaatactgtgcttttcggaccggcttaaaaaatggtgaaccacgagattatatcctgtacctggctcggagggtccttcgcccacggagtctcgcagattgctagcacagcagtctgagatcaaactgcaaggtggcagcgaggctgggggaggggcggccaccattgcccaggcttgcttacataaacaaagcagccaggaagctccaactggttggagcccaccacagctcaaggaggcctacctgcctctgtaggctccagctctgggggcagggcacagacaaacaaaaagacagcagtaacctctgcagacttaaatgtccctgtctgacagatttgaagagagcagtggttctcccagcaggcagctggagatctgagaatgggcggactgcctcctcaggtgggtccctgacccctgacccccgagcagcctaactgggaggcaccccaagcaggggcacactgacacctcacacggcagggtattccaacagacctgcagctgagggtcctgtctgttagaaggaaaacgaacaaacagaagggacatccacagcaaaaacccatctgtacatcaccatcatcaaagaccaaaagtagataaaaccacaaagatggggaaaaaacagaacagaaaaactggaaactctaaaacgcagagtgcctctcctcctccaaggaactcagttcctcaccagcaatggaacaaagctggatggagaatgactttgacgagctgcaaagaagttgaaaactttgaaaaaaatttagaagaatgtataactagaataaccaatccagagaagtgcttaaaggagctgatggagctgaaaaccaatgctcgagaactacgtgaagaattcagaagcctcaggaggcaatgcgatcaactggaagaaaggaaaccctacaagccagaagagagtgggggccaatattcaacattcttaaagaaaagaattttcaacccagaatttcatatccagccaaactaagcttcatatgtgaaggagaaataaaatactttacagacaagcaaatgctgagagattttgtcccaccaggcctgccctaaaagagctcttgaaggaagc

SEQ ID NO: 480196 - DNA, 1229 bp, Homo sapiens
aagttgatgtcatatctacactgttgcactgatttgaagatgggcagcatttgcggaacaattccctcgcagctgtcaatgggaaatgggtggaagcaccagccagcagaggaaggggcgctcctgccagattgccatggagggaggtgtccgcctgaggcctcctgtcccgcggggtatgaggatgcttggggagcatctctggcgccatggcaaatgcgcctctttcaacgggatttccggacgcgctgctttggatgtcggggtgtgcctgagcgcctgctgggactgccatcatcttctccggctccagctctgtgttactcgggcaggcgctctacagagcgccgggagtctgtctcctcctgcagaggccaatggcagtggaagagtttgctggaggtacgctccagaccctatttgcctgggtatcaccagtggaggatgcagaacaacaaagactgctgtctggtcttacatctggaagcttccttccagaggggcacctgccagatgccaaccagagctttcctgtataaggggtctgtcagctcctactggaaggcgtcgtccagtctggatacacagtgggtcatggacccacttgatgaggcagtctgtcccttattagagcttggatgctatgctgggagaaccactgctctcttcaaagctgtcaggcagggccctttaagtctgctgaagctgcgccacagccaccccttcccccagatgctctgtcccagggagctgtggtgggttctgtccagtccaaacactctggcggctttgtttacactgttgatgtcagctgtggtggtaatggcaggttgtgttagccagtgcttaaatcctgggaggagcaactgggctgaacaattaataggccttggatgtactgggatcaccagaatatgccagcagacttgttctcaggctccttggttgtacatacagttgctgactgtgactgaaagaaaagaatgttcttcagggcaccggcagagtgctcacctgtcagctgtgccagctatgctgcagggctgccactgggaagtctcatcaaagtcattctctatccagctttgttccattgctggtgaggagctgcatttctttggaggaggagaggcactctgatttttagagtttcctgtttttctgctctgtttttttcccatctttgtggttttatctacctttggtctttcatgatggtgacgtacagt

SEQ ID NO: 480197 - DNA, 818 bp, Homo sapiens
cttctaaaacctaaaaaatcaagattcagagaggaactatcaaaggagcagtgaggacttggggatgagagatgatacggtcagttgtttattgagaggaatgaagaaatatacaaaaaagccttttaactgtgaaaaagttaaggaagtttctcagcacaaatgtgagaatccagatttgtttcaagggcttttaattgagaaaatcagacagaaccctcagctgcaggtctgttggagtttgctagaggtccactctagaccctgtttgcctgggtatcagcagcagtggctgcagaacagtgattcctgtagaacagcggatcttggtgaatgcaaacgctgctgcctgatcgttcctctggaagttttgtctcagaggagtacccggctgtgtgaggtgtcagtctgcccctacgtgggggtgcctccccctgcatgctgggagagccactactctcttcaaagctctctgacagggacatttaagtctgcagaggttactgctgtctgtttgtttttctgtgccctgcccccagaggtggagcctacagaggcaggcagccctccttgagctgtgactgaataatgctaaacagttcatctgcaatttccctgattatggtttctgcctgtttatgcatcttattcaatccctctagttagaggatattgattccattatttaaaattatgtatatgtattcattggtattctgcatttattgaaaacttgttctcccagcttcccttagggctttgagaacatttaagtaaagtgaaataaaatatttgcctagaaagaaccatgaattact

SEQ ID NO: 480198 - DNA, 2358 bp, Homo sapiens
tttcttgttttggtcaggatgatattggctgtggtttgtcaaagtcattctccatccagctttgttccattgctggtggggatctgcgttcctttggaggaggagagaacagtagattttggtgaacagcaaatggtgctgtcagatcattcctctggaagttttgtgtcagaggactacccagcaatgtggggtgtcagtctgcccctccggggggatgcttcccacttaggctactcagtgttcagggacccacttgaggaggcagtctgtctgttctcagatctccagctgcgtgctgggagaaccactactctcttcaaagatgtcagacagggtcatttaagtctgcagaggattctgctgccttttgtttggctgtgccctgccaccagaggtgaagcctacagaggcaggcaggcctctttgagcagtggttagttacatatgtatacatgtgccatgctggtgcgctgcagccactaactcgtcatctagcattaggtatatctctcgatgctatccctcccccctccccccaccccacaacagtccccagagtgtgatattccctttcctgtgtccatgtgatctcattgttcagttcccacctatgaatagtatctttaggataggtttttaatcatagacttatgttgtcaatgacatagatttttgtaagcctcttggtatgtattttgaaagatttaatatccatccagtttcctaacaacagtgtataagagtgttcattttgctttcaacagcattatcactagaaaagtattctgtcatttgggaaaaaacaatgttatactattttaatgcatcattttactagtaaatttgaatatttgtcagtgtttattaatattttatatttcttctttttgtaaattatccatggctttcttcttttttggggggagaaatattgacatttatttttctgatgtgagatctttttttacatttgaagactagtaccctagttcttatttcttacatatatattttctagtttgttaatattttatttttagttatacagtttttcttactttacaaaggtaactacttaataaaaaccattatccacatttaaaaatgccattactattactttagagaaaaggttatgtgtttttgagttcccctaaatgtgataccaagtctcactgaaattaatctgttcatttcattcattcacgttagtaatcataccacaatataacacttactgttcactaaattttttatatgatgtgctgtttatctgcattcctggggcttttccttagctattctatactgcctcttttcccttactatcttagacccttgcctgtcttcacaatctactagataaaaccatgttatgacttagggtatatgaaaataactactttggtcttctggactgtctcccatcaaactattggcccccaggtgcacaccctcatatttattcaggtgagggacaaatgaaatatatcaaattgttttaaaagcctcttggtatgcatttcaaaagagttaatatcaatccaatttcctaccagcattgtataagagtgttcatttttctaaccctcaatagcattattattggaaaagaactctgacatttgaagaaaagcaatgttatgtcactttaaagtgtattttttattactaataaatttgagtatttattaattgttcatatttcttcttttgtaaattatcaatagccagcctttgtgttttatgtggggagggacactggtacttatcttgcttgataaatacaatctcatttggaaaatagatcaaagggtcattctaggcaaaatcaataaggaattcaggataagttattaaatgttctttaggttgagagatggcatctgggtataatatgtgaaatgttgtcaaaaatgtataattggggagaaatgtagagttacacagccatttctttcctaaaatgtaagcttccttttatacagatatgatgatgtcttacaggagtggctgctgtaaaatatagagaaccatgcagttctctgttttacagatgaagtaacagatttttaaagttaattaactgaaagttcttaattgttggaactcctggaccaacattcaaagcaggtatggctttcttttcttctgaaattctttaaccgttctacttaattttaataaagtgtgtttatttttaaaataaattaaaattattttgtgatgttctttgagataacattttttcaggatctgtcagaatgaggtctgtgaatgatttaaactattatatttatgtgattggtgtttatcatagataaacattccatttctaaattctaacttagtctt

SEQ ID NO: 480199 - DNA, 654 bp, Homo sapiens
cttgggaaccaccaccacatttccatcgtccagatgtgggtgcctgcagcagaaactgtgagattgtggttcacatgcatgaatccagtccatcgtccagtttgtgatttgtgtacttacagccgacatacaggaggtgttgactctcatacttcaaaccaggacatgtgtgggattttaaaaatcttatcattaaaccttcctgcaggttatgtgatgctccacttctgtctgcaccctgtccacagaaagattgtgacatatggcctgaccaagcaacaaggtgttgtgattgtgttccacctgcaggaaaaaattgtaacaccaaagcaatgttactcttttgcgttgcccctgcactcagaagatattgtgatatattatggagcacagaatccaggtgatgtagctcttgctgggccttatccaaagggggcattgggacatatggttggacccaccacccaggtccaaaggccagatgatgtatctgttctcttctgccaggaccttacacactgagggcatcatgacatgaccctgaacccatcacctaggtggagtaaatctcctgccttggccctcccctcaagagatattttacatgttgccaaaccaagcacctaggtgatgtgacttttcccttctgtgtgc

SEQ ID NO: 480200 - DNA, 2427 bp, Homo sapiens
agttcctctccccataagaggtactatggtaaaaacagggttgctactaccactgcagattcagttaacagcttcagcacaggaaagcaagcatgcagcgtcggggccaagatctagccaacctttgattaaacagaatattatttctgtaacactcataaatatgttatgtctatctagttattctcataacagtgttgaagaagactactggtttttaggtgcagataattattattcagctgtgaagtctagaaattttgacccatcgggagaatgtgatccaagcgtcctggctaataaatttggaataaagatgaataaccctcatgtagttctacaaagacctaccatggaaatttcctgggtgggaacaggaaattctttctatgtgaaaaagagagtattttatgatgattattccaaaagccttggaaaaacaccaagctatgaccaacccagacacccttacataaagcatggagagagttctatgatctccagacaacaagaaacttccaaattaaggtgcattggcaagaatgcaacatattttgatccattggcttggaaggagggaattcatcagaagggaacttacacaaataaagggggaactaggtaggttctctgatgaccctaataaacatagagaggttttccaaaatttgacccaaatgtttcatgttacatggagagatgctatgctacatttaagccaaaaccctaactgttacagaaaagcaggcagtcttgcaggcagcagaaacatttggagataaacagcctatatttgtttattagtccatagaaacttttttcatattactgttcttaaagggtctcacctgaaggccagtaatacaattgggaaattagcagaaaaaaaaatcttataattactgaatttcttcttcttgtctgcttggctgtatatgtgttatattccttctttgaaacaaagtgccatataaaccaatttaataggcagatgtaacaaataattattcttgctgcactgtatgcaaataactgtcaagtatagtaaagcaaaccagtcctattataatttgtcttttaataaaaatgggaaactggagagacaaaattatgtttcaaaaatgatagcacatggattgttgaattctagtgtttcctaatgtttttctatttttattattttccactgcttaaattaaactctaatttttctggatataagtttccatattaagctgtgatttcttaaagccctacaaactgaaaagtaagtgtttcatcaagtactgcctctaacacagggccaccacaggaataaatgtcttcactgctggtgctgacaactaataactgagggtgctgagaaaactttcccccaaagtctagtgagtccatgaaatgcagggtgattaagatgatatctgatacaggagtcaattcctaaatacatcactcaagtcaaagcctagaaatctaagaaagcaacccaaacagcccaaagaaacaccctaaatatcaatgtaaaaaaatagaaaatattaagctgaaaatcataaaagataggtgactaagtgaaaactactcattttattcagcctcacacacctcaccaaatacttttggtgtgtctacctctttttttaagccaaatattaaaacattttaatggaaattatttactttgccacccttgtgggaactgccttactcactgctatttgcagtagaacaatatgctatagcatcctcagggtggaatatcagacaaaaaaatctcaattattatagcattttccctaattattatccagatagcaggaataatagttactaaaagaaagtaacacatgagttcttccaaacacatgcttctgcctctcatcaggtaacaaatgtttctatagcaacgaatagggcttagtaaaaaacactgctaaaaacttaaagaaaaggctaaaaagctaagggaatatcaaaacaaccgaatagattcttggtttggattcaaaatcataggatgagtcatcccattcctgggacctcttctaataatatacctggaactaatgttcttaccttgcctaattaacttttttcaaagatttttaactgaaaatatcatggccattttacagacaactaccccaaaatatctacaaatgacattgctcctacaaaataaaagcacaacaaggttttcttaagatttcaatgtgctttttagaaaatcttgtgaagagttataaaagcttttccttctgtcaacaatatagagaatctttcaaaggaaaatatttcttctgtagatatttttataatttttattaggtacagttctttggttttggttacgggtggcaatcatagtccatataattaacttagctgtaattagcattaactttgtttgtactaattttattttta

SEQ ID NO: 480201 - DNA, 445 bp, Homo sapiens
tctgcagcttcattcttgaagccatgatggtgccctcatggaaaacatctcctaggacagtgtggaagggaaatgcagtttcagaacccacacacagaatccctactaaggcactgcctagtgtaactgtgagaaaagggtcaccgtcctccagactccataatggtagacccactgacagcttgcagcatgcacctggaaaagccacagacactcagccacaaccagtaaaatcagacaggtgggtggccataccctgcaaagccacagaggtggagctgcccaagaccatgggaacctatctcttgcaccagtgtgacctagatttgagacctggagtcaaaagagatcattttggaacttcgaaattgtacttccctactggatttcacacttccatgggccctgtaacccctttattttcaccaatttctcccatttaaaa

SEQ ID NO: 480202 - DNA, 563 bp, Homo sapiens
tagggacttggagaacttttatgtctagctggaggattgtgtatacaccaatcagcactctatccagcagtggcaacccactagagtccacttccggcagtggaagctttgttcttttgctctttgcagtaaatcttgctgctgctcactctttgggtctgcactgcctttatgagctgttaacactcaccacgaaggtctgcagcttcactcctgaggccagcaagaccacaaacccactgggaggagtgaacaactccagatgttccactttaagagctgtaacactcactgtgaaggtctgcaacttcactcctgaagccagtgagaccatgaacccaccagaaggaagaaactccgaacaatctgaacatcagaaggaacaaactctggacacaccatctttaagaactgttaacactcactgcgaggctccgtggcttcattcctcaagtcagtgagaccaagaacccaccaatttcggacacaatgggagcagacttctttatgttctcatgatatattaattgttgctttaaatctgaaaatatgcattgtttact

SEQ ID NO: 480203 - DNA, 511 bp, Homo sapiens
gcggttcgtcacctgttctgcagccggcttcctaacaggccgcggacagggatgatgctccaccacctaaagattatggataccatgactacggtcgttctagttggagtgaacaatcctctggaggatatagtttttcctgctgacattaacaaacgttttttaaatttaatgaccgtgatggctaccaagggggctgtggtagagatcattctgaacatccaagtggaagttcttacagagatgcatatcagagttatggatacgatagctcaagttatggagcacctacaggaagtggtgggggaagccgatgtgaaaaaggagactgaagcagatattaaaggagatattaaaaataatacttaccgtggtattcagcagggtagatggaagaatgatgagaggtttgagggaggatatgtcaaaggattcaaggaaggtaaagggaagattgaaggtagtgaaaggagaaacaagaaacatgagtaataagaaggaagatatcaaa

SEQ ID NO: 480204 - DNA, 851 bp, Homo sapiens
tgtagctttgcaggagttcctcatggtttctgagctacttgttgcactgacatctaaacacggctacacatctcaaaatctcttctcattaataaccgttacgttaatcactgttgtccagaactggaatctgactgtgaaatccccaggtggaaattgctataatggctcaaactatgggaatgactatttttcagcgcctgtgctcactgacctaggtgaggacggcacttctgttttcttgcccaaatgttgcatttcccaagaccaccctggcctgccacacctccatcctgccacacctccatcctgtgatataagaaacccccagatcctagcaggcagtgacacagcagctggacgtctagagggaccattagcagaaaaagacacagcaactggacctcgagaagacaccggaggaaggagagcacagagactgaggctgcagggcatccaccgcagaagaacactgagtttcgaggagctgtgggaagagagcgctgacctgtcccattccaagggaaaactaccttcccgctccatctgccttctgggtccccatctatctgctgacaacctctacttaatgaaaccttgcacttattctccaagcccacgtgtgagccaattcttcaggtacaccaaggccataaaccccgggattcagatagccttctgtctttgcaaggcaccattatcatgaacttgttattacctttgtattttttaaatttattaaaatatttatttgtaaataatactggtgctttgtaaatttttaatatttatgtgaatattataaggtgtgtattattttgcatattttttgttaacattcttggtggggg

SEQ ID NO: 480205 - DNA, 921 bp, Homo sapiens
ttttgtttgataaacttaaagttaagcatccaggttttcaaagggaaagcttccaggttctgccattcagtatgatattggctgtggcagtgaatctctggacacattctgtatgtgatgaagccaaattttggaaccaagaagaatttccagccttattgcctttgacagagcctatagctaagacagtcccacaatggatccaggatagatttccagcaatgaacccctgggcaaaaactatggctgaaactgtcataccattgacccttgatgaaatgacaccagttgaatttccagcaatacattcctggaaacagttggaaactgatataatcacactagggacccaagctgaatcactagtgatgaattcatggatacactctcctatatctgatatggtcacaatgtgtatccaggctgaatcattattattacatccttggacacagtctgaaactgatatactcacaacatggattctggctgaaactctaggagtaattccctgggaacaggatatattccaaccatggacccacgctgaacacccaccagtatcttggactcaatcattgattccgggtaaaacaccagcaatgaatccctggagagatgtcacagctgatatggtcctaccatggaatcaggctgaatttatagtaggaaatgcctggacacagtctgaaacttatacagtcacacaggggatcctgaatggtcctccagcacgatattcttggacacaacaaatagctgatgtagacaagctgtggaccaagcctgaatttcccacaataaatccctggacaaagtctgtaggtgatactactatacaatagtatagtagtgatagtactatacaatagattcaggatgagtctccagcaataaaaccatagacacagtatgtgtctt

SEQ ID NO: 480206 - DNA, 739 bp, Homo sapiens
tgaggaaaaggattaatcagcgaaggagaactcatgccacatatggctccccatgggtgtctcacacaggggagaccaattcatctggcattcctgaaactctctttcccacaaaaagtaaatgattggacacagcccataccagctacagttataccaccaaaccaagctgaatctgtaggagtaaatccctccacaaatcttgaaacagaaattgtcatactgtggacccaggcccattctaaaatcaacaatccctgcacatacactctatttgatagagtgacaccattggctaagaatgtttgtgtagcagatctgttgccaggaataaatccattaacagtggctgaaactggtatagtcacactgcagtacatggctgtatctctagtaatgattcccaggagagaggctttatctgatacagtcataatatggacacagacaaaacctccagcaatcactttctggttacaatctctacctgatgcaggcaaactacagacccaaatgaaatatccatcagtaaacacttggaacgaggctgaatttcaagctgtaaattccatgatggagtctaagtctccagttgtaaatatctggacagatcctgaatctccagccccaagtcctctgctataggtcgagactgatatagtcataccatggacccagactcaatctttagcagtaaatgcttggtcaaagcctgttgctgatacactcatactgtata

SEQ ID NO: 480207 - DNA, 874 bp, Homo sapiens
tggagctgactaacacaagccacctacagatggataaactaaaacaacaccgtgttaatgacctccagctgcatccatgttgctgcaaaggacatgattttgttctttttatggctgtggactattccagcgttcatatgtactgcattttctttatcccatccacgatggatgggctcctacgttgatgccatgggactcattccagttaaaagaggtccatcttcaagaagtggaggtcctcctccgaaaaaatctgctccttctgctgtggcaagaagcaatagttggatgggaagccaagaaatcatcgaagttcccgagaaactagggattatgctccaccatctagaggccatgcataccgtgattatggtcattctcgtcgggatgaaagttattctagaggatacagaaatcgtcgaagttcccgagaaactagggagtatgctccaccatctagaggccatggataccgtgattatggtcattctcgtcgacatgaaagttattctagaggatatagaaaccagggattatgctccaccacatagagactatgcataccgtgattatggtcattctagttgggatgaacattcctctagaggatatagttatcatgatggctacggtgaggcccttggtagagatcattctgaacatctaagtggaagttcttatagagatgcacttcagagatacggagtctaaagtgcttttcagaattatctaaaacttagtggcttaaaaccataattataatttactaactgtcagtctctgcaatcgccctcagtctctcagccaaatgaatgtggttcaggggcgctcaggaggatgcaatctagtgatggccaaagatggggacatt

SEQ ID NO: 480208 - DNA, 604 bp, Homo sapiens
tgcctcagagcctttggaattatagtcccttgtcagtcgccatggaacactcccctcctgcctgggaagaccaggaagcttttgaatgggggtcccaacaagagcaagccttttatgagttaaaagagaaactcatgtcagctccagccctggttctgcctgatctgacaaagccatttacaccatatgtgtcagggagagaaaaaatggcagttggggttttgacccagaatgtggggtcctggctgaggccagtggcctacctctctaaaaaactagacagggtttctaaaggttggtcctcttgtttgagggtattagcagcaactgccctgaaagcacaagaagcagataaactaactcttgggcaaaacatgaacataaaggccccacatgctgtggtgactttactgaataccaaaggatatcattggctaatgaatgctagactaagcaagtacaaagctttctctgtgaaaatccccacacaatcaatgaagtttgtaacaacctgaattttgccaccttgctccctgtataagaaagccctgttgagcataactgtgtagaggtgttgaactcagcttactttagcaagcctgac

SEQ ID NO: 480209 - DNA, 774 bp, Homo sapiens
atcatctgggaactgaattcgagatcatcagccagggcccgtggctcaatctcatgcagcactacccaagggagttaggccctcagagagggaacagagaagaggccagggaagcagcccagggctgggggatgagaggcctgtgggtcctggagccaggatacatagcgaagccaaggctcaaggaggagactgaggccctgggtatggatgagtctcttccactacatgaccactggcatagtaaaagttgtgggaagaagcagctatgctatgtgcctcaggctctccacatttactccatggtgggacagctcaggcttctgttcaaggtgccaagatggctggctaggactgccataatcagaagcagcaattggtgcccaagtcttcctgagatttggaggactgagttctttttgtttatcctggctcttgccagctgctccagaagtagtcgcaaggccacgtctgttttggggaaccaagagagaaaactcaatcagcggcttttaggatagaactaatcttgactacagctggaagacatacataatgcacatgcacacatgtgcactggcacactcctattcatccacattttgcatatttgtcataagacaaatattaaatgtgtcttattcatgaaagttgtaagatattacaataagcaagccaaatgaaaactaagatttcaaagattattgccagtgttggagaaatcttgcttttgctaaagttgttggcttaatactcaagtatcttctactgttt

SEQ ID NO: 480210 - DNA, 643 bp, Homo sapiens
atttttttgtgctgttcttgtgacatggaaaaggccagaaaggctgctcaggcttcccaggctgctaatcatcctacaatgcacagcaaaagcttctcccccacaaaattatatgagtacaaaatgccaaagtccagaaactgcaaagtcccaaagaaggtgtcacagccagcccttaggtctgaaaggtcaccgttctcctcttatctttgtcttccacaatgtgatgagcaaggggcaagttttatccctgtttgtgttgcaggtcattcagccctgacattcaacagatctaaaactgttgttctgcatcaagaaagaaagagcactaattcactggggcagagtaagtccagtcctgtgctcccagttgtggccgctctaaaagagaggactatggacttcccatttgaccaaggaaagctgctggcattgccccagttgggagtggtgcctggagctgacccctcatgaagcttctgactggtttcttatggggttgccatttttatccaatttagacctgcattgatctgcccaatgcttccccttcctactttggggacatatagaagttaccttgatctttacttgatcttagttaccttgatctttactataatgatattcccttgttatatgt

SEQ ID NO: 480211 - DNA, 682 bp, Homo sapiens
gaaaaccacaaaagcaggccatgggatgactcagcactgtggacagcctcctggggtggatttttcagtcttttacaagaagacctggaacgaggagtcccagaaaatccaggggggtcataagagaatgaaagagcctgtggtggagaccagtgaaagtaaaaatgaccccagtgacatttgtcaccaatcaaatgtgttttcccctgattgttcagcaggaataatgggtcccaggctctacagccattgtgatacagaggatccaagtaattctggaggggcagcagtgaagttggaagtttccttggtggcacaagaagaaaagctgatgaaatggctgttggagggcctgcataagggtggcagagctaaaataatagtgtggcctaggaccagccaaactcaaactgcttctgagaaacagacagccctacatgcaacaagagagattcagggacaactgcacgttgtctacagccagcgtaaaatacaaaaggactcaggaacagccacagcaaaaagagatgatgcaaaagaaagacaaagactagtgacccaattacaggcctataaaatccaagatatttgacattcacctgtaaactcctctcagtgaggcgaggcccatctcaccttttctcatgtttctgtctgctttacattcgctagaagctgattc

SEQ ID NO: 480212 - DNA, 536 bp, Homo sapiens
ttcagagtaaacatttctctcctccctgttggactgactcaccgtggtgttcctcatcctggaagacaatttttcgttaaatcatgacagtatctttcagcttcagaaatagaggatttttgaggccaaatgcaaatcctaaagcaaacaccgtaggaatgggcacccctttctggtttccttcggggacacaaagaagggcatcctctgctctcaaatcccaagtgattcttcaaacccaggagtgtggagccggcattgaaccaggaagccacagcagatctttcttctctcctatgtttggaataactggctgctgctcccatcagtgtcaccaccaccatggatatgatggaagacacaatttttgctaccatattgcctgcaggagtggagaaaaagcaagctcatctgagaaaaaaatatggctgcaggaaaactgcttaaatattagattggtccaaaagttattacggtttttgccattgaaagtaatgacaaaaactgcaataacttttgcaccaatctaataacat

SEQ ID NO: 480213 - DNA, 489 bp, Homo sapiens
gttactcaaggctgggtgcagtgtccgagcgtggggtttcctgcaggtgttggtctgtccagctcgttgggaatggcaacaagtcgtgtgaacacccacttcattcatatcagcagcaccatcgcccaagtgtcccgcgatgatgtcactggtgagcatttcatgttctttctttttcttatgaacaatggtgccaccagctttccgagctttcccccatgcccacgtggttgcgctgttgctgtttgtgcatggcaagcagaatcaattttagccaactcagtgggtacgaagtggtgcttcactgtggttgtgatttacatttgccttataccacattttgctttcaatatctgctatctggtacagttgttgcatctccttcatacaccctacagttctgtaaaacttcctcaaccatccctccataagcatcagttcaaggacattgcctcagttttcccagccaaagagtcactcacctgagtt

SEQ ID NO: 480214 - DNA, 680 bp, Homo sapiens
cccgaagccagccataaaacctaaaaacaggactctaactttccctctattctatctgtacaaagactggccatgaggaaattacctgacctcttcttgtttgggcatcctaagaaccccattccagagagggtcccgcctcacacccagaaggaaggagtgctgctcagagaggccaagaagaatctagacacacaggtctggctgggtttccccactcagaccattagcattggatcaggccctttttgtccaaccctatttctacacagctgtccagacttggttgaactaaagcataaaaatggaccatctccccttgtatctggggtcttcattctgaatgctcctgtcaaatcttcaggggccatgaccccacaaaatcaatataacaaacaacaattttgcaaagcagagtgctgttgttggaataataattacacaatgtcaaggtcaatgcccactgaacattacctgcctccaggcaatggttgccacatagcacagaagagcaatcagcccacacccaaacctccacttcccattgaattatttacctcaatctaaagaagaaaatcagctcccagcaggctctgagcagaaaataaaaaggaacatacagagactgtctaaatccctgacaccaattatagctattatcagcagaatttatacactgc

SEQ ID NO: 480215 - DNA, 543 bp, Homo sapiens
ttcctatagcccaataagaaatggactgataacacataaaaatgaaaaaagtgcagttcagatggtttctgtcgccaaagtcattctccatccagctttgttccattgctggcaaggagctgtgttccattgctggcaaggagctgtgttccattgctggcaaggagctgcgttcctttggagggggagaggtagagaagcctccagaggctctctttgcccacatggaacacaatgagcaggtccgctttctgtccatcccatccttggctttggcagcactggcacactgtgatattctgctcttctctcccttcccccatggcagaggcctctacagggctgacttcagcagctacagaggctcagaagctttgggctttggttctggctgccagctgagttcctcagtcttcttccatgttccctttgcaggtgccaaatatgcaaatgacttctttccctcctgtgtctgacgcgtgggccaggaggctggacaacagctggacctgcctggtatcactgtctgtgtagcatttctgt

SEQ ID NO: 480216 - DNA, 642 bp, Homo sapiens
atacaccactacaagctggatgcttccgtcaaactgcgaaggcaggcagaggaccccggcaagcacatagaagagcttccctctgcagtctgggccaaagaggaatagtccatgccgacgtggatgaaatttggattcagagttactgaagaagtgtctggaggtgggcctcattacacgatgcttcataagctcagagaagagatggttggatggatggatgagtggatgagtggatggatgggaagaagaatccagccctgtcgaaagctgcccttttgtttcccagctgccccatccctggtgcctacgcaagagctcccactagccagagaggctgccagaactaatagcacatgtcaggtctgcattccaccaggccagctgagcaaaccacatcaggccccttcataccacacagctcaccaccacctcacagatgtatttctgcctcaggctttctcacatgtggcatttgaagcatgtccttgggaacatgtttgtcctctcggaaagtttaaatttttgtgtgttcatttctgtgctagctcttagagtctaaatcaagatgtggtgaatggtgtgaatgaccatggctgtgtgtcagagagtctcattgaccacagtgctgacacagttttc

SEQ ID NO: 480217 - DNA, 991 bp, Homo sapiens
ccagaaaaccagccctaataatatgacaaaacaaggctctttaacacccaccaaaatcacactagttcaccagcaatggatccaaaccaagaagaaatccctgatttaccttaaaaagagtttggagggtgaaagtattggagtgtaccctgtcagcaaacattatttatccactttaagagtgacttcaggatggcggtttgaggtaaaaccaggagataccagttatgatggtttgaaggaaaagtgcaaactggcagtgcctggtggaactgccattgatgaaccaagtgtgatcaggatgaggaacaggaaagaaggaaatatggggaaattgaatgaatgtcaggtggatcagagagatacagtcatgggggtcaggtgtggtatctgcaataatgtgggaagccggattgaagtccaggccaggaacaatggtaactgtgggagactcagcaaaggagagccttgggccagagtttcaggggctctgggagtggctgctgggcgtgttggacagtccagtttccagtggggtcctgcacagatgggacgtggcttaggaggaatcctgggctgcaggcattccttggcccagtggccagatttctggcacttgaagcaagatcctgggggaggagttcctgaaggaatgcctgactgctgtggcttaggtgttttgaagttcttgtgtgctggagatgtggctggggtttctctcacagtggaggcaaggaattgcaagtcagaaatatgttgctacttcgctgcccctactcttctggtacaccttggaggtgaggttaattaggtcctgttatggggtcttggagctttatttaatgtcaggagcagattgggcaataaaatgtatattgagaataagaaagccttctgacctttcagggtctagggctgtaaagcatctcagggttgctgccaaacgagtcatgaactgggctgggtttttatatttgatgaaaaaaagcct

SEQ ID NO: 480218 - DNA, 642 bp, Homo sapiens
tattgccaagtagctgaggcatgctaacaattgtaaatccaccatctttgaggaataaaaacatcaatagcttttgggattacaggtctgcagcttcattcttgaagtcagcaagaccacaaatccaccggaaggaacaaactctggtcacatcttggcaactaagaagggactatcaccaagcggctttctgggaaagggctaacaacccccgactctttggaattgacattgttggttttcctggaaccagcttccacttttcctgtacttccgagctaagccaacggtcgacagagaggaaagcccatctgcagggtcccaacaaaaatttggttgaccctgtagccatgagcagaactctcagagccacaatgcccaagaggaaaactagcgtttttgctgctgcattggtgagtgcaattattccaatcagcagggtccagaaactgttgtgggttcttgggcaagagggggatcagctgctgcatcagtgagcacaactattctgatcagcagggtccagatgcaaaacactcaggcatcaacaggctcacccttgaaatgcatcctaagccattgggaccaaaccctgaaaaagaggtggctcatttttttctgtaccacagcctggccccaata

SEQ ID NO: 480219 - DNA, 560 bp, Homo sapiens
ctgatgcgctgaggaagttagacacaaaatggtacatactggccctgcaggggctgcactggcacatgcaaagagacgcagcaaaggggaaggggcaagaagaaggtgggtgctgatggaagaggagagtggccagggtggagtcccctttaccttccaccatgagtggaagcaaactgaggcctcaccagaagcagatgctggcactgtgcttcctgtacagcctgtagaacttaagaaaaactgtgggattaagccagttgattatgataaagtaagagaaatagctcaagaaaaagatgaaaatcccactctaattcagggctgtttgtatgaggcactgcggaaatatactaatatagaccctgaccccttggaagtggtgatgaggcaacatacatcctcagcttatgaagatgacgagattaagagagtaaagacaggcataggaaattatgactattgattggggaagtgataaatgtccatgaaatcttcacaatttatgttcttctgtcatggcttcagcaggtccctctgtttggggtccctgacttccc

SEQ ID NO: 480220 - DNA, 554 bp, Homo sapiens
aaagtttcagttaagcaaacactcgatgtggggtccccagcttccttcctatttagcctcagcatcttcatccacattcagggttcttgctcttaaaatctgttcaacttgtgctggtgtaatagaaattccagtggctctctgtgggtcagcacttcctggctgcatctggtttgtgagggcagaggagcacacaattcagttattggctgtctgctgcagaggaccctcagctgcaggtctgttggagtttactggaggtccactccagaccctgtttgcctgggtatcagcagtggtggctgcagaacagcggacattggtgaaccgcaaatgctgctgcctcatcgttcctctggaagttttgtctcagaggagtacccggccgtgtggcctgcaggtcacaagggaatgccccaactgtagaggtagtctgactatgtatttgtgcccagaaatcctatgaagtatgctttctacagtgtttcactgatgaacacactctctgatttgggttgcaagtttgcaaaattttaaagtaacaaaaagtgggg

SEQ ID NO: 480221 - DNA, 552 bp, Homo sapiens
gtgttactaccatttgcaccccttgatttctgggtccgtatcatggcacaagcatctacttctgctgagggcttcaggctgcttccactcatggcagaaggagcaagtgaaggtgccaggactccctactttctccttggctccaggggcagcaaggacaaatgcagcaatagctataattatgaaagtgttatcagtggcctcttggagttgagctctcagaggaagaccaagctgcagctgcagtgttcaggagttggactctcagagaaacacaaagccatagctgtagtatttaggcaggtacaagtcacttgtgctggaggcctgaaacaggcaagacacatttggggcagcaaggacaaatgcagcaatagctataattatgaaagtgttatcagtggcctcttggagttgagctctcagaggaagaccaagctgcagctgcagtgttcagaagcagatcctggggccatgcttatacagtctgtagaaccatgaggcaaataaaactgttttctttataagttacctagcctcagtctttatttc

SEQ ID NO: 480222 - DNA, 725 bp, Homo sapiens
tataaaacccgattgtatgttccatctactgagatagggaaaaatcgccttagggctggaggtgggacatgcgggcagcaatctgcttttctctcgtcccaccttacgagaaacacccacagcatgttcctggcccctcttctaacaatatgcttgggactaatgttcttaccctacctaatttacctttttcaaagatttttaactcacaggatcatggccttttcacaaacaactacccaaaaccatctacagacagcattgcttctgcagtcaacccaagaccagaaaaccgttcatccccttgtcagcaggaagtaaccagaatgaaaacaccatctctcctccttttttcaatgataaggtctggattgacagagcaggagcactgccatcttggacaagcccctaattctaaagttcactttaataaaaaccacctaaatccaaagggcatcagcttaatggctaaggttggcatgaccataaaccacaaataacatctccaacgagaaacatttcagactcctccttgtccagagacatgttagccccaagataagccttctccatccaggaagatgccagcctcgagataaccccttctgggctgatcataatttggtaatattttctcccatgctaaaagttgtctgcatattattcatttattattgctgtgcagaaactttttcatttaatttttgttttgccagagagaaagt

SEQ ID NO: 480223 - DNA, 1526 bp, Homo sapiens
ctccagaaactgcaggcacaaatttcctttacacctgaagggaatacgacaccggaatttggaaagtctaaggcaatggtattgattctaactgtcccagaggctgaggaatggcagctctctgaactgtgtgccagaaagataccggagctggacctacacacaaggcccttatttgaggctagcaaaggaaaggaaagagagcccctcctatgggaaaaagaagaggaaaaggccttcaaggatataaaggaagctctcatccaggccccagcactagggttgccagatgttaaaaaacccttctttttgatcagacaatggtcctgcatttgtggcagaagtagtacaacagctgactcagcttttaaagaccaaatggaaactggacacagcctattgaccacagagttcagggaagatagaacagatgaactggacactcaaacagctactaaaaaagttttgccaggaaactcacttacaatgggatcaggtcttgcccatggtcctcctccaggtgtcacaccttggattcaccatagctggctgaaagcagcggcagcagtgactccgatgacaaccagtggattagccaacaagacccagatcaccccacctgaatggtcctacaatgaaatccaaccactggacagacagcactattacgagttgatggacaaggagcaggacttggagctccagtactaattgtcaaaaagaatagaaggactcaagtgtgtccaaccctgcaattccgggtccataagtcattctgtaagcattttttttcctttttttttttttattattacactttaagttttagagtacatgtgcacaacgtgcaggagtatttgtcaactatagaggcagtagtaacccgaaacactaccatgctattgacggcattaaccaaatatcagccactgccaataaaagaaacagctcagctccgggaagagatggcaaatagtggtgctttctattaacatctttgttttaaaaagcaccaaatgggggaaatggaagaggaattgaaagaaattaaagaacgtgtaagcaaaaactcagtcgtatataagaaaacccagttccccctgaggaagagaaagagctggagtcctttaaaattaactgcctgtttttctgtggctagtgagccttatctctccctttcccagaattctctttatttttaaatgttgacagtttgaatacaatgtaccatggagaatactttttgaactgtgtgcacttggggatctctttctgtatctggacatttaaattgcatgctaggctagaaaattttcccctagtctttcatcatataggttccctaaccatcctcccccgtgtgtgctgttgctggagaggtgttgtgattacttggaggagaagcagcattctggcttttggaattttcagcattgttgcactggtttttcctcatctttgtggatttatgtacctttgaccaatgaggctgatgacctttggatggggtttttgtcaggggggag

SEQ ID NO: 480224 - DNA, 666 bp, Homo sapiens
tttccttgtgggcacgttgtgaggaacgtatgtagcttcttatctttggtgggaaaaagtacaaagggcatgaatgggggccaggtcactgacaatggcttatgcttcagccctggaggcagggctatgtctttgggtagtggatgtcaatgaggatccagggatgaggagatcttgtccatattggagtggcaagttgggttacactttggacaacttgaatgacagctgtggtggcaaaaaggcacagtgttggaatgcaaggagcggagatctgaggaggaccctgtggtgttctgtggagggtactgtagccaaaagcaaccatacagcttctaaatattttgttgagaactttcttctgccagatacccattttcatcactctcaagtttggccttccacaaagactgtggacttggacatagaggtcccatttgttaatactgccacattaagtgttaaattcaacctgagttttgggagggacaaatatttaaattatagaaattctaaactactttatgttaacaaatctaggaatttagattaagcggacaaatttttgaaagttataaactaataagttcacttataagaaatggataatctaaatggtagagttaacttttttttgaaaggaaaataatactaattcaaatattt

SEQ ID NO: 480225 - DNA, 652 bp, Homo sapiens
tggctccaggaaccaagtgccacaatgccaggccagactcaggttcaggccagtctccagaggactcaggatgcagacctgatcttacagacccagcgacaaggcctgatccagcaaatcccagtgtttttagcatctttgcaatgggttcaaacatcctcctttagcttggagaagtttgttattactgatcatctgaagcctacttccatcaactcatcaaagtcattctccattcagctttgttccattgctggcgaggagctgtattcctttagaggagaagaatcagatccatcagctgcaggtctgttggagtttgctggatgtccacttcagaccctgtttgcctgcgtatcaccagcagaggctacagaacaggaaatattgcagaacagcaaatgttgctgcctgatccttcctctggaagcttcatctcaaaggggcacccagctgtatgaggtatcagtcagcccctactggaaggtgtctcccagttaggctacttgggggtcagggacccacttgaagaggcagtctgtccattcttagatctcaaactccatcccaggagaaccactactctcttcaaagctgtcagacagggatgtttaagtctgcagaagtttctgctatcttttgttcagctatg

SEQ ID NO: 480226 - DNA, 721 bp, Homo sapiens
agtgactctatgcataatacctttgaaccaatgaatatagtgaagttgtggaaaaccaaggaatatagtgaagttggctgttggcacctaaattcactggatgaagtgacgaaagaaaaggataagctcagggattatatttcctggctccaaaagcacatacctagcctcaaatattttaagattgcccttggtgagagtcttatcttctgtaaacaaagggctggaattgtggaaaatcagacacaagcacttatcatgacaaagggacaaaagatgaatttgtatgatgaagtcagagaatcacagcccttctctcaatttcaagacttaagccagtttaccaacctagaaccccttaaacgaagagacgtaagccagtttacagacccagtccccttgaggaagagcctcactacactactgacaatttatgctgttaatctttctctaatccttccccaaggagaacgctggccttttacaagggtaactgtacactgggaaaataagaataatcagactttttgagtactactggacactgagtctaagctgacattggttccagaagatgaaaaacatcactgtggccctccaggtagagtagaggcttaggtaggtcagggttgttcattttttcttattaatttgtttacatttcttaaaggtgttgaatattagacctttgtcagatgcatagtttgcaagcattttctcc

SEQ ID NO: 480227 - DNA, 518 bp, Homo sapiens
ccttggtggttcagagaggacagaaaatggagcaggccagtcacctggatcccacagaccacacaccccaacttacatggacgatcttaccccaaggatttaaggatagccctcatctgtttggtcaggcactggcccaagatctaggccacctctcaagtccaggcactctggtccttcaatatatcgatgatttgcttttggctaccatttcggaagcctcatgccagcaggctactctagatctcttgaactttctagctaatcaagggtacaatgtgtttggataccaggtgctactccttgagggaccagtgcttcaaatatgcacgtgcatggtcctcaaccctgccacttttctcccagaggatggggaaatgattatgcatgactgtgaacaaaatagtccagacgtatgctgcccaagatgatcttttagaagttcccttaactaatcctgatcttaacctatacactgaggaaagttcatttgtggagaatggggtatgaagggcagg

SEQ ID NO: 480228 - DNA, 698 bp, Homo sapiens
ttgaaaacgggccatgatgacgatggcggtttttgtgtgtggctctcctggttgtggaggcctccgagctaattctgggccaagcaataactgtctacaccccacatcaagtaatgaatgtcctaaactcaaaggcctttcactggatctcacagagccatataagcaaatttccaacactccttctacagattcagaggccacacggtacacagatggcagtagctttatgataggtggaacccaactgtcagggtatgctactattaacctaactgaaatcacagaatctggacctctgccaggaagtagcacctcagcccaaaaggctgagctcattgctcttacctgtgccttacaattaggggcaggcctgaggcttaatatttacacagactcagcctatgtctatcatgcagtgcatgcccatgcagccatttggcaggaaagaggacttttaatggcctgaaatacttccattaaatgtgttcctgaaatcatggccccgttggaggcagctatgcttcccccacaggtcactatcattcactgcaaagcccatcagagaagcaatgatgaaatctctatcgggaacacctgggctgacaaataagtaaaagtggctgccaggtcaccctttcaggctgtcttcattcctagcctaacttccctgtctccacactataaagagggggaag

SEQ ID NO: 480229 - DNA, 1652 bp, Homo sapiens
agctgcctgactcctgcaggcatttgagtttccatctctgacttaaatgatcatatgattgcagcatgcttgaaaatgggaaccgtacatgtttttcctctctgaagcacactcctaaatataattttgacatcacccaaaacgcatcagctgaaaaaaatggtatagcaatctctgcgagcagcttacagattaagaataaggctttcctgaagaaggatggagcctcctcactgaagaacatggttttgcatgtcaccccagacactcacgcacagggacccagctcatctaagcagggagacatccttgcttctcttatccatacggattggtgccttctgcttgttcttctacattctggagttacaattcccttacaggaagattttctactgaaggaatgctttgaggatgaaggaagtgagagactgatcattgagagtctgagggccatgatgctagaataggcaccctttatttattctagaaatggacattgctatgaatttcaaatcaaaacagaaacattttttaggcagttccatcctttatataactgtgaataagtaaaacactggttaatgttttctttcttctgatgaattttcttatctgttatgttggtacaaaggtacttgtgatttttgccattactttcaatggcaaaaactgcaattactgttacaccaacctaaaatatatgatgcttcaaagaaagtggcatgtgacaataatacttattcgaaggactaagagagataaaagattgccatctcctgcttttgacttagaggaggttataaggccaccttatgagagatgaaattggaaaagtgtgacataggtcgtaggtgacatctggttccttatgatagtttttgttgtacttaatgcatggtctaaacacttaaggcagaataaaatgcatcatagaagctaagaaaaaagttgtgatacctctaaatacgaaagaatccttccagaaagagtgggacatgaggatggggtgctatgcagtgggtgatatgagggagatggccttgaaaccagaccttgaaagaggaatacatatggcctgaaattacactaaaaattaaacgaatgtttatgctacatgcttttatttgaataactaatttgaaaatattagtcaataataaattaagtaattaattattaattattaattataaggttaggtttagaaatttaattggtagaatgaccattccacaaattgagctttatttcaagtacctactacaattctcacattttagagcacttaatctgtgcaaagcaaaataccttaaccagaaagaatgtaataaactgttgaaccaataagtaagaaagatgttttttgtattttgtgaaattttataagaagaaataaatgctctgagaaataaatgagctgaagagttagagagtaatttgcatggtgtctactttaaataagttaccaaaaaatgagaagatactcagagacatccatggtgatactgaggatatgtttatttcagaaacatgtgaagattagtgggatttatgctttggactaaaaatggataagaaataaacaaaccattagacaaaatatatgaaacaattgctttcagatgttacacaatgatcaagacagaaac

SEQ ID NO: 480230 - DNA, 896 bp, Homo sapiens
atacgacagtcattttctcagatggtaaagaccagtcacaggtttcaggtacggagatgaagagtttggtattgagcttggaggaggaggaaaagaagaagaagaagaagaagaagaagaagaagaagaagaagaagaagaagaagaggaggaagaagaagaacaataacaacaacaacaacaacaacaagggaggaggaggaggaagaaagaagaagaatgaggaggaggagggggaggggagagggaggaggggggagaaggaggagaagaaagaggaggaagagaaagaagaggatgaggaggaggaagaagaaggagaaggaggagaaaagaagaggaagaagaaggagaagaagaaagaggaggaggagaagaagaaggaggatgaggaggagaaggaggaggaggagaaagaggaggatgaggatgacaaggaagaagaggaagaagaagaacaagtaggaggaggagaaaggaggaagaggaagaaagagggaggaggagaaaggaggaggaggcaaacaggaggaagggaaagaaggagaagaaaaaagaagaagaagaagaagaagaagaagaaggaggaggaggaggaggaagaggaggaggagaagaagaaggagaagaagaagaagaaaaagaagaagaagaagaagaaaaagaagaagaagaagaagaagaagaagaagaagaagcagaagaaggaaggaggaggaggagaagaagatgaagaagatgaagaagaagaagaagggaagaaggaggaggaggagaaggagaagaagaagaggaataagaagaaaagaagaagaagaagaggaggaagagaagaagaagaaaaaagcatggatggagctcgttattaggattcagctggagagtgtcagaagcct

SEQ ID NO: 480231 - DNA, 617 bp, Homo sapiens
cctgtcaaaatggaccaatcacctctctgtaaaacagaccaatcggctctctgtaaaatggaccaatcagcatgatgtgggtggggccagataagagaataaaagcaggctgcctgagccagcagtggcaacctgctcttgtccctttccacactgtggaagctttgttctttcactgtttgcaatcaatcttgctgctgctcactatttgggtctacactgcctttatgagctataacactcaccgcaaaggtctgcaggggaaattcaatctagctgcagaaattttcataactaccaaggatactaatgttaattccaaagaccatggggaaattgttgccaggtcatgtcagacaccttcacaacagccccttccatcacaagccaagaggcccatgaggaaaaagtggctgtgtgggccaggcctagggtccccatactgcatgcagtctagggaattggtgccctgtatcccagccactccaggtgtggctgaaagagaccaacatagcactcaagctgtggcttcagagggtgaaagccccaagccttgacagtttccatgtggtgttgagcctgtgagtgtacagaagtcaagaattaaggtttgagaa

SEQ ID NO: 480232 - DNA, 734 bp, Homo sapiens
tgggagtgggcaccgtggagcagggggtggcgctcgtcggggatgctccggccgcacaggagtccacggagggggtgggaggctcaggcatggcgggctgcaggtcccgagacctgcccagtgggaaggcagccaaggcccggcgagaaatctagctcagcgcagtcccccattgcccggggccagcagggctggctggctgctccgagtgcagggcccaccaagcccacgcccacccggaactccagctggctcacaagcgccgcacgcagccccggttcccgctcctgtctctccctccacacctccctgcaagctgagggagtgggctccggccttggccagcccagaaaggggctcccacagtgcagtgggggactgaagggctcctcaaatgccaccaaagtgggagcccaggcaggggaggtgccgagagcaagcgagggctctgaggactgccagcacgctgtcacctctcactgccacactgaatggattcgggtaggccctggccaggacagatcaccagggcaatatcctggccccatgccctgttcagaattccctggagtcagcaggatctacaatgaggaaggagagaggtgggtcagccaagatggccgaataggaagagctccagttacagctcccagcacgagtgacgcagaagacgggtgatttccgcattttcatctgagtcaaagaaaggggtgacagatggcacctggaaaatc

SEQ ID NO: 480233 - DNA, 589 bp, Homo sapiens
ctgcctccatctccgcattgccttctcctctgtatgtgtcttcatgtgtctttttctgtcttttgtcatctgcaagctgaggagccaagtccctaaacctcaaaagtgtggaaaccaacagtgcagccttcagtctgtggctgaaggccggagagcccctggaaaaccactagactctatgtacctgcaaattgctactggtctgagggcttatactcaatttcgacaacatatcatgcaaatggaaggcaaggctcttgtaagtctccccaataattcaggcagcagagtttttaaggacaagttggtgagtggggggacgccagtgagtggggaagggattggtcaggaattaaatcatagggagttgaagctgtcttcttgtgctgagtcagttcctgttcagggtccacaagtagaggagtgggtgttagcaactagcatcatggcttgtgctgagaacctgtccttcttttggtgccatttttagtgggtgcttggttgtattcaaaataaatttttttgtacatttaaaaaatttaatttacttttattttaagttccacgatacatgtgcagaatgttcagg

SEQ ID NO: 480234 - DNA, 488 bp, Homo sapiens
tttccaacagcagttgtggtgtcctgtttagaggggagattgagaggaaacggctacctggggtccagtgatgtttaacatggcagctccatcttcccttttgtttgccaaccacatgtgtgacttccagcctccaggactctcggagagtaaatgtgtatgtttacaagccatccagttgcaatgtggacacaggcacacacagaaggatgaccctgtgaggacacggggagaagatgatgtctacaagccaaggagagaggcctcaggaggagccaactgtggcaacatcttgatcttggacttccagcctgcagggctaaaagctgaaaattctaagaatcagagctcttctacccctccaaaagaatgcatctccttgctagcaacagaacaaagctggatggagaatgtctttgatgagctgacagaagaaggcttcagacaaccaaacttctccgagataaagaaggaagtttgaacccatc

SEQ ID NO: 480235 - DNA, 1456 bp, Homo sapiens
tgcaactcactctcaaccacgagtgtatattattcccaaagtcagccaagatgccaaaatttctacatgacagagtgagactccatctcaaaagaagaaagaaggaaagaaagaaagaaaggaacgaaggaaggaaggaaggaaggaaggaaggaaggaaggaaggaaggaagaaagaaagagaaagaaagaaaaaagagggagggagggaaggaggaaggaaggaaagagagagagagggagagagaacggaagaaagaaagaaagaaagaaagaaagaaagaaagaaagaaagaaagaaagaaagaaagaaagaaagaaagaaaggtagaaagaaagaaagaaagaaagaaagaaagaaagaaagaaagaaagaaagaaagaaagagaaagaaagaaagaaagaaaaagaaagaaagaaaaagaaaggaaagttttgccaggagaagctgtccttcacacaccagatgtgactttactattttattttaattgtttcaaaatatgtttagctttttaaatttttttcagcaataaattcagcagtcataatacctatattagattgtgagttaaccttcaatgcattatgcaattatattgcataaagaaaaccatctcatacattaaattgctctgggaatgggtgtaattaggctttacatatgaagagtgaaggagcatagagaaggtgctacccaggggaattccagtgggtctttgccaagagatgcataagggaacagccacaggaatagtagtgtgtgttgtgaggggtccaattataggggaattagagttaatataaggagaaaggttttttaatgaaatatcattttatctcatttaccagttttctgaatggatttagagtgtgtttctttactgctaagtttggagtattcttttttcttaattaccagttggttttcatacatgtctgccaatctataattggccttttcgtcttgtgaataagagtgtttgtacaccaatcaaaggtaggtttggtcttttcacatagtccgatatttcctgcaggctttgttcatttcttttcactctttttttccgtaatcttgtcttcttgctttatttcattaatttgatgttccatcactgatatcctttcttttgcttgatgaaatcagctattgaagcttgcatatgctgcacgaatttcttgtgctgtcattttaactccatcaggtcatctgtgttcttttctacactggttattctagttagccattcatctaaccttgtttcaaggtttagtttccttacaacgggttagaacatgctcctttagctcagagaagtttgttattacccacattttgaagcctacttctgtcaactcgtcaaactcaacctctgtccagttttgttcctttgctggcaaggagttgcgaatctttggaggggaagaggattcggttttttggaatttttc

SEQ ID NO: 480236 - DNA, 635 bp, Homo sapiens
tatgcattttgaatgttgaacaagaacaatgaagggcaatattttcaagggtattttaaatgtgttagtctttgccaatgtgatgagtgacaacagattctgttatgtcatccttatctacaattatagcccatttatcaattctatggttttctactttagcaatctctctgtctctgtctctctatctccatctttatttttaacctttttttctcttgaagttttaagatggagtcaaagatttatatttgaatctatcagtttaatatatttttcactttttcatccattaaattttatctgtgtattaagatcatttcttctgcttcctaagaaaaaattttcaaatatatatgcctttaaaaaattacataattataatttatcacactgcaacatagatggacctggagggcattatcttaagggaaataacttagaaacaggaagtcaaatgccacattttctcatttctaagagggaactaaataatgtgtacagctgaacatagagtgtgaaataatagacattggagactgggaaggataggaaagtgagaagggggtgaaggatgagaaattatgaaatgagtgtaatgtacattgttcaggtgaggaatatgctaaaagccc

SEQ ID NO: 480237 - DNA, 714 bp, Homo sapiens
ctgctctcactgtatacatcaggttactgagcctactacttggcatgggatggcttgtggggataccggacccggttttacatgatcaaccaaatcatatggttacaagctatcttagaaataatcactaataaaactgacagagccttgactattctggcccagcaagaaactcagatgagaaatgctatcaatcaaaatagattggctcttgactacttgccagcagctgaaggaggcatctgtgggaaatttaactttactaattgctgtctacacattgatgatcaagggcaagtagtcgaagacatagtcagagaaataacaaaactggcacatgtgcccttgcaagtggggcatggatttgatcctggggccatgtttggaaaatggttcctagtgctaggaggatttaaaactcttataataaagagttatcataatattgtatggaaaggcactgtgaaaattcctgtcctgttctgttccattctcattactggtgcatgcagcccccagtcacgtaccccctactcgctcaatggatcacgaccctctcacgtggaccccttagagttgtaagcgcttaagaggacaggaattgctcactcagagagctcggtttttaagatgtgagtcttgctgatgctcccagcagaaaaaaagcccttccttctttaacttggtgtctgagaggttttgtctgcaactcgt

SEQ ID NO: 480238 - DNA, 600 bp, Homo sapiens
aaccacaccagagggtggaacgactactctgctaagtagtatgtcaaccaaaccaaattgtaagacaaggacatgcaatcctttaaattttactgtcttaaagccagagctacctttttggtctacaggacagacagcactattacgagttgatagacaagcagcaggccttggagttccattactgattgtcaaaaagactagaaggactcaaatgcatccaaacctgcaattccaggttgataagtcattctataagcagtttgatcagtcagtgcctgagcttcccccatcaaccaaaaacttatttgctcaaagtgaaaacaaaactgacagcttaagaatttctaataatggccgagctgtcatgaaaatcacagctagaatgcacaagctggcccatgtccctgttcagacttggagtaatcagtccactatagaggcaatagtaacctgacacactaccaagcaattgatggcatcaaacaaatatcagtcattgcctgtagaataagaagctcagctccatgaagaggtggcaaacagtggtgctttcaattaacacctttgttataaaaagcaccaaaggggggaatggaa

SEQ ID NO: 480239 - DNA, 1072 bp, Homo sapiens
tcaggaaaggttgtcatcaacctgccagacactgctgaaaagggatgactgagggatgtgagaaagctgcagaagaaaaatctgaatctagcagaagttcatgacgtttaaggaaacaagccatcttcataacataaaaatgcagggtgaagcagcaagtgctgatggaaaggccgcagcaagttatccaggagagctagctaagatcaccaatgaaagtggctacactaaacagattttcaatgtagacaaaacagccttctattggaagaaaatgccacccatgactttcagagctagagagaagtcaatgcctggcttgaaagcttcaaaagacaggcagaattttgtgttagggcttaatgcagatggtgactttaagtcaatgctaacgctcatttacaattctgaaaatcctagtgcccttaaaaatgttgctaaatcttctctccctgggctttgtgaatgcaacagcaaagcttggatgacagtatatctgtttacagtactgtttaccaaatatcttaagcccactattaacaattactgctctgaaacacaaatttctttcaaaatatttctgccttctgacagtgtgcctggtcacccaagagctctgatggagatgtacaaggagattcatattgtttttagacctgctaacacagtgtctattctgcagcccatggattcaggagtaaattcaactttcaagtcttattacttaagatatgagtttcttaaggctacagctgccatagatagtgattcccctgattcatctaggaaaagtaaatggaaaacattctggaaaggatttagcactccagatgtcattcacaaccttcatgatccatgggaaaagacgacaatatcaacattaacaggagtttctaaaaagttgattccaatcctcatggatgactttgagggattcaagacttcagtgcaggaagtaactgcagacgtgttggaaatagcaagagaactagaattagacgtgaaacctggagatttgactaaattgctgcaatctcaggataaaacctgaactgatgacacattgcttctt

SEQ ID NO: 480240 - DNA, 517 bp, Homo sapiens
agcgaggaaaaagacaaaaaacagccccctccctccaggacctgcgaggggtccgtgtgcccataatggatacaactggggatgccagcatcttgggcctctacagtgtcttgcaccacattcaccaggaggggtgcccactggccctgcccactgaagcttctctccttgagtccctgcaagaagagctcctctccctggcggaggtgaaagctgagggcataagcaggcttatccttgcaggaggagctcctccccttggtggaggtgtgggcacacccaggtccctccctgcaggaggagcttcttccactgatggaggggatcgccaggataaaattaaggtgccagctactttgtgttctccccgagcctcccgatgctattccaaattcagtgcgtgttggtggaattcagttcttcgtggttctgggactgaggttcccacattcttgctgctgaaagtccttggccattagtgatttctaggtctatggacctcacaggaagtttacat

SEQ ID NO: 480241 - DNA, 1232 bp, Homo sapiens
agctctgttagaagccgtgggtcatggaagagaaccgcggaacccagcgacaagtgaacacagtggataccctgctggatctgtgggggcggaagtcagcagcaggtctgcgatggtggcaaacaacagtggtgaacagcaagcaaaagctcagctaaagcaagctcaaacactgtgcttggagaaccgctgctctcttcagagctgtcagacagggatgtttaagtcttcaaaagtttctgctgccttttgttctgctatgccctgccctgagaggtggagtctactgaagcaggcaggtctccttgagctgcggtgggctttacccagtttgagcttcccagatgctttgtttacttactcaagcctcagcaatggcagatgccccacccccagccagactgccgcctcacagttcaatctcggactgctggctagcagtgagcaaggctctgtgggggtgcgacccactgagccagaagctgagagccatgcagcatcaaggccgaacatcatcctggtcatggttgacgaccttggcattggagatcctgggtgctatgggaacaggactctcaggttggaaaggcagctcctcagtaaacacataaatcataatgttgaagaaaatcttctccacaagacatagccaaatgtgtctcactttcaacctgaacctttgcataacattgctttttacttttttaaaattagattgacctatgatgttgcttaaattttaaaaagcatatgcaaagataagatctcagttttaagagagcacttttaattaattatctatgtgtgttttctgcctcaccttttgcctgcatttttaaaacttttacagattactttttacatctgtgatatagatctttttaatttagtttttcttaccagtgtcacaattttattcagttttttattttatctttttttaactttatgtattcctaaggtgtattgagataatagataactgttcctaccaagatgtcttaattaaaaagttagagccaagtctttaaagttaactctttaccaattatcaaaagaaaaaatgtctaaaagtcccatggaagaattgatagcaatatcaaccctagatctgtcttgggctctatgttagagtcccgttttttctgagttacatttctcatattatagtttgtaatatcacaccccaaaatagtcatttttttccatgggccagtatagacactaggagg

SEQ ID NO: 480242 - DNA, 1239 bp, Homo sapiens
tggctttaggtctaacatttaaatctttaatcaatcttgaattaattgtagtatgtggttttggtgtggatgtcccttctgtttgttagttttccttctaatagtcaggaccctcagctgcaggtctgttggatttgctggaagtccattccagatgctgtttgcctgggtatcagcatcagaggctgcagaacagtgaatattgctgaagagaaaatgttgctgcctgatcgttcctctggaaggttcatctcaggggggtatctggctgtactgactcagtgctcaactcatttccctggactgactcagcaggtcctcaactgtgtgccctggactgtgtggtactggactacttcttggattgagtcagtcatggactgtgttttccagaccatgggcatctttggctgtcatccaccctcatcaactgttttccttggagtgactatgtctttcactattttccacagtgggggcatcttcatgccatcctgttatcagtgctttccgtagactggttctggatctctggaaatgttttactgatctctggaatgactcacgagcactaatgtcactgaatgattgagaatggatataactattgccttcagggttagctctacatctttgtaaaagtatgtggtcatgctcaaagccagttgcaacattccatctgtagatagccctttctcaatatctggaccataaagctttagaaatgctctgcctaaaatatcaacccaggagtaaggaataccataaattttcaacccaccaattcagagtatgacaatttcttccatttagtctcttgagtgacttgactcctggatcaatactcagttattcattttttattgccatatacttctcaccctgttaatatccatgtgtataggcaatatacaatgaccttaggatgctaggaagaaaggagtcttaaaatcctgtgggtgctatgaatccttactgttctataccacagagggacctgtagagtctggttcctggactggcttagatctttccaatctatcctgctgggggaatgtgccagtattctatcctgaagctcacagccccagccaagtatcactagtttccaaatttgcatatagcaactttcccttccatattgatctcctagtcatcattcctgtgtctccacattcacatatacatcaagtttccagtccactatatgtcatagaatagctcaagtgagctataatt

SEQ ID NO: 480243 - DNA, 638 bp, Homo sapiens
ggaatccaggtgggtctactgagtcataagacatccacaaagcccaccactcacgggcagccacagatcatagcgccaatggcgccacccttggccactgcctatcaggagcttaaaagatacacaagtggtaatgatgattgtgatgtagatggtgatgatggtgatggtgatgaagatgattgtgatgatgacggtgatgatgattgtggtggtgatcatggtgatggtggtgatgatgatggtaatggcaatgatgatgataatggtgatgataatgatggtgatgattttggtgatggtgatgattgtgatgataatggtgatggtgaagttggtgacagggatgataatgatgaagacgacggtaatgatgttggtgatgatggtgatggcaatgagggtaatgatgtttctgatggtgatggcaatgttggtaatgatgattgtgatgatgacgatagtgatggtgatgatgatgatgatggggatgatggtaatatgatggcaatagggggagtgatgatgacaataatgatagtgtaatgaccaataggcagacatcctatattcagtataaaagcagagttcagatattagcagacttccatggttaacttttttacctgagggtgggt

SEQ ID NO: 480244 - DNA, 2263 bp, Homo sapiens
cctgcagttaacaatgcagtatggtgcatttaaaaatatgtaaagagaatatatctcattctaagtgttattaccacaaaatatctgcagatcaactgcaagaagaaaccagcaatcctgagaggacctacacaccttctgaaggaagtggactgcttttgcaggactggggagacaactcaaatactgtgagtgccccaactgtggaagtggcaaagagacagaccttcctatgtgacccaccctcaggtaaaaaagttaaccatggaagtctgctaatatctgaactctgcttttatactgaatataggatgtctgcctattggtcattacactatcattattgtcatcatcactccccctattgccatcatattaccatcatccccatcatcatcatcatcaccatcactatcgtcatcatcacaatcatcattaccaacattgccatcaccatcagaaacatcattaccctcattgccatcaccatcatcaccaacatcattaccgtcgtcttcatcattatcatccctgtcaccaacttcaccatcaccattatcatcacaatcatcaccatcaccaaaatcatcaccatcattatcatcaccattatcatcatcattgccattaccatcatcatcatcaccaccatcaccatgatcaccaccacaatcatcatcaccgtcatcatcacaatcatcttcatcaccatcaccatcatcaccatctacatcacaatcatcattaccacttgtgtatcttttactgttgaccaagtactttcctatgttttcttacttgaaatgaattttatgaatttctgtcttcaggaaatcgtctgcaaaatgaatagacaagttgaaactgaaacacaagccatgaacaagagttaagtgcttaaatatcttgcagtaaacagtacttaagtccttgatatgctacagaaaaatgctggaaagggcagatgaagcatgttagcattggaaaaaaaagctagagctatcagaagtaaacttcttggagaagtagaccctgagatccattcaccgatccagaaaataatttttgagtgcctgttttattttgtgcagtagttgtgaggggctgcaaagatacgtgagtaaaaagcttcatctacaagagaaacatgcaagctaatgaggaagaaagataagcaaataatgtgattatagtcttacccaggcttcccttaacagtggtgggaaaagcttgtgggtggataatttaggtaagaatgtagttccagaaagaaggcgtctagaacaaaggaaataaaatagagaacacccagtacaatgatgcttcattgactcatccacctccagaatagcacatgttcaatcctgtcagggaccttctgaaaagcctctgaaatacaccttaaaattgtctatctgagacatcaaaggggtaaaccacttattttacagctcctgataggcagtggccaagggtggcgccattggcgctatgatctgtggctgcccgtgagtggtgggctttgtggatgtcttatgctatgtcagagaaaccctaagccaagcagcatggaagactgttgtccagttatactcggataaagcaccacacagaagtgacagtgtaagtgttggagaagaaaggatattgaggaacataaaagatgtcaatacaacaactctacaaaagtcttccttccataccctaataatagcaaaatctaaaacaaatgtatatgctttgatagagcaaataactctcacatttatttaataaattttgaaatttagtttcattttgccttgacaggtgaccacacaataactactaattctctaagataagaatattttctctagctttctaagaattggaatgttatgaaattaaccattcattttgtttgtgtactctacagtttactttcaaaataagcaaatctgtgacatatgcccttacaacgtttcataccaattcttaaataaaatataatttgagtttcgcagtgaagttttatatacatttttaaataataatttgagtttcacaacactgaagtgagaatttttagtgttttctaagataagtattctttacttcttaaaacatcacctttatatttcaactcagaaacatgtctttaaataatataagattatcttgcagggagaaatatgttctacattttgtaggaaggtagcacctgaaatacattctcccaaaaggaaggaagaaaggactgacaagagaaagtggttattcc

SEQ ID NO: 480245 - DNA, 886 bp, Homo sapiens
cagtgcactccgagtgcactagtgatgactagtcttcagtctcaatgtactctttctgatgatgaagaagaatctaatttctccttgttttctccccaagaggaggaacatggtgatgatcccctccctccacctcctatcatggaacctgtatatgttaactcttcttctactaagctgttgccccctctgccagaggaggacgtgtgtcattcttctgaatggtctgtttctcattcctctcatccttttggaccactcccctcttttaagcccactgtttcttttgacgctccgggaccccttctttcagagacgtggaaccctgcttccccccactccacatcctggagctcccactctccttctctctcttcttctgcccctgctagacctgtccgcacttctattcaggaggcaatgtgtagagctatggcttctagtggtttggatgtctggcagctccccatagccatagcctctaagtgtgaaggtgcaggagggtggggaaaaggcacagctaaaggccggtgatattatgaatctttctctgtacaactccttaaggattttaaagctgcttgtgatcaatatggaccaaattctccttatgttaaaactgttctacattcccttaccactgaaaaacaacttgttcctattgactggaatttgttagctcatgcttctcttaccccttcttgattcctacaatttaagatattgtggtcagaagaggccatgattcaaacttcgataaattttgaaaatgagactgaagtgccttatgatatgcttatgggtactagtgatttgtggaatatacttgctcgacaattggaatatagtcaacgtattttaactcaggtaactcaagtgtgtttac

SEQ ID NO: 480246 - DNA, 1441 bp, Homo sapiens
aagaaaaagtatttacttccataatagaggagccaagatggccgaataggaacacctcctgtctagagctcccagcatgagcaacgcagaagatgggtgatttctgcatttccatctgagttaccaggttcatctcactagagagttccagacagtgggcacaggtcagtgggtgcacacaccgtgtgcaagccaaagaagtgtgaggcattgcctcactcaggaaatgaagggggtcagggagttccctttcctagtcaaagaaaggggtgacagatggcacctggaagatcaggtcactcccacctgaatactgcgcttttccaatgggctcaaaaaatggcacaccaggagattgtgtcccgcacctggctgggaggaacctatgcccacggagtctcactgattgctagcacagcagtctcagatcaaactgcaagacggcaatgaggctggggtaggggcgcccgtcattgcccaggcttgcttaggtaaacaaagcagccaggaagctcgaactgggtggagcccaccacagctcaaggaggcctgcctgcctctgtaggctccacctctgggggaagggcacagacaaacaaaaagacagcagtaacctctgcagacttaagtgtccctgtctgacagctttgaagagagcagtggttctcccagcatgcagctggagatctgagaatgggcagactgcctccttaagtgtgtccctgaaccctgaccccagagcagcttaactaggagacaccacctagcaggggcagactgacacctcacacggccaggtactccaacagacatgcagctgagggtcctgtcttttagaaggaaaactaacaaacacaagggacatccacaccaaaaacccatctgtacatcaccatcatcaaagacaaaaagtagataaaaccacaaagatggggaaaaaacagagcagaaaaactggaaactctaaaaagcagagtgcctctcttcctccaaaggaacgcaaagaatgtataactagaataaccaatgcagagaagtgcctaaaggagctgatggagctgaaagccaaggctcgagaactacatgaagaatgcagaagactcaggagccaatgcaatcaactggaagaaaggaatttcatatccagccaaactaagttcataagtgaaggagaaataagatcctttacagacaagcaaatgctgagagattttgtcaccaccaggcctgccataaaagagctcctgaaggaagcgctaaacatggaaaggaacaactggtaccagccgctgcaaaatcatgccaaaatgaaacccatctcacgtgcagatacacaaataggctcaaaataaagtgatggaggaagatctaccaagcaaatggaaaacaaaaaaaggcaagggttgcaatcctagtctctgataaaacagactttaaacca

SEQ ID NO: 480247 - DNA, 1961 bp, Homo sapiens
aggggcagaagctctcctgcaacccaggaagcagtcggcaaaagcagctcctcctgagttaattgctaccctgtcttttctctcacttcactttctctctctctctctctcctctctcctcactctctttcctctctcctctctctcttttctctctccctctccctctccctccctctctccccctcccctcatgcagcttcagctgaagaggagctttgctgattccctccagaacatccaacaacatacactaatccagatccagctggttttcttctacttctaccttaaatcctacccctccctgtgtcaagcttgcaactctcataaagtctttctgcttaataaaaatgtgccctgggcctctccttcctccaaaattccttttgaccctgcagatgaacccactctgtattattatccccctgcatctgctcctcatctgtctgaaccctctgccatggtggcccttcctgcctccaagccttcagccccaaactccactcctcctccttctccacctgttacccattcaaaaaccacctctgccattctctctctgggagttaaaggcaatacttgcattcgtgtccatttctccacatctgagttgctgcagatcaaagctgtcctggaagccattttcatagccctgttcttaaagggcctcaccagaattccactattctaattgggaaattagcagaaaaaaaaatcttatatccactgaatcttcttttggttgtccatgtggctatgtatgtgttatctgtgcaatatctattaaaagagctctaattaattggcctaagaaaaataagcacttaaatatttttaaggaaaaggtttaagcaattttggaacattaattgtaaagaaaattctgtgtgtaaacatattggctaaagttaaaggggtatcatccagtttttctgtaaattgagcattaaaagcacaacaggtttttctaacctgttctttaacaaaattataaagggttaaaaatagtctataaaaatcttacttcatggtcagacattaatattgggtaaatgcatataaaggttttattagaaattgagtttaacattaatagcacactaatataaaggtaaaatctggcttatttggtataaaatcacacaggaaacattgtagaatataaaatgatgtttggctttctttgggctatttttgtataaatacgttttggtatgtgtcccaaacttatggagactcctataattctgatacatcttactgggaattatcagtattaattataattgttatgttaaaattattgtgtgccacagaggtagcagatatccttgtcacttgtgtctttaactatggctatcctacaactttttgttatccataaacaattgttgtcttgttttggtactctttaaaaggtggtttaatagttagctgtgaagttctaacaggtgctcttcaatgcaggtttctgataattttggagaatgtaacatcagaatagaagaaaaactttcaggactttgaagagctaaaatgttaattaatatcaagcaggacaggaattaactgcatgaattttactaatgggagactgaagtaatctttttaatgctttgctaatcctttattttgctttccaaagtcaaaaaaaattttttgggctattaatagcttttaacaatttagtatattcccataaacaaaatttggagcaactttttctctctacctgattttctcttgaatttggagactatctgtgagtatttttaagttatggtaatacagttatttgcatacatgcaatatggatctgttttcatttgcaacgggacacaattggagaaactggttattgtaccaagactttgactgaaattgtgtgctttccttaaaggcatcaaacttggctttatgaagctaataaagcctttggaaaacttgcctaatatttc

SEQ ID NO: 480248 - DNA, 580 bp, Homo sapiens
gtcacacaaatgaattgaaggaggtaaatgtggggattttattgatgatgaaagtggctctcagcgggaagagagatgaaacagtgacagagagggaaagtaatcttcccctggggacagttggactcctcaccaaagctacactgtcaagctgtccctgtgaagtcaagctgcatctctctgatggtcatgggtgcaactggctggggccagcatcatgggccataaatgaatttaccaagacagttgtggataaagaagaaggcagaagaggctcgggcagatgctccaggaggtatccagaagaaggcattattatcatgggacaggacagctccatgcatgttattgcccctgaataccttccagtggaacaagatgtagaggtggaagacaatggtatagatgttcctgattctcaggatataggacataagaggaagaacaagttaattccagactaaataaattactttgttttctactgatccaggtaccactgaaaacaaatttttaagcatatttttgcgaacccaaaggtatctgagagaggactcaatcagtttagaaagttaatttc

SEQ ID NO: 480249 - DNA, 503 bp, Homo sapiens
ctaagaaactggacccctggaccctgtggcctccaggtggccaagatgtctgcgagccatagcagccacagcaagcctggttcaggaggcaaaaataaatgcattaacatctacactgacagcagatatacgtttgctactgtccatgtacacagagccatctatcaggagcatgggctactcacctcagaaggaaaaactatcaaaaataaagaagaaattttggccttgcttgaagctgtttggttccctcaacaggtggctgtaattcactgcgaaggacaacaaaaagaagatatggtcattgcttgtggtaaccaaagagcagattctgcagctaaaaagacagctcagtttccagtcatgcctttgactctgctgccctctatatcctttctgcagcctgactttcgagaccacccagaatactccctagaggaggaaaaagaggcttcagatcttcaggccagtaaaaatcaggaaggttggtgaattcttcctga

SEQ ID NO: 480250 - DNA, 699 bp, Homo sapiens
gttatcagttaaacaggaacgggccattttcacttcttttgtaattcttcagttgcttcaggtcatctggatgtatacgtgtaggcttagactcagaggcctgacatgacttgcatcaggaatgatgtctcttgtgcccctttattcagatgggtttttggtgtgggtgtcctttctgtttgttagttttccctctaacagacaggaccctcagctgcaggtctgttggagtttgctagaggtccactccagaccctgtttgcctgggtatcagcagccatggctgcagaacagtggtggcagtagaacagtggatatttgtgaaccgcaaatgctgctgcctgatcgttcccctggaagttttgtctcagaggagtacccggccgtgacttggcgagtttgggatggaaagactgcgagagctcaggaattggagagcagcctgcacaacatggtaaatccctgtctctaccaaaaatacaaaaattatataggcatcacagtgcatgcctgtggtcccagctactggagacagcggctgaggtagaacaggagacaggactgttgttattaatgagaatactactactgaactggtacaattgtagacaaaaagcccagggaatttgtggtattgctagcttcaggaaaatttttaaacatcatttaggactgttaagtccatatgtaaaatgctat

SEQ ID NO: 480251 - DNA, 781 bp, Homo sapiens
gagtttgaaaggcggtatctgatttcagaagccttttcctgtaaacaccgggtggcaactcatactatcgctgactgaacccacaatggtccctggatactgctgattggaatagttgcactcaccgatgcagcagcagaaacacctcttgccaatgaacccgcaatggtccctgggccctgctgattggaatagttgcacacaccaacgcagcagtggaaacacctcttgcccaagaacccacaacagtccctatgccctgctgatcggaatagttgtgctcactggcacagaggcagaaacactagttttcctcctagaccacaaggaggatcgaggaagaatctcttatctcctcacagaagaagaaaagctcactgaccctgtggggttggaccttatgggagaaacccagtggaaccaccaaaaaggtgaagtaggaaaggcagaagggaaccatccggcagatgatgaggccaaaattgcttccagttggaacctcccattggaaatacctacagaaggacccttgatatggaacaatcctgtccaagagattaagccccagtattccacgaatgaaacagaatggagactttcacaggggcatggttttctcccctcagggtggttaatgacagaagagagaaaggtacgaatactcaaagccagccaatgaaaaatactaagacccttcaccaaacttttcatatccatattgagaacactcatcaaatggccaaatccctatttacaggcccaaatctcctctggaccatcc

SEQ ID NO: 480252 - DNA, 748 bp, Homo sapiens
taaggggctgcaagtgaaggagccaaaatggagtctgtccacttctctcagccaagggagagtcaattcaggttaaaacaagaagctacgcagtctatggtattttcattattgcagcccaaagtggatgagacacttgacgtcccttcaatcaatttcacgtggaatctccttgatactctcctaacagaagagaaatgcacagaacttgaaaataattttggaagtccaagttcatcaagatgtcaacctggtttctggagagagctctcttcctggtttgttgatggtcagtttctcactctaagttcacatagtatagctgcccagtgggttcaccttgcccgctgcctaaagagagccaatttctcaagacaggggacttacaatagagaaagagtattttatgcagagctggctgtatgggaaactgaagttttattattactgaaattagtctccctgagcatttggggatcagagtatttaaggataatttggtgggtagtgcagcagtgagtcaagagtgctgattggtgggattggagatgaaatcatgggaagtcgtggccatcgtcttgtgctgagtcatttcctgggtgggggccacaacgtcaggtgagccagtttatcagtctgggtggttccagctgatcaatcaagtgtaggctctgcaaaatatctcgagcattggtcttaggagcattttagagaaggtcagaatcttgtagttttcagctgattagtc

SEQ ID NO: 480253 - DNA, 703 bp, Homo sapiens
aattcacttctcagataattcttctgaaattccatgacttagcaaattctttcattcatgtggagccctcatcacacaaatagctctccaaggccatatccatcaaccttgtcacatagaggattatgctttaatatgagttttggagcagacaaatattcaaaacatagtggatttgaaaatagtgatgatgtttgcacagcactggggaggagaaaaagaggaaaaaggtgtaactctcattccgaggctaaaggcctgaggacctgtgagatcaattttgaaaatcttggaaccagggaagctgatggtataattctcattctgaggacaaaggctagaggacctgtggagcaccctcatcttttttgtccatatggtatgagtgattgccccaacggtactgattttgtggaagacaatttttccatggatctgtgggtggagtgtagatggtttcaggctgaaactgctccacctaagatcatcaggtgttagattctcataaagagtgcacaaaccagatccctctcatgtaccagtcaatggccttggggtttggaatgtttttgtgtggaggagaaatttattgtggggttggaatgtctctggttggaggggagattattgcgagtctgtcacgtctctagtcgaggaggggtttaactcagatttggaatgtctctgatcagagatgtcattt

SEQ ID NO: 480254 - DNA, 704 bp, Homo sapiens
tatcaactcccagggatctccagaaggacaactccgggtacataatgttgactggtttggatgggaaggaagatggcaccaatgagaagaaagtggatgctctttttagcatcaaccaggcttcctctgatctttgcaaccttcttattgtagtaattgatgatggtgatgatggtgacagtgatgttgatgatggtgatgatgacggttataatgacgatagtgatggtgatgatggtaatgatggtgatgctcatggtagtgactatgatgttaatggtgatggtgatgatggtggtggtgatatcaattacggttatggtaatgataataatggcagtgatgatggtaataacgataatgataatgttgatgatcatgatggtggtgctggtgataatgatagtaatgatggggatggtgatgatggtggtgatggtgatggtaatggtaatgataattatgatgatgataataacaatggcaatgggatgataatgatgatgatgatggtgacaatgttggtaatgataatgataaaaatgagatgatgcttttatctatgtttcatttatttatttaaaattttaacaagcttttaggaagtattctgcactaagatttttagcaacttaaaacaccccatgcacaagtctaaaatctttttaaggaagcaaaatgtctgctgggctctgtggcttatg

SEQ ID NO: 480255 - DNA, 1132 bp, Homo sapiens
gaagaggcacaagagcgagtgagggctgctagcacgttgtcacctttcattaggctagaggcggcatgatctccttttgcctgatgacagcttcctgcagaatctccttttttaaaaaggccagctttggagcttatattattggtcatgttggctatgtcactttccccctccctcctaagggacaaccatggaggaatccattgtttgctgaaaattttagcatgggattcacagacactacttttgttttagataaaagcaggcagaggaaggtggaagaactagactggctgagttttctggcctccatctttctcccatgctggatgcttcatggcctcaaacatcaggctacaagcttttggacttttgaacttacaccagtggtttgccaggggctctcaggcccttggccacagaccgaaggctgcactgttggcttccctacttttgagatttttgggattcagaatggcttctttgctcctccgcttgcagatggcttattgtgggatttcaccttgtgattattcagaaaatatgatttaattcacgagcatgatgttgtaatcaagaccacattagaatcccagggttagctcttaccctgtttgtcaccatgggcaaaccaagatgtccaagatctctcatctgaaaggtgaaaataaaaaatatgtcctacatagctctttcagttattatgaatataaaatgactgattgcgtatgtgatggctttataaattataaagtgctatgatatgtaagactcttgaattgactccaaaatgtatgagtggagcatgtcttctcttttctcctaatttatttggatttccttgtccattatccctggactgtttgctcctcaactttttaggctaccaaaagaaagtcctaaagttggtagaactagcttttcctaacttgtccctggaggtgctggagaaaagcagcatggcaaatggtggtaaccttaagttatgacaatgacccctaagcagctatcaacttcatatgctttctcacttccttcaaaatataatattttcagagaggtattcctaaaccagtttctacaaaaacaatctccgtgagttgctattcttaatattgctgttcttctttcc

SEQ ID NO: 480256 - DNA, 1657 bp, Homo sapiens
taattcacagccgtggcacaggaagtgtgcattgcacaggaaagaaacaggaaaaaaggaatggaatgtatgtcctgcacaggggtgaagcagggggtctgtcctccacagggaagaaacaggaagtgtttcatgcacaggggagacacaggaagtgtgtcaaagtgcactcaatagagaaacaggaagtgtgtcatgcacatggaagtaacagaaaatgtgtcactcacagaggagggacaaaaaatgtatgctacacaggaaagagagaggaagtatgttccccacaggggagacacaggaagtttgtcctgcacactggggaaacaagaagtttgtcaggtacagtaaaggaacagaaagtgtgtgctacacagaggagagacaggaagggtgtcattcccaggggaagcacaggaagtgtgtcttgcataggggagaaacagaaagtgtgtcatgcacagaagagaaacaggaagtgtatactgcacacccagggaaagaaagtgtgtcctgcacaggggagagtcaggaagtgtgtccttcacagacaagcaggaagtgtgtcatgcacaggagaggcccaggaagtgtcaaaacaatgcaaccagttttgtctcacttagcggtgacccagaagccccctctctgctttgagttctctctgtctttctagacaggaccaatgtacttcttacatacattgattgatgtctcatgtctccctaaaatgtataaaatcaagctgttccccaaccccactgattttacattatagtgagttgtatagttatttcattgtctattactatgtaataataatagaaatacagtgcacaatcaatgtaatgtgactgaatcattctgaagccatcaccctcctctccccatcctggtccatggaaaaattgtcttccacaaaaccggttcctggtgccaaaaaggttggggattgctgctttaaaagttcataatgtacgtgttttataactcagacattctgatcatggttatttatccaaaatatatacaagcacttacccaatcaaagtcatgtatacaagtataaataacagttttatttttattagcaaaaacctggggacaacctgaaaccccatcaagagttgaatggataaacaaactctactgtatacatacagtgaaatacaatccagaaattaaaaagaataaaaactaccaatacataaaacaacactgattaacttcaaaataattttattgagtaacactataaaataaaaaagaatgtgtaagacaccatagcatttatgtaaaattctagaaagtaaaatctgtagtggagggaaaaattttaagggaacatgaaagaatatggggaattaacggatatgcttattttcttaatagtgctgaaggttcaatgtacagatgtgtcgaaatgttatcaaaagtacagattttaaacacccatgcagttgtttatgcctcagttatataactgaaaatatagtgggttcagtgtaatttctactttgatggtgcttggaaaaagggcatttataaccaacccaacaagcatagttactgtttcaaaggagaagcgttatcacttcctcattagggaatttgtgttatcacaagtaaaaatatttcatcataaaaatgtataatt

SEQ ID NO: 480257 - DNA, 674 bp, Homo sapiens
gcacagaagaggaacagaaagttcatcctgcccagaggagtaacaggagaaagtgtgtcctgcacaggcatggaacagaaagtgtgtgcttcaccatggagaaacaggaggagtgtcgggaacaggaaacaccggaagtgtatcctgtaaagtggaagaatagaaagtgtgtgctgcacggaggtgaaagaggaagtatatctctcacaggggagaaaaaggaagtgtgtcttgcactggggagatggaggaactgtgtactacacagtggagacacaggaagtgtatctagcacacaggaggaacaaaaagtgtgtgctgctcaggagagaaacagagtgacatatttcctgtgtctcctctgtaagggccacacttcctttttctcccctgtgcagcacacactttctgttttcccctgtgtgggacatacttcctgtgtctctcctgtgtgggacatacttcctgtttcgtctctgcaagacgcacttactgtattgcccctgtggtagaagagtgtcctgcacagtggagacacagggagcatgtcctgcacaggggagaaacagaaagtgtgtgctgtataagggagaaaccagaagtgtgttatctgcagtggtgacacaggttgtgtgtcctacataggggacaaacagaaaatgtgtccttaacag

SEQ ID NO: 480258 - DNA, 903 bp, Homo sapiens
ccctgactcacactgtccagcagtgggtgtgaccctcaccatctctgccagaaatcactgcatgagcaagggccaccagactggcatccagctgccagcccaaggcaaaaagtcagccatctgcaagtcaagaagagacttctcaccaatactgatacagacaggaggcaaagaaatactggcctcctggcagtattatacagtgatttactggcaaaagccccaccctcaagcctggaaatttgtgggactaaatgggaacaggcattcctgttttctctcccaaatgttgcctttttgcccaccgtacccccctatcctgaacccatatacaccccaaaccccgggctccatgagcagaattgcagaggagcagaagaatggtgtagaagagaaggagtgtctgaacattgaaagaagtttggctggggatgctccccatcatcccactgagagccacctccattgggcaatgaagtcccccacatttaccatcattcgatttgtccatgtgacctggattcttcctggacgctagacaagaacccagcattgctgttttcataagtgaaggactaatgaaatagtgtttgaagtttgcatattagcactgagaatttaaacattgaaattgttggaaatttgaagattggaaattatctaagagactgaggtgcaaaggcatacagaaataaatctaacaatattttcaaatttctgcttgtggttttacagatattcattttctggaagttggcaacctaaaagttggagaaaagtgtttctgaaagttctaggcaaaggcttggggtggataatttgcaaatatattctcctattctgtgcatcatcacttcacttcgttgattgtttcttttgctgtgcagaagctttttaacttga

SEQ ID NO: 480259 - DNA, 729 bp, Homo sapiens
aaggcacagcagctgtaggccaagatgaagtggaccaatctcctgtacaagacagaggatgtgatgatccaccacgatgattgcctgctgcaggaggccctgaagcccaaggagaatcacagcgcccagcagcacagcgagtgggagaagcgcaactcaggcgtggtagagaagatgcatcagtgccaagacctgctggcagcagaacctgcacaagaagaaggtggcccacatccagcaccgaatgctcagagcccacaagaactgtatcctgctgcaggacctggagcttgcaggcctagcaggagggcctggcctggcccagcctgggcctttcccatgttgggctgccatcttccatcttgtctgcagagtcaggaaggaggaacaacggtcactgccccttctcctcctgcctgtgttctcaggggccacaggactgaagagggtggcctttgttgccaggccacgttagtccacagctcgccagaaaggaggacaaccctgaggtgtgtgtaacttccatgaaacatttattaattagcaaactggatcaaaaggcagacttcatgtataggttgatattagtgcatcgaaagagaagggttaaattgacaattcaaaagctttggagaattaatgaatattttttatgaattgttgcataagaaattgtaccaaagttaagtaagaagaaaggtttattggtatcttgtgattctagtggtt

SEQ ID NO: 480260 - DNA, 1366 bp, Homo sapiens
ccatcaacgatagactggattaagcaaatggggcacatatacaccatggaacactatgcagccatgagaaaggatgagtgcatgtcctttctagggacatggatgaagctggaaaccatcattctgagcaaactatcacaaggacagaaaaccaaacaccgcatgttctcactcacagctggacacatgagtgaagtctttttaaaccctgtaccccagacaagccatcatttgaagcagctaaataaatgccccaatgtaaccacccaacgggttcaccttgccctcttactagacagagccaatttatcgacagggcaattgcagtggagaaagagtaattcacacagagctggttgtgtggaagaccagagttttaatattactcatatcagtctcccagagcattcagagattgaagtttttagggataattggactgagtatgagtaaagtggtcttcttgtgccagatggctatgtgtgaacttatttacattcacatctgttgtagacctaaaatcaataaagctgtaaatattctttaaaaaacatatttagggcttaggtcaatattagaagtaattatcacatattcttcaatttgtggagtttttggaataagccaaaatcctttaacacctaaaaaaggatagcatactaatgtattgataattaacactcagagtcaaatttctaagtaattttcatttctgtcagtattcattagaattaaattttactgtgtgcacaagccttaatctaatcagaaaatccattaaaaaaaaaaaaaaaaaacttctctgatcagtcatgggaagaaaaaatttggcatcattacccaaaaggcagcaaactgtatgaaatctaagacattgtttacactaaacttattttcatattccctggcactgcataattcaaaccccccctgtgctaaatgggatattttcatctttaacatgaagaggaaaaaatataaccttttaaaagcaaatattcagtcgatcttcagtctctgatatcctttcttccacttgattgattcggatattgatacttgtgtatgcttcacaaagttctcgtgctgtgttttccagctccattaggtcacttatgttcttctctaaattggctattctaattagcagttcatctaacctttcttcaaggttcttagcttccttgcattggtttagaacctgctccttttgctcaggggaggttgttattacccacctctgaagcctacttctgtcaattcttcaaactcattctgtatccagttttgttcccttgctggtgagggtttgtaatcctttggcagagaagaggcactctggtttttggaattttcaatcttttgc

SEQ ID NO: 480261 - DNA, 2602 bp, Homo sapiens
aagaaagaaagaaagaaagaaagaaagaaagaaagaaagaaagaaagaaagaaagaaagagaaagaaagaaagaaagagaaagagagaaagattagctagaccattataaatgagtgtgactgttgtgttctttcacattcacacatatacagaaatggatgaaaagaagactggccattctaatattgaaaactcctgtggaaagactttttgtttcagatatgaaatcaatatgaagccaccctatgtctttactactcaaagtgtggttctggaatcagcaacagcagccattgctgggggtggatttcattgccaaacctcaggccctgagtcagaatctgcttttctgcatgacctcaaaggagtgatcccaggccacttctctgtgtcacatttccacagctcagttcaccaagaggtggtaggtgggcaatggagtagtgaaataaatcttatacatgcctgtaatcccagcactttgggaggccaaggcgggtgggtcacaagataatctgtttactggcctttacaaataagaaaacaaaattaaatagaaaatcatataactagtgtggcttaataaactttggaactttttattcacctaggctttcctctcctgaaaagaactgtgtcttgcatcctgttccattagccctggtgtggtaatctgcagtgagcaagttgtaaattcacttcctagcatggcaatacaaaccattcttaaatatccttccttgaacacaacggtgtaaacctcacaacctcattcccaagtgagctcaagttcaccattcacatagtatttttctaaacagctcaaaagcctcgatgacttatgggctttgctctagcagagctaaaatggaaatatggattgtagctgtcacttcagagactcagagctggctaggttagtatggacagatttgtaagtgtccatttccatagctatggacaataggtagtatttcattttgtctttccccaatggctactcttacaaccacagaaacatatgagtccattagtagtctcaaacgcttcataaaatttggcttgtttgggtctcctttgaaaatgttcccctgaatatgatttttctctgcaagtcataactgaatattttttaccagctgtgctatatttgatgcttctctaggttcattaatatccataaggaacctaaacttgcagaaacaaatcttttgaattcttgaatgttttcaacctgaaaaaaaaataaaaagttactctgaaacatggaaacatatcaagattcttccattaggtaacatatatgaggaacatttttcagaaaatggttatataataccgtatcagcttttttgagtacttaatgatattaaaattaattttaaattataataaaatatgtcatttgtatgagaagtttaaagaccaagaattataaaccagttgagatataatatccctttattacaaaggacattaaagacaaatatctgtgttatgcctcaaatgcagctgttgtacgtgtagacaagtgaccaatacaaattgaatgtaatgtagatgtgtatagacacagaacacacacatacatacattctaactactctataaaatatttttctgtaaggagacttaggtatacctttacagcaactgagaaatttgttgacattgaagccagtattttacagcatgcagcccatttggctcacctttgctgaacttgattgtgctcttaaaacattgtctggtggaagaactatacaggaaggtaggcatgttgttacattgcttcagtgctctttccaactacattttaaaatttgcatttataattaagcagacgggaaaagaatatgcatgaggaagttgatagagtcttgccacataccaaatattcttgctaagtgaggtattgttcaaagctccatcctcaagtcagtaaccattcaactcttactctgctaaatgctgatagaatcatcattttgccaatgtacgtatgttttctgtttccaataatttccctaataatgatctctaagtgcatttttagttctgactttgatgaatggtgtcaatgtaaatgaatatagcagtcaggctagcaggaggaaaagagaaataaagaaaccagaattttaccttttcttaactcattaacatcatttcagagtacatccttctttttctctgtcataaaccagtctattttgttcaactacaaacttgtcattttgtagatcaaagcgagttgaaggttggcaatgtcatctggacaagttcatatttgagtcaggcccattttcttgttttatttatcttatttaatttttatcgaaatgtcatagttatcttttttatttttaaaaaagaggtcatacaggtcaaacctaactgttcagttatctaataattctcagaaaaatgagtagtcatataatgtattaattttactaaaaagtgtttatatgtgccaggcattttgttagaagctacaagtagccaaaataacttgtttcctaacaagtctccaaaatttaatttccagagggggatatttggatataatatatgacatagatggcatttgctgccaaa

SEQ ID NO: 480262 - DNA, 633 bp, Homo sapiens
agccaccacagacaaaggaaaaaacattctgaaaggagctgagaacagcattgctctaagaccttatgaaagagaaaaaaagaagtatttgcacagtcaaggcaggagaatctagggtccctatgagtgaagatgaactgaaaagaggggtgagaaatatgaaagagagagaattcatgggacctgagtgtgagtcaaggagtggccatcccactgatgtaattggatggtggtgtcattgctattgcaaaggaattgaaattgacaaggcaaacggggaccccaggatgagtttgccagtggcagatataagtgtggtcaataatacagtacaaagcccatggttcctggaggaaggaatgttagatgtggaacttggggaacaagtggggagaaatcttaaacaacatcagaagagcctaaaaagaagaaagaggagaaaacatcacctgccttatcacctcctcttccctcagccccaatatcaaccggccaaaatagcaaagaggaaacagaggtcttacctaatcctccacttccaatagataggaaagaagacagagaatatgctacagctatctgttcatgtcttaagcaggcagtgctagaaggagagctcttaacctgctcagt

SEQ ID NO: 480263 - DNA, 756 bp, Homo sapiens
gagaaagaaagaaagaaagaaagaaagaaagaaagaaagaaagaaagaaagaaagaaagaaagacagctagattcgatagattaataactacatgaacagatagaccgatggatagatagatataatggatagacagggccaccagagggctccttggtctagcggtaatgccagcctctgggaagacgccattgccaagtggaccatgctttcactgagtcttcacaaaattttcctggtacctacaagggagactggggacaggttgagagaactgaagaagcaccctcaagatgatgtctggggagaattgaacagcagtggaggagactcttctccatgggtctcttgtcctccatatcttatgggtgtgataagaaagaatgacaggctccgaccaccctttacccggagcatttctcatggttgttgttctactccctgttcaaccttgaaggaggaggtgacatattcctccaggacaagagcaggctctgcttattgggggttacaaagtggtagagttttcccaagttctgtgtatccctcttgtaatgcagcccacggcaggtgtaggttcctatccaagttcatccgcagcacccctttgtgatactgataaaaaaaggttgatgttctggcaacgactttgctggaagcaagttcctctattcttcgacctaaaagttctgtgtcttctgccagcatccatagaattgcagcaagctattttattaacttacaaacaggatata

SEQ ID NO: 480264 - DNA, 637 bp, Homo sapiens
acgtccttccccacacccaagccagcagttgccgatatgcccatgctccacagacccaatataggccagagggtgctttccaagcatttggagtctttagctgatgccaagatctcatataagggccttgctgtaagggagaagtttggaatccaggttcggcagaatcccgctacacctagaaatttcctgagctgctgccttgtaactggggtgggcaatgcacgcacagcctccttgcatgcacttttaagtctgcgctggccttgggataccatgaattctagatattcaacctccaaaatcagacttttgccttgtccttggacacttagtaaccagcttcacaaagcaggtgaagaaggctctctgttccttagaggtatttctccctcgtgggggcagcgaagagcaaatcatcaatgtgttgtaatagcacacaattgtcactaggtggcgcaaaagcctcaagatcagagctgccggattaactcttttatgctcctctgtattaaatgaagttagcaaaagttattcacaatctggccaggtcaggttatgcgtgttaataacagaatttaccaaatcaataagagcctgagacttttctgtataggagggggtgggctgtttccaa

SEQ ID NO: 480265 - DNA, 1053 bp, Homo sapiens
ctgcggtctttacgcagagtgaaagcatgtggagctggtgttgcagcaacatgagaaaccctgtggccaccagcacaaagactgtgctggttcacatctcaggcatcacattacgggacttcaaacgatactacagcactacagtaaccaaaacagcagggcacccgtacaaaaacagaggcacacaccaatggaacagcgtagagagcccagaaataagaccgcacacctacaactatctaatgtttgacaaagctggcaaaaacaagcaatggggaaaagtctccctatacaataagtgttgctgggatagctggctagccatacgtagaagactgaagctggacctcttccttacactctacacaaaaatcaactcaagatggattaaagacttaaatgcaaaacccaaaactataagagccctggaagacaacctaggcaataccatcctggacataaaaacaggcaaagatttcatgataaagacaccaaaaacaattacaacaaatgcaaatattgacaagtggggtctaattaaacttaaaagcctctgctcagcaaaagaaattatcgatagagtgaagagacaacctacagaataagaaaacatatttacaaactatgtatctgacaaaggtctaatattcaacatagagaacttaaataaatttacaagagaaaaacaaacaaccctattaaagagttgccaaataattgtctactcgtgtccttagcctacttttttatgggattttttttttctttctaatttgtttgagcttgttgtagatcctggatattagtcttttgtcagatatacagattgtgaagattttctcccagtctgtagattgtctgcttactctgctgactgttcctttagtcgtgaaaaagctctttagtttaattaaatcccacctatttatctttgtttttcttgcatttgcttttgggttcttggtcatgaaatccttgcctaagccaatgtctagaatgttttttgatgtcatcttctagaattttttaagtttcaggtcttagatttaagtc

SEQ ID NO: 480266 - DNA, 551 bp, Homo sapiens
cggttgagttttgcacttctgagtgtgacatgccctagtgggcatgcacattcgtcggggtggcgggaacaggaaaggtgaacccagaaatgttgagtcagggtatccaaggtggcgatcgccatcttggagtcttcaccggagtccaatcactgagtattcttcatattgttcagggataggagtgggtcataagggcagaaacccgacttggaagcccttttgggttgtcatggcagtgtctgcacagggggcctttctcagccatctctggtatggtttagagaaccctctgttcttccactcaccttatttcaatgctggcccttgttggcaacagcaagcttctgtcctgcaccagaggaaacagagtgtgacccgattaaaacactgtgtcaatctcctgtgtggaactctgcaaagacattcctaagttcttatttagttcccacttacaactgtgaacatgcagtatttggttctctgttcctgtgtttgttcgctaaaggttatttttcaaagatttttgtacagaaatagcctgggaaaac

SEQ ID NO: 480267 - DNA, 623 bp, Homo sapiens
agggggagatggaacaaccaagatcagacacataggagcatcttcatagatccccagtgcatgaagaaaccagaggacagctgaagaccttgagattcacatctgagtagacacacttgctctccaacactcaactatttattcaaccagccatgacctgggtttgaacatgacggactcaccagagttccaaagcctgacaacctgcacctgtcaggaaaagccacctcctttcctgttccccctgaaacacatggttatggtgggccagatggggtttcccagattagatgacaagagaggcctggcatggacagacctgccctggactacactgcagttcctgtgggtgcctcttgccaaatgggcacagcctgaaaaattgaggcagcagtcagtcatgacccactctaacctgggcaatcctgtgagaaagagagaaaagaaagaaggaaagaaggaaagagaaagaaagaaagaaagaagagagaaagagagaaagaaagaaagaaacaaatgcgggcagatcacgacgtcaggacatcaggatcatccagaacaacatagtgaaattctgtctctactaaaaatacaaaattagctggtcttgctctgtgtgaggc

SEQ ID NO: 480268 - DNA, 495 bp, Homo sapiens
aggacacagcctacgtttctgcccatgggatcttctggaacttccattcccccagagagaaaagaggaccacgggggcacgggtggtatactccagacccacgacctcagagtggcaaatacctgtcacaatggaacaaagtccgtgaaatccacgctaccagacacagcatggatttcccagagaggacagcttacaccaaattccctcctgtgcagggccctccccagaacgggagtctcaggacctacagtcgaacaaaacacaccctgtggaattcaagcatatacacggacaatttccccatcctcttggggccttcgttctgtagactcccatgaagacaggtcccagaaacatatctgcctattcttttattcttctgcctctgacgagttgaggtttcagatgaaacttcagagggtggaaggcaaagcactctccctgctcccatgtttttgtgagtggtgaaaaatgacagtctcccaaggcaaa

SEQ ID NO: 480269 - DNA, 601 bp, Homo sapiens
aactttccactctatgttgaatacgagtgccttgctcgttggagctgatctgatcgtgatggataagctttttgatgtgttgctggattcagtttgccagtattttattgtgaatattcacattgatggtgttctgtcccagggagttgggagttttacatataagtctctgactcaggctgctgcctttctttcagagatgccctacccagtgaggaggaatctagagagccaatgtggccacacctgctttgcatgcttcttaattgtggtcgaacctctccccaccgagctttatcattctaggttgacttcaggcttctatgtaggtagtgagaacttgaagccagtggatctcagcttgctgtgctccatggaagtggggcctgctcagtgggaccacttggctccctggcttcagcccctttccaggggggtgactggttttgtctcactggtgttccaggtgccactagggtatgaaaattattttgcagctagctcagcctctgtgaaagcagccacccagttttgtgcttgaaacccagttctgtggttgtacaggcacactagggaatctcctggtctgtgcgtcgtaaga

SEQ ID NO: 480270 - DNA, 1221 bp, Homo sapiens
tgggtgtctcacacggggcagataaaatcaactggcaccccagaaactttctttcccacatacaaagaagaggaggatgcaggggtggccatctcctgcttgaagtccagggagacctagcacagcttctccttgatatcgcgcatgatttcccgctgggctgtgttggtgaagctgtagcctctctccttgaggatcttcttgaggtactcagtcaagtcccagccagtcaggtccagatgcaggatggcatggggaagggagtagccctcgtagatgggcaccgtgtgggtgaccctgtgtccacagtccatgacaatgccagtggtgcgcccaaaggcatagagggacagcacatcccggatggccacgtacatggccggggtattgaaggtctcaaacataatctgagtcattttctctctgttgtccttggggttcagtgggtcctcggtcagcagcactggctgctactccggggccccatgcagctcattgtagaagtggtgccagatcttctccatgttgtcccagttggtgatgatgccatgcttgatggggtacttcagcgtcagaatgctgcgcttgctctgggcttcattgcccacgtaggagtccttctggcccatgtccaccatcacgccctggtgtccggggaacccaacggtggagggaaacatggcttggggagcatcgtcccctgcaaagccagctttgcacatgcaagagccattgtcaatgacgagcgcagcgatctcttcttctactgcgatggacagaggagtgggacagaggagcggcagaagaacaaggcactcacaagacttccttgggtaaagacaggaataattctcctgccagggaatccaaaatgatggggaagctggccatccactttaaactttattttaatttcactaggaaatgagaagtgaaatgttacgactgttctggaaatatggccctaaccagtaaggagaaagcttgtgacctctacaataaaaggaatgataaataataaattacttgagatttttccatgtttgtttcctgtattgagttttgaataataaaaaatgtaaataataactgtaataatacatttaagtaataaaaacgtttaagtaaattttaactattaaacatttatatttatttatatgaattaaatggtcaatgtacatttctttattcatataacttcaacaggctctcaagtat

SEQ ID NO: 480271 - DNA, 1130 bp, Homo sapiens
gataaacacatgacagatgtttagcgtgttacagatgaggaaccagactgtggagagtgagggtggaaagatggagatgcttgggaagtggagatttgcagaacataattcaatgtccttgagaaaggcagcctatctcatgaagattccctggatctcctgtgtagtgatggtagagagtggaagtcaaaggtactgtgctgccattggatggagccatggaaatgagcaagaatatcaacttcaactaacggatgactacatcattagaactagtcgagtgattgaagaggaaaggaagaataaagataccctgaataagtccctctttattaaaaagttcttagatgactttgactgtggggaccatctgccttctgtctggatcccagctgcttcttacagatgcacagattatattggatctcgagtctgtcaccaaaaggtagaccagatagcaccttgtgtgtatggtagaggacagaaacaggctttcaggttaacatgagagtttgaaagagttctttttctttctgtgccatcatgcattccacaagcaatgaatgaattgttgtttttcctgcagcaaatcagttgtcatgttttaaaaatggtttagccattccaacaaatatagatgggccatgctaactcgttgtaattttcagtcacttaaagatatatgagtttgagcatctttttgtttgcttgccatctttgtattttcattggtgagctcagctttttacacattgtcaattgggtagtctgttttattgttgagtttcaagatttgcgtattttcagtgcaagtttttaccccgatctgtattttgcagatatttattttcagtctgttgcttatctttctatttcctgaacaagattttactcagagtataagcttttaatatgagaaaccttaaattattaattttttttttaccgttgctgatcggctttgttgtcatttgttaaaacttgtggccaaatccaagatcacatacatttatgtctgtgctttcttctagaatttgcatagttttacatttccagttaatggctccttcaccattaaaaaaaaaaaaaaaaaatgagggggaattgctggcaagattgctgaataaaaa

SEQ ID NO: 480272 - DNA, 1103 bp, Homo sapiens
cgccttgctgtgggacagctgcagggagtgctgtttgacctggtttgcatgtagcatgccgcatgtgagaataagtgtctatagtcccatgaacaaaggcgagcttgccaatgacagctttattaataggacagtgaaaaaggagaagaaaaaaatgcagaagaaagtattccctcgggaaagaagaagaagaagaaggagaaggagaaggagaaggagaaggagaaggagaagaagaaggaggaggaggagaagaagaagaagaaggaggaagaagaagaagaagaaggagagaagaaggaagaagaagaagatgaagaaagaagaagaagaagaagaagaagaagaagaagaagaagaagaagaagaagaagaagaagaagaagaagaagaagaagaaaagtgcccactgaagcacactgaagctccctgtgtaaaaggaatagaaacgattttctggaaggcccacaaagaggcacaggaaaggcagaaaaagcaagaggcagacagaggcattagtgacgcaattacaggtctacaaaatccaggagttttgagctggactgctgaaagtttggcaagctccaggactcttcaggaagaacagcagagaaaagaaaacaatgcctcctcaactctgtccagccagtggtggcgaccactggaaggtggaatgcctgcagagacatattttgcattacagggcccgattttagataatcaacctttggggtccagtgggtctaggacaaaaggagggcagaaagctacagctttgcacagaaatgcagtgcaacttttaagccacatttcaactactgcggaaaaacaggcagcagtacagacagcaaaggaatttgaagatgaacaactgacatcctatagtcagtcagaaaataaacagaagcgaaagatgaaaatggatgagtaaagaagacagaattactatttccaatagaaagaaaaacagtgctgtttgaaaaccccaaatgaagccttggtaaacctacagatgaatagaaatgaaaaacactttctactgtgcatattatcaggcttcgaaagaaccagaacaagacttcttaattactctgaactgttct

SEQ ID NO: 480273 - DNA, 3182 bp, Homo sapiens
cagctgctgcatctcagttttttttctctctctctcctctctctctcctctctctctctctctctctctctctctctctctctctctctctctctctcccccccccccccctttctttctttctttctttcagatgttagggttttactctcttcccctaggctgcggtgctatggcaggatctccgctcagtgatatttatatttcatgtgagtgttcaacaacggtgacctcagaagaggaaaaattttgtaagcaaatggatagaataaaccatcctgtggaaaccactcagtctctctcccgagcttctgctgtcatcacccagagggcccataaacaaagtggccatgattgcaggggtgaagattatgcacgggtgcagcaaaatggacttttactcaccaaagctaacctggctatggccactgctgcatgccccatttgcaagcaacagagtccaacactgatccccagaattattgggtacagaaatcaaggtgtggaagtgaaaatgtccccgctcaccgtcacccctagtgatccactagcaaaatgtttgcttcctgtttcctttacattatgttccgcgggcttacaggtcttagttccagggggagaaatgttgccaccaggagacagaatgacatttccattaaactgacagtgaagattgtccccttggcattttgggctactcctgcctttcagtcaacaggctaaggaagtgacagtgttggctgtggtgactgacttgcattagcaagataaagtcagtctactattttacaatggaggcatggaagaatatacatggaacacaggagatccattagggtgcctgatagtatttaactgccctgaggttaagatcaacggaaaattacaacagcctaattttgacaggactgtgagtgatccagaaccttcaggaattaaggtttgggttactctaacagaaaagaaaggaagaaagcaagcaagcaagccagcaagcaagccagccagcaagaaagcaagcaagcaagcaggcaagcaggcaatcaggcaagcaggcaagcaggcaagcacgcaagcacgcaagcacgcaagcacgcaagcaaacaagaaagaaagaagaaaagagagagagggaggaaggaagaaaagaaggaaggaaggaagggaggaaggaaagaaggaaggaatagaggaagcaagggaggaaggaatggaggaaggaaggaaataaagaaggaaggaagaaaggaaataactataatccttgaaatctttgttttgctttggcttggttattataatggcttagcaacttttatgtcataagacatatttaatttttgccttacgataaatattatgcccattgtgcttgcataatgtagtgtgccaatccacaagtgtgtatgtcttttctgtatgccttccagctgtagtcaagtttagttctatcccaaaagccattcattgagttttcttaattgccacccccaaaatagaggctgcctagctttgctttttttttttttctttgctatactagtgttttacggaaatatttaaaaagtaatgggaaaagaaaaggggagaaaaataaatatatgctttactatttaatcattgactaactgaactgactttgctttactaacacttaccttaacttgaatcaacagaactttacaaaagcttcttaaaattcttctgatttatagaaaccaaagattgagttaagtaatcttgaaaatataaaatcaaagtgtgcttttcttatgtacaattttctggagagatgatctatcactgttaatttatcaaagagaggcctgagactctagattttaagatatttatcagcttttctaatctctcagggctagatgctagtaaccaccttaccaattccacttctagtcatgaaccaggcttagggtaaaaagaaagtaaaatctattgacttacagaaaccctagccactcacatggactgtctgttacctccatgagctcaatgtctataactgtttgccttccacggtctgctccagccacagtgacctggctgtttttcaaacaatttaagcagacgtctggtggaggtcatcaaacttgttgatcttgatgcatgcttgtgtgattattaccttattattttatttagatatttacttcaaagtcactttagagactaattattttatgcttgtctcacatgagtccaagctgtactcaatagagaattttacctcatgcattttatatgaaattgataggatcaattaatataaagcaaacaaaaaaccttacactataaacactaaaacaaacaaataaaaaatctagaaacccaaattaaaagtgtaacatttaacttcagcatttgaaacaacattttcatgggacaaaatttagatctcctaaataaaaataaactgagattagaaaacagttcatgcttcacaactaaaactgaaacaaaattgcagagcaggcagcgtcaaaccattcaaagaaatctcaaacaaataaaaaaccgtctacacccaggaaaccaatagttcaccaatagttcacatcaaccaaggaaacacttaatcaagagagacaattttaaaacagttaatgttttggattgtcatactgcctcccagacacagatgaagcctgcaaaactgaaatccacattttcaatttgaggccctgattcctgattctagaaggagtaaaacagcccttatgtgctaatttattgtgtttgttctagtctttctagagaataaacgatgaattgattagtcatttttatttctgttttgccaaagtcagaagtcactcttggttgaaaatgccaggaattggtcacaaacatttaggttcctgagaaccaacaatgcagttacttcatataattgacaatctgataatacatattcagttttttttttaataatagcttgtatactgctcttatacaaaatgctatttaagtggatactaagctgccaataactaagaagacaccttggagaaatgaagaacatttataacttgtaaaataatacacaagcagaaaatgtctagataaaaataagctcgagaaatctgtgtctaaccctccccccaccaaaataaagctattactattacctagcaaagataattactactattatgcttattatc

SEQ ID NO: 480274 - DNA, 2518 bp, Homo sapiens
agcgtcttctttcatcactcatggaactattttaggacaatttctgaggaagcttttgtttcaaattctttctcctgaggaggcaagagttgaggttactgcagaccatgatagatttgacgccagtaactcagataacttccactgacgtctgcttaaattgtttgaaaaacagccaggtcactgtggctggagcagaccgtggaaggcaaacagttatagacattgagctcatggagtttaatggaaatgtcattctgtctcctggtggcaacatttctccccctggaactaagacctgtaagcccgcggaacataatgtaaaggaaacaggaagcaaacattttgctagtggatcactaggggtgacgcgtaatgtcatcagtgtaacagacaagtgtgatatcttgcagccaccaaaagaaatcaagatctctctgaaaaagattaaggcacaaaggtcaggaagcaaatgtggggttctaccagcagctaagtgtgtctatgccaataatgcattctggcactgggaaaatgaccttaggatgactctaggtacacgctcgacccactaaattgctttacatatctcatttggaaaactcattgcatttattgattacacttgcatttttttttcctttggattttcttttgtaagagtattctaaattgtttgaagatacaataagatgtttaattatgtcaaataaacttaaaaggtattttcttggaaagacaactttttcttaagctatgtttctactaatactgtgtgactactttttaaatgagaatataaaatatacaatatagttatttgtttttacttagtgacacacctgtcaatacatgaagatctgtttatttctgttctgtgctacataacttggcattcaatgtgctctaatttatgcagtccacatctaagatggattgatgtataatgctacatggacctgttatcaacattatttcacaattacaataaggctactaaaggtgtaaaagcacctggttgaaaataaaaagtatttggttgatcataaggcagcaaaaagttaggctttagtggcagatcacatatttaagatgtagctattaagtctaatttgtggcatgcatgacaataaaacactgtcacacaactttttactgtatactgtaatatatagctctttctagtttctaaaacaagctgcagcttctcatgagagtttattgttctttcaggaagcggagatcctgccatagcaccgcagcctaggggaagagagtaaaaccctaacatctgaaagaaagaaagaaagaaagggggggggggggagagagagagagagagagagagagagagagagagagagagagaggagagagagaggagagagaggagagagagagaaaaaaaacctgtgagaattaaactcattagtatctgtgtgtctcttagtgtattacctctttaagtgctataaatatcagctgctattattattgcttatcatgtatcttcaatttactcacaccaaattctgcttcatagcataaaaaacacatcagaacagtaacagtcagatagtagtggctatatggaaccacaaaagcatcagtgtctgtgtcagtaatcttttgtaatttacaacaaataagtgaccttttacacctacagattctgcaaacacagatttcttaaaacctaaactgtactcagtgtaacaatttagatttgcttcttatggtaagtaatttgtgtttggcttgtaggagtttttacaaggtatcgaatgtgtttaatctatttcttcaatcttcttcttctttctttatgaaatcattagatctaatttatatgaatgtgctgcctttttggtttagttatttcaaggtaaaatatttaagatatctttaccttagaatattggtttttaatatatggaaatatggaagagcatttatgtgttatattaattattattttttactcaagcagtttgaaatatgagtcagtgaagcggtgaggtaatcactaagatttggcttaactaacaaatattttattaacagcttcaagatacaaatgtttttgactctatatataattttttttgaacagtagaattattttctgcatgagggaaaagaatttgctatgattagcatacaaattgcctctatattcatcattaccacaggattttacaccaaaaaatgtttgtgttcctgccagtgactggtacatggctttggatttcactcataatgtaattataattggtttgattgtctattatactgctttatatttcctaacagcaaaattattatttcaatttttaaatatgcgaaaaacatttttgcagtaattgtgtgagaattcttggtaaacataaaattctctaatctaaatatgcattttttaattaaaaattatctctgacttcaaaaaatttgtatcatagcttattctaatttatcattcagtattaagctttatctattctaaacaaaatctttactt

SEQ ID NO: 480275 - DNA, 827 bp, Homo sapiens
acaagaaccatagaactcaccatggctgcagaccccaagttctcctgcctgtttcccgtgcccactcaaaaagtacaatttctttgtctgaatgcggtattcagttgcataacagcatttgttgaatttactgatcttggttacatgtcaaaaatcaattgtctacaattgacaattgtagacaattgtagagaaagaagaagaagaagaaggagaaggagaaggagaaggagaaggagaaggagaagaagaaggaggaggaggagaagaagaagaagaagaaggaggaagaagaagaagaagaaggagagaagaaggaagaagaagaagatgaagaaagaagaagaagaagaagaagaagaagaagaagaagaagaagaagaagaagaagaagaagaagaagaagaagaagaagaaaagtgcccactgaagcacactgaagctccctgtgtaaaaggaatagaaacgattttctggaatctctttgtgagcatatatttgtgcacaaagaacaaagttctgtctatgtcggactgcgtttcttcatgtgagtgggctgaagctgtagctggagatttctgactggctcacagaaattaacagggctagtttaaactacaggcaaattctaaagacaactaatgagactagaagacaatggccaatgtaagatttgaaacaaatttttctattttccttgttcatttctgtaaaaaacaaatataataggcctgggttgacagcaaaatggtctataatttgatagttaaaataactattggcataaactgtgggccaaataattgctcttaaataggctttgtaca

SEQ ID NO: 480276 - DNA, 696 bp, Homo sapiens
aaggaggcggcctgggaggaagctgatgatgggaggaagctggcgcctactgactcaggaatacacaactgcccctcgtcggggacagtccaacttgctcctcatgtctgacgtgttgagtcaagatgagctgcgagaaaagctacaccaaacgttgaaggatcggggtgtactgggcacactcaaatatcaacttcaactaacggatgactacatcattagaactagtcgagtgattgaagaggaaaggaagaataaagatgactttgactgtggggaccatctgccttctgtctggatcccagctgcttcttacagatgcacagattatattggatctcgagtctgtcaccaaaagtttcaagatttgcgtattttcagtgcaagtttttaccccgatctgtattttgcagatatttattttcagtctgttgcttatctttctatttcctgaacaagattttactcagagtataagcttttaatatgagaaaccttaaattattaattttttttttaccgttgctgatcggctttgttgtcatttgttaaaacttgtggccaaatccaagatcacatacatttatgtctgtgctttcttctagaatttgcatagttttacatttccagttaatggctccttcaccattaaaaaaaaaaaaaaaaaatgagggggaattgctggcaagattgctg

SEQ ID NO: 480277 - DNA, 640 bp, Homo sapiens
caacagggaccccgccaggaagaagggagagagtgacgggcctccagaagagagggagagaagccagtggccccaggctctgtgaagtcggccagacgtccctccgtgccacctcgactttcaataacagtggccgctaggtgatgcccgaagacaaccgatgcttgcaagtgtcagtcggcacggaaaagaaacgaataatgagtctttctgtgtcagggtggaggttggggatggagtgcggaagaggcacaccccagtcactggcctcttccagatccctctcacatcaggtcgtttccgggcccagggagaactcccaggcaattcccacgactagcgaccagagccccacagaggacacagcctacgtttctgcccatgggatcttctggaacttccattcccccagagagaaaagaggaccacgggggcacggagtggcaaatacctgtcacaatggaacaaagtccgtgaaatccacgctaccagacacagcatggatttcccagagaggacagcttacaccaaattccctcctgtcctcaggccagttttcactcctgaagtacccatttctcagtcgtgttccgcaaagtcctctctgtcgtgaatcattcaaaaatttagttcagtgaat

SEQ ID NO: 480278 - DNA, 608 bp, Homo sapiens
ctacttcagacggtcttccagtgtgtgtttcactgaagtttaatggaagatgctgaaagttgggcattttccggtgagcccacttactattgcggggaaggggaaaaaaaaaaaaaaaactctggtggagagtctgtagcaaagaaaaaattcctgcagtgtgaaaagagaggaggcaacagccatacacaaagcaaggtgaaaataaatgagcagctgttgcggcaagccatcattgcttgtgaacatcctgctcaccggctcctgatgaaaacgattccattttctgtttttaaaagtttcaatactttcgatattacaactgctgattactcaccttcctatcccgtgtcaactcttcatctgtacacagttatgcaaacacaagccccttaccccatgaaaacatctaaatacagccagggccccaggtttgagggaaaagagctggattagaacattctttttcttctcatttctgtgatcataaaaaaaccactgtgtttcaagtctccccagccctgaaatatatgcacattggggattctgctagcatcggcttccaagcaatttctttgaatatataggagtcttgctctgtgtgaggc

SEQ ID NO: 480279 - DNA, 767 bp, Homo sapiens
cagggataggagtgggtcataagggcagaaacccgacttggagtgtgcgtgggaggagctgcggctggagggggagcccagactgatggcagacccagggcccactactctcctccaaattcgcgaggctcccattgtcatggctcacaggaatccaagaagagcaccagggacaggaggcagacatcctgacattgtgacaaggatgggcaaagtgcttacttatggtgatgatgatggtggtggtggtggtggtgataatggtgatggtatgaaggtggtgatgaagatgatggtggtgatggtgatgggtgatggtgatggtgctggtgattatggtgatggtgatgatggtggtggtgatgatagtgatgatagtgatgatggtgatgtgatggtgatgatgatggtggtgacagtgatgatggtggtgatggtgatggtggtgatggtgatcgtcattatggtaatgatggtggtggaaatgatggtgatgattggttatggtgatgatgttggtgatggtggtgatggtgattttgtgatggtgatggtgatgatgatggtggtgatagtgatggtgatggaagatgatgatgatgatgatgatgatgatggtgatatataacacatggtactaatcacagtgcttcccactaggcagtctcattccagagcctatgttcttaaccatcttactatactaattctcatgagtgttaagtataattattataatttttactgactaggaagaaatgtggctg

SEQ ID NO: 480280 - DNA, 737 bp, Homo sapiens
cacacgcagtaaaactaacctgtctcacatgggtctaaccataatgctttccagggcatgcgcaccgctctcaggtgaatccattccagtctgccttgtccttcgcaaagaaaagagagctctgcaggggcgatcacctacattctttggattcaatgtgggtttgtcacagatgcttggtgtgacaaattgcatggcttctaccacttcatttgatcagcctcctattgactttcagctaagtgctgcagaattgcttctcagattgtatctttccgcaagacaaagctatttcacagtctctaactgtcccattttgtggctgttaatttatacttacatgtttttcaactacttattctggttttctgtttatgaaagctttaacctgtgctattttgagggaaatactgatgcatatctaaactttaagagtgtttttcaccctggctgcagacacttggtgaataatttttcaggtgatagaaaaacccatcatcatgagaatgtagcaacttttattttgcagtaactgttaaaactgtagctgtggtgctcagtaaaatgggacctttcccttatcagtgcctgaattatattatgagcttcgtaaagttgtatcaatgaatgaatgattcataatctgggcactgcattctaacacttaactgaaaaaaaatcttagatctatcttccatgtaaaagcatatctaaaatgcaaatcttaatttgataat

SEQ ID NO: 480281 - DNA, 731 bp, Homo sapiens
cctgaaataattgaaccgggtcacagggcacagcacctgtgctgtgttatggggagctcctcctggtccttggtgccagcgggctacagcggccaactcaaaccacagataacagtggctgcccctccctccctccgggaactgggtccatctccagctgtttccagcctgctgccgctggccagctggaattctaagtcagtgggtcttaacttgggaatgcatggatatgtctcccactttgctggaattctcggggcagagtatgcaaaactcctggatttccatgcatgccccagtgagccagcgagcactaggctgagactccacacagctctgtgtttcagacccaagccatggtgcctgggcctacgaggggatctcctgatctacaggttgcaaagatccgtgggagaagcatggtttgccagacaaagtcgcacaatcactcaccgcctcacttggctgcgagacttcccatactattttgaagaggagtggtgagagtgggcatcctcatcttgttccagttctcagagggaatgctttcaccttttccccattcagtattatgttggctgtggattttctagtttatgtgccttaaggtgttcatagtacccatgaatgatctttattatttcagtggtgtcacttgtaatatcccctgtttcatttcttagtgaggttatttggatttttttctcttcttgtcttggttaatcttgcta

SEQ ID NO: 480282 - DNA, 718 bp, Homo sapiens
gcctctataatgaagtttaatgttgttgtctctgcagtagtgacaaggatcactaaagaattcattaagaaacagttaattttatattatgtgaaggaacttcacctcactaaaaagacaaaacttcttcctcagcattccacagagtgctctcagaatggggttctggtccctccacagtccagaactgcctggggccaggcccaccacatactaggcatgtactccagccacactatccaccagctcctcgacctgttaccagtgaaagtatctgttactgctgtcaaatctatcatggtctgcagtaacatcaactcttgcctcctcagaagaaagaatttggctgaggggaataaagtagcaaaagagactgagaaaagtttcacagcaaacccagcagttgccgatatgcccatgctccacagacccaatataggccagagggtgctttccaagcatttggagtctttagctgatgccaagagtggcttagggtagagaatcaagagaaagcatttggatctgtatatatgtttactttttttcttggccaataatggtgctctggttaatgctattaatttagccttctgagcagaagtcccagaaggaagactttcattttattataatcccatgtttatagggccgatttaaatgtttcgttatgtcatcaattgcctctctgggtggggggtgttgacggactagtacc

SEQ ID NO: 480283 - DNA, 522 bp, Homo sapiens
ggcggtgttgctctggtctgtactgaggagaaggcagctgtagccctcgggcaacacgagctgaacccgatggtgctcccagggtcagaaaaggcggactcatgctccccctgctggcagccagaagaactgcaagacccccatggtcaaggtgaggcagccgtgcgcccccttctggctgaactgcggcaccaaataaaagcagagttcagattgttcagtgccatcattttggaaattcaaacggaaatgttgcctattatcctgtttcgtaaattattatttattttaggttcaggggtacatgtgaaactttgttatgtaggtgctctgtcccagggagatgggggttttatttgtaagcccctgactggggctgctatcatttgtttcgaaaataccctacccggagagaagaaatctggcagtctggccacatcagccttgctgagctgcagttcaaacttctctgaggctttgtttacaccatgaggtaaagcagcctactcaagcctcagcaac

SEQ ID NO: 480284 - DNA, 729 bp, Homo sapiens
aggggcaggatgcaatgcgacagctgtaatctcgcgttgtttttcagtcgttcaccttccctctaccccccaagtaacctgaagagtctgcaaatgggtctggctaaccacccgtttcacttggaagctgaggaaagaaacatttttgtagaacacactgaccttcttgtctcatgggggtctctctctgctgcccctttcagtgagggtggaaagatggagatacgcgggaagtggagctttgcagagcatacttcattttccttgagaaatgcagcctatttaattggagattctgtggttctcctgtgtagtgaagatgactttgattgtggggcccatctaatttctgcctggatcccaactgctgctggcgaatgcacagattacattgaatctcgtgtctgtcatcaaaaggtagaccagatagctccttctgtgcatggtagaggtgagaaagaggttttcagattaatttgagaatgtgagttctttttttctccaccattgtgcattccatgagcaatgaatgaattcctgttttccctccagcaaatcatttgtcatgttttaaaaatggtttagccgttccaacaaatataaatgggccatgctatctcattgttgtaattttcagtcccttaaagatatatgagtttgagcaactttttgtttgctttctgtcggtgtattttcattggtgtgttcagctctttactcattgttaat

SEQ ID NO: 480285 - DNA, 693 bp, Homo sapiens
gtgattcagtctcacagtgcttatcagaggcgttctctgctcagctgttctctgctgtggtgaggcgcctatgctttgtatatgtctgaaattaattgaaaagctagtgacagattctgatgtcatttgccatgagctttattgttgtgcaggacctatagtgagtgtctgcatccaaggtgatcagacaaagtattgccaggacatacagaaaatcatccagaagcactgtgatattgtaagacacaagccatctccttactggttagggccatattatccagaaccgtcagaacatttcacttttcatttcccattgaaatctgaggagtgtgttttgaactctatagtgaaatgcctacaactacccagtaccatcaaaaaggtgacagaacacagattaagtggatatacaacacaaagaatgcagaccacaaaaatagctctggagggttgctacacaagtaaacaacccacaaactaaggaattgtggatgttaagaatttgttatccaaatatgctgaatactatccaatatttcaattcacttcattttactattctcaaagacctaagggaacccaggagtacagtgattcaaaactgaaaataccagtaaagacatacagattattttaaaaatgaaatcaataaccttgaagttactaggaagctgtgtgattgaaagtcag

SEQ ID NO: 480286 - DNA, 732 bp, Homo sapiens
cttttccgtgaggttgaaaagatggagatgttgaaggactggagctttgcagagcctaacttatttgatgtgagaatggcagcccatttaactgcagattctgggcttatcttgcatagtgaagggaagcagaggagagggcaagtgactgctacaccaggaggaatgcacatctcagttcagactggtcacctttccactgtcaatggatgcatgtggctggagagtccttctttacttaaagaagtaggtctagatcagctggctcatgaaattgtggtatttcagaaagaactgcagaaagcagaaaatgctatcatagctgagcatgaggagttcaagaaccacaggccagctctgcaatacaactgcaacatgcactgcaaggccacaagctatgcaaggctacaagttacgggcataactggtaatccgaccaagaagggctgcagacaacgagagtgtctcactaattcagaagaaacttacaacccaaccaacagagcatgtgagagtagcctgctaagtcagctcagaaggaaactggacgtagggaaagtggctcaccaccccaactgggaacatgggaactggtagcaggatggtgtggggaagtgtgtgaatggagaggcctaactaggctcatcagccacgaagtgaggaaccacaagtctcttagtgaagactgtactccaagccaaatgtgtggctgactaagactagttgtgatcc

SEQ ID NO: 480287 - DNA, 612 bp, Homo sapiens
gtaaagggtcttgggaagttaagatggttttcgcagttacagtgccatgtattggcttttcattgcttatgtattggaacccgcaatggttcctgcatcctgccgatcggtatagttgtgctcaccgtaacagcagcagaaacactagttttcctcctagaacacaaagaggaccgagcaagaggtccactgcagacactgtttgcttgggtaacagcagcggtttctgcagaacagcagattttcatgaaccgcgaatgatgctgtctgatcattcctctggaaattttgtctcagaggagtacccggccgtctcagagaagtttgatcgtctgaagccttcttctctcaactcatcaaagtcattctccatccagcttcattctgcctctggaccctctgctgaaggtctgttggagtttgctggaggtccactccagaccctgtttcccgaggtatgaacagcagaggctgcagagtagtgaatgttgctgaagagcaaatgttgctgcctaatcattcctctggaagtttcatctcagaggggtacctggccgtgtgaaatgtcagtctgccctattttggtgctgtctcccagttaggctactcagg

SEQ ID NO: 480288 - DNA, 763 bp, Homo sapiens
cagctgttagaattattttctttttctttcatgcatagccaccccagccagcagtggcaacccactttggtccccttccacgatgtcgaagcgttattctttcactcctcacagtaaattttgctgtggctcactctttgagtctgtgccatctttaagaactctaacactcactgcaaagaattcggctgtgaatccatatggtcctggactcgtttttgttggtccacctggtgcagagaatttggctgtgaatccatctggtcctggactcattttggttggcccctctactctaaccaaggagactcagagggcaaatactcatctagtagaatgggaaccagaggcagaaacagccttcaaaaccttaaagcagtccctagtacaaactccaggcttaagacttccaacaggaaaaaacttctctttatacatcacagagagagcaggaatagctcttgcagtactttctcagacttgtgggacaatcccacaaccagtggcatacctaagtaaggaaattgatatagtagcaaaaacctggcctcactgtttatgggtatttgtggcggtggctgtcttagtgtcagaggctaccaaaataataacaaggaaaagatctcactgtctggactactcatgatgtaaatgccatactaggtgccaaggtagtttatggctatctgacaaccacctgcttagataacaggcactactctttgagggacttgtgcttcagatatgcacatgtgtgtccctt

SEQ ID NO: 480289 - DNA, 677 bp, Homo sapiens
gtttgacacacagcagtgtcttcttgtgctttaccagttacatccctgagatgccatgatgaagtatggtaaagtgaatattgtcaccatcagtgaccacttcattgacatcaactatgtggtctacatattccggtatgattctacccatggcaaattccatggcactgtcaaggctgagaaaagaaagcctgtcatcaatagaaatcccatcaccacttccaggagcgagatccctcccaaatcaaatggggcaatgctggcactgataactgccatcactgctacccagaagactgtggatgacccctctgggaagctgtggtgtgacacccatggggctctccaaaacattctctctgtctctacagacactgccaatgctgtgggcaagatcatttctaagctgaatgggaaattcactagcatggttttccatgtcccaccacctacctgttgatgtaatattatagtgttcgttttaaatcttcttaagttggtaatatgggtgtttagtgctacaaatatttaccttaacaccgctttagctaggtcacagagatttttacgtgttatatatttattagtattaatttcagggaattttttgactactgcctaactttattgtttcctaaatgttatttaaaaatgtattatttaatttatatttcatt

SEQ ID NO: 480290 - DNA, 744 bp, Homo sapiens
acgacagccattttgccacactatggtgaattccatgccttccacccctcccagactccagcactgtaggggaaaagcacctactaaagcctcagtaattgtgggtatccctatccccaccaagcatgattatttcaggtccacttcagactgctgtgctggcagtgaaaatttcaagccagtggttctcaccttgctgggctctgtgggagtgggacctactgagccagaccacttagctcccttgcttcaaccccctttccaggggattttgctcttgccatatgatgtgcctgctctcagtttaccttctgccatgagtaaaagctctctgaggcctcctcagaagagactaagtggttgtgaccaaaatgctgacagtgatgacagtgaagtccaggtttataagaagaaattcttaaacagcaaaacatctgagaggaaaaatagtggcttctaacagtctatgtttaaatgtaagagcaaagcaatggtttaaaggtgaaagctatattttttaagcaaaaggagagtgtaaaattttggaaaatttgcagcctagtcatatggcatagaaaataaaatagcattattgggaggaggctgtggagaaaccacttgatagagatgttagcataagtaaaataaagtcaacttctagtagtagagacaatggacaaaagatcttgaaagcctttcaagaatattttctgcaggccctcccttaaaagccccaaagtcttt

SEQ ID NO: 480291 - DNA, 1101 bp, Homo sapiens
tttcctgttagctattctgccaccatgctgcaccatctatatttagccttgtctctgttctcaggccctccaccgaagaataaggttttatccaacaatgcaagcagccaaaagccgactcactcaagctgcataccattgttgaggctgcctgataagcagcagaaagttaatgagagcattaagacagacatgctgtgcacagacaaggaagaggagtgccctgctgcctccctgctgcagaaatacaccaataacagtgagaagccatctgggaagagacaatgcaaaaccaagcacttgatatctcaggacctgaggcaggggttcctgctaacagggaagtgctactcaactgtcccaagattcagaaagcaacttgaacccagttccaactatgatctgacttcatccaagcaggagatgaagcccttcaactgcttgcaagagttgctaccagcttcccagtccatgaagctgccacactcatgttcccctcaggaaaccaaccaatctcgcccagtgcagctgagagcaaggagaattattgtcgataggcatgctggtgagactctcctgcagcaggcagcatggcttggctatgagcttctggagactatcatcttacactctaccttcatgacatcaacttttcctacatatgagcctctccatggtgcagttgaaaatgattgtttggaaattgtccgcctcctcctttcctatggcgctggccccactttggccacctactcaggcagaaccattatgaaaatgacccacagcaaagttatggaaatgtttctaacagaaccagataatggaggggaatccaatgttttggcagaccccccaggaccagaggaccaggatgatgacaatgaggcttgcagtgatgtgtttgaatttaaattttcagataccccctcttaccttgttaaaacattcaagtttcatctttgcaggggtgagcatggctgctatgtcactgaaaattagctgagctgatttgtgggtagtagcaggacttaaagctctttttaagtagatgagggattgctactgattcgtaaatgaatgctgtagcattgaacagtttct

SEQ ID NO: 480292 - DNA, 3550 bp, Homo sapiens
tctgggaactaatgacctcacaccagggaggtcaatttcatagtagagagtgggatataggaaaaaagtatgaaattttaaaacgtgctaaaagattactgcaggctgatgtcatattgaactacttggcagtttctcttatgtactgctactgctgttttgaaggagtgtcccaagtaacatctatgttgttgctctgccaaggtggatgcaaattggcttatcagattgacggcctggaagcactgatcatggaccacacaggcctgaaacaggaagggctcctacaaaagcgtaccacggaggatggccatcagtccccggaacgccatcaattcccacacctatcctcatattcagaacaggaaacaaccagggtgccatttgccaaggcagttgctagtggctttccaggcgatacaactctcgtgttctgtgcctcccctcagccctcaccccaggtccaccttcccacccaggctgttgcagacatattctctgagttccatgagcattatgccaggatctctaccgctccttcagtgacactgtcaaaggcaaacatgatgggcagtgagttccccacagcgaggctctccaatagcaaatatcctgagaccctggaagtgggtgagagtgctcagccagtccccatgtacacctggaagacagtggctcaagacaggaaagatggtgtctcacctcctctgttagagaagcagagtattaccaaaagcatctcaaataagccagtagagttgtcttctaaagtggtggaggtagatgcttccaaagctgatcacatgaaaaagatggcttccatgggcctggttcacagcatggctggaagtggcttagtgctctccagaagtgagattctgaaagagatatcttctctaagaaatggctgtgctatctatagatctgaatttattagcactgatccatcatcctgggtagtacccaggccaagaactaatgaagagaacaatggtgaaagcatgttgaaaaacaaggtgatggactggatgataatacaacagcaaagttctttttacctttgcatgaatggcaaaggaactatgatccctaatgttttggggtcagtgtcctgtgcaggccaccccacctctatattaactctatattaccagtccccaaccccacatagggcagatggcactaggaccaacaggagctctgtggataccacatcatccatcattcagcaagtgggccaacctccaaccgtgcctgtcaagcaaagcagcagcactagcagcaaggttgccaaagccagcagcccagaactgagtttcaaagcaaataagaatggccttcaaccaagccccctatttctacctccaaatgaggctttcaggcccccatcaatttcccaccccagaagttactttccttacccagtacctaaggccactgctataagacccttctccttacatgacaaagggcctgtctaccctcatccagttttgttgcccaacaacagtctctttctggggtgtcttgcctcaaagcctagactgccttatgtggtgcccatgggccatccagagtttctgatctaccaagatgccctgggatttggcatggtgcaacccatgttgataacacacaggcccatagagatcaccaaaaaggagaaaccagagaggaggtcacattcccaagaaagagcctgccgcaaagacccaactctccagaatcagttttctgagatgctggaagctagcagtacagcgtttcatccagaagtccccaatgacagtctaaaactgaaccccagctggaatcaagactccaaccaacaaagagaaaaaagaggagaaaccagagaaagatcccattcccatgaaagagcctgccacaaagacccaactgtccagaatcaattttctgagatgttggaagctggcagtacagagtttcatccagaagtccacactgacaatctaaaactaaacctcagctggaaccaagggaagactgttagcagaaataaaaagattgtttacatagaccttctccaagaagaaccagatgccaaaactgaggcaaacatgtccaaaccatgctttacagtgaaaaatattggtcagaatgccaagcctgccaagcccccaattgtcaaggcatccctgcagcagcatggtgattttatcatgctaagagaggagttggggcacattggtgacttgcatgaagcttatgctctcaaacggactccagccaacaaagagaacatagggatgccagtttcaacatcattcctggagccaactctagtgagtgatggtcatgctgtaacttttggtaaaatccaagagtatcccaaaccatattgccttggcagtgccccactaagtatggacataatctctacttacaccaaagatggagccaatgaggccaaatcaagtgatggcaaacttctgaaaccaaagccatctaacctggtaaagagagtcaccacctcagcaggttgcatggctgaccgactcaagtgtgttactactgaactgtatgcagattctaaaaccaaggacgccaagccatacaaattcagcacagctgactcagagaggtggaaaggaaatcaggacaaaaagccaaaatgtcttctggaggaggatattgccagccagaataactgtgagagatgtagcagacctggggtgtgtttggtcgcaatgcctgggcagaaattattggctcaggaacttctcttccaggagaatatgcctgaatgctttgtagattatcttgaattagatacagagaaagttgatgcccgtgatggagagggcataagttataacaagacccctcttcgcagcaccttaagtctgcccaggttctcagccttcctctggcagttgtttccctctgctgattttgcaggcaactgccatgtcctggaccatgggccctatggaagagatgattacttctgcccattaagggtttaggtttcttttgacatgctgtctcccttccctccttcttcatgatctctgctgttggtccaagtgaatattggtgttaccacttcagtagatgacattttgggtatattttgtgtcttcatctcatcagccttttatttcaaaataatgacctcagcacgtattactgtagagatatttatgccggtcctggcttgattggatcatgctgctgaaagaaaggactgtaatatttttttttaaaaagatagcattgatgtctcatcttctttcttatttgtctcattcccctaatatacagagatagaaggagagaattatgagtgtggtgtatgtctaactttctgctttgcttgctgctcatcttcagtgtatccttcctttggacaagtctatttatgagaacttgatattaacaatgtgagaactccagtttctaaagaagcatctgtcaatagcagattaccttggcatggtctcagctgttccctgaatcctgccttctcttggtgatttttgaattcacttatgtattctggttttctctcctgctaggcaagcat

SEQ ID NO: 480293 - DNA, 1645 bp, Homo sapiens
ctgcgcttttccaacaggcttaaaaaacagcgcaccaggagattatatcccgcacctggcttggagggtcctaccccacagagcatcgctcattgctaacacagcagtcggagatcaaactgcaaggcggcagccaggctaggggaggggtgccagccattgccgagttcgttgtgtgattaggtaaacaaagcagtgggaagctcgaactgggtggagcccaccacagctcaaagaggcctgcctgcctctgtaggctccacctcttgggggcagggcacagacaaacaaaatggcaattacctgatgacccaaaagttactacccttgagttcttttctgggcaaagcaaagaacactcccagactaagccccaatttggggctcacctgcattgtatcagtttggtgtccaacatgggacaaagaagaatatgacagtgtgaaagttggtgatggcgtcatcagtgaggtgatgtcaagagaagacaaatttgtgagaaaaggagataagatgggaagaactttattatgtgcaggctttttggccctctatcgggatcttaacctaagggctcgctgtagaatgtgtctggcttgtgatactctcagacatccagaagctgcattagatatgctacaggacctcctagtagctgctcccctgccttgcatcctggggatgaagctgactgatcatggtggtgaagcttttggatgtgctgctgaatttggaccctcagctgcaggtctgttggaatttgctggaggtccactccagaccctgtttgccagggtatcaccagcagaggctgcagaacagcaaatattgcagaatggcaagtgttgctgtctgatcctgcctctggaaacttcatctcagaggagcagccagctgtatgtcagttggctcctactggcagatgcctcccagttacgctactcagaggtcagggacacacttgaggagacagactgtccattctcagatctcaaactctgtgctgggagaaccactactctcttcaaagcggccagacaaggacgtttaagtctgcagaagtttctgctgccttatgttcagctatgccctgcctctagacatgaagtctacagaggcaggcaggtctccttgtgttcagatggagtttttgtgtgggtgtcttttttgtttgttagttttccttctaacattcaggaccctcagctgcaggtctgttggagtttgctgaaggtccactccagaccctattttcctgggtatcagcagcagagtctgcagaacagcagatattggaatcagaggacagtacaactgactgtgagggaaatgttccaatgtgaatcacagatgcctctgctgcacaaaagaagtcacacaaggaagtggggtagcaggtggcagccttgccatgagtgtgatcaatccaagagtggagtcctgcaatcttcactgccaaggggttggagagaaggatggtgtttcaatcctcgaggattaactccttttgtaaaagatgaagaatgtaccatttggcaagatgtgcatcgctgaataatcactttagcttctttccagtgtgaaaaggttccaagggggaacaaaccagagtacacagttgtcccattgttactctgatgcttcc

SEQ ID NO: 480294 - DNA, 637 bp, Homo sapiens
cagccaaagacctttagggagctggcccctgtgccagcacctggaactgctcatccatcatagccaatatggctagctgtaaggaacaaactctggacacgccgccgttaagaactgtcacactcatctcgagggtccgcggcttcattcttgaagtcagtgagaccaagaacccaccaattctggacacaggagggcctccatcttccagaccccagaatagtagatccactgacagcttgaattttgttcctggagaagccacagatactgaatgccagctggtggaaacaggagcaaagcttgatttacatgatactgacacaaggactaaccccactgttcccagaggcaccgggccccagatcccaattgcaaaacttttagagtcttcttcttttagcactaattcactggggcagagtaagtccagtcctgtgctcccagttgtggctgctctgaaagagaagactatgggcttcccatttgaccaaggaaagcttctggcattgccccagttgggagtggtgcctggagctgatccctcatgaagtttctgaatggtttcttatggagttgctgtttttatcaaatttagacctgcattgatctgcccaatacttccccttcctacttc

SEQ ID NO: 480295 - DNA, 542 bp, Homo sapiens
gctgtggcatgccaccgagctgttatgctctccaggcataaggacatgaaggcaataaggagattttctcctcagacgccatccatggctccccatgggaggtggaagggctccagtgctgttttaattgctgaccacacagaccaagtggagaagggaatatcgcagccctcttgttgtgctccttgtccaggggaccagagaattggaggcttgctcacggacccgagctctcaatctccacccaatttactggtttacaagctctttgttcttagaggccacccatggctcccatgggtgtctcacacaggggagaagaagtcatctggcatcccagaaactctctttcccacagagaatgagctatcttgttctggagtcctagcaatgttcaatgatttctgtcagagaacccaaaagcctcctgcaaagtgcaaacaacctcagcccccattaagagaccaagacccacaacctgggttgcagccagcctacccaaagtcccttgtccttcctgaaatccctggaggccaataaat

SEQ ID NO: 480296 - DNA, 851 bp, Homo sapiens
tccttgagtctagcgcatgcgcattcgtgaggcaggcaaggcctccaggctagcagaactgtcaggctgcctaagcacaggaaaatgtacagtcagagccgacctggtgcagatgaggttgagagagtatcttggaaacgtctgtggtggtgccaagtctgaaattgtgtccagtagtgctgttaaggggcactgtgtattccccttgaaagcaaagaaaaatcaaggctcaactgagagaaagagctgccttatggtgaaatccaagcaatgttcaaagactcctgtcagaggacccaaaagcctcctgcaaagtgcaaacaacctcagcccccacaatgagacaacaacccacaacctggagtgcagccagcctaccccaagtcccttttgctccctgaaatccctggcagccaaaagatctggggtgagaggcagtgcaatgcagcaacaacccaatgaaagagcccctccacaatgagaaaggacttgaagatgaattgaaacagaggctagattaccaggcaatatcagacatagctgcctgcttctcatcatacaggaatcttgcagccctctgaaaaataagtgggagaataggagtttcctttttggtggctgtaactgacatttacagttttaaaagtatcaaagctgcccagtcattaaaacacgacagtgtttagaaggaaacactcacacaatggattcaaatgagggtcgtcctccatgaactgggaaacctttattgtggtagacatttagacagacccaggaaaacctaggccaatgagggaaatgtaagtgaggagaagaggagacaagtgtgaaggtcacatcccaccaaacat

SEQ ID NO: 480297 - DNA, 2231 bp, Homo sapiens
tgccctgggcacacgggaggcctaccgccatggtcgccaatgcagtgatccatgtgcactgctttgctggtgcagaggccctcacaagtgcaggggtggccgtggtgcctgctagcggggctctggaagccagggccttggcatcctactccagggctgctgctggaggctgtgcaggagaggatggcctgtgcacagagcaggaaggcaaccctgggggaagaggcatgctagtgggggatgacatcattgcagagatggaggtggtggccaaggaggaggccaatgtggagccacagcaggaggacctgcaggcacagcctggccctggccccagtacgccccggccagcaacagactcgctggacgtccttcacttggagcgcagctacatgaatgtcccaggctgcagggcatccccggcttctgggccagagccatatccttgcagctgccaattcgggatgctccatggggagagccaggcacagccctgtagctacttctacgcacagcagttccatggggtggacacatgcacccctcagggagaccaggagaaggagagaccacacacccagacagcagcagagcctgtccagcacccagcacaggagggcctcctgcagctcagaaacactgagcaagtagttgcctcacacaacaacaccctgcccgcaaccccctgccaacttcttcagtgccagcccctggtcagagcaggttgtctgggcctgtctccacccaccaccaagaccaccacagctctgatggtgccctacacgccagagagagacagaggacctggaagggaaggtgccctgccccacactctccgtgctcttgcaaacttgcagggtgtttccttgcacgcccacccaatcatctggcggctccttgaccagaggcagattgtgcagcacacccagatgttggccgggatcacaaatgatgatgaagtcctgctaagttacgtatgtgatggatttgcagggaaggggaggaacgcaactatcccgggtaccggaggcaggatgaagttttccctttatcacaatctttacttccacaatgaagtgatcattcaagagtattgcttcggcatcctcgacaagagaggccactacacagggaatctggagaaccacactgggctcacagtattgtgaataggttaaaccttgtatagtattgtcattctctctttcataaatttttgaagaactctgatactgtttccatccccccacccctgaggagaacatgcagatagttccaaacaattgtggaacgtaatattgcacatatgaaaaaaaatgcagtgttaaataaaaagtagtggaattaagaggagtcattgcttagtgaattaaaacaacacacaaattgagaagaaaagacagtgatagaaaatatattgtctattgatttaattcagaataattttcatttttgtctattagcattaaatagtaccattaacataatatcattttgtatattgtcttctaacatgtaagtggtttttattttgtatatttggaaacctgatcaaagattctttatacattttattttttccgaaatttgctacctaatagctagctaaatgctagttgcctgaatgcctctcactaagttgtttgtcttttcctaatacatttaatatgaacttggtgtgtagtttgttggcatctttactaaatctacaggtgttgaagttgttcagatctcagtcatggatcctcttgggttttctcaaggctaaaacaccctttctatgctgaccattaagaaattctcaacttcaggccagatctttgttctaccttcagacttggcatatccaacttcatgccttacatctccacataccaaaaccagaccttcctttcatccccaaaacatgtttcctcctacagtattccactatttcagaaattcacagcaccaaataccctgtatttcaagctagaaatgtagaggatgattcttcaggcagccttttctcaatgactcttcatcatttacatccaactcttcacaggttgtgtgtcctctctgagaattacatagtcttagtaaatgaagagtggcccgtaagtaaccttcaatcgtccagtttttttttcttcaattcacgccagtttctctacagaacagctggagctctgcaatgtcaatgttggagtaagtaccattctctgccagtattaccattttatttatga

SEQ ID NO: 480298 - DNA, 1482 bp, Homo sapiens
agtggctgtgccgcccagggagacgcccaccgccctcccattgactggccacgacgggaggaaggggcgcctggaagcccggcgcatgcgccctgagggctcgctgacctaccgggtgccagagaggctgcggcagggtttctgtggcgtgggtcgggcagcacaggccttggtgtgtgcgagtgccaaggagggcaccgccttcaggatggaggctgtacaggagggggcggccggggtggagagtgagcaggcggctttgggggaggaggcggtgctgctgttggatgacataatggcggaggtggaggtggtggcggaggtggaggtggtggcggaggaggagggcctcgtggagcggcgggaggaggcccagcgggcacagcaggctgtgcctggccctgggcccatgaccccagagtctgcactggaggagctgctggccgttcaggtggagctggagccggttaatgcccaagccaggaaggccttttctcggcagcgggaaaagatggagcggaggcgcaagccccacctagaccgcagaggcgccgtcatccagagcgtccctggcttctgggccaatattgcaaaccacccccagatgtcagccctgatcactgacgaagatgaagacatgctgagctacatggtcagcctggaggtgaggccaggaagactggggctagagggtttagcgggggaggaatacagggcttctcattccactccaattgagtggtatccggattatgaagtggaggcctatcgccgcagacaccacaacagcagccttaacttcttcaactggttctctgaccacaacttcgcaggatctaacaagattgctgagatcctatgtaaggacctgtggcgcaatcccctgcaatactacaagaggatgaagccacctgaagagggaacagagacgtcagaatcaatgagaagtaaagctgaaaatcattcagttcagtctgtggcacttgattccacggctgtcaaccccaccggcagtcatcccgccaaccccatgagattgggctccctgaatatgaaacagttccaacacgagcatccatgttgaccacacgctactagagtgctaacattgctgtcccgtatagactccagtcagcacagcttctgtgagaagagctatgttgtttcagggaagagggtttgacagtcaaagttcctgaatctgttgtggtgcctgcaatatgcattctacacctcctgctcggtgtcaaagcagttgagctttgaaaatctatcgcccggttttgtccctgctcctatgcagacctctgaagctctggagcgggagtcttgtcctcctctgactaccgtccccctgacccacaaacacaggagaaacaggtgttctaagcaaattattctgaaaacagtcggaacactttggccccctcaagctgccctctatcctactgtgtgcatgtcaaagacactgtggtccagtac

SEQ ID NO: 480299 - DNA, 1284 bp, Homo sapiens
gagtgccaaggagggcaccgccttcaggatggaggctgtacaggagggggcggccggggtggagagtgagcaggcggctttgggggaggaggcggtgctgctgttggatgacataatggcggaggtggaggtggtggcggaggaggagggcctcgtggagcggcgggaggaggcccagcgggcacagcaggctgtgcctggccctgggcccatgaccccagagtctgcactggaggagctgctggccgttcaggtggagctggagccggttaatgcccaagccaggaaggccttttctcggcagcgggaaaagatggagcggaggcgcaagccccacctagaccgcagaggcgccgtcatccagagcgtccctggcttctgggccaatattgcaaaccacccccagatgtcagccctgatcactgacgaagatgaagacatgctgagctacatggtcagcctggaggtgaggccaggaagactggggctggagggtttagcgggggaggaatacagggcttctcattccactccaattgagtggtatctggattatgaagtggaggcctatcgccgcagacaccacaacagcagccttaacttcttcaactggttctctgaccacaacttcgcaggatctaacaagattgctgagatcctatgtaaggacctgtggcgcaatcccctgcaatactacaagaggatgaagccacctgaagagggaacagagacgtcagaatcaatgagaagtaaagctgaaaatcattcagttcagtctgtggcacttgattccacggctgtcaaccccaccggcagtcatcccgccaaccccatgagattgggctccctgaatatgaaacagttccaacacgagcatccatgttgaccacacgctactagagtgctaacattgctgtcccgtatagactccagtcagcacagcttctgtgagaagagctatgttgtttcagggaagagggtttgacagtcaaagttcctgaatctgttgtggtgcctgcaatatgcattctacacctcctgctcggtgtcaaagcagttgagctttgaaaatctatcgcccggttttgtccctgctcctatgcagacctctgaagctctggagcgggagtcttgtcctcctctgactaccgtccccctgacccacaaacacaggagaaacaggtgttctaagcaaattattctgaaaacagtcggaacactttggccccctcaagctgccctctatcctactgtgtgcatgtcaaagacactgtggtccagtac

SEQ ID NO: 480300 - DNA, 1503 bp, Homo sapiens
gatgggcagctcggcgtcgatgtgactctttggggaacaaaggggagttgccacggaccagtgtggctgtggaaagccggagcaggcgtgggtactattgtcctgcatgcggcagagaaacccttggtgatgccgagcagcagacgtttggggcatctttttgaagagcagaagcgagttcagagcggaagaggtttttcagtgaataaagctatttttaagggaattgcaaaccacccccagatgtcagccctgatcactgacgaagatgaagacatgctgagctacatggtcagcctggaggtggaagaagagaagcatcctgttcatctctgcaagatcatgttgttctttcggagtaacccctacttccagaataaagtgattaccaaggaatatctggtgaacatcacagaatacagggcttctcattccactccaattgagtggtatccggattatgaagtggaggcctatcgccgcagacaccacaacagcagccttaacttcttcaactggttctctgaccacaacttcgcaggatctaacaagattgctgagatcctatgtaaggacctgtggcgcaatcccctgcaatactacaagaggatgaagccacctgaagagggaacagagacgtcagaatcaatgagaagtaaagctgaaaatcattcagttcagtctgtggcacttgattccacggctgtcaaccccaccggcagtcatcccgccaaccccatgagattgggctccctgaatacctctgaagctctggagcgggagtcttgtcctcctctgactaccgtccccctgacccacaaacacaggagaaacaggtgttctaagcaaattattctgaaaacagtcggaaccctttggccccctcaagctgccctctatcctactgtgtgcatgtcaaagacactgtggtccaatcgtgctgaattatacaggctgtgtaatgcttcttccactgaatatccgtacacgtgggccacagatgctaagggcactgacaaatttgcaccgtgcctcagtaactcggaagcacatctgtgatttgtaccgacagggacttggtgtcttttccctctgtgcctggaatttctatctttcaactcatcatcagcattcattgggattttcatatatatatatatatatatatatatatatatatatatatatatatatatatatacctatataagaatacctatgtacacacatatatacgtatatacatgtatatacgtatatatgcacatttatatacgtatatacatgtatatacgtatatatatacatgtacacatatgtatttatttctcaagttacgaaacggcttgcattctttcctgtgtcatgaaaaagactttgctagaaaagaaaagcactgctttataataaaatattttatttgcatttattttgttaaggcattttaaaaattgtatgtttgtttaaaaaatgtcatatgaaatgatacatatttacaactta

SEQ ID NO: 480301 - DNA, 1045 bp, Homo sapiens
gagtgccaaggagggcaccgccttcaggatggaggctgtacaggagggggcggccggggtggagagtgagcaggcggctttgggggaggaggcggtgctgctgttggatgacataatggcggaggtggaggtggtggcggaggaggagggcctcgtggagcggcgggaggaggcccagcgggcacagcaggctgtgcctggccctgggcccatgaccccagagtctgcactggaggagctgctggccgttcaggtggagctggagccggttaatgcccaagccaggaaggccttttctcggcagcgggaaaagatggagcggaggcgcaagccccacctagaccgcagaggcgccgtcatccagagcgtccctggcttctgggccaatattgcaaaccacccccagatgtcagccctgatcactgacgaagatgaagacatgctgagctacatggtcagcctggaggtgaggccaggaagactggggctggagggtttagcgggggaggaatacagggcttctcattccactccaattgagtggtatccggattatgaagtggaggcgtatcgccgcagacaccacaacagcagccttaacttcttcaactggttctctgaccacaacttcgcaggatctaacaagattgctgagatcctatgtaaggacctgtggcgcaatcccctgcaatactacaagaggatgaagccacctgaagagggaacagagacgtcagaatcaatgagaagtaaagctgaaaatcattcagttcagtctgtggcacttgattccacggctgtcaaccccaccggcagtcatcccaccaaccccatgagattgggctccctgaatgtgaggagccaataacgtatgtagctaacaacagtacgagtgcattttgtgctcttgcaaagtctagtgaggctctattctccctcgtgattggcactgcagattgtatctggagcccagggcccctaaattttctgtggcctcttcagcatagtttgcctaaggtttagaacgtaaagcgaatatagttgc

SEQ ID NO: 480302 - DNA, 1445 bp, Homo sapiens
gagtgccaaggagggcaccgccttcaggatggaggctgtgcaggagggggcggccggggtggagagtgagcaggcggctttgggggaggaggcggtgctgctgttggatgacataatggcggaggtggaggtggtggcggaggaggagggcctcgtggagcggcgggaggaggcccagcgggcacagcaggctgtgcctggccctgggcccatgaccccagagtctgcaccggaggagctgctggccgttcaggtggagctggagccggttaatgcccaagccaggaaggccttttctcggcagcgggaaaagatggagcggaggcgcaagccccacctagaccgcagaggcgccgtcatccagagcgtccctggcttctgggccaatattgcaaaccacccccagatgtcagccctgatcactgacgaagatgaagacatgctgagctacatggtcagcctggaggtgaggccaggaagactggggctagagggtttagcgggggaggaatacagggcttctcattccactccaattgagtggtatccggattatgaagtggaggcctatcgccgcagacaccacaacagcagccttaacttcttcaactggttctctgaccacaacttcgcaggatctaacaagattgctgagatcctatgtaaggacctgtggcgcaatcccctgcaatactacaagaggatgaagccacctgaagagggaacagagacgtcaggggactcccagttgttgagttgaatatgatggagcatcagattttacctaatacagcagaactcctaaaaagttacagccatatgcaggacggcagtactcagcatggtcttatgcacaggaactaaaggaaaaagagatcgagtcacaaaaattcaggaagagggggtaaatgtggattgtatggaatgaaaaataaacattctcaaggatgtgtgactctgacttctgaaacatcaacgtgagaagaaatgggcatgtaaggtgtatggagggactgtgggaaaggtgacagaggcatgtgggaaggcattcaggatacgcttttggcagagatgactaagggaaaacagaaacttacagaagtgaggggaaagggggtggattagtggaatataagattgttggagaatccatccatggactctcttgtcacttgatgacccaggatatggacactcttgttgatgtttacatctttagttgttttaagcttttctccaagattctgtgttaggtgaggagccaataacgtatgtagctaacaacagtacgagtgcattttgtgctcttgcaaagtctagtgaggctctattctccctcgtgattggcactgcagattgtatctggagcccagggcccctaaattttctgtggcctcttcagcatagtttgcctaaggtttagaacgtaaagcgaatatagttgc

SEQ ID NO: 480303 - DNA, 1460 bp, Homo sapiens
agtggctgtgccgcccagggagacgcccaccgccctcccattgactggccacgacgggaggaaggggcgcctggaagcccggcgcatgcgccctgagggctcgctgacctaccgggtgccagagaggctgcggcagggtttctgtggcgtgggtcgggcagcacaggccttggtgtgtgcgagtgccaaggagggcaccgccttcaggatggaggctgtacaggagggggcggccggggtggagagtgagcaggcggctttgggggaggaggcggtgctgctgttggatgacataatggcggaggtggaggtggtggcggaggtggaggtggtggcggaggaggagggcctcgtggagcggcgggaggaggcccagcgggcacagcaggctgtgcctggccctgggcccatgaccccagagtctgcactggaggagctgctggccgttcaggtggagctggagccggttaatgcccaagccaggaaggccttttctcggcagcgggaaaagatggagcggaggcgcaagccccagctagaccgcagaggcgccgtcatccagagcgtccctggcttctgggccaatattgcaaaccacccccagatgtcagccctgatcactgacgaagatgaagacatgctgagctacatggtcagcctggaggtgaggccaggaagactggggctagagggtttagcgggggaggaatacagggcttctcattccactccaattgagtggtatccggattatgaagtggaggcctatcgccgcagacaccacaacagcagccttaacttcttcaactggttctctgaccacaacttcgcaggatctaacaagattgctgagatcctatgtaaggacctgtggcgcaatcccctgcaatactacaagaggatgaagccacctgaagagggaacagagacgtcagatgaaacagttccaacacgagcatccatgttgaccacacgctactagagtgctaacattgctgtcccgtatagactctggtcagcacagcttctgtgagaagagctatgttgtttcagggaagagggtttgacagtcaaagttcctgaatctgttgtggtgcctgcaatatgcattctacccctcctgctcggtgtcaaagcagttgagctttgaaaatctatcgcctggttttgtccctgctcctatgcagacctctgaagctctggagcgggagtcttgtcctcctctgactaccgtccccctgacccacaaacacaggagaaacaggtgttctaagcaaattattctgaaaacagtcggaacactttggccccctcaagctgccctctatcctactgtgtgcatgtcaaagacactgtggtccagtacggtatccctatagcggcaatggggcaacagattggtgtgtgcactctgggcaactcagattaggaaacgtctggggacttgcctataacgaggt

SEQ ID NO: 480304 - DNA, 1593 bp, Homo sapiens
actgaatatccgtgcacgtgggccacagatgctaagggcactgacaaatttgcaccgtgcctcagtaactcggaagcacatctgtgatttgtaccgacagggacttggtgtcttttcgtgtttaaagtagcacgtgtgtgtttgtggttgctctcctccctgagccttggcttctctatgtgtgtcctaactccaggacccacaggcctgtcaacccccagccctgggctgcttccctggcctcttctctgttccctctctgagggcctaactcccttgggtagtgctgcagaatatagagccacaggccctggctgatgatctggtggactgggcaaattggtcgtgacaggtcaggttctggttcaaagccaattcctccgatgccaaggaatgtcgaagaaggcagtgacctgcgggaaactcgggctttcacctgcatgaccctagaaccactggactgcagtggagccagtcgccctgtatcctggagggagacgagtcaggaaggcgcacgccaggcccagcttccgaggtactaccccctctactcctcagggaggatgccaacgcaatactccttacaacttctatcttctatcatggaagccaaggttatttggaccaaacctcctgtcttagttcattttcacgctgctgaagaagacatacctgaaactgggaataaaaggaggtttaattggactgacagttccacatggctgtggaggcctcagaatcatggtatacgaataaaggcacttcttacatggcaatgccaagagagaatgaggaagaacctgaggcagaaacccctgaaaaacccatcagatcccgaagaatcctttatttccttgaacatttatgagactatacagattatatatgtcttcttgtatcaattttactaagctatatacatagcttatgtttatatattatatatataaatgtaagatacaaatataaaaattatgtataaatatgaaaatatatatagaaagcgatatatatgtctatatatatagacagattataaatatctgtctatttgacctaagttttcaaatttgtaggttaaggtgttaacgatatttccttattagcttcttaatctatgctgtatctatggttgtgtaccttttaaattcttagttttatctatgttttctccctttttttctaaacttgactgacggttgcatcacttattatatttctccaacaagcaaaggttagctttgtatgttttactaattttgtctacatcattattcccacactttagtttttcagaattgattctgttgtttcttttctaattctttattgaaatatctagtacattaattttcaagttattagagaaatatttgtctgtaaactcctattgtaatatcacttttcttgctactcacagatttaatctttaatattggcggtatcattgagttctaagtacatttcaattcctagtatgataatctatgaattgctgagaaatagtgtttacaattttgttgttctatttccacttaagtttatttttacttctgctaactcaattgaaaattctttactaatttttaaaat

SEQ ID NO: 480305 - DNA, 506 bp, Homo sapiens
gttagtccacctcacacggaatctggaggaccacactgggctccagtatgaaattgccccttcacagccctgtttctccttcttggacaggcaggtggaggaactcggccaccctgaatacaaggggtaggaagaagtttgcctttcatcacaacatttacttcggaaacaaagtgacgactaaggagtattgctttcccgcaggtcactgcctgagcttcttcagctggttgtctgactgtgagggcccaggttacggcacgattgctgaggtggggcagctatggggcatcatggcaaaggaccttcttcgacattccttggcatcggaggaattggctttgaaccagaacctgacctgtcacgaccaatttgcccagtccaccagatcatcagccagggcctgtggctctatattctgcagcactacccaagggatattggtgaggacacccagtgtctcttggccctgagcttgtgcacacaaacacgcacattgtctaaac

SEQ ID NO: 480306 - DNA, 1316 bp, Homo sapiens
aaatccaacatgcagctttgaaggactttctcatgcaacttctatcttctgtcatggaagccaaggttatttggaccaaacctcctgtcttagttcattttcacgctgctgaagaagagatacctgaaactgggaataaaaggaggtttaattggactgacagttccacatggctgtggaggcctcagaatcatggtatacgaataaaggcacttcttacatggcaatgccaagagagaatgaggaagaacctgaggcagaaacccctgaaaaacccatcagatcccaaagactccagtcaaggcctagggactactcatgaaaagagtttaatagccgactctctcccagtggatctggattccaccggactgtatcttcacagtaagggtgaaacagaagcaaacccattcctatttccaagctcaaggaactttggtcaaagttctcttggagctgagcagaacaaggaggcaaacagaaaagatttgtaattcttcatatatattgaaatgctctgcctggggaaaaaaatctgagcctagcgttttatctctaggaagaatcctttatttccttgaacatttatgagactatacagattatatatgtcttcttgtatcaattttactaagctatatacatagcttatgtttatatattatatatataaatgtaagatacaaatataaaaattatgtataaatatgaaaatatatatagaaagcgatatatatgtctatatatatagacagattataaatatctgtctatttgatctaagttttcaaatttgtaggttaaggtgttaatgatatttccttattagcttcttaatctatgctgtatctatggttgtgtaccttttaaattcttagttttatctatgttttctccctttttttctaaacttgactgacggttgcatcatttattatatttctccaacaagcaaaggttagctttgtatgttttactaattttgtctacatcattattcccacactttagtttttcagaattgattctgttgtttcttttctaattctttattgaaatatctagtacattaattttcaagttattagagaaatatttgtctgtaaactcctattgtaatatcacttttcttgctactcacagatttaatctttaatattggcggtatcattgagttctaagtacatttcaattcctagtatgataatctatgaattgctgagaaatagtgtttacaattttgttgttctatttccacttaagtttatttttacttctgctaactcaattgaaaattctttactaatttttaaaat

SEQ ID NO: 480307 - DNA, 582 bp, Homo sapiens
actgaatatccgtgcacgtgggccacagatgctaagggcactgacaaatttgcaccgtgcctcagtaactcggaagcacatctgtgatttgtaccgacagggacttggtgtcttttcgtgtttaaagtagcacgtgtgtgtttgtggttgcgtagtagtgatgtcaatgccgtttagacaatgtgcgtgtttgtgtgcacatgctcagggccaagagacactgggtgtcctcaccaatactgaggtgggccttaatatccagccagattgccttctggaaacacacggaatgtcctgttctgttttgccatctcttcacatttcctcccctgtgagccctgtgtggtcctccagattccctgtgcggtggcctgccttttttggggtggggagttgctgggtgaatgaggatggcggagggaaccaagtatgtcagtggagcgtggtgtcatccaaacggtacttagcaggcctgggagagtcattctgggaggacgcagacctagagaggcctcaggtgggcatctgtgtggagggtgagagatccctggttgagcccaaactgaaccccaggtagaagca

SEQ ID NO: 480308 - DNA, 608 bp, Homo sapiens
cggtcttggcgcggctccaggtgccctttgagtgcagtccgttaggtggcgcctggaagccaggtgcatgcgccctgagttcccgcccacccacaggctacagaaagggcagcgcagggttcctgtgctatgggtcgggctgcacaggcggtggtctatgggagtccggagaaggacaccgtcttcagggtgcaccgtcttcactctgcccgaggcgcagagggaggaggcaaccttgaagcaggagacagtgctggtgttggatgacataatggcggaggtgggggtgatggccgaggaggaggccctcgtggagcggcagaaggaccagcgggcacagcctggccctgggcccatgaccccagagtctgcactggaggagctgctggccgttcgggtggggctggagctggttaatgcccaagccaggaaggccttttctcggcagcgggaaaagatggagcggaggtgcaagccccacctggaccgcagaggggccatcatccagagcatccctggcttctgggccaatgttgtatccttttcagtgtttcttctgcctttctagttgagaggtgctcttggggaagtgattgacttggcaatgc

SEQ ID NO: 480309 - DNA, 514 bp, Homo sapiens
gatcctccgagctgtcttggtggggctctctgggaaaggcatgcaccatgaaaaaggcaagtcaaagttggatcaatgttctcacacctcggactggcctctcttgggtgcagatgaggttgaaacagcatctcagaggccatctgtggcgattgcaaacctgaaaatagtgtccagtagtgctgttgatggacaatgtggaatctctaggaaagcaaagaaaaatcagtgctggcctgagagaacgagctgccttgtgctggagtccaaggaatgttcgatgcttcttgtcagaggatgcaaaatcctcctgcaaaatgcaaacatgctcatcccccacgacatgtccacaacccacaaccaggagctcagccaatctacccaaagtcttttttaccctctgaaacctcttgcagccaaaagatctgtggtgacaggcagtcccatccagcaacaacccactgaaggagccccgtgacaatgagaatggacctgcagatgaaatgaaacagaa

SEQ ID NO: 480310 - DNA, 1265 bp, Homo sapiens
ttgcaaaatggctggggaccttcaacagccggagtgctgagagccgaatgggagtctggacatcttggaggagtagcaatgccaggatatttcttgctgctccactcaccaaccagaatctctcatgcagcagaatggtagacaccttcacaactctcagttgtgccccaggatgcctcaggcccagtatcacagcagtgtcttcaggactcctgtactttcctccaagcatagaggaaacaccaggggttgaaaatgtagtggctgcttcaggaagatcaacccaggtcctagaggtcccttgggagctagcagaagaggctatggataggagaacaggagaagagaccagaggaaaaataactgagaaagatgggaaaatgcaaaatgaagggaatgcacaagaagaaaagattgaacaagaagaacacagtgtatgtggagatggaagagaacaagacagaaaaaagaaaaaggaggaacaaagagagataagagaggttctcactttaccagctttaaaaacagcaaagcattcaataatatcagcttcagactggatccagtgcatgtctgctttggctacagatgttcagatgtgtccagagtttcttccttctgatgggtttgtggtctcgctgacttcaagagtgaagctgcagaccttcccagtgaatgttacagctcttaaaggtgtaacagctccagagttgtttgttcctcctgctgggttcttggtctcactgacttcaggaatgaagccacagaccctgaggaccatatcagtgatagcctttcttcagggattaattgctggagatttacctggaatccatgttgactacaagatactggtggatgttcagcatgggtctgtgatagtaatataccatgtgcccagggacctactcctagagtttcagccagaatccacgtttctgcgttctgggccacaatatctaatatttatgccgaatccagggtctcactctttcagtttcagtttgtaaccatggtttaattgtatcagctttcaagtgagtcaagagtcttcctgattgagtttctggctgggaccacgtttggaatatggttgtttcaggctgattccagggtctgatcatgtcaactttagagtgaattaagggctcaattatgttcataataggatttattaagatccatgtctgcattgggggtttcagtataacagcctcatgtttattcaatgtactaaatctattcatttgatataaaggcctgat

SEQ ID NO: 480311 - DNA, 495 bp, Homo sapiens
tgattggccgctggagtgtcccctggtaatggtcccctggtgtcccaatctaaaaattgcttgttcagcttctatgtcgggttggagtcttgcccttaccatgtcagagtttattgaaatcatccaagttccggagaaaccagggattatgctccaccacctagagactatgcatatcgtgattatggtcattctattcaggatgaacattcctctagaggatatagttaccgtgatggctactgtgaggcctatggtagagattattctgaacatacaagtggaagttcttacagagatgcatttcagagatatgaggactgctggtcactctctgcgaaacagcggctggagccccaaagatgttcgagtctgctatatcccagaaaacaagattgtcaaagttgtaaatattcagtggctatctgtccagattcagagtgagcataatgaatgacggtacaggtgtcagtcatggacactattcttggcata

SEQ ID NO: 480312 - DNA, 1110 bp, Homo sapiens
atcgggcatttctcagagagggtgatgtggcaggacaatagggtaatagtggagagagggtcagcaggaaaacgtgagcaaatgcctctgcatcatgaacaagagcccagcagactcaaaagtggcagggcctgacacttcctacctccactcccattggactattagctacggagaaatggaggagcctcaggtgactcttgaagtagaagaatgtaatgacaactgcaagcaaaccttcaatactctcaaggagaaattgggctctgctgcagccgtgggagtccccaagttggatgaactattttttctttatgtgaccaaaaagcaaagcacaggccttggagatattgctgctaccacttttctagcaggcaaagctaataaactaacattagaacagcacctacaggtttttgaccccacatcaagggaagatgaagcagccaaggcccctgcactgaaagggtcaatgaagcttatgggcgtgctggcaagcatacatagaactgagccagaacactctgaagaagaagaaaaatgggccagggatttcatttcagtaaacctgtccaaaattgagaaacctatccagttgaccagctttccccaacttggaaaggaccacagcaaggacatcggagctctccaacagacgttcaacgccaagggattaacaaatgggtacacctgtgtggaagtaaagctgttgcttattctgggagccgaatctgaggctgacggatgtgggacataaaccacaaaagcaacaagacatgtacgggaaaagtgcttcttaagatcattttattatcatgtataaactctttctgatttcaatataagtttaagaactcttaaatcgacgaaggaaagaactaaatttacatatagttttgaagctctgagattctttcctccacttggcctattctgtgagtgatagttgtggttgcgttgtgaagttctcattttgtgtttttcagctctatcatgtgatgttcctctctaaactgaatattctggttatcaactactgtgttcttttatatttttaacttcttgcattaagttagaacgtgctccttcagctcagagaagtttgttatt

SEQ ID NO: 480313 - DNA, 496 bp, Homo sapiens
ccacttctgcagaggcctctactgcatccctgcctcatgggcacaatgtcacagaacagaattacatcatgtgggagaccatatgcagtcaaagaccccatgaatgggataagtggccttgtaaaagggagccaagggagcttgttctccttccaccatgtgaggacccatctaggaggtgccctctataaagagcaggccctcaacagacacccaatctgccactaccttgacctcccatttgccagcatccagacctatgagtcaggaccctcagctgcaagtctgttggagtttactggaggtccactccagaccctgtttacctgggtatcagcagcgatggctgcagaacagtggatattggtgaaccgcaaatgttgctgcctgatgcttcctctggaagttttgtctcagaggagtacccagtcgtgtgaggtgtcagtccacccctaaggggttgtgcctcccagttaggctactcagggatcaggga

SEQ ID NO: 480314 - DNA, 549 bp, Homo sapiens
ttgagttaaacacctttattcttgctgagatcaacacaacattttgcaagcaggtatttgcattgcggtgtaggaaaactgtgtactttgaagagactatatgcgttataggcctttcctgggtagtaagaacaggtcgccagtaaaaacaaggcttcttctgagtgtacttctgcataaaggcattctgcggggaaaaccccatctagtggggcctagggctggagctctctctgtgcggactgctgactccctctaccttgggttccattggccccagcctgggacatgggccttggcagattctggcccttcctggcccttacgtcgctgtcagaaaccccatcttgtgctcggatgccccagtgactgtggctcgtgcctttctggaaacactggaaatctctcctctatgcatggtcacctaaaaccccaggagctcaggacacagggccgccatccacctcactgctttcagaagagaatgctgagagtctcttacagactctctcttgacttgagttcttcatgggtgtgtggttaagatgt

SEQ ID NO: 480315 - DNA, 614 bp, Homo sapiens
tttttaatctgacagctttcacggtatacatgtgtaatattgtcgacggagaggcgcgagtgggaaccggggctgcgtgcggtgcttgcgtgccagctggagttccgggtgggcatggactttgtgggccccgcactcggagcagccagccagccctgctggccccgggcagtggggaacttagcacccgggccagtggctgcggagggtgtactgggtcccccagcagtgccagcccaccggcgctgcgctcgatttctcaccgggccttagctgccttcccgcggggcagggctcgggacctgcagcccgccatgcctgagcctcccacccactccatgagctcctgtgcggccagagcctcccggacgagcaccaccccctgctccacggcacccagtcccatcgaccacccaagggctgagcaatgcgagcgcacggcacgggactggcaggcagctccacctgcagccccggtgcgggatccactaggtgaagccagctgggctcctgagtctggtggagacgtggagagtctttatatctagctcagggattgtaaatacaccaatcaggaccctgtgtttagctcaaggtttgtgagtgcaccaatc

SEQ ID NO: 480316 - DNA, 1962 bp, Homo sapiens
tccacagatctgtatgaaggctggggaagcctcaggtaacttacaatcatgttagaaggggaagcaaacacatccttcttcacgtggcaacaggaaaaagaagtgctgagcaaaagaagaaaaacccttcataaaaccattggatcttgtgagaagtcactcagtatcacaagaacagcatggaggctgtataggaagcatgatgctggcatttgtttggcttctggagaggcctttacagtcatcacagaaggtgaagggcaagcaagcaaacaacagaatctagagaataggctaaccttcctgtgttccctgagcccagtcatgaagggccctcattcctgggcctcaggccaagaaaggaatactacaaaagggctagggtcccagaccacacagaagctccatgagacctctcctcatctgtgcatggagctcttggaaagagactatggaattttctagaaattttttcagtcttctttactcttttctctttacttttatctgagtgttttcaaagacctggtcttcatgctctgagatttgtccctcaccttggttgattctactgttcatactagagattgtattatgaaatatttgaaatgagtttttcagctctgttagatgagtttagttttcttcttaaaatgatcattttgtctttgagctcattgttttgtcgtatccttagattccttggattgggtttcagattttcccaaatctcaatgatcttcattcctatccattttctgaattatatttctgtcatttcagccatttcagcctggttaggaaacactgctgaggaactagtgggtttgtttggagaaaataggacactgtgtcttttggggttaccagagttcttgtgctggttatttcttttcattgttttgatgttccttcagtctttgaagttgtcttcctttggatggggtttttacttttatcttctttgatgcctttgggggtttgattgtggtataaagtaggttcaatcaactagcttcatttctggaagattttaaggggataagtctcaactcttagactgtgtcccctaactctgagggggggctgatatatggccgcttgctttgttctgtggccccttgagtttaaaaacctcatgtgctgcagggtccaatatgttcccagtccactagctacaacactttcattggcagtgctggctaaagcattttgttggcatagtggcagtgggatccatgcttgcttgtgtgtgccagcagctgcagcagtgtggcggggtgcacacgcatgggctggcatggcatactggcaggagtggggctgtagcattcctgcttgtgcctatgccaatggcctctaatcttttttataagttgtcggatttggtttgcttatattttcttgaagattattgcacatatattgctaagaaatattggtatgtagttgtttttcttttcttgagatgacgtatttttttttaatcaggccatatataatgggttaaatattttttctcttttattttattgtaaatatttctttaagattggtgttgattacttaagcttttggtaaaattaaacaataagggcacttagtcctcaactcttatttacgggaacttttaaaattaccgttataaaagctttattgttaccggttggaatatattttctgtttcttcttaagggggttttagaagttttgtatttgtggtcatctatttcatctaaggtatctaaattgctttcatacagttgttcatgttatttcttataatcatctttgtttctgtaatgtctgtaaaaatatccctcttttattctaaatttaactcatttgagtcatctgtatttttatttttagtaagtctagccatagttgccaatttgttaatgttttcaaataagcaaattttggttgtactgttttgtgtctattattttcctagtcttt

SEQ ID NO: 480317 - DNA, 570 bp, Homo sapiens
ctacaggttaccccatgacattacagatctgcagtcagggaacaaacccaggagtctatttatatattagcaaaaagcctcagacccgtccagcccaacaattcctagtatttgagtcattttatgagcatatcaaccaggagttgcctgagccctcccctttgtccagaaacctatttgttcaactggctgaaagtattgccagcagcctaggcatctcctcatgctatgtctgtggggggaccaacatgggggaccaatggccatgggaggcaagggacttgatgccccatgataacttcactctggtggctccttcccccaaacccatgctcacagatcggagcatctggctgttaaaaacctctattgtcgggatgttctgcattgcctgctggggaaaagcctttacagacccaaattttggggagtttaaatactccctagaggattccattggttactttgggttcgccctatgtaaatggagaggatgaagtaaagttacaaaataatttaaggcatacccctatggagagagtattacctgttataggtgaagtgtgagtc

SEQ ID NO: 480318 - DNA, 1019 bp, Homo sapiens
aggagatatacctaatctctctaagttcatctcagctccaggtaaagtcaaatccttctcccatgatgtggacattaaggttccccagtgaggatgattgtttaggggcagacgatccccctttcacattttcacgctttgggcactcagagtttttcggccatttcctggagcctgaagtagcaattcacttctttcaaagggtctgtggattcctttggctttcctggtatggtcctgctgtggttcttcaagcaaaagttttggatatgggtatccacatgctgctctgtccatgtaagtgggagctgcagagccttcagccacagagccaggaagatgctgctgtctctagtacttcacatgtactcgcctgcttcggacgtcatgctcctaggcatggtgctcacccatgtgccggcctggggagtctggcagctgccctccgtcatcccgtccgccagcttcttccaggcggtggacagctggctctactgcgtctaccagagtgtggcgctctttgagaactacaccagagtacagatattgctacatggaagtatgccaaaaattaagaaaaatataatgtatttagcaaatcatcaaagcacagttgactggattgttactgatatattggccattgagccgaatgctcttggacctatgtgctctgtgctgaaagattaaaatgacttccatcatacaggtgttacttgtctcagcatggaggaatctaaaagaaagtgccaaatgtattgaaaaagaaatgagaaacaagtggcagagctacatgaatgcggaaactgctatgcattttatgatttttttccagaaggtacaagtcatgtaataatatattccatagaataatgcttttaaaaaaatgtgaaatgctcttttttatgttataatttaaacttgattggctacttattctttatgttaacatttctgcttactgctagtgaatttttgctagaaaattataccaatgatccaaatgaaacacaccgatc

SEQ ID NO: 480319 - DNA, 478 bp, Homo sapiens
gatatttggatcgtggggtggatccatcatgaatggcttgggccatttccatggtaatatgcacatttctcaggtgctggcagttgcagtagtgggccaagcaggtgggcaggacctcaggcccgtgggcaatgtccttaacatgaacaatggtagtagcagtgtcgggataacggtgtatgtgggggaatgtctgtggggttctgaagatgtggagatgctggttctgctgggcctgaaggcaaactataatcagcctccactagtgatacccagggaaatagggtctggagtggacctccagcaaactccagcagacctgcagcagaggggcctgactgttagaaggaaaactaacaaacagaaaggaatagcatcgacatcaacacaaaggacttccacacagaaaccacatcagaaggtcaccacatcaaagactaaaggtaggtaaatccatgaagatgaggaaaaacctgca

SEQ ID NO: 480320 - DNA, 522 bp, Homo sapiens
ggcatgtaaagaaagaagtttgacagtgagatgttccaggccatggggcccccttgggcacagactgtggcagggagacgtcccacaccttttctggaccagccctgtggagggaagaatgctttgctccctctccagcctgggaacctgcacatcttgcccctctcagtgctggcagttgcagtagtgggccaagcaggtgggcaggacctcaggcccgtgggcaatgtccttaacatgaacaatggtagtagcagtgtcgggataacggtgtatgtgggggaatgtctgtggggttctgaagatgtggagatgctggttctgctgggcctgaaggcaaactataatcagtcaaggaaagctgtgagggactgtgccatgaggaacagtgcactccagcccagatactacgcttttcccatggtctttgcaagccacagaccaggagattccctcgggtgcctatgccaccagggccctgggtttcaagcacaaaactgggtgaccatttaggcagacacc

SEQ ID NO: 480321 - DNA, 831 bp, Homo sapiens
ggcatgtaaagaaagaagtttgacagtgaggtattttctgcagtaggggcagggagaaagatgtttctctcaccagatccattcaagggacttgggggaccctcctccaatcactggtactgtgcttgcatttcttttaatgaaaatgaacctaagattataaaaatacagatccaacaaattatttctaaaccagaaatgatgaacaacactgatgatatattgatggaacaacagatgaatcctttcaatgccctggtttattttgtggtcccttggagatgtgaatcttatgaagtctttgaaatgtggcaattggttgaaagagctattaccaatagaaacgaacgtctgggttatgacaagaggtggtggagaccaaagttttattatgcagatggagcctccagaaaggtggagacaactcaagttaaggtcccccaactgggggcttccaggttacaggtaggccttgacttgagtgcaatgtattcaggagttgattcctgtaactttactgccgaggggattgaaagaagaacagtgcaaggcccttgccagcttgacatagggacggagggatgtgagattttcactaataccacattttccgttgctattttataggacatccagtagtggggatatattgctcatctccaaaattatctgctatttgcagagctgcctactttccagctgcagtgagggtttggtttgggagcagcataacatctttccatgtgaggtgaaatacctgagttgaattgtgaaaagtttctatatacctatcagggtcatcagaaaatcagcctaagtttccctttattt

SEQ ID NO: 480322 - DNA, 691 bp, Homo sapiens
aggggtttgagcagcagggcactgaagaactatagtaggccccagtacagcaatgtcctatgcccaggaaagctgtaagagcacagaagcctctacctagatatgaaagaatgtcccggagagctgagctgcagggaaccaggcagaaaagcataacgtggagtgggatcaccagcagagatccttcactggacaatgaccatctgagacttgtagcaggacctcccctcacaaaccacagacttttaggatttataaccagactccagtcccggcaggccccaaaaagtgagacacaaagtgtgaccttggaggaagtacactacatttcagaaaacttacttgaattttccaatttatatagacataaatacaaggaatatgtgtggaaatggatattaaaggtgtgggataatggaggaagaaatataaagtttgaacagactaaatttattgatatgggctcattaagtagagattccacatttaatgctgtgaatcagagagttataaagtactttcacagtttatttggttggttgactgaagcatgaaccaaaagatagcctacagtgagtgaactggaaattcccaacctgcctaagttaaatatagataaagtggttgaaaagcttaggcatattgcagagtaggcctttattcataaaattaagacttagttaacatgacc

SEQ ID NO: 480323 - DNA, 580 bp, Homo sapiens
aggcacctctggacccactcgaggtctgggaaaactcaccaccatgaagggaaagacaaaggcctggctggctttaccacctcctaattgtagagccccagatattaagccaatattaccttcaaggagaaatgctcaggtgaaggcagggcagcagtgctgtgggcctttaactgcagagaccaggtcccctcagctggagcaacagagactggcagctgtggggtgtgtggcacacttgcacttccctcctacaaaagtagctctgggttttattaatactcttgggggcatgcacatgtgctgggcctccttgctctctctctggccctggagtggcaaggacttagcctgtggctgtggcagctgcaaggggctagtcagcgacctctgggagtgtgctctcagaggaacacacagccacagctgcagtgttcagatgaaggtggggcaggtgcactggaggcctaaagatgacaaggcccatttggcaggaagcagtgaagttggggagctgtggggcataaaatctgttgctgttctgtacctcatctgcagttatctgtgctgacagtgccag

SEQ ID NO: 480324 - DNA, 1024 bp, Homo sapiens
gtgaagactgccagcacgctgtcacctctcaggatgaataggaagcccctctgctgccagtctgctggagtttgccggcggtccactcccaaccctgtttgcctgggtatcaccagtggaggctgcagagcagcaaagattgctacctgttctttcctctggaagtttcgacccagtggggcacctgccagatgccaaccagagccctcctgtatgagtttgaacttcccggcagctttgtttacactgtggccctaaaactgcctactcaagcctcagcaatggcagacgccccttcccccaccaagctcgaccatcccatgtggatctcagattgctgctgtgctggcagccagaatttcaagccagtggatcttagtttcctgggctccatgggggttgtgaagaccgtgatacaagtgcagtatctgtgccggagttcctcaggctcagaccttgacggcttcccctgggtagcggggggaattccccgaacccttgtgcttcccagagtgattgtggtttccacagacatgcagaactatgataagaaaataagaaatattagaggaaaatattatcctctaaaaacaaacaaacatcatagagagtctgggcttcgggtcacagcctttagccttaagaccagacttgtataaaacctagagttaggattgttaaccattttttatgtgactgacaaccagcctctgaatgtgttttgcaatagcaaaatatctatctgctactactatctgtgaataatccctatgtgtgattattttaatcacccaaaattacatatagatagatggatagatatacatattgtattactatatgaaaataaaaatgctgtcttgaattgctgattggaaaacaaatatgcagttatctccattaggaatttcaggtttttagcaactgaaacatattattataaacatgggtttcatgaaattgctcttcttgtgctttatgtttgaataaaattgtatctcttaatttgctcacctttttcttt

SEQ ID NO: 480325 - DNA, 1340 bp, Homo sapiens
taacgatttaatggcctctagagtgtctgacaacccttgtttgttggggcagtagggggggtctcagccagttggatggcatgggaagcaggattcatttaacaaagcactttggctgtcccttggtagagggggtgtgcagcactggagggaaactcactcatcagggcttcccagattcctcagagctagtaggaggaaagactaagtctcctggtctgtggagactaagaccaaccatccccttaggggctcagtcccagggagatcagagttttgttcctgagcccctagctggagctgttggagttcttgcagggagtccctgcagtggaagtgttgctgccacccttcccccaaagagctcagctggcttagaaagcaggcagctgcagcagtgccaatctactgagagcccaaatatagcaaaaaggcagaaggagggcaaattatctctcttcttgaactggaacattcgtcttctgctcttagatattgacgctcttggttctcaggcctgtggtctccaggacttacaccagtggatcccgcagttttcaggcctttagaagtatacaaaattatatcactggctttcatgattctccagcttgcacatgaaaaatggtgggacttctcagtctccataatttcatgaaccaattcccataataaatctctctctctctgtttccgtctttctctctctatctctcttcctatctctactgctgcctttatctctctgtctctctatacatgtataaatggtattacattactttatttctttattatgtgattattagatttataaatgttgatttatacctatattatcttatgtgactatgtaaatttgaagacacagctctgttttgcatataaaaccaaattgcatactatactttatgggaaaattacatagaaactataaatgaaagtataaattttcccttgggaaaagcttttaaagaaatctatattattctgagagtgcaaacatctcctttacacagactcaaagaaattcagttgttatagtaagtatgtcttctcctttgaaaatgtgcattataaagacattttaagaagcacgcattctacaagtttccctttgtaatttagccattagcaatggtatatacatacagacaattattagtcttgtgcttcgaaatagctgttgatgatggactggttctataacatttttaagactctacatgctcttttttaggaaaatgactttgcacctttctttctcatttattgtaaagtggtaatcctataaaggcaagaaagccaaataccaaaattatgcataattctcttatatt

SEQ ID NO: 480326 - DNA, 671 bp, Homo sapiens
ttggtgatattttacaagaagagagaaagcaggaaaaacaaaatggtcgctaacctaatgataatattgataatgaaaataatagcagcacaccagacccaacaacttcgtctatttaacacttcaggtgatgccaccaatccagacagaatgtacgaccttgttgctgttgtggttcactgtggaagtggtcccaatcgaggccattatattgcgatagttaagaatggagatgaggaatttactgggaactggagtaaatgtctctcatgctgtgctttagcaaagagactagcggcatcttgtctctgccctagagatctgtggaactttgaatttgagagagatgatttagggtatctggcagaagaaacttctaagcagcaaggcattcaagacgtgacctggctttttataaacgcgtacagtcatatgcactcacaatgagatgctgattttttttgctatttaattatagatgtttctcttatattttgaatatcaatcccttgtcagatatatgatttgaaaatactttctcccatttagttgcttgacctttcattttgttgaatgtttcctttactgtgcaaaatttttttagtttgatgtaataccatttgtttatgtttgcttttgttgtctgtgcttttggaattacattcaatcat

SEQ ID NO: 480327 - DNA, 571 bp, Homo sapiens
tgaatgaatctttagggaattatgctgagggaataccttaatccaaaaggcttacataagttcagcctaaaggtttttctgtacatcgtgaactataacaagtggaggtataacccagacgacagcctatacttgtgccaatcacctagttttggccaatcaaatgtagccaactgttcaaaccatgttcaaataagtcaaatgccaagctgtaaccaattcagctgtttctgtaccttacttccatttactgtatgtcactttcctttttctgtccataaatcatcttccactatgtcgctgtgctggagtcccagtgcctgctctagctcaggaggctgcctaattcgtgaatcatccattgcgcaattaaacttctttaaatttaatttggctgaagtttttcttttaacagttggcatcagaagtgagatccaaagtagagcttctaacgacctccaggagcgctgagtgaccaagcaatgtactcaaccacctgttgtgcccatcgctcgagatctcagagcagctggggattgtgatattagaaaaaacttgagtgttgtgatct

SEQ ID NO: 480328 - DNA, 614 bp, Homo sapiens
caatcggtccatgtataatcgccttcatattctactttatctcccaaaggctgaactcccttgtctaggcagccacccaaaaacaattgataccatctttctcctccgccaagtctggtgtcagcacctccaggaaaacaactctgaagtcagacatccactacttcaaaacccaaaccctgattacagtgcccaggcctcagtcaaagtgaaacatttcactggggttcgggccgtgagaaacaacctgcctaaccacctgaccacaaggtggacaaaggcccaaatgaagaaacagcctgcctcttatcatattctgctgggagaaagtacaaggaggagcaccacattctaccggtacaagggccagaaccacctcatcatgggaacatcttatcagtatcctgccgggcagcaagccatactgcccagacccctcctgcccatacctagaaattaccccagcggtgggcactgtcattaggctggtcccccacttcttaattttatatatattttattttgtagaagctcaccaaaatatggttaagtttgaaaaatataaacaattacttgtattagtattaaagattttattaacattcatggctttg

SEQ ID NO: 480329 - DNA, 2772 bp, Homo sapiens
ccatctctgctgacaccttgatgttaggcaatgatgttcaatccaggagccaactggagtgtaggaaggaccccttcagctcaaagccatgaggggttgcaattctgtcctgggcacccttcagtcctcaggaaagtctcatttccagtggctgagcttgtgatagaggggacaagccatgcagtttatcccactgaggaagttggccctccagtgggctggcttccggcattgatggcagttacctggaaggatattctgaaggcaacatggaggaggctggcggacttgcaaggcagccatcagttggagctgccacttttacttttgcctctccctttcctgagaaagttccttttcctcctggtcccagttgtaaaagacagagaaagctattttgaggatgtcaggcatatgggtgttgggtacttgtcttgggagtttcctctgaatatctggagcttcctgagttagaaaattgttcttttgtactagttgcccttctggtggctctggatctaggtttgtatgtttcattagggctctttgtagcctctctgggaaagcattctggaaataaattttatattgaatatatttaattataatataaactactactctatacattttatattttaagggcatgtaaaagggagagaaactcttgattttaatgtattacatcaattgttccattttggttaacagtttatgtactgtttaagtaatctttgctgtctcaaatgtatgaagaaatacttctatatttttgttttagaatactttttattttaaatttagttatatgatctagttggaatttttctgtatggtgaaatgtaggaaaacattttggttttatctatatgaatatttttatagtttatcttaattcaaagacattgctatattatttacatttcaatttgtcacacaaatatttctaatttcttatgttcatattcatgttgtctacaaataatgagctttattttttcatagtacactggataagatatccagtataggtttgaattgagagaataatgggcatttttatgtcatttttaatcatgagaggggaaatagggaaatgtcgtattttactaattaaattttatatttgctgtagattttaaatatataccatttgtcagataaaagaaattccttatattccttgcttaccatagttttttttttacattgatgatggtgaaattttctcaaatccttattctgcattgcatctatgaagatgacttactactttattatcttaatgtgataaaagaaggtaattgttgttaaaatgtggtctgccctgcatgagaaaataataccaacttgttaatgatgtattgtacctttaaaaaatcactggattctatttgttattttttagaattattgaatttatgtttatgaacgtgattacccctaagtttcctttcctgttatttgttattcacaaaattacagtgaccccattactctctatatccaacctctctctctttccttctccccttttttgtttctccaagaaagttgtgtacaattagtgtcacattttattaaaagtttggaaaaattcagaagtgaatacatctggcactaaagatattttgtggggaaacatttatttgccaatttactgactttaatagatacagtgctatttatatatttttattttatcttgtgtcaattctgataatttgtgtttttctaggaattattcaattttatgcaaaattttatttgtactttaaaatttttcattatgctatttaaaaagctttataaaatttgtaaaacatcttgtgatagcacctttttatccctggtatttcaaatttgtgtctttaattatttatgtattttaattttgctcaatttggttaaatgtctatcaaatgttaatctttcaaaaaatccacttttggctttgttaataaactaacttctattgtttattttgtatttaataaatactctttttattttctaacttctacatttttggtatacaataagatgtccttttactcacttcttgatataaatatttggttattgatttttgacttaccatcttttcttatttataaatttttgaatatatattttcttctctgcacagacttgctgcattccacaagttttgttatgctgtatgatcattagtttacaaatcaaaatgttttaattttcattatgatttctaatttgataaattgctttgatgtattttgttaaatttctaaatagttgaactttttttattgcattattaatttttaggcttaattccactgtagccataaaatataccttgaatgatttcaatgctttaaaatttctttagatatttttaatagccttacatgtggtcagtttgggtagaagtataacgtacatttgaaaatatcagttattaaacagttatttacaactatttcaatttgcaaattgggtcacttttgtaaattctgttaattgaatcatctggagatgaaatgtttttattattttcttgttttatcagttactgagtgtgctgttttaaaatttcccaccgtgatgatggatttatctattttcattttgattctataaaatatggctgtatatttggaaactctgttatttgggagatacatgttaaaactgttacattttttccagtggattgaccctcttgattgaatggcaaattaaaaaataatagcaatataagcaaagatgtaaagcaactgaaactct

SEQ ID NO: 480330 - DNA, 1074 bp, Homo sapiens
agcagcagttggacctcaaccccttgtgagacaactcttaaatgtagcctttaaagttacaaccatagaggcaggaaaaagagagacagccaagaagcgcatttgttgatagtttctttagcccctttccaccacagaattacccatcttgagaaagaaaatgtcatgagatcagcatctaggatgcccagagaagagcccccaacatcccagcccctgggccaaaatcagtgtgcatactataagcaaaagggccactggaaattagaatttcctaaacaaccccagcttggactctccaaggctggaaagccagaactgctgagtcatccaaacagcaaagatggcaacctgcacctccttctggaagttttgtcccagcaagtttccaaatcccttcagctggagaacactggtgggtgtggctcaaggctctggttgggaggttccaccttaagtgacagttacttctactgggaagcccagaaatctacaatatccaaagcttccatgtctccatatgtgcctgagtggcagctttgccaaggctccaaatgggccatcaaactgccttactattctctattcttcaggggtcgagctgtttccttgagtagttccaatgtaagcatctggatgtttcagctgaagatagttcattataacaatgtgaaaaagaactactacagaaaattggtatcatcagagaagtggggctttgctctaaagatacctgaaaatgtggaaatgaccattaaacttgacttgttgaatggttttgaccaaaatgctgaagtccaggctgagaaggtctcagatgaagatgaggaactcactgcaaactgggtccaatataagggacaaatggactgtgacacagccctcaggagatcctgagattatgtgaccaattggtcagggtacaacttgattttatacattttagggagacataaggcattaatcaatacatgtaaaatgtacattggtttggtccagaaaggtgggatggctcgaattggggacttccaggtcataggtagatttaaagattttctgattgacaattgattg

SEQ ID NO: 480331 - DNA, 576 bp, Homo sapiens
atttagaattttccaggaaaggtttggaaccttctagaagccgtgggtcacggaagagaaccgtggaacccacccgaacaggagtggcaatgggcgccttgctggatcaggagcacagtgaacaccctgccggatccagagagatggaagtcagtggtgggtctgtgacggcagcaaacagcagtcgtggacaacgagcgaaagctcagaacatacatgtgcatcaagagaattataatgaagaattggctcatgagactgtggagactaagtcccataatctgctaaatacaaattggaatccaaagaaggccaatggagtaattcagtcctggactaaaggcctgagaaccagtggagccaaggggggtataatttccagtctgagaatcaaagaaaatgagttgaaatactggacactcagtggtggtcatagccaagttgcccttggtgagttaaaagccatgttgctaagcaagtctccatttctgctgccatggccacttcgtgaaccactgagcaacgatggtgtggcaggggaaagaggctgactagtatctggaaaatgggtattct

SEQ ID NO: 480332 - DNA, 1924 bp, Homo sapiens
ggcaaggctttgaagtttgagtgggactaaagtaggttttcaagtttggagaaaccaagatggaagtgattaccaccattaagaatgaaaagagtaaaaacttagacgtctacctggtattctattgtattgctgctgacctggcactcacaccacaagatggggtctttcttattcttccttcctctttccaaaggcagagcagtcacatctcatggccaacaccactacaagcccatggggagtactgccagactactgctgatgtttccaaatgtctgggatccagcgcctggaatggggggcctcaaaactgtgatcagtaccctattctgctgtggctgagctcatatctaagatgcaagacaaagtcctccccactattttctctactctcctcagttgaaaagaaaaggcatctcttggagccacaagttgtgcagcctggggctaggtgtggagtgatgccagcactcccacatccatgttagctgtgcatcatgtaacaatacaaagttaaaagcaggtactgagagtgctcacctgtggtgctttgctcaagtaaatagttattaaattggtgtctttgcaggagggtgtcgggggtggatgatggatggagctttatattctttcatcttgttctgcctcttttatatgtagtctttcaacttctcatacttgttattttccctctgtatatgctatcttaactagctacagtgaacttttcttgtaatctttctctaacgctacttattccattttcaactaaatttcatttttgtctgaaaacctttgtagatgacttagagattctgttttctactattttatcttatattaccatgtatttttatctttataacaattacctagtttccttgtccacttgtgtatttattattttttgagtgataactattttccttatcagattgtatgttccatgaagaaatggaatgtgtctgcttcttactagtgcagcctcaatgacagaagattgtgtggctcacaaaaagtatgggtgggtgtaccaatgtgtgaatttatgtgtatctttgtggtatcactaaaggtcttaaggaaatcaggattttcccaggttttttagtctcactaaggattttatttttctcttaatctagcaggcattcttcactgattaaattccattttcttctttctcccccttcacaccatccatcccatttcataagtaacttagaaagcttcacttcagatacaatgataaattattagattatatttcctagcattgaaatttttggaaagctctttatattataaactattttctgttatgtgttttagtcacaattaaatctagctgtgaataaattgaaaatatgtcctctcttacctataaaaagcaaagctgtaaaatgattcaagtatataccctttaaaaaatgcatttatcaaaaccaacacttgtctgtcaataataaccaatttctgtattgtgtttaaaatgtatccctctatagattcaaaaaatatttaaaattttgtttcaccataattatttatcagattgaatgcatatatgttttcagaaagcatgcaagactaaaaagacatttctggattagctagaaatgtagtagactaactgctttttattattttgatttagcatttctatgcttctcattattaacaggtttatgtttgagaaatatcagaatattatatgtaatgattgactcaattatggaccttgatataaataattttgccctctataagtaaattaatattttcaataaatattaaaagggtgcttttttaaagaaaatatacatgaaattgacacagggccagcctttaagtgagttacaattataaatacaaacacctcattctagtattccattataaagtttaaatcaatagcttt

SEQ ID NO: 480333 - DNA, 750 bp, Homo sapiens
ctccagtatctcctctgttctcaagtggataattgtgaacagatgacaccaaagaatgttgaatattccgccccccactgtcttctggcttgtacggtttctgcagagagatctgctgctaatctgatggacttcacctttcaggcccctctgctgcaggtctgctggcatttgctggaggtctactttagaccctgtttgcctgggtatcaccagcagaggctgcagaatagcaaagattgctgtctgttccttcctctggaagcttcatctcagagaggcacccaccagatgccagctggagctgtcccagccagcaggcagaaatgtttaagtccactgaagttgcacccacagccacctcttcccccaggtgctctttcccagggagatgggtgttttttctataagcccttgactggagctgctgcctttctttcagagatgccctgcccagagaggaagaatctagagaggcagtctggctacagcggctttgccgagctgcggtgggctctgtctagttcaaatttcccagcagctttgtttacactgatttgaaaactatttgtgagtgttcttagtgtatggcaaatagttatttgcataagtgcactaagaatgttttattttgcaacaggacacaattggataaactggttattttatcaagactttgactagactcatatgatttcctttaaggaatcaaacttgacttatagagccaataaaagccttttggaaaaa

SEQ ID NO: 480334 - DNA, 763 bp, Homo sapiens
agctaaaggattgtaaatgcaccaatcagccctctcttcattactgaagtccgggagaccacgaaactaccagaaggaagaaactccagacacatctgaatatctgaaggaacaaactctggacacaccatctttaagaactctgacactcaccgcaaaggtctgcagcttcattcctgaagtcaacaagaccaagaacccaccagaaggaataaattctggacacaattttactagttttcattcctaccaacagtgtaaaagtgttcttttttcaccgtatccacaccaaagtctatttttttttattatgtccattcttgcagaagtaaggttgtattgcatcgtggttttcattagcatttccctgataattaatgatgctgagtatttttatatgtttgttgggaatttgcgtatcttctcttgagaattgtctgatcatatccctatcccactttttgataggattgtttgtttattttgctgatttgattgagttccttttagattctggatattagtcctttgtcaaatgcatggtttgtgaagattttctcccaatctgataaataaatagagagatgacactgaaatagcagtatagagataaagatatagaaacatagagataacagtcttaattatttacttttaaatttttgataaacagtttcaaaatcttagacaattttcagctgaatagccttaaattcgcatattaaaggaaataactaaggtgagaatcaaatagcaaaattta

SEQ ID NO: 480335 - DNA, 643 bp, Homo sapiens
ttttctccctgcatctggaaaatctgcttgtactcaacaacccaggttacctggcttattctgaaagcattcacttatatgcattcacaaagagatggtttgaaatgggaacttatgtttaaaaaggaagcagagcataaaggtttggaaaatttgcaggctgaccatgtggtagaaaagaataacccatgttcttgggaggaatacaagctggctgcagaaatttgcataagtagcgaggagtcgaatgttaaccaccaagacaatggggcaaaggtctctagggcatttcggagatcttcatggcagctcttcccatcacaggcctggaggctgaggagggaaaaatggttttgtggcccaggcatttggccctgctactctgtgcagccccagaagttggtgccctacatccaagccactccagcttcacccatgcataaaagggacaaacatgcagcccaggccatcacttcagagggtgaaagcccgaagccttggcaacttccacatggtgttgggcctgtaggtgcactgaagccaagagttgaggtttgggaacctcaacctagatttgagaggatgtatggaaaggcctggatgtccagacagaaatctgctgcaggggcataaccttcatgga

SEQ ID NO: 480336 - DNA, 831 bp, Homo sapiens
gcggtgaaagttatccgagtcacagcgcaccgaaatatatcagcaaagtcaattcctgccgcctcagaagaaagaattcaactgacgggcataagggagattgccttctgctggtgccagctgtgatcaattattattttagagagacagccagagctatggaaagcagcagtagatgctgggattatgctctccccagtcacaatcctggggcaggaggagagctgctacagctgcagtttctcctggatggcaaggactgcagtcagggccagcttggtgacctagaactgattgtggagcagcaaggacctgtctgctccactaccaaagcagatattcaggtatttggaacatcagtcagctggatgagcagcctgaacttccccacccttcctgtgcagagatccttgtgcaggtgggggttgtgggagtggagctcacttttacaagctcaggcagatttccaggaattcagagcacctgctagtctggttcagcagcctgagttgccccacctctcctgtgcagacatcttggtgcaggggacccactctacttcaagccaaggaagacttctcggcatctgaagaacacactctcctttctttaagatgcattgttagcttgctcattgacccgctggttattcaggaacatattatttaattttcacatttgtatagtttccaaaacttctcttgttattgacttctagttttattttttattccattgttgtcagaaaagatgcttgatatcatttcaaagtttttgagtgttttaagacctgtttataaacctggtttatggtatatccttgagaattat

SEQ ID NO: 480337 - DNA, 717 bp, Homo sapiens
caaagcaaaagatagttatataggcatgaaaactaagtatttttctcaaaacattttattcagtgagtttcatgcgcgtccgtgtgaagagaccaccaaacaggctttgtgtgagcaccatggctgtttatttcacctgggtgcaggcgggctgagtccgaaaagagagtcagcaaagggtggtggattatcattagttcttataggttttgggataggcgataaagttaagagcaatgttttacggaattggggcattgctacaaagataactgaaaatgtggaaggagctttggaactaggctggttaagtggttgcaaccaaaatgctgataaagatatggacaataaagtccaaggtgatgaagtctcagatggagatgaagaagatattgggaataaaaacaaaggcttatgggtagaagagacttgccttgtctcagatgagacctttgattttggacttcggagttaatgctggaatgaggccatgtaaaatgtacctgcttccctttcaccttccccgataatttgaagatttattaatatttatactaccacaaatataaaagagaaataagtgccagtaatcccaattctttaaactgtcaatagatcccacttcttcagtcagcacatggagaattttttctgttctttacagtgtagtataattatatgacacatatgaacagtcactgcctcatgaactggtct

SEQ ID NO: 480338 - DNA, 568 bp, Homo sapiens
tgaaataatatggtttgtctgcgtctccacccaaatatcatcttgaattgtagtttccataatccccacgtgttatgggagaaacttggtgggagccaaaggctccaagaaatttgggattatgttaaatggccaaacataagaataattggtgttcctgaagaagaagagaaatatagaagtttggaaaatgtatttgggggaattattgaggaaatcttccctggccttgctagagatctagacatccaaatacaagaagctcaaagaacacctgaaaaatttattgcaaaaaggttatcatctagtgtagtcgacccagatatttgccttgtacaaccacctcctggtgtcccacatccctgtggaacagttaaatacaacttatttgactcaccccactgactcctttaccccatatggattgtgcaggatcagactttaatgtttattttagcctaatttgattcttgatgcttgtaggggtgatgactctctaagagatccttagttatgagagtctttgcgttctggttttccctaatgctggttgtagtagttatattct

SEQ ID NO: 480339 - DNA, 669 bp, Homo sapiens
gtttgcacttcttttgtggtggaatgtcatcagttaaggagggcagggcgtattcacttcttttgtgattcttcagttacttcaggccatctgggtgtatacgtgcaagtgacaggggatgcgatggcttggcttgggctcagaggcctgatgctcacccaatgttgaaaggggggcagaaggaacacttacccatccacaggagccaaaatgatactgacttgtctccaatgtgtggcttgggtgaaggtctccacccaagctttacagcttgggctggctcagctgccataagaggattggcgtatgatcctgtaaccagccagccaaaatggcagacagtgcccaacgaagctaagggagcagggacattccatgccatagggatagtgccatccagtagagcctgtggaggcaatttctgcatggcagagtgtcagcataggcagagccctggcagaaagccccatcatggccataggtcaggcactgcagacagccatgacataggcattgccccgctgagccttcctgatgtagtttgcatgctcatcacctctaaatcccatgttgaaatgtgatccctaatgtaggagatagggcatagtggggaaggtttgggtcatggagagattttgagtttttttaattaattttttattatacttt

SEQ ID NO: 480340 - DNA, 577 bp, Homo sapiens
gataacattaggagatatacctaatgctaaatgactagttggtgggtgcagcacaccaacatggcacatgtatacatatgtaacaaacccccgcagcagcccctgcttctccccaaggctccactcaagaaaatttgtgtccatcaaaaccactaccaatttcagttggaagctccctttgcctgtgaccccaggatggtgttcgatgcattgaaatttaccatcatggtggaaggcaatggagaaacaggcaccttcttcacagggcagcaggatagagtatttgacatgacccacggagaacaagaaaaagcagggtggtgcaatggcccacctgggagccacacagggcaagtccatgccaccaaggcattgagtcacaacagacctgtgcagattctcaacggccacttggctggagaccgcttaagactaccaagttgctggggagaggggtggccattatcacggcagctgactgctgcctaagacaactgagctccccgggggaaggatggccatcctcaaagcagctgcctgctgcctaaggtgactgagctccccaggggaggggtgg

SEQ ID NO: 480341 - DNA, 576 bp, Homo sapiens
agctgcactgaaggaagcccagcagccattctgccatgaaccttcctttgcagggttcttccttgcaatgggttcaaacatcatcctttagctcagagaagtttgttattactgactttctgaagcctacttctgtcaactcgtcaaagtcattctccgtccagctttgttccattgctggtgagcagctgctatcctttggaggagaaaagactgctacactagcagtgagcaaggctccgtgggtgtgggacccactgagccaggcacgaggtataatatcctggtgtgctgtttgctgtgaccattggaaaagcacagtattagggtgggagtgtcccgattttccaggtacagtctgtcacagcttcccttggctaggaaaaggaaatcccccgaccccttgtgcttcccaggtgaggcaataccctgatctgctttggctcaccctcgatgggctgcacccactgtccaacgagtcccagtaagatgaaccaagtacctcaattggaaatgcagaaatcacccgccttctgcgtcgatcacactaggagctgcagaccggagatgttgcca

SEQ ID NO: 480342 - DNA, 736 bp, Homo sapiens
cagggctgggtgtatcggcggcatgtgggatccagttcatgtaaggagggatgcggcttccatgcacatctttctgtgtgtgtatagatacctgtgtgtgcctgggcatgttggagtgtgtctctgtgtgtgtgcatatgcatgcatcagtggctgggttttcactctgccccgggctactgtgatgaaacttgtggctgtattccatgtgcacttgccctgctcacccctggaacccataggaagaaacataagaggaggcggatgcttgcagatcagcattactctgccgacgagtgagccccaagagcagagaaggcagcatccaaacctgtggatctgcaagtgtggcctctgcaaaaacagcctcagcatcacctatgcccatcttagcaacaaagatgccaactccactccagatccgatggagcagaaacgccggggacttcacagtagccaagctatggaaacaagcaaagttgaggaagttctcctggttaatatcctgaagtgtgttttccagcttgtttccattctccccatctgcttttggtactccactcaatcgtaggtttggtctttttacaaagtcttatatttcttagaggctttgtttattcattttcattctcttttctcgcatcttgtctgcatgtcttttttcagcaaggaggtcttcaacctcagatatcctctcttctgcttgattgattcagctgttgatgcttgtgtatgc

SEQ ID NO: 480343 - DNA, 1871 bp, Homo sapiens
gcagctgccacagctgctgtctactgatgctacccaggagcctgaatacaggcctactcagggcgtaacaggaccatggaaggctttcagaagtcatttttgaagacacaacgcaaattcgactcaggagcccagctggcttcacctagtggatcccacaccggggctgcaggtggagctgcctgccagtcctgtgccgtgcgctcacattcctcagcccttgggtggtcgatgggactgggtgccgtggagcagggggtggtgctcatcggggaggctcgggccgcacaggagcccatggagtgggtgggaggctcaggcatggcaggctgcaggtcccgagccctgccccatgggaaggcaggtaaggcccggcgagaaatcaagcgcagtgccggtgggccagcccggctggggcactcagtacaccctccgcagccactggctcgggtgctaagtcccccattgcctggggccagcagggctggccggctgctccgagtgtggggcccaccaagcccacgcccacccggaaccccagctggcccgcaagcacggcacacagccccggttcccgctcgtgcgtctccctccacacctccctgcaagctgagctaagggagagcatattcacatggaaacaaggctaggtgattaagggagaaagggagagtctaaaaacaaggttagtaaaagcaaggttctaaagagaggacatattaatagtacacatgtaaacagtagctgactgaatttttaaaagattaaataaagaagcactaagacaagtattaaaattttataaacaattattgcttatccttcattagacagcaacaacattggtgggaattgaacaatgagaacacatggaaacaggaagcggaacatcacacaccagggcctgttgtggggtggggggaggggggagggatagcattaggagacacacgtaatgttaaatgatgagttaatgggtgcagcacgccaacatggcacatgtatacatatgtaactaacctgcacattgtgcacatgtaccctagtacttaaagtataataaaaaaagaaaagtttatcatagatagtacatatttgaatctatgcatatttatgaactatgaaaatgactgccatgttcataacaatggtaatataaaacagtttatgggcacttactggaaatcaaatgtcaaagactcagagactaagtcatttagaaaagaaaataaattcatttgcagaaaattattaattggagtacaggttttaacagaacttgctgtaaaattaaaaaaaaatgattagatatttaatttatcaaagctgtaatgttcatgatggacaattaataacttctttgaattattgtcaaattagatgatattctcccatttttatatatcaacatttcaaaggccaagataaaattatttttgttagggagtcagtaacttacagaaaagctcaagatttgatttaatttttggaaccagacagaatgagtctgttttacttgttgttgttgttgtcattgtggtttaccttagggaaaatgaagcatttaaaaatgttttccttgtgtggaatatgatgtaaaccctcattcctttaatggagcagggcaaggtgatacagtatttccttatagacactgtgcaaggcactctattcacttatgtctaacaacaagcccatgatgatcacagggcactgcttactcactgaattttacagttacactagaggtggagttaaacctgcattggtaatacattaggcttagtaaataatttagtgagccccttgagaatgatctaagatatgagcacctaattgtaccaaatgtatggtcaatattatttcctgtt

SEQ ID NO: 480344 - DNA, 775 bp, Homo sapiens
atactaagcaaattatcacaaggacagaaaaccaaacaccgcatgttcttattcataagtaggagttcaaaaatgagaacacatggacacaggctcaatacatatttcttgaatgaatccatgaatggaagatattggaaaaaggattctggaaaggattttcagaatcctataaaggaaagaagaacacagagttccttggggctgtgggaggagagtgctgacctgccacattccaagggaaaaccaccttctcacttcatctcccttctggctctccatccatctgctgagaactaccactcaattaaaccttgcactcattctccaagcccacgtgtgagacaatccttcaggtacaccaaagcaggaagccccgggatccagaaagccctctgtcttttcaatgctgcttgggatcggagccccacaacctgtcctaactgctcgctcggtgatgggaggaacatttatattgtgataaagaaaatagtaatactggcagagaatggtacttacttcaacgttgactttgcagagctcctgctgttcgccactgttgacagccgtagttatttcaatgtccactgaacaattttaacttaaggtaacttcatacttctttgtaacattaaagagtctttggattcaactttaaatcttgaaatacagtggatttaactatttagagtaagaacagatatatttaaggtaataatattggttgaaatgtctaatttatgacagaagatatgctgtctacactcatcatttc

SEQ ID NO: 480345 - DNA, 571 bp, Homo sapiens
agctgtcggacatgtacgacatgtgggcaaacaagggttgtgcaggggaagaaggtgtagagatggacacgtttggcagtggggggctggtggcagggcccgaggggcaactggtgggacggggcttctggtgggagcagtgtgacaggggacaggtggggctgcggggctgccacaggggcagggtggggcagcgggggaatagagaggatgttttccagatgaaaatgtaccaccttaggtcatcctcaggcattacattcaggccacagataggtcccgagccctgctctgcggggaggcagctaaggccccgcgagaaatggagcacagcagctgctggcccaggtggtaagcccctcactgcctggggcttgtgggccatcctgccgctccagtgcggtgtccaccgatcccacgcccacccggaactcgctctggcccacaagcaccgagcacagccctggttccctttagtgattgtggtggctacggtgagggctatggtagagatcattctgaacatctaagtggaagttcttatagagatgcatttcagagatatgggtcc

SEQ ID NO: 480346 - DNA, 538 bp, Homo sapiens
acggtgagttgccatggacaaatgtgaccatggaaagccagagcagaccttcctccacattgtcctgacaggtggaagaagtgaagcatcctgttcatctctgcaagatcatgttgttctttctgacgccccctacttccagaataaagtgattaccgaggaatatctcgtgaacgtcacaggtacaggtggctcccaagatagggcttctcattccactccaattcagtggtatgaggattatgaagtggaggcctgtggccacagacactacaacagcggccttaacttattcaactggttttctgaccacaacttcacaggatctaataggattgctgaggtggtctctcagtacgaggggtcccatcaatgtgagaagaaatgggcatgtaaggtttatggagggactgtggaaaaggttacagaggcatgtgggaaggcagtctgagtggagaagcagattggtgtctgcactcagggctactcagattgggaaatgtctgggcacttgcctgtaatcaggtcatgtgaaaac

SEQ ID NO: 480347 - DNA, 616 bp, Homo sapiens
cagctgagaaaatttaaataaacatggggctctttttgcaatctttggtgcttgctcatgtgaggatgtgtattggagaatcaatattggagaatcagaatattaaaacatcaaagggtatcacttttgtacagtttctcttgactgattttcatgtgaagaaagaaaggaccagagccaagaagatgatgggacagaggaaagggccagcaatacttccctctcaccattcctctccatgtctccaaaaatggccagacagtgagagcttggacaccaaccggttagggcacacgagcgaccacttccagaaaggaggcaggctggtgaatgcagtgttctgccttggaatggtgaatggagagcatggcatctgcacagatgtggccccaaacagaagtcctaagtctcattgtgacccgactaaaatcttatcctaaccaccaaggcagagagaatatggtgcattggtcagaaaacaccagctctgcaagtgtagaaacttagcctgtttagcacctacccccagttcctcaaacagggtctgcctcatcatagcagtagctcaataaatgtctgttgttgaaaggggatttcttacatggcttgacagctc

SEQ ID NO: 480348 - DNA, 545 bp, Homo sapiens
tggtcagggagatggggagatgaaaacaaaacacttatttaaaaagatgtttggactctcataccacccaaaacagcttttcagcagtagtttctgtattttgattttagaaaagctgattattgcagagctccctggatcctcaacagtaaggctgacctccctgtgtgacctgcccacccaactcctggagctgtaccaacagggcttctctctggcagccatgcacccctttgtgcagcccacccatggacaggagaagacacccctggagcatatctttagggccatcctcatcaagaaaaccgacagctctgtggctcttagtctacatcagtgtaaattagaatttgctgtgaaaggtggtacatgtctttgctcaaacctagaattcacacattttttggagagctgtaagcatcaggctaggtaagaaagaacacaggactcgtggccagcaggcctgtgttctaggctgcatgaggctactggttcattttcctcttagaatacaagagtttatattactcatctatgtgctcatg

SEQ ID NO: 480349 - DNA, 655 bp, Homo sapiens
agtaaatctccactatggaatgggccctgcacaaaggaaggagagttacttattgcaaggccaggcacacaggtgagggtactgcttttccagaggtacattgtgaattatcactgggtcagaatcctaataatgttgaaacacagccaacaggggatattatcacctatctctgggcctatgagctaggtgatgtgtctctcatgccagtgccctgccacagagaacactgtgacagagcactagatatagtatctagccttactgaacataaaagagtccatactggaacaaaaccctacaaatataaagaacgtggcaaacatttacatgctcctcaacccttatttaaacacaagagaaatcatactggaggtaaaccctacaaatgtgaagaatgtggtaaagcctttaagtacttctcagaccttactaatcataagaaaattcaaactgtagggaaaccctacaaatgtgaaaaatgtgacaaaacattgagcttgttttcacagctcattggacataagataattcatagtagagagaaggtccataagtgttaaaaaaaaaaagtggacctttaacaagtccgcacattgtgttcagcaacagagatttaacactgaacaaatgcaatataaagaaagccagtctt

SEQ ID NO: 480350 - DNA, 507 bp, Homo sapiens
gagaaggaaaaggaatataggcccaatatgtatactttcgacaggagtaagggcaaagggagagtactacacaaatctattgagccctatcctgtggtggaggtggacaggcattgtactgggacaggaggagggggtaattggcactgggttgtgggtattgaatttgaggagttgcaaagagaaaggttcataatatcgctggcctttaacagtgccattgccccactctcctgtaccctcagatttaaggactatggctatggggaactgccaggcatccaaaccacaagaagccctagctctacccatcaccttctgaatacaagtgtagacaggtctatcagggcagaggaaaggagagaaggagagcaaaggcgccgggaggtagacggggggaagcaggattccaagcctctgaaagaaaggatcccagagcgttgaaagaaacagtaggcttagaagaggggagaggtccaaatggatgagaggaacaagaaacaggcc

SEQ ID NO: 480351 - DNA, 714 bp, Homo sapiens
actgttactcgtttacctgggtcctctatatccagaatattatgggatattgctgggcccagaaccctgataacatgactctcatgactgtgcggaataccagaaggttttatatttttaccaagctcacagaagcttacaacactaacttatattgtataaactctttggtagtagagaatttcatgggtcttttgatgatgaatgattcaacacactgggtcctgcccagaaggtggaatgtgacatctcactggcgccatctcgacatagaatgggccgtgcacaaaggaagtatagtgacatattgccaagccagacccacaggcaaggatactcttttgccagagccatgcccaaaggactgcattttgacatatctctggacctatcacctaggagttttaactatgtcatcctactcccttcttgcccaaatgatttatgttcataaatttacgggtgcagagaaacatcatcagtttggtccacagatatgcgtgttcgactccctgatgagtggtgaatagtctgtgtatggtctgggataactgtgggtcacattgagtataaacattatacctatctcttctatattaaactctggttgaaacagaaaaggtttcgagtgcccatggaaaatatgatcactgcattcagggcagtggtaaaattctgtccttggtctcctgaaaaaggacccttagacgtaga

SEQ ID NO: 480352 - DNA, 937 bp, Homo sapiens
ctacaacctaagccattaaggcactctcatacatttctgatatttagatattatatcctgtgcctggctcggagggtcctatgtaggcccatggagcctcactcattgctagtacagcagtctgagatcaaactgcaaggcagcagtgaggccgggcgagggacacctgccattgcgaggcttgaataggtaaacaaagtggccaggaagctcaaactgggtggagcccatcgtagctcaaggaggcctgcctgcctctgtagactccacctctgggggcagggaatagccaaacaaaaggcagcagaatcctctgcaggcttaaaagtccccgtatgacagctttgaagagagtagtggttctcccagcacacagctggagatctgataacagacagactgccttcttaagtgggtccctgacccccgtgtagcctaactggggggcacctccccatcaggggcagactgacacctcacacagtcaggtactcctctgagacaaaacttacagaggaatgacaagggagcaacatttgctgctcaccagtatccgctgttctgcagcctctgctgctgatacccaggcaaacagggtctggcatagacctccagcaaatgccaacagccctgcagctgagggacctgttagaaggaaaactaacaaacagaaaggacatccacacgaaaacctcatctatgaatggctaattagaataacgaatgcagagaagtccttaaaggacctgatggagctgaaaaccgtggcacgagaactatgtgatgaatgcacaagcctcagtagacgattcgatccactagaagaaaggatgtcagtgatggaagatcaaatgaatgaaatgaaacgagaaaagaagtttacagaaaaaataataaaaagaaatgaacaaaacctcaaagaaatataggactattt

SEQ ID NO: 480353 - DNA, 805 bp, Homo sapiens
ctaatgctaaatgacgagttaatgggtccagtgcaccaacatggcatatgtatacatatgcctggggctcaaaatttagttgttgttgtacatcagcatgagaatacctcccctggagcttatcaacagttgtattttgcctggctgcctgattctggttgtcttgttgttcgcacagttcatcatattctaccgtccagaggaggagtccaagtcttcgctattgtgaatagtgccacaataaaccttagcctagaagtacaggaagagtgcaagctgattccaggcaaaccaacgctcccagctccgaagagtctgcggttgttagagagccctttcccagaaagggctgacacctgtgtatttagtccagcagctgtgctagtcacttttaactggccaacaatttcctggtatttagcccccgaattctaaggaaaaataggacaatagcaagggaaaggggtccaatgggacttaccgattgaaaggggaggtggctggcaaggtccagttgaaaacattcagaagacaagaggtgaattagcaaagtggaaagagatgttgaattaaatgtatgcaaatttttgatgacaaactgcatgtaaatcataggttatatataatcctaaagacagaacattgatggccctacatcaaccttagtgccagagtaaaacaaaaggagatgcgcaccactggggtcttccctaaaatacaaaattcaaaaaaaaaaaaaaaatacgtgaacatagaaataataaactgagactgagagtgaatatgggactgacagtcaatatga

SEQ ID NO: 480354 - DNA, 611 bp, Homo sapiens
aaatgaaacactgtcggcaaacaagccatggtggttcagagaggacagaaaatagagcagaacaataacccagtaaggcttgttatcagtgtggtttacaaggacactttaaaaaagattgtacaacaagaaataagctgctgccttgcccatgtccactatgccaaggcaatcattggaagacacactgccccagaggacaaagtttctctgtgtcagaagcccccaaccagacaatccaacaacaggactgagggtgcctggggcaagtgccagctcatggctgaagctcataaaggattactggatatcgttaaacacttaaaagctcaaggcttagtaaggaaatacagcagtccctgcaacacccctatactaggagcacaaaaactgaatgacattaaaacagttgtgagggttccttgcacatcactggcttttgctgactatgggtccctgaatacagcaagatggccagaccactctagactctaatcaagaagacccagaaacagccttcaaaatcttaaagcaggccatagtacaagttccagctttaagccttcccacaggaaaaaaaaaaaaaaaaagccaaaataaaacttctcttt

SEQ ID NO: 480355 - DNA, 631 bp, Homo sapiens
caggccagctccaagggtctttcatgcagttggccctgtgggatctggaagctggatgcataggacctgagggcggagctaccctgaggctgtttctgctactgaaattcacgtttattttctgtttctctggacagtggaagataatttttcctcagacaagggttgcccaggggaagaaggcagcgaggtggacacttttgggagtggggactggtgtctgggacccgaagggcacgtggtggggcggggcttcctgtgggagcagtgtgacagggggaaggtggggcagcgaggcttccatgggaacagggtggggcagcagggatggggggagagctagcaaggatggatcaaagagcaagtccagagactttgcatttattatttctgagaaccctgcagatgctaagaatgctgccaaagatatgaatggaaaggttaagaaatactcgagcttctcattgcagatcaaagaagtgactagagtgaggccaacattccttatattcttgtgtttgctagagaattccccctaatttttctgtaagttcctagcagtattttttcatggtatgcttcctcatctaatgaattattccatttcctaggtctcctggtagtggtcccc

SEQ ID NO: 480356 - DNA, 464 bp, Homo sapiens
gtgggcagggcataggaagaaatacgtttcaaagtcccaaacatgtcctggcttcgtgtatttcagtcaacatatcttgagtcaagctcaacttgcagagccaataaaagccccttggaaaaacaggactcatacctcatctatacagtcatagtgcaggtttatctgtggaaagaaagggatcaagaatgcagactaggatcagctaaactatgtggttctcacagagaaaaatgcaaggtgtgcataaatacagaaccatcaaatgaaatatccagccctagagaaactgttggatctaattttgcaggttttgcataccagaagaagctgttccaactgaacaccccttggtctcctgatgtcttcaagggacacattctggctacagattcttacaggtcagtctcaggtaccctgggagcccataccatagcatctgcactggtgggccatgtctgacc

SEQ ID NO: 480357 - DNA, 471 bp, Homo sapiens
tggacaagatccatgtataagagccccgatttcactttaagattgttttcaggaaaggagtcacagccccagaagtgtgatgaatcatggttcaaatgttaccaaatcacttgtgaatcaaagccatcccgagcaacagtgcaagactctgtctcaaaacaaaaacaaagacagaagaataaagaagaaggaggagaagaagaagaagaagaagaagaagaagaagaagaagaagaagaagaagaagaagaagaagaagaagaagaagaagtaggagaaggagaaggagaaggagaaggagaagaagaaggagaaggaggaggagaagaagaagaagaagaagaagaagaagaagaagaagaagaagaagaagaagaagaagaagaagaagaagaagaagaagaagaagaagaagaaagaagaagaagaaggtcacttaacctaggtgctgggctctgcaatatgtaatca

SEQ ID NO: 480358 - DNA, 1561 bp, Homo sapiens
acctgtaagaggccagtttgacatgtaagaacactgcttcaaactgcacttgacgttgtcatggttcatgcctttcccagagagcaccagagatatccaggataaagggaggcagtgaagtcaagggcctggtcgtcttttgcagacacccacctctggggtctcaggtatggaggcagaacaggagtttccagagaccacctcaaagtctggaaatgcctcctcctccagagaagcccgactacgaagacggcccaaatgggccgcctgcctagatgttgtagccgtgagtctttttgaaacttgccccattgtgatttctaggtacattttgcctgtgttctccagggttgatctctcccatgtggggcttgctgcagaaacatgcatcctcaggagatgccagctgtgtttttctgtgagagtattgtgagtgatggattcctcttgggctacatggctttgtgttctctatttttctgtgaatcattaatttgtggtgaatacataaacggaccaggcccacccagtgtgagtgtgagcagcaataaggttagtgttgatcttccttttccttcatgggaaatccgcagtgctcctccacagcactgcgggacatattttcaggcttgccatcgccacagacagcctctgacacattgtctccacatcatctgcagtagtgggaggccagtattattctatcaatcacagaaccctgaaaaacacaccagactacattccaatccacaaaggaccctatacttgtacatagcctcttttgggaatggagtcagaagggtagtttctagcgaccacctcacagtctcaaaacacgtcctcatccagtgggagcagaccacaaagactgcgaaaacctagggtttctgaggtctggctcaacaatttccaaactaaatatttcccggttcatggagaacaaccctcatgagaattcattgtgtgagtgtttctttctaaatactggcatattttaatgactttaaagctactttaagagtagctttgatacttttaaaatcataaattcccatcacctctgccaacaagaaaactcttgttctcccacttctttcagaggtctgcatgattctggtaaaatgagaagcaggcagttgtttctggcttttcctggtaatatatcccctgttatgtttcatttgcatggccttctcattgtggaaaggctctttcattgtgctattgttagatgggactgcctctctccacagattatttagcttccagagatttcagagagcaaaagggacttcgagtaggctggctgtggtccaggttgtgggtcattttcttgttgtgggttctgaggttgtctgtactttgcagaaggcttttgggttttctgacaggaatcattgaacattgctttgaatctagcacaaggcagttttttctctcaggtgagccttgatttttctttgcttttatgggggaatccacattgtcccccaacagcactactggacacccttttaaggctttcccttgcctcagacggcctctgagacactgttttaac

SEQ ID NO: 480359 - DNA, 469 bp, Homo sapiens
tccagtgaaagaccacatccacagtgagaaaggacatgcagatgcaatgagacacagcatagattaccaggcaaaagccagacatggctccctgcttctcatactacaggaatcatgcagcactccgataaaagttgtagaacaaaagcttccttggtcgtcttctgtgaactgggagacgtttaacatggaagacactgagccagaccaaggaaaccctaggctgacaaggaacatggaagacaggaaaagaagaagcaagtgtggtggccatatcccatcttgcatctatcaatctcactttcaagtggagccaagtaggaaagctctcaaattgggagtttgccaggatggccccagtttgcacatcaaatattctctgcatgttggcgtactcccacctgaacatcaggccatagtgtggactacttgtgtaattaaggacatgtgaggatgcagttggaatcaa

SEQ ID NO: 480360 - DNA, 1456 bp, Homo sapiens
gggctctggaactcagtgaagtatttctacatctcacacttgccagcacttgccaaagcagtagcacgatggtgtgttacttgccaacagccaatgcgaggcaaggccccacagttccaccattcatacaagcttatggagcagctccttttgaggatattcagggggatttcacagaaatgctgcaatgtagaggtgattgcttgtggaccaaggactggaacgtagcccctttggggccacggtggaaaggacctcagatcatcatcctgaccacccccatggctggggagtgtgtggccttaggaatcaatggggccagactggatcctccagtaaatatcttggttcaaggagaagtttacaagcactctcctgagcaagtgtgtcaaactttctatgatgaattaaatgtgccagtaccaaaaattccaggaaaaacaagaaatttgtttttgcaattagccgagcatacagcctagtctctcaatgtcacttcatgttatatatatctttgagttcttttgccagttcacttttaaataacattttgattggaacacaataaacgttataattttacttacataagatatacatttaactttgattatttcaaaatacattttgttgttgtttatgataataaatgtgccaactttttaagatactgaacctgtgattagttctaataagacatagaatgaattttctcagattttctgggtatataacaatgtaatttacagataattaaataccttaaaaggaattgcaaattgttattacatgtatgtgtatattcatttgtttatttataggagctagagctcatatgttttaaaatagctgctgtgatactctacatctcttaatctcagctttctgtaaaattgtgagacagttacttaccacaaaaggtggttttgagcatcaaagaatcacattagttcttttagacaaaatgcttaaaacagtgcctatcacatagtaagcactataaagtgtttttgttgctgatatcattattaatattattttattggctgcaatttcaaaataaaagataaccgtggtgtgagtaaacatctttattttgctctttatcttatggatgatacactttagaggtttatttttatattatgaatcatttaaacttatttagacatttggacattttgacattgtgtaacttaagtttgatatgcatattagtctgttctcatgctgctaataaagatataaccaagactgtttaatttataaaggaaataggtttcattgactcccagttcagcatggctgcaaaagccccaggaaacttaaaaatcataacagaagaggaagcaaacacatccttcttcacatggcagcaggaagaaaaatgagtgttgtgttagtccattttcatgctgctgacaaaggcatacctgagcctggacaattttactat

SEQ ID NO: 480361 - DNA, 1008 bp, Homo sapiens
ctttagcgagagccaccagcatgaaggaagttggatttttttcccctatttccatgaagcaaggtgatcaatggatgatcgaggcagcccttcaggtggcttaggcctgacctgtggagtatccttgtggggaacgcaggccagcttgaatgagagcagatcatgagagtgctcctgggcaggcaattgccccagtggaatgtctcaccagagcagtgcatggcaggcccccgtagaggatcaaggcagtggctgaacactgggaaagaaatggcaaagggatttaatggagactatggggttactatgacaccagggaaatgtagaacttattttgaaatagattggtcaaaattagaagtgggttggccatcagaaggaaacctggagaggtcccttgtttctaaggtatggcacaaggtaactggtaagtcaggacactcagaccagtttccatacatagccacttggttacagctggtgctagaccccccacagtggctaagagggcaggcagcagcagtgctagtagcaaagggacagattgccaaggaaggatcctactccacccgccgagggaaatcaactcctgaagttctgtttgacccaacatcagaagatcccttgcaggagatggaaccagtgatcccagtggtgccctccccttaccagggaaagatgctccccactcttgagcccacagtccttgtgcctccacaagacaaacatatccctaggccacccggagtagacaagagaggaggtgaagcctcgagagaaacccctacattggcagctcgtttaagacccaaaactgggatacaaatgcccctgagagagcagtggtatactgggatagatgaggatggtcacatggtggagaggtatgtttttgtgtaccagcccttcacctctgccaaccttctcaactggaaagacaataccccatcctatactgaaaagctacaagctctaatttatttgctccaaactattatctagacccat

SEQ ID NO: 480362 - DNA, 501 bp, Homo sapiens
tccccaggcattacattcaggccaccgacagaacaatggtagaagcagattgtcctgggaagctttcattggtggcctcaatagagaagccagtgaaaaagatgctgaaagaagtgtttgcgaaacatggtccccttttggaagatgatgatggatacactcttgatctcaacatgagttcttctaggggagccattccagttaaaagaggtccatcttcacgaagtggaggtcttcctcctaaaaaatctgctccttctgctatggcaagaagcaatagttggatgggaggccaagtgatcgtgatggctacaatgacgcccgtggtagagatcattctgaacgtccatgtggaagttcttatagacatgtatttcagagataaggcagaggaccctgcagccttctgcagtgtttgtgtccctgggtacttgagattagggagtggtgatgactcttaacgagcatgctgccttcaagcatctgtttaacaaagcacat

SEQ ID NO: 480363 - DNA, 2209 bp, Homo sapiens
ccaacacctggaccaccgccatgatgtcatccatcaccagcaccttctcctcccacgagggcacctccacactctgtgccctggctggcctctcctgcagagcctccaaattcaacggggtgcctcctttggagaagaaaactcatgcctctgctttattggctgacatgttcctaaggagatgtgacagcaacctcatttcagataatggtgcacattactgcaagtatcacacgtacaggtccaaagttggggggcagggcaggaggaggaggatgagatggaagaggagaaggagaaggagaagaagaaggagaagaagaaggaggaggaggaggaggaggaagaggaagaaagaaggaagaaggaaggaaggaaggaaggaagaagaagaagaagaagaagaagaagaacaagaagaagaaaaagaagaaaacagcaagcttttaagtctgtatatttgtaacactagatcagaaactcagtactcatagtgaaatccaaaaatgatcacagtcaattccatctcatacctagactgaaataagaaccttcgaaagaaaagaaagttgagagcttcaggcttgtcaaaattttcctgtataggtaaaattattggtgactttctctcactagaaaacataaacaaaaattcatgcttcatatatttgtaaatagaatatatttatttctatcagttatgacatgcaagcaagtaataaagtgaaagtataataataaaatgatataaggaaatgtctctgtgtcaaaaaactctattgaggctattaattttataaaaaccatagagaatatttcatgaaactacattatacagtacattttactattttactgatattttaatactcaataaattaaagaaaattcttaatcattatttattaccaataacattattctacttgagtaatcattttgagattaaatattttaaataaaacattaaaaacaaattgtgttgactgatatcagctttcaatgaaataatacttctgtatttgtagtcatgtgaagtataactttctcctcacaatggttcttttataacaccagtggtatttttttctctgatatacatcctttttgatctcacagttttactgtaaccatacattacatgactccagagggtagccttcaaataaatggaaaaattatatttgtgacaaaattctaggaaagggaatggtaaaatgggagaataatttctgaatttctaactgttcattagtggatttggatgtattaagatatagacaaatatttgcaccctgcaagtttccatatgtgtatataaatttaaatgaggtacccataatgtatgggttgtgtaatctttcaattcatccttaattttccatgtgggaaatttgataagagtttatccttatcaaatactcaatttgaagtactatacccaatttcaagtactacactcaatttgataaaattttgttggtaaagccaacaaaatctgtgtcaacattcatttcaattaatccaataatgttaactgctgatagcttcattctccttcatccctgttggcagcctgaaagctaattcttactctaattcagtgctcaaggtgccatccacaagtggctgtcatcttgctgtggattgtgacctctgactccaccactttcatcctatagtagtcctacttttgcatatttaataaactttgtacatggttaaataataaaagtgcagtgaaatgtcagaccatgctgtgaaatgttccattgtttctatatctgtaattgacctttcatgttgtggaggacaagaaaaacaattcaatatgtttcttagtatccagtccaatgcaccctttcttattaatgtgccaaacctgtaccttcaaggcactgacatccaagcatggctagatgtatcaaaatatcttctgattaatcaccattatgttaatcactgttgcccagatctggactctgactgtgaaattgtagggtggaaattgctataattgctcaaactatgggaatgactatgttttgtcataattactactgtcaccttactgaaaaataccacattacatggcaacttttagttacataaatcctgttgattaatttttaatgtccagcatttatgatattgcacaagtaaagatctttgataacttaaatgattagctgagcaatgattaaaataa

SEQ ID NO: 480364 - DNA, 657 bp, Homo sapiens
cgtccagcaccagcaccttctccccgccaagggcgcctctgcactctataccctggctgctgtctcccgcagagcctccaatttgaaaggggttcctcctctggacttcccgctgaccatgacgcgcactgggccaagaggaacaggcccaaaaggaaaagcaagatcagagaaaggccacagccttagtcatggccctcggagagacaaacttttgtggttcagagaggacagaaaatgcagcaggccagtcagctggcaagcaccagcttatgtcatcaccctcactgagccccaggtacatttaaccattgaggaccaggaaattgatttcctcctagacactggcacagccttctcagtgttaatcttctgtcctggacgactgtcatcaaggtccgttaccatccaaggaatcctgggacagcctgtaaccaggcctgaatctcaaaaaggattacaggatattgctaaacatttaaaagctcaatcgagccttagtaaggaaatgcagcagtccctgcaacaccccaattctaggagtacaagaaaatgaatggtcattggagactagtgcaggatcttagactcatcaaggaggtagtaatctctctatatccagttgtacccaaactctataacctgctgcctcaaata

SEQ ID NO: 480365 - DNA, 588 bp, Homo sapiens
ctcgcctgagagaactaatgccacagccccctggttctgctggttttaacacactgtaaccaggtgcacctctgccatagattatctacattgataatggtctttccagaaagataactgaggaactcatatttagtcgttctgattcacatgtatcaacttgaactaaaggaggaccacatcattagaactaatggacagatcgaagatgaaaggaagaataaaggaaaagctgtttctttgcaagtggagctcctagctattaatgtaaagaaggaggaactcaatcaatctgtaaattgtatgaaagaatttaagatgaccttgactgtgggagccttctgccttctgcctggatcccaactgctgctgacagatgcacagatcatattggatcttggggctgtcatcaacaacaaaaaacaaacaacaacaaaaaaaacccaggataatagcagcatttcagatggaatttccaaaatgatggtgctgaacaatctgaagtctgcttttatttggtgccttaggccagtcaggagagaatgcatagctgccccaccatgaccacctgggtcctgcagttctgcc

SEQ ID NO: 480366 - DNA, 703 bp, Homo sapiens
ggtgatgggttgacaggcagcccccaagcaataactgagcatgaccggtctagggcctaggcagaggagcctcccgctgtggccagcaccacaactgattcacagagggtacttccagtccactgctgatgttcacttaaatcccaaagactctcagtcaccttttgatgaatactaccaagcctggaatttacccttcagggcagtgggctcccctctggcccaggtaatgtccataaacattgatgaagagagtctaggcctggactcagggacaccaagagtggtggtgctctactactatagctcaagtggtacccaaggttcctgctcgcatgatttaatcatctccaaaaggcctcacttcctcactttgggaattagatttcaagatttttggggagacacaaaattcatgccaaatcaaacagtaagaatgaccaaagtggagaaatacatcagaccttatctctatacctatgtttaacaggtagctcttgactttctgatcctctctggtttttctgacccatgatgacttccatatttttcttgcctttctcatatttgagttccagtgaggcaacttctttccataccatttggaaagctgatgcaagagtcacttatatggattcctcaagctctcacttctgctacttatgaaaacctaaacctaagcttcttgcattcactttttact

SEQ ID NO: 480367 - DNA, 539 bp, Homo sapiens
cccaagatttctttcgttggaatccgtgaggccaagaaccccatgtcagagaacacgaggcttgctaccatcttggaagtggcccgtggccattttggaagtgacccaccgccatcttgggagctctgggagcaaggacctcctggtaacactttgactccatgtctcacatacagggcatactggtgcaaagggtgtgctcccaaggccttggacagccccacacttgtgaatttccaggttcagcccccacagctgcttcttacaggctctgcagcttttccagaagcacagtgcaagctgccagcatatcaaccattctgggatctggaggatgctggtcctcttttgacatctctgctaggcaatgcctcagtggggactccaggaccacctccactcagagttccttccgttggtcaccaaatacaaactgaaaatatgtgagacaggtctcagtcaacttacaaagtttattttgccaaaattaaggatgcatgcccatgatgcagcctcaggaggttgtgaggagaattgcc

SEQ ID NO: 480368 - DNA, 748 bp, Homo sapiens
agctccgggaagcggagcttgcaatttacagtcatgggccacataacagtatttcagccaatgatggacctcatatgcaaaggtgagcttgagcgctgttctgggagatccactgctctcttcagagccagcaggcagggacgtttaagtctgctgaagctgcgcccacagccgccccttaccccaggtgctctgtcccagggagatgggagttttatctataagccactgactggggctgctgcctttctttcagagatgccctgtccagagaggaggaatctagagagacagtctggctacagcagctttgctgagctgtggttgcctcctctcagttcaaacttccaggcagctttgattacactctgtgtacctcatttggaaattcagaaatcaccctcttctgcattgatcttgtcggaagctgcagaccggaggtgttcctattcagccattttgccagctcagaaagatgtttcttattaggattcattgaaactacctgaagaaagcctccagatttaatttgaataagagtttttgtgaaaataatttgaactcgttattttttgtctttttaataatagccaacctaacaggagtgagatcatacctcattgtgctcctgacttgcaacttcctgatgattagtgatgctgagaatcttttcatatattttctagcctttcatacatcttcccctgggaaacatctgttcagattatttgtccattttttaatcaga

SEQ ID NO: 480369 - DNA, 722 bp, Homo sapiens
ggtgggctgaaggactcctcaaacatggctagagcagacgccgaggccgaggaggtgctgagagcctctctgctgcaggtctgctggagtttgctggagttccactccagaccctgtttgcctgggtatcaccagtggcagctgcagaacagcaaagattgctgcctcttccttcctctggaagcttcatcccagagggccacctgccagatgccagctagcactctcttgtatgaggtgtctgttgacccctgctgggtggtgtctcccagtcaggaggcatggcggcaggaaagtttaagtctgctgaagctgcacccacagccaccacttcctccagatgctctgtctcagggagatgtgagtttcatctataaggccctgactggggctgctgcctttctttcagagataccctgcccagagaggaggaatctagagaggcagtgtgactacagcagctttgtggagctgcaattggaagtgccctgcccagagaggtggaatctagagaggcagtctggctacagcagctttgctgaactgcagcgggctccactcagtttgacctgcttggcggctttggttacattacaaaaacgttgataattttaaaaagtttagttgcatgttggtgacattttaccacatttcatatgcatcaattgtgcattacatttttagaaattttaaaactgcctttttagtatgataagttctct

SEQ ID NO: 480370 - DNA, 624 bp, Homo sapiens
gttgaggaaaaatacccctaaggatggcctatcagtggccctggaagttcagctatagccacagtcttcagatggggacagggtgggtgcactgggagactgttactgtagacctagaagaagcagtacccgttcatcacctggaaacaggaaaaccatctgcagattttgaagtagatccttattccagtgccagatctgctgaccaaagacctggagtcaaaagaaaatcaaatttactggtgaatggaaaagttccaaatggaaaactgagagaagagacccagggcctattggagagcctacaggaagaagcccagatgcagaaaagggaagcagcaagaactctaaagtacttaggctctgggcacaaggtgcataaggtgaacctgaaataccttgtcattccagaaaccatagaaatgatcaaaaaccactagagttatgttagaaaaggtcttaagagccaacctggataaattcccactggaaaaatatgagaagttctcttaactaccaaaaagagtaataattgaaagcgatttaagtatgtcaaatattgtcaagactattagctcataatatattttttaaaagcctcattgttcacttgtgaaggatttt

SEQ ID NO: 480371 - DNA, 567 bp, Homo sapiens
cgccacatccttgccagcatgtattattgcctgtcttttggatattagccattttaactaggatgctccagccatggctaaatggggccaaggtacagcttaggctgtggcttcagaaggtgaaagacccacacctgggcagcttcaacatggtgttgagcctgcaggtgcacagaagtcaattaattgaggtttgggaacctccacctagatttcagaggatgtatgcaaaggcctggatatccaggcagaaatttgctgcaaaggtggaaccctcatggagaacctctgctaggacagttcagaaggaaaatgtgggtttggagcccccaaacagagtccccactgggtcactgcctagtggagctgcgaaaagaggcccaccatcctccagaccccagaatggtagatcctcggtcagcttgcaccatgtgcctagaaaagccatagacactcagtgccagcctgtgaaagcagccaaaaggggggatgtatcttgcaaagccacagaggcagaactgcccaaggccatggcctcttgcatcagtgtgatctggttgtgagaca

SEQ ID NO: 480372 - DNA, 556 bp, Homo sapiens
actttgtcaaagatcagttggcttataatgttggctgtgggtttgtcagagatggcctctactaccttaagcaactatgcctatattatgtttttaagaatacattctgcaaataagcctaaccgttatctgcatctgtttcagctgaaacactatgcagatgcaattggtgcacactgcaaggtgtcaatggagctaccattctggggtctggaggattgtggccttcttctcacagctccactaagcaattaccagccccagctgaccctgaaccaggagaaagcagggccaactttgctgcaggactggggcatgtctgcactgcatattctcctgcttgccagcctttcccagtgcccctgcctggccaccccacaggaatgtgtggatagtgtggcttccactgcccagcctgggtgctgtgcttcacccaattatcttccctgtagcctgggaacactttggattccccagcacacctggtacctgactctgttggtacagaggatagagctgagagccagtcctggcaccctagggttgcagtgagcag

SEQ ID NO: 480373 - DNA, 564 bp, Homo sapiens
ctccaccatgctgttctcttgatatgataattcccacaatttctgcactctccctcactaaagcacagagattctttctccataccatgcatcccctgccatcatatgagagagtggtgttggcaattccaaactatctttcctaccttgttaatgcctctttcagtgataagaagttaaagccaggtactgtgatcactcaacgaatttttggttcttatgatgacgtttaccatcatgagaatacacagaagtataaaagcagtaacaaaaaagaggaaaataaaggactcacattttatcacgacagaaatccaactgaccacaatgacaatcttgttacagcttttttaaaacaccgagggtctgagagttccatacccctctcagagacacaagggaaatcctgagacccagcattctggtgctgattcttcctcatctttgtggtctaatctaccttcaatctttgaggttgctgacctttggatggactttttttttccttttattctgtttgatgaccttgagcatttgattgtggtttaaggtggattcagctaa

SEQ ID NO: 480374 - DNA, 3853 bp, Homo sapiens
tgggaacccacttcttgcattagcatgacctggatggatttccacttttgcatcttcctcctctctttgcctgctgccatccatgtaagataagacttgctcctccttgccttctgccatgattgtgaggcttccccagccacatggaactgtgagtccaattaaatctctttcttttgtaaactgcctagtctcgggcacaggagcctctcccagtggccatcaccaccaccagcacacggggaatttgccaggcaaccactactgctcacttaacattccaagggctcttcagtcagcttgtggtgaatgccgccaggcctgggattcactctacagtgaaataatcacccctgagtcccagggaatgattattcacactgaagaacctgtaaagggagtaagaggaaatagccataatgatagaggaaaacaaggagaaaggagtatcatagaaattgagaaaggacaatctcatgaagacagtgggccacagtgcaaaatatcaaagagagatgaaattcccactgaatgagtctttaatgcgttggaataaaattatattcaatacaaaatctacctttcaaaatcaggtaagaaaacatacaaaactattcaagtgaccaaagttaagataaatgcaggaatgaataattaaaatcaagattttatcacaatgttttagagttaatcaatattcacagaaatgtgacactagtgatacatcacaagcatatcatgagagctgagactttcttcaaataataatgactaacactgtatttttactatgtatcagttcaccagagaagcaatgtaatgaattactttgtttaatgaagatgaaattatttttcacattttgccaatgaggaaactgagaaacggttggtacggacaaagggcagtactctcgtccatgtctaccttcagctcaagcttttgttcttaactactttgctctaatacatactgcattaatgctggtaagtttggatggcccatttaaaattttgtctgattctatagttatcagtaacacagaatactaaattcctttatctcagttatagttacattcaacaaatataatataactaaaatatattttaagtagattgaacttatattgaaaattaaaactgttgtggggtgggggaggggggagggatagcattaggagatatacctaatgctaaatgacgagttaatgggtgcagctcaccagcatggcacatgtatacatatgtaactaacctgcacattgtgcacatgtaccctaaaacttaaagtataataaaataaaataatctgaaaaaaaacaaaaaaaaagaaaagaaacttaaaaatattgaaaaatgttgattgttgatagcaatagtaataaaaacatccacaatattgaggatgaaagcctgaaaattaacttatttcagtgataatttttactctgtaaaggctgtgtagtatagttagggatcaaaaaattaactttaagcatattacaattaaccatagcaatccaattttatcaatcaaaatcaaatccatgtatgttaattaacaatctgaatactatcatttttctttcattcagtagcatcctgtttgtatcttggtgaaacagaataaaagcttctggcaagatatattagattttaaaatatttggataattaacatgctttcatataaagagtatacattaattagtgttttacttccctaaaacacattgatagaatagtttatcattgtatttaatactgttattattttcattactaacattcattgaatgtttactaagaactagtgattgtgataggcattttattcacattatctcatttattgcacacagccctaacataaataccactattacctccattttgaagataactatagctagtatttactgtggaccaccattagcaatctcagttccagtgctccaaagaaatattttaaaatgagtggaacattgtccttgttcttatgcaggttgtagtctggtaaatttatcaaaattttcttgaaaaaatcctgtgcatcattatatgccatgttgaattgaatctttgctctacttttctagctaaaatatatcaggtagaattatctgagtgtaattatttatatcagaatatgtcacagcatttagagattttctaatttgtacttaattgctatgataagaaaaatattaatacgtaaccaaagcaattattttggtctcaaatattaaaaatgtgatggtattccgctgaagtgttggaacttttcttgttattttgaataaatatttctgttattcaaagaaattctaacagttgttttctgacttctaatgaatatgttgcaaatgttcttagtgatatacatcaaatgattaaaggtatagttttccagaaagcagagttcattactgtatatctcttatcctggtaagacaaatctgtacttgattttggtgttaacaaaaagaagcaaatattttttactctttaatgatgttttatgcttaaactacatagagattttcttggtattcatttggaacattgtttccttgtctcattaatacttgtagttttcaattggtagataagaggaatttttgtagttaattttactcagatggagagacaaaagctcaaagaaggtagaatcatacaaatctgagaccaagtctattaaataaaagtgaagattattgccaggaaaaatattttaataataataatttacctagaatgaaaaatttggaatcaaaggtagaactcagcattcatttatccttttgtatatggaacaattttagaagtggggtagggaagaggttcagagtagattttcagaagaaacaaaagatgcacacttattatcttgtcacttctttataatacattattatccctaatttataaaaacataaagaaaataaaatgaagaagaggtttaaaaagaagaggaagaatttgccttcaaagtaggacaaagaaactaagcataagagaaactacttttcagtacactatgtctgaaacaaatttgttacaactaaaagaggacaccaatattttaattttaatgtatccagatggataagagaaactcagtaaaattgctttcaacaaacaaattaaaaaaaaaaacccaaaggtatccagcatttctacactatttataagtgcaatggctgctgcttctgaaaagacttacagaatctgcttttatgttattttttgatgtcatttatagtgtagccattgttagacaatgactgattcaattaaagctaatgcttttgatttcttaaagctctgaatagtatttttaattgcaattgattacatacttatttaataaaagggaaactgttgaactgaccgaataatggtatcccagaatgaggatttacatcagttattggttgaaacatttaaaacttcagagtaatattataattttcctattattcaaacttataaatgaaacaaaaagtgatttttttctatgctttcagaaacaggaattcaccagaactactttactgaataggtgagtgaattattcattaagatgatcagtaggactgggtcttttttaactctaaggagatatgtatattacttcacacagaagcaattattaatttactgatagcatagataacttcatactttaatttttgcaattttaatatacatgtttatactattttatttaattttaataaaagcaaataaagtattgaatatgtaatcattttgagataactctggagtagtaaattactataatttcacttttctttgccttttatttctttattagtttgttttcac

SEQ ID NO: 480375 - DNA, 544 bp, Homo sapiens
aactcccaactctccactacccttcccagcctctgggaagtgggctcctctctggcccagagcaggctttgtgatgccatccaagaggcaagtcctgaaatcagggatccaaaggcctcacttgtgtgctatccctttgatagaaaacccatttcgatgcagctcagagacagggaagccaggggaagcccagcagactctcacagttgaggagatatgcctgggactttcttttcacggggaactctctcccctgtctctttccctttcccaacttgggaccctcagcagacagcgtctaagcacgagccaattgcaggtcactgattggagctacacacagcctgaccatgcaatagaaaagaaaaatccatttttatggggagaaattcaagcaggccacagaatttgtataagtaacgagaagctgaacattatttcccaagctaatgggaaaaatgtctccagggtgtgtcagagacctccatgccagccctctcccatcaaaggcccagaggcctaggaggaatacatggtttcatgg

SEQ ID NO: 480376 - DNA, 1070 bp, Homo sapiens
tcccacaagatctagaaaatttgacaaaagaagacaggaagatgtgggaaagtttagaacttcttagagacttgataaatggctttgatcaaaatgctgataataatatggacaataaagtccaggctgaggtggttttagagcgagatgggaaacttgttgggaactggagtaaaggtcactgttgctatgcaaagagactggtggcattttgctcctgccccagagatctgtggaacattgaatttgtgagacctgatttagggtatctggccaaagaaatttctaagcagcaaaggattcaagaggaagcagagaataaaagtttggaaaatttgcagcctgaccatgggataggaaagaaaatcccattttctgaagagaaattcaagcccactgcagaaatttgcataagtaatgaggagctggatgttaatcaccaagacaatggggtaaatgtctccagggcatgtcagagaccatcacaacagcccctcccatcacagactccaaggcctaggaaggaaaagtggtttcctgggccaggtccagggacccactactctatacagccttgggacttggtgccctacatcccagccactccaggcatggctataaggggccaacggacagctcaggccattgcttcagagagtgtaagacccaacccttggcagctttcacatggtgttgggcctgtgggtgcatacaagtcaagaattgaggttaagaaacctctgcctagatttcagatgaaaggcttctctcataactcagaaagctggctaaaaagctctaacggcaaactttcattccaggagcctcacaatggaaacatttaaaaagcttacacaaatcaactaatgtgggggccaaagccctccaaaacttagtaagtccactgtttattggtaaaggaataacccaatcttcagcgagccatcttgcaggcttgtgccacatgctgcgaaaatgaatcctgaagggacccacaaatctcctcctctcctctactccattcgaagatgagggaccctaccaggagaagattggcagctagattttac

SEQ ID NO: 480377 - DNA, 656 bp, Homo sapiens
tcctgcaatatcccagtggtcctaatgtcatcaaaaatatccctaaaagagtcaaaaagatgtgacaacagaaacacacagagaaaaaaatgggagaaagatgctaatattgctggttttgtagatggaggaaagactcagaaaccaaggaatccaggcataatccaccagtgcagaagctatgatgcagaaaccctgggcacccaaggctgccctgcaagcaggcattaccaagctggggcctcagtagcagccagtataacaagggatgctcaggccagactcgttctgtctaatgggcaagactgctcgacagaatttaggtttgacagctctcccagtgctaaagtcttctatggaaacaagttgagcctaataactggtagtggacttgccctcctttcagaaaaaattacaaaactggaaaatacagataaaatactgtctgcagacgttggcaaacatgtagcatagaaccgtaatcagtgaagggataaaagaagcatggcatatgtttatccatcattttatgggtcataatttttggcttctttgcatatctaataatttttcactgtatagtaggtgtctgtgaatattatggtattgagtgtctatatttgttgtcctacattagcaagatttgaattatattt

SEQ ID NO: 480378 - DNA, 731 bp, Homo sapiens
cctgacagtaggctccggagggaacgcatgcaaagtggcaccggtgcccacctaaaggcagagacatctggagaatgctccagggttgcacagcggcggccgggcaacggcgctcctcacttctcagacggtggggcggccagggagaggcgctccttacttcccagacggtggcgcagtggtgcagaggcattagtcaagtgtggccgccaggcagaggcgcatctcacttcccaggcaggaccgccacagggcagaggcgcatctcacttcccaggcaggaccgccacagggcagaggcgctcctcacttcccagaaggtgtggcagccaggcagaggcgctcctcacttcacagacggtagggcatccaggcagaggcgcttctcacgtcccagtcggggcggcggccgggcagagggtcacctcacttcccagatggtgggacggccgggcagatgtgctccccacttcccagacagtggggcagccgggcagaggggctcctcactttccagacgatggggcggccgggcagagaggctcctcacttcccagatggtggggcgtctgggcagaggcgctcctcacttctcagatggatgccacaattgctatagaggaagaagagccagagggataaatagaatattaaattcccaggaaatgtgtagaaagaaagaagttaaatggattagagaaatttgtaagaattgttaagtttagtctaaa

SEQ ID NO: 480379 - DNA, 3008 bp, Homo sapiens
cctgacaatgcgatagaagagaaaaacccattttctgaggagaaattcaagcgggctgcagaaatttgcgaaagtaatgaggagccaaatgttaatccccaagacaacagggaaaatgtctccagggcatgtcacagttcttcgtgacagcctgtcccattacaggcctgtaggcctaggaggaaaaagtggtttcattggctgggcccagggtccccatgctgtgtgcagcctatggacttggtaccctgcatcccagccactccagccatggctgaaaggggccaacatagagcttggactgtggcttcagaaggtgcaaaccccaagccttggcagcttccacctggtgttgagcctggtccctactgtggctccacctagtggagctgtgagcaaagggccacagtcctccagaacccagaattgtagatccactgacagcttgcacagtgtggctggaaaagctgcatacactcaacaccagcccatgaaaacagccaggagggaggctgtaccctgtaaagccacaggggtggagctgcccaagaccatgggaacccacctcttgcatgcaagacatggaatcaaaagagataattttggagctttaagatttgactgccctggtggatttcagacttttatggggcctgtagcccctttgttttggccaatttctcccgtttggaaaggctgcatttacccaatgcctgtacccccattgtagctaggaaggcttacaactctaagggggtccgcatgagagggtcgtgattgattgagcaagcagtggggatgccaatgggtcataaattcaatctcttaattccatgtttcttggagattttgtttgtttcttgtcattttttaaattcttgtctgactgtcttatttcacaaagccaatcctcaggatttatgtgataacttatttgaaaaagacaagattttagagtttttccagagacacaatgctgagagcaatgctgtccagtggaacatcctgcaatgatggcactgttctttattggtactgacaatagagtagctactacttacatgtggttgttaagcaactgaaatgcagccagtgtgactgagaaagtaaatttttaatcttattttattttgactattttctatttaagtaaatacatgtgtctgtgttgcatggagcggatatagagatcaattttaagcaggataaattcataaagaagcctagtatgtccctggtagaagttaaattatcttccaagccctcagatttttcaccttccactaattaaacaaaatattatgaaatcctaaagtttcccagagttggccattggatttcagaggaaggagaaaacaggataaatcgactttttaataggcaatctttattatactgtttgattttttttaacagccaggagaaagttccagctaaaatatttcacctgtggccatattgattattttgcaatagcctatcatttcttaccatatttttaaaagctatgccttgtggttattaagaggtgattctacaatacttttctgagtgatagctttcatctgacaatgcatcatatttaatgagtagtaaaactgtaattcagtctttgatcactgtcaacaaacaacttgggttggcaaggagctattaagtgtatgctgcattgacaatttattttcttttaggctattttatagtaaaaaaaaatcacctggtataaagtgttgtgttaattgtttataactaactagtagaatttgactgcagagttaatcttaggcaataatttcttcaactaccagtggaattttgcactcaaagttgttaaagatttctttcattcaaatccctgaagtgtggtgcagttctagtcattgtaaagattttttcaggagatgggagaaagatctaataaggtcatttttcacagtgttatactgagagttgtcttggatggaatggctctgcagttcatcagttttgatatttatattcagtacctctgagtagttaaagatcaatgacaccataaaatgcatttatctcatacatactttaaaacatctcacaacaaagcatttagagaactgtgtcaaaaacatgactagatcttgtaacttacaaaaagggacacattttgcctttttatattttccatttttaaaatttttttaaagagtgtgtttattacaaagatattttaggagcaaagataaaaaaatgtattccaaaaatgagcctgtacattctaggacttctgatattgtgactaaagtgagatatattctattaaccttttccaaataggattgtacttgtttataaatgatgtccagcatttggtcccaaatgcaaattttaacttcataatcatataaaaaacttgaactgatatatcaaacccacatactatctaacttttaaatgtatatctatttttatttcataatcacaataacagtaaaatgcaatatttctctgacttcttataataatttccccctatccttctacaagaattcagggagtttccagaccctttctcttgtgggcttatgcgtaggagattcttatgttatcttctctcagtgtcagcatcagtatgtcacatgctccttaaatctgggtttctgtagtgacatgttctgctacttcactgtgcctgagaaatgatgtgctatgatccaatgataattatattgcatcggctcagttgtcctgcacactttatgataagcttgtgaaacagagctgtcttctgttttttgtttcttttgtatatttccatgatgatgatctatgttagttactcacttctaaatgagtaaaaataaaaggcagtacaacacagtggttaacaatatggactctgacacttcagtacttgggtttgattgtcaactctactactactagctatgtagcattcaaaaaactacttgattcccctttgccaccatagccttatttactaaatgtgggtaatgacaatcagatctgcc

SEQ ID NO: 480380 - DNA, 660 bp, Homo sapiens
ctgacatgccctggagacattttcccttctctggcacttgccctttctttctctctctctctctctccttctgccacgtgaagatgtgtttgctacctcttcacacttctgccatgactgctaaatttgaaaacaaacaaacacaaacacctcttctgtgttttctatcaggaagttctggaattctgcaaaaagggcacctgagcaaccaacaagtcagcccttgtgcccaattgtgccccaagctgaatgaattcactttttgtgtagaggccaagacagctgttggggaggctggcttctctgcttctaaagatgccttgacttttatctccactcccacttccatttggccacacttcatctctctgccacagcctcagagtaaggctcaaaaccttggtaggcaaagccaaagaagaagctacaatcatggatatataaatgttgcaatgggggagaaagctgggatgactcccaatattttgattaaagaaatttaagctatgacataaagaaactatgaactcagaaagatagtaagaggaacacttcttttcaagaaaaatgcatgaacacaaaagacgtagaagtttgtctttgctggtcatatttaacaatgctaatttggttagcacaaataggagggatttaaaactt

SEQ ID NO: 480381 - DNA, 1642 bp, Homo sapiens
aaatccaacatgcagctttgaaggactttctcatgcaacttctatcttctatcatggaagccaaggttatttggaccaaacctcctgtcttagttcattttcacgctgctgaagaagacatacctgaaactgggaataaaaggaggtttaattggactgacagttccacatggctgtggaggcctcagaatcatggtatacgaataaaggcacttcttacatggcaatgccaagagagaatgaggaagaacctgaggcagaaacccctgaaaaacccatcagatcccaaagactccagtcaaggcctagggactactcatgaaaagagtttaatagccgactctctcccagtggatctggattccaccggactgtatcttcacagtaagggtgaaacagaagcaaacccattcctatttccaagctcaaggaactttggtcaaagttctcttggagctgagcagaacaaggaggcaaacagaaaagatttgtgtccctgagaagtcatggccacaggctggctatcacacagattgtcaagccagttccatattgcatgggtattacagaaaatctcaaaacataaatttgtgtgtgggttgtcccagagcagcaggatctggcagaaggaaatttccttctaaccctcaaagaatccacataaatcttgttacatttgggattttacgatttgcttcaggaatgagaatggccttaattttcatatctttttctacactcagtttatgtcttgttggcgtcaaagttctgcttgcttcacacaatgagtttaggattttcccttttttattctatagaattcttcatatatattgaaatgctctgcctggggaaaaaaatctgagcctagcgttttatctctaggaagaatcctttatttccttgaacatttatgagactatacagattatatatgtcttcttgtatcaattttactaagctatatacatagcttatgtttatatattatatatataaatgtaagatacaaatataaaaattatgtataaatatgaaaatatatatagaaagcgatatatatgtctatatatatagacagattataaatatctgtctatttgatctaagttttcaaatttgtaggttaaggtgttaatgatatttccttattagcttcttaatctatgctgtatctatggttgtgtaccttttaaattcttagttttatctatgttttctccctttttttctaaacttgactgacggttgcatcatttattatatttctccaacaagcaaaggttagctttgtatgttttactaattttgtctacatcattattcccacactttagtttttcagaattgattctgttgtttcttttctaattctttattgaaatatctagtacattaattttcaagttattagagaaatatttgtctgtaaactcctattgtaatatcacttttcttgctactcacagatttaatctttaatattggcggtatcattgagttctaagtacatttcaattcctagtatgataatctatgaattgctgagaaatagtgtttacaattttgttgttctatttccacttaagtttatttttacttctgctaactcaattgaaaattctttactaatttttaaaat

SEQ ID NO: 480382 - DNA, 547 bp, Homo sapiens
ctgcaatactacatgaagatgaagccacctgaagagggaacagagatttcagatgagccgttaaattccctgtgcagtggcctgcctgtttggggggtggggagttgctgggtgaatgaggatggcggaggggaccaagcatgtcaggggagcgtggtgtcatccaaacgggacgtagcaggcctgggagagccattctgggaggacgcagacctagagaggcctcagggttcccccatcatgaaatgtgggtactacagttccctgatgggcctttctccaccagcccatgatggcctgagtttgtttactgcagtctcctccctgagccttggcttctctatgtgtgtcctaactccaggacccacaggcctgtcaacccccagccctgggctgcttccctggcctcttctctgttctctctctgagggcctaactcccttgcatagtgctgcagaatattgagccacaggccctggctgatgatctgggggactgggcaaagtgttcatcacaggtcaggttctggttcaaagccagttcttcc

SEQ ID NO: 480383 - DNA, 6914 bp, Homo sapiens
cgcgccggcctggacccactttccccaggccactcccgctgccctcgccccagcagccagagaattctccggatctgcaatattccgtaccatctacctggcttgcgtaatgaagtgagacgtttcatgtgttccttgtgggtcaatggcttgccacactcaggatgtcagttagggcacagggctcacatgccaacatttccaaaggtcacgcagcccgcgtgtgcctggatgcagcgctacctggcactagctctgagggcttctcagagtaggcttaccccgggaggctgggactgcaggccagccttggttggtgccgcccagggagatgcgcaccgcctcgcactgattggccgcagggggaggctggcggtcttggcgcggctccaggtgccctttgagtgcagtccgttaggtggcgcctggaagccaggtgcatgcgccctgaggcccgcccacccacaggctacagaaagggcagcgcagggttcctgtgctatgggtcgggctgcacaggcggtggtctatgggagtccggagaaggacaccgtcttcagggtgcaccgtcttcactctgcccgaggcgcagagggaggaggcaaccttgaagcaggagacagtgctggtgttggatgacataatggcggagaactccagctgttctgtagagaaactgacacgaattgaaaaaaaaaaggatgattgaaggttgtttaggggccagtcattatttactgagactatataattctcagaggggacacacaacctgtgaagagttggatgtgaatgatgaagagtcattgagaaaaggctgcctgaagaatcatcctctacatttctagcttgaaacacagggtatttggtgctgtgaatttctgaaatagtggaatactgtaggaggaaacatgtttggaggatgaaatgaagatctggctttggtatgtggagatgtaaggcatgcagttggatatgccaagtctgaaggtcagaacaaagatctggcctgaaactgggaatttgttaatggtcagcataaaaagggtgttttagccttgagaaaacccaagaggatccatgactgagacctgaacaatgtcaccacctacagatttagtaaagatgtcaacaaaatacagaccaaagttcatattaaaattaatgggaacagtcaaactacttagtgagcggtattcagtcaactagcatttagctagctattggctagcaaatttgggggaaaagtgtataaagaatctttgattaggtttccaaatatacgaaataaaagccactcacatgttagaagtcaatatacaaaattatattatgttaatggtactatttaatgctaatagagaaaaatgaaaattattctgaattaaatcaatagacaatgtattttctatcgttgtctttgttttcttctcaatttatttgtgtgtcattttaactcactaagcaatgactcctcttaatcccattactttttatttaacactgcatttgtttttcatgtgcgcaatatcatactgcccaatagagaggaaatgcagaatttagactattatatcagaaacatctttgcttttcagatttggacttctggagtgtggttaatttaagtgttctcatcaggccttgatatttcagatttccgtaatcacttctccaaaataaagtctgaaggtgatgactacaataaaattaaaattatactggcttttaagataattatgtttatgtaaatgtgacgcctttttttggggggtggggtgtcgtaaaataccaatgtatatgttatattcgtaggtgccgtaaaataccgacgtatatgttatattcgtcggtgtcgtaaaataccgacgtatctgttataatcgtcggtgtcgtaaaataccgatgtatatgttatattcttccgtgtcgtaaaataccgacgtatctgttatattcgtcagtgtcgtaaaataccgacgtatatgttatattcgtcggtgtcgtaaaataccgacgtatctgttataatcgtcggtgtcgtaaaataccgacgtatatgttatagtcttccgtgtcgtaaaataccgacgtatttgttataatcgtcggtgtcgaaaaataccgacgtatatgttatattcatcggtgtcataaaataacgacgcatatgttacattcgttggtgtagtaaaataacgacgtacatgttactttcgtcgtcgtgaaatacccacgtatatcttatattagttggtgtcgtgaaataccgacgtatatattatattcgtaggtgttgtgaaataccaacgtatatcttatattcgtaggtgtcgtgaaattccatcgtatatgttatattcgtaggtgtcgtaaaataccgacgtatatgttatattcactggtgtcataaaataaggacgtatatgttacattcgtcagtgtcgtaaaataccgacgtatatgttacattcgtcgttgtcgtgaaatacctacgtatatcttatattagttggtgtcgtgaaataccgacgtatatattatattcgtaggtgttgtaaaataacgtcatctatattatatttgtaggtgtcgtaaaataccgacgtatatagtataggtgtcgtgaaataccgacgtattatattcgtaggtgtcgtgaaattccgtcgtatatgttatattcgtcggtgtcataaaacaccgacgtatatgttatattcgtcggtgtcataaaataccgacatatatgttatattcgtcggtgtcgtaaaataccgacgtatatagtataggtgttgtgaaataccgacgtatatattatattcgtaggtgtcgtgaaataccaacgtatatcttatattcgtaggtgtcgcgaaattccgtcgtatatgttatattcgtcggtgtcgtaaaataccgacgtatatgttatattcatcgctgttataaaataccgacctatatcttagatttgacggtgtcgtaaaataccgaagtatatcttatattcgacggtgtcgtaaaataccgacgtatatcttatattcactggtgtcgtaaaatactgacgtgtatcttacattcgcaggtgtcataaagtacaggtgtataacttataattgcaggtgtcgtaaaataccgacgtaaatcttatattcgcttgtgtcataaaataccgaaatatatgttatattcacaggtgtcataaaatactgatgtatatgttatattcgtcggtgtcgtaaaataccaatgtatatgttatattcgtacgtgccgtaaaataccgacgtatatgttatattcttccgtgtcgtaaaataccgacgtatttgttataatcgtcggtgtcgtaaaataccgacgtatatgttatattcgtcggggtcataaaataacgacgcatatgttacattcgttggtgtcgtaaaataccgacgtatatgttactttcgtcgttgtcgtgaaataccgacgtatatcttatgttagtcggtgtcgtgaaataccgacgtatatattatattcgtaggtgtcgtaaaataacgacatatatattatatttgtaggtgtcgtaaaataccgacgtatatagtataggtgtcgtgaaataccaacgtatatcttatattcgtaggtgttgtgaaataccaacgtatatcttatattcgtaggtgtcgtgaaattccatcgtatatgttatattcgtcggtgtcataaaataccgacgtatatgttatattcgtcagtgtcataaaataaggacgtacatgttgcattcgtcagtgtcgtaaaataccgatgtatatgttacattcgtcgttgtcgtgaaatacctacgtatatcttatattagttggtgtcgtgaaataccgacgtatatattatattcgtaggtgtcgtaaaataacgtcatatatattatatttgtaggtgtcgtaaaataccgacgtatatagtataggtgtcgtgaaataccgatgtatatattatattcctaggtgtcgtaaaataacgtcatatatattatatttgtacgtgttgtaaaataccgacgtatatagtataggtgtcgtgaaataccgacgtatgtattatattcgtaggtgtcgtgaaattccgtcgtatatgttatattcgtcggtgtcgtaaaataccgacgtatatgttatattcgtcggtgtcgtaaaatactgacgtatatcttagattcgtcggtatcataaaataaggacgtatatgttacattcgtcagtgtcgtaaaataccgacctatatgttacattcgtcgttgttgtgaaataccgacgtataacttatattagttggtgtcgtgaaataccgacgtatatattatattcgtaggtgtcgtaaaataacggcatatatattatatttgtaggtgtcataaaataccgacgtatatagtataggtgtgaaataccgacgtatatattatattcgtaggtgtcgtgaaataccaacatatatcttatattcgtaggtgtgaaattccgtcgtataagttatattcgtcggtgtcgtaaaataccgacgtatatgttatattcgtcggtgtcataaaataccgacgtatatcttagattcgtcagtgtcgtaaaataccgacgtatatgttatattcgtcactgtcgtaaaataccgacgtatatcttagattcgagggtgtcgtaaaatactgacgtatttcttatattcgacgatgtcgtaaaataccgactatatattatatttatgggtgtcataaaataccgactatatattatatttgtaggtgtcataaaataccgacttatacattatattcatagctgttgtaaaataccgacgtatatattatatttataggtgtcataaaataccaacgtatatattatatttatgggcatcgtaaaataccgacgtatatattatatttataggtatcgtaaaatacccacctatatattatatttataggtatcgtaaaataccgacatatatattatatttataggtatcgtaaaatactgacgtatatattatatttatagttatcgtaaaaaatcgatgtatatattataggtatcataaaataccgacacatatattatatttataggtatcgtaaaatactgacgtatacagtatatttatcggtattgtaaaataccgatgtatatattatgtttataggtatcgtaaaatagcgatgtatatattatagatatcgtaaagtactgacgtatatattatatttataggtatcataaaataccaacgtatatatttatagatatcgcaaaataccgacgtacatattataggtatcgtaaaataccgacatatattttatatttataggtatcgtaaaataccgaaatatatattatatttataggtatcgtaaaataccgatgtatatattatatttataggtatcgtaaaatatcgaagtatatatattatatttataggtatcgtaaaataccgacctatttataacatttatgggtatcgtaaaataccgacatatatattatatttatacgtgtcgtaaaataccgaagtatatattatatttataggtatcataacataccgacgtatatattatatttgtcggtgtcgtaaaataccgacctttatattatatttgtaggtatcataaaataccgacttatatattatgtttataggtatcgtaaattaccgacgtatatattatatttataggtgtcataaaataccaacgcatatattatatttatcggtatcgtaaaatactgacgtatatattatatttatgggtgtcataaaataccgacgtatatgttatattcgtaggtgttgtaaaataccgacgtatatgttatattcgtcagtgtcgtcaaataccgacgtacatgttatattcgtcggtgtcataaaataacgacgtatatcttatattcgttggtgtcataaaataccaatgtatatgttacattcgtcggtgtcgtaaaataccgacatatacgtcatattctttactgtcgtaaaaataccgacgtatatgttatattcgtcggtgtcgtaaaataccaacttatatcttttattcgtcggtgttgtgaaatactgacctatatcttatattcgtaggtgtcgtgaaacaccgacgtatatattatattcgtatgtgtcgtgaaataccgacgtatatcttatattcatgggtgtcatcaaatgccgacatatatattatattcgtaggtgttgtaaaataccgacgtatatattatattcgtaggtgtcgtaaaataacgacgtatatattatgtttgtaggtgttgtaaagtaacgacgtatatattataggtgtcgtaaaataccgacctacatattttatttataggtgtcgtaaaataccaatgtatatattataggtgtcttaaaatactgacgtatatattatatttataggtgtcataaaataccgacgtatatattatatttataggtattgtaaaataccgacgtatttattataggtatcgtaaaatactgacgtatatattatatttataggtatcgtaaaatacctacatatatattatatttataggtatcgtaaaataccgacgtatatatttataggtatcgtaaaataccgacatacatattataggtgtcataaaataccgacgtatagattatatttgtaggtgttgtaaaacaccgatgtgtatattatatttataggtgtcgtaaaataacgacgtatatatttataggtgtctttaaataccgacgtatatattatatttatatttatcgttaaataccgacgtatatattatatttatatttatcattaaatatatatttatatatttaataaatgtttattgaatttcatggaaatttta

SEQ ID NO: 480384 - DNA, 1096 bp, Homo sapiens
tctaaaatcatgaggaaaataatgattaatctaccaaaaaagttaatgtataattggtttttgcaacaatgcagggacaagtttaagtggaaatggcatagaaatggagagcaaagaagaaaccaaatcgcatttcaaggaaagaattattttactcaggccaaaagaactacttccagagaggaggtgaacaagttctactgtgaaaagcccaggggccatagaaccatagttaatcattcacttaaccaaacaactcttcagcaaaaggcaaaggagaagcaaatacatggctttacagggcagctggcacaagcacatgcaggggaactaccctttataaaaccatcagatctcatgagacttattcagcatcacaagaacagcacaggaaaaatctactcccatgattcaattacctcctactgggtccctcccatgacacatggggattatgggagctacaactcaagatgagatttgggtggggacacagtcaagccatatcatatagggaggacttctttcaagtgggaatttcatcttctgcttttaagaaacaaaagggagaaggaagatcagagcatttttcttgaatctgctgttttttaagtgcctttaactgaaattgccaatatgcgagagtggaatattttgggatgttgtattctgtcatgaagtaggttgtacctgtattattaactatattttatacattttataaagttctaaattgaatacattgaacatttaagagattaatgacttggccaatgttaaaaacatagaaagtcaaagagcttgaaatttgaatgatcagaattagaaataactgaccctaaattgtgtgctatttccaataatgccaaaaaatgtgattgtattatttgtctaaatgaaggaagtgtataactagctaaactacttcttaaacacttatttaatttatattcaaatcattaaataaaactgtcagtgtatttatccagagaatttttctccctttgcactgtctgagagaaatgaagggatttttccttattttattccttcagcctttcaatacagaaaggaagtttttatagaaaacaatttg

SEQ ID NO: 480385 - DNA, 537 bp, Homo sapiens
cttttccttagttcagaaagatcaaaattacaaatgagtggccatgatttgaatggaaagctgaagaaagaaggcctggatctctttgagagcccaggggaaacagctggtgtgcctaaaaggcaaacagcaaatatattaagtatattgcaaaaactaatcccccaaagaactcggagctccatgaaaaggacagttaccctgggcaatgcttttggtggctgtttgggaaattgccagggacagagcactgtgcggtcagttcacacagatgcacccacattcttctcagggctgaaccgagatgaggagactgccgagtttctgcgaagctgcataatccctgaagatctagccttcagcaggggccacccctatggaacagggagaacacagaccatcaaagccaccttgggacaaaggaaatgtaaacaaagcaccaatcactgagggtggtagcaccagtgactgggaacagacgtggagaaggggtaatcttgtgctgccccatcgactgtcacagacacagtagaggct

SEQ ID NO: 480386 - DNA, 932 bp, Homo sapiens
gatgggctctggtgtcaatgatgtgtcaatgccggttcatcagctgctacagacagcaggggaggtgatgcatgttcagggctcctgtgatgctgggaccattaggtgcatgctatcaagcctggccaattttaaaaacttttctgtagagctgggatctcactatgttgccctaggttcagggtatcctcccacctctacctcccaaagtgctgggatgacaggtgtgagctaccatgcttgggactcttgtttctttttaaagttatatttcaatatcctcttcatgattaaaaaaaaaagaagaaaggaaagctggatgcaaagtcagacaagaaagcctataggaatcagaatgttactgtttctggggaatttccagggtaattgctggctacaaatgctgcatcttccctatattagttcagatttcatgtggatttaaagttgcactgtggcagaaatcagagaactggagagaccaagtggggttcaggagggtttattttaggtgtacactggctcaggggacacgtcttgaaagtctgagcagtaaacgaagaaaacaagtgccttttatgcatcttcaggcgggaattatgtgatccaggaagcaggcttacagaagtgagaacaaaggcagttaatcatcatgtgacattcttcggaaaacatgtcttgcagcttatgtttatctattttgtgaccttgcagctgcacagctagaaaattaagaacttacagaacttacaaaatatgttgaggagagatatggttaatgcttcacagactccacagaaagtcagtttatagtcttacttaactctcacttcttgggggggcatttcatacctattctgcctaactttatacagtaagttcttaatttcttttaattttccactttattcccccctttggtgctgtatata

SEQ ID NO: 480387 - DNA, 392 bp, Homo sapiens
  misc_feature (49)..(50): n is a, c, g, or t
  misc_feature (109)..(110): n is a, c, g, or t
  misc_feature (112)..(112): n is a, c, g, or t
  misc_feature (135)..(135): n is a, c, g, or t
  misc_feature (155)..(155): n is a, c, g, or t
  misc_feature (218)..(218): n is a, c, g, or t
  misc_feature (220)..(220): n is a, c, g, or t
  misc_feature (329)..(331): n is a, c, g, or t
  misc_feature (338)..(339): n is a, c, g, or t
  misc_feature (342)..(347): n is a, c, g, or t
  misc_feature (353)..(353): n is a, c, g, or t
caggcatcaggctgagaatgaagttttagcataaaagcttacatcattnnaaaaaaagtaataaaataagcactcaaagtaattaacataagaaaaagtaaatataagnnanacagaccgggtgtggtgactcangcctgtaatcccagcacttngggaggctgcggcaggtggatcatgaggtcgggagtttgagaccagcctgaccaacatggtgnanccccgtctctactaaaaatacaaaaattagcctggcgaggtggcacatgcctgtagtcccagctactcaggagcctgaggcagaagaatcactgcaacctccatctccnnngttcaanngannnnnntcctcnacctcctgtgtagctggcattacaggaacatgtcaccac

SEQ ID NO: 480388 - DNA, 366 bp, Homo sapiens
  misc_feature (104)..(104): n is a, c, g, or t
tccggctcattcagtcactaattgttattctctgattcattgtactagagatcatcagtacagatattccatgtgttgtatagttttagggttcctttggagtnagattctatttttatccactgtgatctgagagagtgcttaatataattttgattttcttaaatttatttagacttggtttgtggcctatcatagggtctatcttgaagaatgttccatatgctgatgaaaagaatgtatgttctgcagttgttgggtagaatgttctgtaaatatttgttaagtccatttgttctagaatatagtttaagtccattgtttcttggttgacttccttgatgacttctctagtgctgtcagtgg

SEQ ID NO: 480389 - DNA, 135 bp, Homo sapiens
acggcgaccccccttctgcgagtgctgtcagaggggatgggggtgacatctaatccgcccgatcttcataccgagcggcaagggctctgagggcgcatggccaggtcaggtctgtctattctctgtgccgagttg

SEQ ID NO: 480390 - DNA, 432 bp, Homo sapiens
agcgggtgtcttcgaggctgcggctcggtggtgtccggcgctgtgagcgcgccgtctgggcgcccggcgcagaggctcccgagagcggacccggggctcatccccgtcggtgctcccgcgctcccctgtgcgtgcggtgtgcgccttcgagctagctcgtctcgctcgctctgcttctcctgtctgccggtctgcgccatgtgcgtcggctgttggcggtcgctgagctggcggtcgagccggcctgcggcagccggtaccagcagttgcagaatgcaagaacagtctggagaacctgaacaggctgcaggctgatgctccatccaccttacagcagcatttctgcagagagcgcagcatattttgactacaaggatgagtctgggttttccaaagcccccatcttacaatgtagctacaacactgcccaga

SEQ ID NO: 480391 - DNA, 324 bp, Homo sapiens
  misc_feature (32)..(32): n is a, c, g, or t
tgagcttcttcaaacacttgttcactactttntattcttccgtgctttatatcttcacgagccaaagctaccgaacgaatgtcttcctctgttacctcataaggattatgaggctccaatacttcaacccctatattttctaaagcctttacagccaattggtagtgttggaaatctaagttatgttttaatatgatggtattcataataaacctttatttttcgtaaaggtacaaagtaattacaaaacagcaaattggcaaatcgccaattttttattacctttgtcggcaataaaaaacatttgaatgacaacagaaaata

SEQ ID NO: 480392 - DNA, 771 bp, Homo sapiens
ggtcggtaccttagacggacgcattcatactaagcatccaagtaaggagaagacaagtgcaaaaagttggtcgggatgagtgacggacgcattcaaagcagtgtgtagagggaaatttatagcactaaatgcctacaagagaaagcaggaaagatccaaaattgacaccctaacatcacaattaaaagaactagaaaagcaagagcaaacacattcaaaagctagcagaaggcaagaaataactaaaatcagagcagaactgaaggaaatagagacacaaaaaaacccttcaaaaaatcaatgaatccaggagctggtttttggaaaggatcaacaaaattgatagaccgctagcaagactaataaagaaaaaaagagagaagaatcaaatagacacaataaaaaatgataaaggggatatcaccaccgatcccacagaaatacaaactaccatcagagaatactacaaacacctctacgcaaataaactagaaaatctagaagaaatggatacattcctcgacacatacactctcccaagactaaaccaggaagaagttgaatctctgaatcgaccaataacaggctctgaaatggtggcaataatcaatagtttaccaaccaaaaagagtccaggaccagatggatcacagccgaatctaccagaggtacaggaggactggtacattcttcggaactattcatcatagaaagaggatctcctatcattatgagccctcttcgtacaagcggcgaacacaaaaagattgc

SEQ ID NO: 480393 - DNA, 204 bp, Homo sapiens
ggggccccgggcccaaaaaaaacccagggttaatacccccccttctttgggttttttttctaaaaagggggaaaaccgggtctggggccccccccccaagaaaaagggggggggggggttttgaaaaccgcctaaaattttttaaaagggtaccccccaaaagggcttttccgggtcttaaaaaaaaatttttttttttaggga

SEQ ID NO: 480394 - DNA, 223 bp, Homo sapiens
gctctaacacagtagccactagccacatgtggctattgaaagattgaaatgtggttattccaaatcaggatgtacagtaaatataaaatacacaccagatttcaaaggcttacatgtaaaaaagtaatgtgaaatatctcactagtagtttttatagtgattacatgttgaaattttacacattgtgaacatattagtttaaataaaatgtattgtgaaaatt

SEQ ID NO: 480395 - DNA, 166 bp, Homo sapiens
gggctgttggtggagacggattacaccttcccacttgctgaaaaggtcaaggccttcttggctgatccatctgcccttgtggctgctgcccctgtggctgctgccaccacagctgctcctgttgctgctgcagccccagctaaggttgaagccaaggaagagtcgg

SEQ ID NO: 480396 - DNA, 194 bp, Homo sapiens
cggcgcgttttacggaaacagagggactcggaatcaggcagcagaagcagaaaaaggcaacgagaagaaggaggaacccaagtagctttgtggcttcagatgtccaacacctcattgcccttcgacctgtgtgcctggtcgccagtcccacacacgctcagcgtttcctacctgtagatgctcacagagtccca

SEQ ID NO: 480397 - DNA, 1156 bp, Homo sapiens
  misc_feature (74)..(74): n is a, c, g, or t
  misc_feature (261)..(261): n is a, c, g, or t
  misc_feature (276)..(276): n is a, c, g, or t
gattgccagacccttgaaacacacggaataactgcagatcataagcatatactcgcagatgtataactatggtngttacttatcattccaatggtgaacaatacctacaaagcctgtagcgtacacctcgataggaagattctccgttgagaggagaagagaagtggtgggagagctagctagaacacatcattaaactccatgagttgcgaaacaaggaacttccgtaaagtagacgtcctagtaacacctagcacaagnttttgtcctcgacanagaatagtggaagagttagtcgtcgcacataccacgttccatcgagctacagcatagcccaaggtcatgcgagcgccaatgaacctcaaaaaaccaactttaccttgctatccgtggtgcgcctccgtaattcgcgtggttactctgtcgaacctagtgaacagagtctgccccaacccgctccgagccgaatcgggctcactctagctcgagctactctaaacaccgtgaagttttccccacacctttgtgatacaaaattcttgagctagcgatccgttcgctaagggcccttgcaccataggcgtgataatcgatcgagaccatccgcgatccctggttggataaatatcctatgtacgagtctcgaagagaagctataagacggtgcccaatgagctgtgtttccggtccccatgccactctcatacactatgcaccatacgcaactgcagtgtctttccgtacgtgcacgcaatggtaactatacgaaagccggcaaaagggtggaacactttgtaagcccaacccctaaaggattgtctatacctggacccattacccatggggaaccccacttccattgcgttcccctttacttaaaatcctttggcaaaaggccaagcctaaattcggcgaattagaacccttttccccagttccccctatgagactaaggcggtccccgaaaccccaaaacttaataagggcgactttcccaccgacatgaccccttgtcgtaggatcgttaccgcagcggtaaagcccaaaaggcacgcggaatagagagcagagaccccggcaacgattccttagtggatcgaaccaggacctgcgtgcacagaaagtagatcatttggaggatccttcgccccaggtt

SEQ ID NO: 480398 - DNA, 167 bp, Homo sapiens
  misc_feature (111)..(111): n is a, c, g, or t
  misc_feature (131)..(131): n is a, c, g, or t
  misc_feature (162)..(162): n is a, c, g, or t
aggatcccctcaagggaggggagagagaaacccacacataaacaatgccatcactgaactgtttaaacatttccacttgcagtttaatttcttgaagactgttgcctggtnggaatgtttcttgtcactgnattttaacggttgcattctggaaaagactanaaggc

SEQ ID NO: 480399 - DNA, 206 bp, Homo sapiens
ctcgattcggtaccctggtggtgcttctggagaagagcagagatacacgtgccatgtgcagcacgaggggctgtcggagcccctcaccctgagatgggagccatcttcccagcccaccatcccctatctgtgggcatctgttgctggcctggctgtcctggctgtcctagctgtcctaggagctgtggtggctgttgttatgtgta

SEQ ID NO: 480400 - DNA, 426 bp, Homo sapiens
aattgtaaattagttaatttttatgtggaatttgctgagaaaagaatatagactactgaaatgtcatcttagttatttttcttatgaccacattgtacaaatgaatctgtgtaaaaagactattttaaatgtatttcctgcttttgtaagcattaaagatttaaaaggaaatttttccaacttttttttataaaatggaaggtttggatttttaaacttatggatccctctgcccccaaccccctcgttttgggaagataatttggatccctaataaaccttttacccctaggctttatatatgtttttctgtcacaaatgcttcctggcacacaggaaccaagcccaaatgggaggggatcaaattcagtgttgtatgtatgtttatggcaacattttgaaaataaaaattaaatgtttttcttc

SEQ ID NO: 480401 - DNA, 689 bp, Homo sapiens
cccaatacctccttttaaaataaattacccagtcttgagtagttctttatagcaatgtgagaacagactaatacaatggtctatgtatttaactgtgtttttgtggtggccaataattatctttggtttctatgtttagcactcccttaaggacctcctttaaggcaggtctggtgataacaaattcccttagcatttgcttttctgaaaagaaatttatttcttcttatcttacgaagtttagtttggctggatacaaaaattcttggttggaatttcttttctttatgaatgctgaatataggctcccaatctcttctggcttgtagggtttctgttgaaaggtctgtggttagcctggtggagttcctgtaaaggtgacatgccctttctctctgcctttactattttttctttcactttgatctgggagaatctgatgaccatatgacttagggatggtcatcttatatggaatctcacaggggttctttgaatttcctgcatttgaatgttgacctctctagcaaggatggggaaattttcatggacaatatccttgaatatgttttccaagttgcttgctctctctccctctgtttcagggatgccaatgagtagtaggtttggtttctttatataatctcatatgtcctaaggggatttggtaggttcattccttttttttc

SEQ ID NO: 480402 - DNA, 403 bp, Homo sapiens
aggttgcagtgagccgagatcatgccaccacattccagcttgggcagcaagagcaagacttcgtctcaaaaaaaaaaatgcccggtgaggttgactcacgcctgtaatcctagcactttgggaggccaaggcggatagatcaccaggtcaagagattgagaccatcctagccaacatggtgaaaccctgtctccactaaaaatacaaaaattagctgggcgtggtgacacgcgcctgtagtcccagcaactcaggatgcttcttgactcaagaagcatcctgagtttactctgtacgaatcacgggtgttggacatctcggtatcaccgttgatgaactcattggtttacaagtcatttgtgctgtactgtttatgattggccagccatgacagccgtgggaa

SEQ ID NO: 480403 - DNA, 290 bp, Homo sapiens
tggagcacccaagcgggacaagccctctcacagtgtaatggagagcacggtctgaatctgcgcgagagcaagatgctgagtggagtctgttcctttgtgctgggcctgctctttcttggggccgggctgatcatctacttcaggaatcagaaagcacactctgtacttcagccaagaggattcctgttcttaagtacagaatcatctatttaaatcattttttcttcagtctacacatcttctctggagagaaaaaataacatgctatttcaacacctctagtgtaagtg

SEQ ID NO: 480404 - DNA, 879 bp, Homo sapiens
  misc_feature (11)..(11): n is a, c, g, or t
  misc_feature (62)..(62): n is a, c, g, or t
  misc_feature (67)..(69): n is a, c, g, or t
  misc_feature (72)..(72): n is a, c, g, or t
  misc_feature (74)..(74): n is a, c, g, or t
  misc_feature (81)..(81): n is a, c, g, or t
  misc_feature (94)..(94): n is a, c, g, or t
  misc_feature (100)..(103): n is a, c, g, or t
  misc_feature (112)..(112): n is a, c, g, or t
  misc_feature (116)..(117): n is a, c, g, or t
  misc_feature (136)..(137): n is a, c, g, or t
  misc_feature (149)..(149): n is a, c, g, or t
  misc_feature (220)..(220): n is a, c, g, or t
  misc_feature (398)..(398): n is a, c, g, or t
  misc_feature (482)..(482): n is a, c, g, or t
  misc_feature (518)..(518): n is a, c, g, or t
  misc_feature (522)..(522): n is a, c, g, or t
  misc_feature (877)..(877): n is a, c, g, or t
gtccatatgtnttggcctacactgttctggtttgttaattttcttcttctgtgttctttttntttcnnnttntngttcttngttgttttggtcncttctnnnnttgcttggntttnntctggtggttccattttgnnagcccaccggcntgcaaacctagggtgttttctccacccctgggtcacagatcttcgttctccccggctctgttacccaaggnccctacagcctctggggcctaacacccaagctcttccttgcagaagagctgagatgctaaggagaccatctggggtgtcataataggcccttggggtttgctgagctcccacatggctttcttcaaccacctggcccactttcttcaaccacattccactttggaatgcgtgtctttnaggcaccaagtgatcttaagaatgggctctgtttttgaattcagcaatccaagttcctttctatctcggtggggcctccaaaangagaaaaaggattggcttggcttctaatgttaggcntgcnttttacacaccagttgtgtgtttgttagtggctgctggatgccagtccacaccctcaaacacctcacagtcccaaacggggtgctcctacaggtcccagggtcctgttagtggaagaaaggcagttccaggaagtcttcctctagccttcatgacaggaagtagttaatcctctgggaaatagacttgcagccctgggaagaaaagagttgttcctccttggggacatacaccatcatctgggctatttcatccagtgtctcttctttatacaggagctcctggctcaggaaggcatcccgtgcacacagcctcacgtgacggtactccaaaggcagggagggggtgaagtagtnta

SEQ ID NO: 480405 - DNA, 113 bp, Homo sapiens
tgtgcagtggactgcgatacaatcatctgcatcatacaccagcaaagcatggtgcaaaacactgccctatcatcaataactctataccgggtccctcccaaacatgtggggct

SEQ ID NO: 480406 - DNA, 1533 bp, Homo sapiens
  misc_feature (408)..(408): n is a, c, g, or t
  misc_feature (429)..(429): n is a, c, g, or t
  misc_feature (625)..(625): n is a, c, g, or t
  misc_feature (627)..(628): n is a, c, g, or t
  misc_feature (634)..(634): n is a, c, g, or t
  misc_feature (641)..(641): n is a, c, g, or t
  misc_feature (652)..(652): n is a, c, g, or t
  misc_feature (656)..(658): n is a, c, g, or t
  misc_feature (662)..(662): n is a, c, g, or t
  misc_feature (971)..(971): n is a, c, g, or t
actgtaaacatctatatgatctgggattttgtttttattttgaaacgggagcttttttgtttacaagttcattaaaaactaaaaactgtttctgtaaggaaatgagattttttttaaacaacaaaaaatgccttgctgactcactattaaataaaaatctccccaattttttgatagactacttcaagccatttgttacatggtattcctttgcaagtcaatttaggtttcgtgttataacttttcctctttttttaagaaaaatgaaaaaagtaattcttttgtctgaaggggaaaggcattctttcatttttttcttttttttttttttttttttattgacttgtggagggcacaattattcttagttacgtgcaactgtgccagaaacttgggtattgtgtagcntgtgtgcccgcttgacttagnagctgtggactggattttggacattaaaaatgtgaaagcatttaaggggttcccctacaaaacatttttcttaacaatactttggaaagggctataagcagttgattttcaccctgggagagcatcacacggtgtggaggtccaggtgatggtggaccctcccaagccctccgtgttcttaaagtttatcgggggngnngcgctncctctanatcttttgggnggcnnnattnctttttctctgacccagtgggaaaggcaaccttctggtgaatcattctcaacacagggtactaattcccctttatagacgtgcgggaaactaaagaacttggcgggcaaagtggcgggaccaatggtgaaagtcgggtctgggcacaacggtgagtggaagagcggttgggacaggtggagaacgggggggaattttgagaatcaatgggacatggagagagagcacgcgaaaaattaagaggagggtgacacggttgtggttattccgattattttattgatttatagctttcttattttcttttcgnccaccccaccaccccccaccaccacacacacgaccgaccgaccagcaccaccaccacacacccaagcacagcccaccaacacccacccgacaccaaacccacacgacgcaccgaccccaccaccacaccccagaaacaacaccaccacccaccgcccccacaacaacaccaccacacccaatggaagcgggagcacagaatggaggagtaagacgaagacaggaacgagagaaaaacgaacgagaagcgaaaggcagacaagaaggggagatgacgcgaggagggagcgagagaggcagaagcggagagcgagaggcagagaggacaacgacgagaagagacacagcggagagacaggagacaaaggaacaaacgagaggagaaaccagcaccacacaaagcgcacagaacggacaaggaaaggcaaacaaagacagaagagggccagcgaaagagaacgaacaaggaacaccacaggctaatcacacaccacacagcagaggacccacccacgacacacacacacgcagacaaacccacacaaacacacgacaccacacac

SEQ ID NO: 480407 - DNA, 212 bp, Homo sapiens
tgaactactgcttcatcgtcacttattcatagtgcagcgccccatgcttcgtagcgcgcttgccatactattatccacatcagtctcagtgatgtactctggtcactccgttcaggtcattgtggtaagtaccgtagcacactgatgatttccccgctaccgtccactccatgctacgcgggtcttagctgttccctgaatatagatagagg

SEQ ID NO: 480408 - DNA, 115 bp, Homo sapiens
tataatcgagtaagtcggtgcttccatgtatgaaggtcacatccgtagcattcgtgggaagtataagctcatactctcattcacatatgggaggttagatttttttttaagtttc

SEQ ID NO: 480409 - DNA, 145 bp, Homo sapiens
gaccccgcctgaaaaaagggttttttaccctcccagccctgggtcaactttgaaaaaggattttggtacagaaggagcccttgggctcccttttttttgatagcagttataaagcccttgttcccaataaaactgggcagatgga

SEQ ID NO: 480410 - DNA, 97 bp, Homo sapiens
aggtcttctcgtttctacgtaacctttcgttaatacacagacttgtggaagtgctcacctaactagattataaaccgatgtttgtttttccctcact

SEQ ID NO: 480411 - DNA, 1156 bp, Homo sapiens
  misc_feature (389)..(389): n is a, c, g, or t
taatttcttccagggattcattaagggctttgacccccgggtaatttctacccacattgaaatgaatccaaggaaatatttcagggacctggaggggatgtgtttttataacatgctcctggcgaacagggatcgatcagacgctgagaaacgccctgttgtacaggccaccgccttgtagccgcaggcgcccactctgtgtggcaataacactattgttctgcgccctattgtccctcaagtcagggaggttacaggggctccccggagaaaggccctctggagggtgttcccctatccatcttttgtgtgttgcgccccaaaacacagcatatatgtgccccccaaactctgtgtgtgcgccacaagaggcacagagatatgtgacnccccctataaacccactataaagtctgtgcaggaaagagctctatctccagcggagtagtgagagagagcgacactctcacagctgtgcgcctgtgtgcgcccgcacagtgtgtgtgcgtgaccgcccccaagagagagctataatgcagagggcacacaaccccagaggtggcccagactatcttgtgagagcaacgacctgtgtgacaaaactcgctctagagcagcgacgacgacgtgtgcacaacgcccgtgtgttgtgcgcgacgagacgaggcggaggagaattctaccccacccaaccacgagtagtcgttgtcttaagacgacgaacaaaggagggttgccgtgacagccccccgaacaagagcatcgcccttacctcatccgccgtgatggcgtgcccccccagaagaatgagcccaactcaccgcgcgcgtgcacaccaccagggcagacaaaacatgacagaaagacgcaccacacagaggggggactacacacatccctgtggagctctaaatacgagtgaggggccacgcgcgtgggccgatcaccagatggagcaccaccacacgccaccatctacacgatacttcacacacaacactacgtactacacaacaaacaaacatctaccaacagacagtatgaagaaccccccccgtggcggcagaaagagcccaacgcatcgagaggaggagaagggtgggggacaacaccacaccacgctgttatataacaagacagacagcagaaaccaacc

SEQ ID NO: 480412 - DNA, 226 bp, Homo sapiens
actcttatgggcccatctggaaatatgataaatagccataaaacaacagcggaactgcgaaacacttaacataccttacaggactaaggcaggacaaggaaacacggtcacatctcctgagaacgaaaaggaccttcgatgccaagtggtgagaaaagctccaattcgccaggggttggaatggcaggctcgagaaccaccgcccagaccggaacctattctgtca

SEQ ID NO: 480413 - DNA, 812 bp, Homo sapiens
ggcgaaacactatgctaatggcatggtgccgcggtcctgtcttgctgtgcctgcggagggggctcggaaccaattcattcctgcacggctggggcaggacgccctttcgagggagctcggtccctgtgttgcaggtcctcgcttagagacctgcgagatggagaaagagagcacgaggcggcacaaaggaaagccccaggagcaagagtcttgcccatctctccctcttgagcatcttcggacatggggactggatgtctttcgtcactggaaaacctcagattgccgaggctgcgggaagagtcatcacctcgagaagctcgaggactcgagcggagaaccaggggccggtgcggtcccacacaaccaggatccgaggatccttacgatgctctcgccaggcccagtccggtaccgaggtcgaagagcgtcaacgtctccccttcttgttcaatttccagagagagaccctttcaggctgggagctgatttaagcgtgagacttggggaggggagaaacaaaagtttaagaaatcattcaggttgaacaacttccggacttcttaaatagttacttggggggcagtccccgttcgggcaaagaatcgtggggaaacgtccccggcgccaagaatactgaggagtgcctttcggcaaaggaagtaaatgcttgagggagggcagctttgggaagactattgtacgtattgatgaaaaacgagggatgccatacatttccaaaaggatataatattgttctctccaatgatggtattaacacagggatactgtttggaagcgggctaggttgg

SEQ ID NO: 480414 - DNA, 162 bp, Homo sapiens
atacagtggtccgacaacaagaaaagaaactgctgctgcattctctgatcttctccattttgctagtcagtactctactctggcatataaggacggaggtatcctctatggtgccaactgcccagtgggtgagctgtccctgtggcaggtagaggcagatgc

SEQ ID NO: 480415 - DNA, 211 bp, Homo sapiens
cttcccgatgccccccggctggactttcccaagcctcttggagcccctcatctcaaatccctgtgttgaacatgacacttactgtcccttatttgttaaaatttgcaatatctctcaaggaaataatagccaacatttttttgaatgctttcatgactcccgggctaaggcctttatgaggcgttgtctcaagggggcccaacagccatcc

SEQ ID NO: 480416 - DNA, 220 bp, Homo sapiens
aaacaactgcgccctggggttgtctgtgggcctcgtgggcattgtggtggacactgtactatacatcatccgaggacctgcgttcaaatgagtgcttccagacaaccaagggccctagataaatcacaatcctggaatgaaaggtagcatcgccatctaaaggaacagacaagtgaacttgctacataaactaacataatatactggccccatagcgata

SEQ ID NO: 480417 - DNA, 293 bp, Homo sapiens
agtgagcaacggcaggtgagaagcacattgtttacattgtctctgatgggtcagtcactggtgttgaatgcctaagtgctgtgtaaattcagtggtctcatggcccttctaagtgaaaggggagggacttaatgagcttctgaactttttaaagtctcaatccatccttcgatattttttattaaaagccacgttgttaggtaaatgcagtcttgatgtctcaaaataaatgccggtgacctgcaatcatcattaagacgatactggcgttcttcaagaagtggctacagggt

SEQ ID NO: 480418 - DNA, 149 bp, Homo sapiens
ataccaagcgaaggttggctcatgtcatgctcgtatacagatgcagaaactgaagaacagagaacttagatgctcatgcaagatgacaacacagcaggaggtgacagacacatttatttcgttaccgtgagataatatttcaaataagt

SEQ ID NO: 480419 - DNA, 184 bp, Homo sapiens
cacgtagagatagggtctcaccatgttgcccaattaggtctcgacactccatgagctcgagtgatccgggcgccttgagccacccaaagtgctgggattacaggcatgagccaccgatgccatggccagacaatagtaaacacacacaaactctcaagtggcctaattccctctcaccaaacca

SEQ ID NO: 480420 - DNA, 498 bp, Homo sapiens
atgccaaaccacagaatgagagaaaatatttgcaaaccttatattcactaatggcttaatatgggaggtctatgggctccatagaacttaatagcaaaaaacagataacccagttcaaatatgggcaaaagacccgaatagacatttttcaaaaaaagacatacaaatgaccaagaagtatatgaaaaggtgctcaacatcattaatcatcagagagctgcaaatcaaaacagcattgacatatcaccttacatcagtaagaatagccattaacaaaaagacaagagataatcagtgttggtaaactgtagagaaagggaacccttatacatggttggtaggaatgtgaattggtaaaagcataatggaatacaatatagatgttcttcaaaaaattaaaaacataactaccatatgatacagtaatcctacttctgggcatatataaaaaatgaaatcagtcaagaaatttctttacccccatattaattgcagcac

SEQ ID NO: 480421 - DNA, 169 bp, Homo sapiens
gcatacatatacgactcgagttggtaccctcgatagccgagagacattgatttggaaaatccggtccccacccgctaatgagctgttgacacctgttgttcctgtgcgtgaagtgggattgttgacttgtatgttcagaggcgtacgaacgtaattggcccttatcgag

SEQ ID NO: 480422 - DNA, 181 bp, Homo sapiens
cgtccctgacattgcagtgctgtggtgcaggtccagacatggtcagatcccacatggctgtgtctgtggcataggctggcagctgcagcttgtttctgacccttagcccgggaacttgcatgtcgcacaggtacagccctaaaaagaaaataaaaagaaagaaatggactataatcgtatc

SEQ ID NO: 480423 - DNA, 374 bp, Homo sapiens
  misc_feature (82)..(82): n is a, c, g, or t
aggatccctgtgttcttgtttggggagaggggaagcctggggcctgagaaggcagagcccccgagctcggagtgatctgcgnggtcttcttgtctgggggtcctggctgctgcatggaggcgcgaagtcacggaaagtgggccattgccaggctcggttgcctccatagcgaaaaaaatcacgggaacaacagaaacaaggggtgccctagttccctctctgcaggcgggtggggactgggtgagagcccgggggcctccaaaacgcaggcggcaaaagactgttgagcagtgcttgggctctgtctcccgtagacaacgggccatcagggaccaggacaggacattgagccgttacaggggaaagagcggggg

SEQ ID NO: 480424 - DNA, 871 bp, Homo sapiens
ttatcgggggttttcacttttgcttccttctcattttctcttgctgctgccatgtaagaagtgccttttgcctcccaccgtgattctgaggcctccccagccatgtggaactgtaagtccaattaaacctctttttcttcccagtctcgggtatgtcttatatcagcagcgtgaaaacggactaatatactaaattggtaccagtgagagtggagcactgctgaaaagacacccgaaatatgtggaagcgacttgtggaagtgggtaacaggcagagggttggaacagtttggagggctcagacagaagacaggcaacaatgtgggaaagtgtggaacttcctagaaccttattgaatggctttgccaaaatgctgataacaatatgaacagtaaggtccaggctgaggtggtctcagatggagatgaggaacttgctgggaactggagcaaaggtgactcttgttatgctttagcaaagagactggtgacattttgcccccgccccagagattgtggaattttgaacttgacagtcatgatttagggtatctggtggaagaaatttctaagcagcaaagcacgcaagaggtgacttggatactataaaaggcattcagttttataagggaaacagcataaaagttcagaaaatttgcagccgatgatgcagtagaaaagaaaaacccattttttgaggaacaattcagccagctgcgaaatttgcgaagtagcagagcctatgttaatccccaagcccttcggggacaattctgcgggcctgttgagacctcacaggaggccctccataaaggccagaggccgggaaaagggttcttggccgcccggcccctgcggtgaccaggaatggc

SEQ ID NO: 480425 - DNA, 176 bp, Homo sapiens
atagtttaaaaggcattcaaaccaccacaaggggagacaggctagttaccacctcggtacaacagatctaaaaattgaccttcctgattatcaaccccaggagtcagcagagaaagcagaggtcatgtactccttagtactttgaagatgagctcttgttcaagtgccgtcgacgc

SEQ ID NO: 480426 - DNA, 522 bp, Homo sapiens
gaagctctgggaagtgggatgcccccgagggtgccagtccagctagctgccccaaccctcaggccacagacatggaccccaagctcacccactctgtgtgcccctgagcagccctgatgggcaagcagctgcctgccatggccagatgacaccatggagctgctggcagagatgcccatggtggagcaggatgagcacacagctgagcggctgaagcatgcccagaagacggcgacgcccagacaggtgaagatgtgggcccaggctgagaagtgaggcccagggacaagaagtggtcctgagggagacgatacccgcgaacggaggcaagacagaacaaggagctcccttgaagcagagtcctctataccacatcccagatagtagtcctatctggacggccgcatgacccgaacatgacctggcaacaagatcgcccagataacctgaagaaaatggagggtccagaccctgaacctggaacaaagaaggacggacctgacgggacctgaaaacagaagc

SEQ ID NO: 480427 - DNA, 872 bp, Homo sapiens
tgtggtggtgggcacctgtaatcccaacaactcgggaaggtgaggcaggagaatcgcttgaacccaggaggcagaggttgcagtgagccaagatcgcaccattgcactccagcctgggcaacagagtgaggctatctcaaaaaaaaaaaaaaaggtcccatgagggtttaaaaggccaaaaatagccaaggaagagaaaatagggtttgagacctttaattaccataaaaaagggtggttttataaaggcagtggtgacgctatatagggagggaataaggtcctagtggtctacaggcacttgtagaattggacaataatttaacaattaaaatcctatataggttccaaataagtctaagggagaaattttggaagtggttccccaaatgacaacaagaaaatataacattggatctggaaatactataccgacttaatagttgactaaatcctggatccccctaatattggtttcccacaaattatccagagaatattatagccccaataatctttttgtcccgccttgtattatagtgtgtcacagattttcgaagaagtatgtgaaattttttgttgtacaaaagatgtgagcagacgagagattgtggggcacgcaaagagaaaaagaggctaaattgagtgcactttgagggagattagtatgaggggcacgcgtgtgtaacttatagcatagtcaaatgttggtagccgaattgagaaaaagcgaagaaggggggatgcttcccagaagaagctgggatatcaaagggccagggtggttagatggacaccgtgtggaacttagagggaaaggcggaaagaaataaacaacagtgtgccaatccatttgtgcaatggggagaaaa

SEQ ID NO: 480428 - DNA, 123 bp, Homo sapiens
cagtgtggcggagcaccgcaagcgcaagggcctgaaagaaggcatcctgccctggacaacttcctggacaaattgtaggcatgcccttcctgcagcgcctgccgccccggggactcgcagcac

SEQ ID NO: 480429 - DNA, 849 bp, Homo sapiens
cgcctggcgccccgcccgcgccttaggacccgcggggccgcgcggtgcatcctgcgggcggcggcggcgggcgaggctgcctgcagcctgggcgcacgatgatgaagtcgcggttccggcggcagggcgccgacccgagcgcgagaagctcaagcaggagctttgcgccttcgaagcaagactgtggagcatggcttcccgaatcagcccagggcccttggccttcgacccggaacttcgcatcatggccatcgcgaccaggtctggggctgtagaagatctatggtgcacctggcggtggagttcacaggccttgcaccgtggatgcaggccactgtcacagcgagatgcaccttcttgagctggccagggccgcctcctgttcccctgctttgatgacagcatgttcttgcattctctggggagatggtcccaccagtaaatggctgtgcccatcctggaagaacgcacgtcggtcttccagcttgcccagccggcccggccttgactggtgccagtgcatccgctcaggcttagccgagtcacagtggtcctgctggtggctgccggcgactttagcagcgcttggccactgaggggcagccatgtgcctccttcctggagtgttacccgcgctgaatccttgctcgagggggcagacggtttgccccagggcgaggttctcgcgcggctgtgcccgagaaggacttacggctgttgggaagggcaccttggggcgcacagtgagagtaccatccagggaacaccttgtcgtggaccccacaagagattcctcatgcgctacatgccgggcgcctgttgctcatctggaaccaggcctcgagtgtg

SEQ ID NO: 480430 - DNA, 345 bp, Homo sapiens
agcggagagcgccgccgccgccgctgctgcagcagcagctgctctgcagagtggtggccggggccaggccggggtgccctccctcccaccttctcacgccatgagccaggaagtccgggggactgggccccctagatccgacgcagcggagaccagcagcgagtccaccaaatgcaaacgagggagcatgaagtaaggagagataagacgcacagagggagagggggcaaaaggagcgggcatcgagggaggagcgggagatgggacgacaacagaagtagagcagagcttgaacgagagcaacgacacggagacaagagcaggcagaagaagggccagagaagg

SEQ ID NO: 480431 - DNA, 483 bp, Homo sapiens
  misc_feature (13)..(13): n is a, c, g, or t
  misc_feature (25)..(25): n is a, c, g, or t
  misc_feature (54)..(54): n is a, c, g, or t
  misc_feature (98)..(98): n is a, c, g, or t
cccaatgcccccnattgaaaaatgncaatttgccccctgaaatttaaaggggtnaaaactaaatgtgttcccaaaacaatttgaaaagtttaaaaaanattttgtccctttatttcctctgttaaatggcttttgaaaactatgctatccctttgcttttaacttaaaaacactttcttttgaaaacttttatggctgggtgcaagtggctcaggcctgtaattccagcactttgggaggctgaggtgggaggatcacttgaggcaaggagtttgagatcagcctgggcaacatagtaagaccctgtctgatccagcaccagccccccgcccccagcccccccaaaattagccaggtggtgtggtgcccacctgtagtcccagctactcgtgaggctgaggcaggtgggtcccctgagcccaggaagttaaggctgcagtgagttgtgatcatgcttgggtgaaagaacaagaccccccctca

SEQ ID NO: 480432 - DNA, 81 bp, Homo sapiens
gccgaggacacggccatatattactgtgcgacagacccaaacggtgactacgtaggggcttttggctactggggccaggga

SEQ ID NO: 480433 - DNA, 213 bp, Homo sapiens
tattaccagtgtatcttgaatagtagaagatccgttgagtacataatatctgttgacccagtgatggagtgcagtgaagtgatcacggctcactgcagccacaagcttccagcttatgtgatcctcccagctcagggctccccaccctgagtagctgggactataggcatgtgccaccacaccaccatgctaggctaatggtctgtatttgtt

SEQ ID NO: 480434 - DNA, 158 bp, Homo sapiens
agcccccagcccgccaaacccccccccagccctacacagcagtttggcctgaaaggtccctggggatttatttgtggagcctggtgctccagaatgtggcttttcataaagctttggccaaaggaggggaactttttgggggagggggggtggagggg

SEQ ID NO: 480435 - DNA, 733 bp, Homo sapiens
ctggtgtcatgttgacaaaatatataatggtttacatgctgtcattgtccatgcctacagataattctattttgtatttttgaataaaacaagcatttgtacattcctgatactggcgtacaagagccatgtaccaggtgtactgcttacaacttaatatcactgaggcattttgtactactattctgttaaatatacagcgatttctatgtgcttgccaccaccagatgagaagttaagcagccttatactgtggagagtgagaataattgtgtacaaatgtagagaagtactccaatttactgtgacaatcctttgtgtaagtaaacaatttgtttaaagttaataattgtgttagcatttccatgattacgaagatactgacagattgaacagccagttgaagggcaggctggcatgtgctgtcaaaacattatcctatctatgactatctttcatgtttctctttgttgcacgactgaacgtactattattccgattgcataatggggaaagacagtttctattttccccggtgcaaggatgtaatctctcttggagctgtagaatctgggaggattggagggaactccagtgtacctcagcatgggcttttgggctgctgctgcaagcacaggcattgaggcaaactatttatagctgtccttaccttggcacagaagtagaggggagaaatacagtccatcattcacgaagcaagccaacaagaagg

SEQ ID NO: 480436 - DNA, 188 bp, Homo sapiens
ctccatgcctgtgtgcaacaacgagtgaacactctgtctcaaacaagaaatgaaatgaaatgaacagaatagctctagcagtctatgcttgtaatgctaacactgcccagtgcactggctgtgcctcacaaccatgctacatccctagccgccttctgtggcagtgcttgatgtgcatgctagtgctg

SEQ ID NO: 480437 - DNA, 529 bp, Homo sapiens
  misc_feature (180)..(180): n is a, c, g, or t
  misc_feature (221)..(221): n is a, c, g, or t
gttaatcccagctactcgggaggctgaggcaggagaaccgcttgaacctggaggcagagattatggtgagccgagatcgtaccactgcactccaacctgggcaccaagagcgagaccctatctcaaaaacaaaaaaaaagtttcccacaaagaaaactgcaagtcaatgtttttaccagntaatgataaaaactgttgacaaactagatagagaaaggaanttctttaatgtgaagagtaccaacgacaacaacaaaattctaaagcagacatcatacttaatggtgaaatattcaacacaaaaaacggacaacccagggtaaaaatgggtaaaagactcaggcacttcacaaaacaagacacccaaacagccaatcaacatgcaaagttgctcaacctcattgataatctggaaaatgtagatttaaatctcaaagaggccgggtgcggtggctcacgcctataattctagcagtttgggaggccaaagcaggaagatcgcttgaggtcaggagttcaagaccagcct

SEQ ID NO: 480438 - DNA, 1322 bp, Homo sapiens
gcaaggacccgccaatatgggccgcgttcgcaccaaaaaccgtgaagaaggcggcccggagctcatcatagcataagtactacacgcgcctggggcaatgagcgtgtccagacgaagcaagcgcgtgtgcgaggagatcgccattatccccatgctggatagtctccgtcagacaaggatagcaggttatgtcacgcatctgtatgaagcgaattcagaccaggcccagtaaagcagcgtattctccatcacagctgctaggaggcaggagcatggagaacaggcgagatgaattgatgctacctgagtgtctcagacctctgcgaatccggcagacttattggctaggtcaagatcgcttgtaccagcatatgggcaccactagctgaaaggcgcctggggggacgttcctggacaggttcgtgtcccataggcgtacagggatgcatcgtgcagtcctttacaagctctggaggattgcatcttctccacatataccgaccgtcgagtggcaccctcgttcctgacattttatcaactctgggttagggtgctagtacttgattcccaacaaattatagagtactgggggaaccaagcgaaaacacaaagcaaaaagatcccaaacatataaagaccaaatcgtaacaagaacattaacacacacaaccgataaagaagaccgaaaatataaagaaggggaagaacaagcataccgggcgaaagactgcgcgacacagcgcaaaaaatagaacaatcacggaaccccatgacagggaacagatagaacccaaatctccagccccaaaggtcccgaagagagccacccaaagacagaagaaaacggactacacatggatcccccggcaccaagaggcccagcacaatcacaccggaaaacaccccagaagagcccacataagaaattcaaagctcgaaccaaagcaaccgcggccgggaaaggaaacgaccggggagggccccagagaccaagcaagaagacggcaccggcgcaggccaccaaacaaaaataacacggccccgtgtgtgagacaccagacaacacagaaaatacgaacagggccggacacgggcacacagaacgcggcaccccgaaaacaaccgggaccaccgcagtaacacacacaccgagacagagacacaacaaagacaaaatgaaacacaacggaccgacggaagacacaccaacgagcgcacgcaaaggacacagagagcacacaagaccgagaacaacaagacgagcaacaacacagcacagaacaacaggaaacagcaaagcagaacaacagaacacacacaac

SEQ ID NO: 480439 - DNA, 415 bp, Homo sapiens
gacacttgaaagcgtaagatcattttagtcgggattagaatagcggacacatttttagcatgggactggaccggcgttagacaggttctccaagatgtatgattttaagtccttactccataaatcttcattaaacacatctcagttttggcctgactcactggggtgtcaagcagctactcaccctgcctcaactacgtaagctgcaccttggcaggaaagggctcacaggttacagatagagcttgatgagctcatcgctgactgctgagggtgtcagcacgcccaggtctgtaaacagcagagtgattaaggaaggggcagtgtagtcgacccacggatgctcctctttgaggtcttgtccagtctgcgcgaccttgagagtgtctgccttatacttaaacttatctgggac

SEQ ID NO: 480440 - DNA, 2422 bp, Homo sapiens
acattaaagctatttaattaattattattattattattttgagacagggtcttgctctgttgcccagactggactgcagtggcgtgatcatggctcactgcagcctcgacctccagggctcaagcgatcctcccacctcagcttcccaagtagcggggactgcaggcacatgccaccacacccagctatttttttttattgtttgttgagacagggtctcactatgttgcccaggctggtcttgaacttctgggctcaagcggtccacttgcctcggcctcccagagtgctaggattacaggcaggaggcactgcacctggccagaaaaaactattcttgacttcacattttccgccagcttcacccctgcccctttgcttctctttgcagcaaaacttcaaaaagcatagtccacgctctcccccaggcattcttgggtctctctacccaggattttgctcccccatcgccacatctccttttgccaagggcaccagaggcctccgtgttgttggatccagcggtcggctctcagcctcctcttaactgctcagtggcactggtgccgccaagcaacccttcctccaagagagccacaggctctgggatacttcactctggggttcctcctacctcacagactctcctggctggtcctcctcttctccccaacatcttatggccaggtctccaggctcttttctgtctacaggcactctccatgagtccttattcagtctcctggcctcaaatgccagctgtgctgagacccccttatttgtagctccagcctagcctgctctcccctgaaccccagactcatgtttccagctacctctgccgatatctaatagacacctcaaactcaacctgccccggctgcactcccgatcggcccccacctcctacagtcatcctgcttcagagactatagctccgttttcaagggctcaggccacacccttggaaccacccttgcatcctctctttccctcaaaccaccgcatctctcacctggattatcgtaacagcttcctgtgtcccagctgcagtcccccgcccattacattttgttcctaacacagcagccagagtgagccttttgaaagggaagattatggggctctttggctcacatagtgcagtgtctccccatctgaccactaaggcctggctgtgaccatatcacccctgcgacctcaactcccctcacctccactccagacacacctgctgttctatggtgctgcctgcagttcaacaccaaagaatattcttcgctccaggaagaaaaacggttttctccacctccaatcacaatgtgttcttttggcctatcttttgctccccacccacccttttttttgagacggagtcttgctctgtcgcccaggctggaatgcagtggcacgatcttggctcactgcaacctccacctccacctcccgggttcaagcgattcccctgcctcagcctcctgagtagctgggactataaatgcgtgccaccacgcccagctcattttttgtattttagtagagatggggtttcaccatgttagccaggatagtttcgatctcttgacctcgtgatccacccgccttggcctcccaaagtgctgggattacagctgtgagccaccgcgcccggccttattttccccttttaggaaacactgggaactattttcttctcagagaaaaacaggacttgcccaatagtaacatggaaacttaacagggtcttaacctgtgaagactcaaggagcagaacccggagtaagggggagcaggggccggagtaaggggagcagggccccgtctaagatggggcagggcctgggctaagggagagcagggccgggctaaggggaggcagggcccagtctgaggtgggggcagggcctggtctaaggggagcagagcctgggctaaagggcagctgagcccagtctgaaggagagccgagctatctgaataggggctagcacctgttctaaaggaagtggctgctcccctgctttcgctgtgagagggaacacaggccttttaagaaaatgggaatcaagttttttgtttaatttcccaaaggttatatgttgacaattaacttcaaagtattagctgctttttgtaggccaaataaacacgtctgtgggccagatctggcccaggactagagttgccagtggcaacttctggcccaggctgaatggtgggcaggaaggaaatggagcccccaggagtgggagtgggagctgatgcctgggtacgggagctctgtgggtgggagtgagacaaaaaacagggtcttgagctctggggagcaagcagtgtcctccagtgaaggaaatcctggactcgcaggcagaagttttgcctcttactcgccatgtgctctgaataaagttacctgccctcc

SEQ ID NO: 480441 - DNA, 1142 bp, Homo sapiens
  misc_feature (81)..(81): n is a, c, g, or t
tgggatgcgtgctggtgagtgttctgctgctgcttctcagtggttcgtgtctgtgagtgcctggtgatgtgcctggatgcntgctgtggctgtagtgtgacctgtgctggctctctgaatgctgcactgctgggctgtggctgtgcagtgatggtgcctctcctgcttgctgtgcccctagttgttgggtgtcccccgtgtgtgctgctcctggccatctgccctgcacccatgctgctgtctggtgccccctgctgcctggtgactacttgctgttgcttggtgctgctgtgtgccctgctgtgtgcctgcatgattggccttacttccgtgcatgctgctggcttggagctgctgagcttactgcatgttgtttctgaatgctgtgtgctccgctggctgtgcgcctgtgcatgcgttccttcatcactgcttaccctgctggcacctgcaagctcatcatgcatcaaacaatgctggtacactgggcaaggctaactgcctgagttcaacctccgccacgactggaactctctgctcagccacgacccccggctgctcttcagacactactcgcgtgcctacttccccgacgcccgcgacatggtgcgctacctgggtgacttcgcggacacgctggggctccgtgtccagtacaacaccaccatcgcccacgtcactctggacaaggaccgacaggcctggaatggccactacttcatcctaactgaccagaacgggccaggtgcatcagtgcagcgtcctctttgtagccactggtttatcagtccccaaccaggttgacttccctggctccgaatctgcggagggttacgagtccggtccgtgggacctaggcctttgttggccccactgttgctgtcctgggtcgtgggaactctggctttggacacgcgcgacactctgggttgccaggctttttcccgattgtccgccggcccgggtctgttgtctctgtggcccccactcgttggagccttaagcctctcactggcgtggggacttccggtacgtcctgggggtgtcagcattcgcggggctccctctgagcggagctgtctccaccttttgtgttgccgcgtgtgtgccccgggagaggttcgtgtacgtcggggggcaac

SEQ ID NO: 480442 - DNA, 812 bp, Homo sapiens
tgtgggaaaaaaaccccatcatttataaaaaaaatggcccccccccccctcccccccaaacaaccccctcgagaaaacagggggcccaaggggtgtgggagtgggttcgttgtgtacgcccacggcatgagtggggggcgccgcctattggtggtcggggtgggaggctgctttgccccgccgtttgtgcacggcgacgtcgtgtagagcaaaaacgatattgggtgtggcaacaagggctcttctctctcttcctgcgcccgtacccgcctggtggtgtcactccccctcacagggagagaaagcagaggtggtcgccccaagcggcccaccacacaaaagaaaacaggagagagtggagcctgcgggaggtggggagaaaaaaagtggcgagaacgaacaaaggaagccacgaggcgacgccaatcacaccatggaggcccctcaagagacacgccacaacggcaaaactcccaagcggggagccaggaggaggttggcacacaacacgcccagagagagaaaggacgagcagcaggcaagtacaaaccacaccacgggactatgccacctactattgggaccgcttttcttcaaaagacaaccacaaggagaccaaatgagagagggcattaacccgtatactccacgaaaccagatatgagcgagaccccagccagaaataaaaccgccatatgatgcgaaaaaactaaacaacaacagaagacaaagagggtaacataccaccggaaaaagaaacaaccaaccaaaagaggacacagaaacgagagcacccacatccccaccacgag

SEQ ID NO: 480443 - DNA, 656 bp, Homo sapiens
ctcgtgccgaattcggcacgagcgagattgcaccactgcactccagccggggcaacagagcgagactccgtctcaaaataaaataaaataaaataaaattggagtagagtagagtagagtagagtagagtagagtagaataaaataaaatataatatcgtgataggatgggaccgttgatcaccatgtcagggacatgataagcctactatagaaaccaaatcgtcattgcacagatctttatgatctgtacatatggactagactatttaattaattaatttagagacggaatctagttttgctgtgcaggctggcctgcaatgctgtgatcttagcttactgcaatgtacacttcacatgttaaagtgatgctagtgccgcggcctgtcatgtaactgggatgacatgccagtgccatgctgctaggctaagctaaatattataagtatagatgagatggtaccatgccgggcaggctaggctcgaagctatgacctgacgtgatgcgatcctcttggcttgccatagcgaagggattacaagtctgatcgcatgcactgaacccatattatatcccggtctgacataacatatataccctaccttcatacactttactgttcaaggtaggggacgtgaccgttcctacggggg

SEQ ID NO: 480444 - DNA, 524 bp, Homo sapiens
ctctgggtgtgtctgtgacgctgtttaccagagtgatcagcacctgaattgacagacagtacggaagatgtgcccttaccgctgtgggcaggcatcctatctgctgagggtctgaacagaacaaaaaggcagggaagggtgaatgtgttctctgtgtttgagctgggacacccatcttctcctgtgcttgagcatcagagctccaggttgtggggccttgagacttggatagaatctcatcaccagctttccggggtctccagcttacagatggcaaatggtcaaacttcttggtttctataattacacaaggccatccctataaaaaaaaatctctccccaccatacacacacacacacacacacacacacacacacacacacacaaaagacacacacataaatatctcctagagctgtgtatctctggagaagcctgacaaatcgagatcgcggcatatatatcccaagagggctacagagtagggagggtcaacatccgactcatttcaagaaaatctgat

SEQ ID NO: 480445 - DNA, 477 bp, Homo sapiens
  misc_feature (115)..(115): n is a, c, g, or t
  misc_feature (351)..(351): n is a, c, g, or t
  misc_feature (354)..(354): n is a, c, g, or t
ccaggtgtcgtccccgggcgggggcatgggcatggtcacagtggtcctgttgatgtccccgatgatgctgagcgcctccttcagcgcgtggtgcatgtgcagcatcttgttgtgntgctgtgcctgctttgccaactcctccatcagtgtgttttggttcccacatgagtacatattggccagcggctccgaaatgatgaactccggggtttgagagtgggcaaacagggaaaaaggttgggacctggtgcctgtccccccctggctgccttgttgggcccttttgggactgtgcgctggacttggagccccttggagtatggcttttcacacggggttttataccggttngantggaagatccccctcccccctgccttttttcactcaaatggggaccccgaggtccaaaggaaaaaacccctgtcaaatgtcccagatttgggaggggacttaaaacttttcatgcccaaagga

SEQ ID NO: 480446 - DNA, 356 bp, Homo sapiens
tacacggtcccctgcgattgtaatgttatattctgatcatcattttttttgttctcttgtttctgcgatattagattccacttcgttgagattgtacccgtctgtgttgtttagtttgatgtctcctctctacctctctcaggagttttcatagttcttttaccttcataatcttctagactgatattatgtatatgtaagttaactgtttgaagatctgaaccattaatccctaattctctcttactcacatttttatagactattcatctcctaatatcttttcagtacaatattatatcttatctttgagcatttaggtgattgaactagtatgcttgctctcaaatggtttg

SEQ ID NO: 480447 - DNA, 160 bp, Homo sapiens
aggagagggaagatcgtgtggaaatgtcagaggtaggagtcagtgtggtggtcttaggggatgtggctgttgaacgtggtgaatgtagtcgtgacctgtggctgtatgttgctagaggtggcatgaaggtgtttccatcgtttgtaaatgttgtgaatga

SEQ ID NO: 480448 - DNA, 417 bp, Homo sapiens
  misc_feature (34)..(34): n is a, c, g, or t
  misc_feature (109)..(109): n is a, c, g, or t
  misc_feature (118)..(119): n is a, c, g, or t
gctcgacacctgtgaagatcgccattatcggcancggcattgccggactgaccagtgcctacctgctcagccgccgtcacgacatcaccctgttcgaagcgggcgaccnatcggcggnnacacccatacggtgaatgtcacggtggatggtagaagctacgcagtggacaccggttttatcgtgttcaacaactggacgtaccctaacttcattaagttgctggggcagatcggtgtgacgttcaaacccaccgaaatgagtttttcggtgtgcgacccgaacgccgggtttgagtacaacggcaacaacctcaacagcctgttcgcccgcgccgcaatattctgtcaccggggttctggggcatgttgcgcgacatcctgcgcttcaaccgccaggcaccgctggacttgcaagag

SEQ ID NO: 480449 - DNA, 1012 bp, Homo sapiens
aacgaaggaccggtgacatactagttacacgctcaacagtcacttggacatgcgatagcagtgacgattcacttcaatagtgataatatgacaagcaacatctcagagaaatgtcaagagaactcatactagtcaaacgacagaggtgtctccaagtgcattcacgtcaggttactctcttagcatggtcagaggaataagctgcatacatcatactccagaaagaacactgggcaagtggcagggaatgcaagatgtgcactctgcccgtttctcactcaaggaagacgaccacgggtggcgagttcagtcccaaagcaggtacttagatctacttccacacacattgcgcaggggtcctgggaaccgagaaaatgaatagcaggaataatccaaggttagacagtgcaaacgcatgaaccagcataaagggttcgcaccacgtccaatgaccttaaatctacccaaaacgaactgcgctaacacgtgtacaggcaaacaaggcactatataaggaattctctattaacaacactcttttgtccacgaacagtatcaccagcgaaaaaagtatctaaatttacggccaagtaaaagctaaaactctaaacttaaaaccagcatattacgacattggccatcggacaccctttgaccattacaccaaatcagagaacaacaccatgtggctacatataatcagggctcgatacaactctgtggtcacctttctttcacgggcaccttgggcgaaaatattgggggcttcaccaccgttggggcccacttgggctcctgggtaacccaagctcgttccattcaacaggcactataacccacattaacgtgtgggtcagacaacacatctcattccgttacaatgcctctcagtcattgataatgacacttcggtatcacgcgaaaggacaggccaacatgggccataaaaaacatcaggcgcacaacttagggcttaacacttcccgggggaaacattggccccatgggcaaa

SEQ ID NO: 480450 - DNA, 225 bp, Homo sapiens
gtatagtgagaaccgtttgcaaagttaaataaaaaaaatagcaggtagagtatacctatagtctagctacttggaaggctaaggaagaagctcacttgagcttaagggcttcaaggttgcagagagctatgaccatgccattgcactccaacctgggtgacagagcaagacctcatctccaaataactaaagtacttaaacattaaaattaaacctaccccaaat

SEQ ID NO: 480451 - DNA, 831 bp, Homo sapiens
ggactagtctcgagtaatgatgattagtaattcctcagagaataattaataatagaattaccatactttgggcgcaaaggtgtccaacaccaaggtgacaagtacttatatcagaatcactcttacctcagaaaaatcacaccttccctgggctctgcctggggatccaaatcaagccggggtgtgtctgacaatcaccagggcacggttggcttcccggccctccatctctactgttgggctacagcttgagttcactaggacatcggctcccctctcaggccagccagcaagttgtaagctgccaacaaggacatggtgtatgcgggtctctgtgggtaggcactgccaatgtggggcagaatcacacagttctatcagggtacaggagagggtggttggtaggcaggggttctggggctacgtcacatccagtaccagaagctgcaatcttaccatcgggccaggcctggtacaggtcgtaccgggttaacgacgtcagcccctgctgatgttgataaacacagttggtttccttcatcttcgggaagaagtccttgtggcaaagtccctcggttgagggtgtaaaggagcaggccacgacgggatgacatccagattggggaggccagctacggggtaaacacacaatcatagcctgagaatccgaggagatcccaaaggcctgggagggcgctgggtaagaattctcgggacccagaaggacaaacgcaaaaagggcgagcatgacccagcagaagccaaaggacgggaagccagccagcggggcccaggtcgcattactcaccagacgaccacaagagacagaga

SEQ ID NO: 480452 - DNA, 530 bp, Homo sapiens
tatgtttataaatgatacagatctgtttaaaggttgtagatacttttttgttcctgttcatagatgggaagcttccttataagctgatgcagagaaaaattagtccttcaaatactgctgtattttcaggaaaaaaaaaaaagggggtgttgctatggaaacggtactagattttggcctacaatttacctggtcaaatatggtagataaatggctaatactaatagccaaatagataacacctaaggcttggtttaaaaaaacgaaaaagaacaaaacaaaacaaaaaaacatgagcaggggtggtctaatgaagttatgacatcggtcctaataagtttcttaaatacatttactacttaaatgggtttggaagcaacggtttacttttaaaattttggaaaactggctaataacctttgggtggcagaattagtagattggttaatggcgggacatcaactacatatgtgaaagatgttgaaatgctttgttatttcaggcaatcaaattaaatcagactatcagac

SEQ ID NO: 480453 - DNA, 106 bp, Homo sapiens
atgacatcattagtcagacttcacatcttaactagctgctaatatttgctgcctatctacatgatgtttgcgcactaaatctcatgttccagaatagaaggtttta

SEQ ID NO: 480454 - DNA, 151 bp, Homo sapiens
cacgaggtctatgattcactgtccaatcgccattgcactgtatcatgattacgctgtcatgacatatttctttgactcattaggccagacgttgacattttagatccactccacagggatcataagttgacgcttcatgtataacatgttt

SEQ ID NO: 480455 - DNA, 129 bp, Homo sapiens
agagctgttttgctccttagaaacttaagcctggaatgattcaaaaggctatgctctcagcgcatgagagctggcaaagcaaatgagaaccgtcgccgtatccagcgcagggccgtgcatcatctttat

SEQ ID NO: 480456 - DNA, 251 bp, Homo sapiens
agctttagattacacaagttatcctaacataccatatacttagtttagaatataagtacctaaaataaataaaccattctgggtcacccttactgaatattctactgaaaattccatcaactgcagtatgctgacttgcgactggattgcttcaattcaggtgctcattttttacatggctgttttgtgagcacaaaatagatgtcatatcacttccaggacatcctgactattggttcctcccagtctca

SEQ ID NO: 480457 - DNA, 260 bp, Homo sapiens
tgatacaacgcgtagggagcctcccatattgtacgactgcaggcggcgcgaatatcactagtgattccccaacaagactgttagagtaactaccacggacagtgcaaaacaggggcacgagggtatggatagccgatatccaccaattacctccaccggcaacaactctctatggcctgttgcccctcctataatatccgccacgacacccacgggctcctcctctgaaatttaccaccacgcatattgaatcctccacg

SEQ ID NO: 480458 - DNA, 263 bp, Homo sapiens
gttttttactttaacaaattttttttgcagaaaggaaaagggaatgataattagtttaaaaaaggggcccggccgtaaaagaagctaaaaaaactttatgcaattaaggggttacagaacatgttgaaacttttttttcttttattgggaaaaaggaaagtttgccccccccccttttattggttttggatgggaaatcaaggaattatttttggtgttaaaaaaagggcccaccttttaataaagggaaatggacatatgga

SEQ ID NO: 480459 - DNA, 241 bp, Homo sapiens
gatctacaggatctaagggtgatgatgtggtaaccaaggtatgatgctgagatacatgtagctttctttaatgagagggtagattattcaaagcaagcgaatagccaaaaataaggggggaaggcggggagttccatttctcggaggttcaaggcggccttcaagaagaaagaacatttaaatggccaagggtgaaacctcctggtctaagccctttatctcaggggaagggacttcttaa

SEQ ID NO: 480460 - DNA, 501 bp, Homo sapiens
acagaaacacttaaagaccacacatgatgccatttgcagtccagagaaatgtaaacaaatgtaaaggtatagtactgaatcataactacataaaattcactgttgtacatactgtactacttaatataataatttcatagccaattcttcttgctattgctgtgagctcaagtgttgcagatacacgcttaaaatgctatgtgatgctaatcatctccacataagcaatttgtctctctggtaagttggatgtagcagtaaaaagtgatcacttgtggttcttgtgtatttttcatcatgttaagtggaatactgtaaagtttgaataacaccatggcacccatatggagtgccactaatcatgccagaagtgctcccaagaagcagagagaagtcatgacattagaaaaaaaaagttcagttccttgatatgggtgtagattgaagtctgcaaatcagacgctcccgtttcaagataaaaggttctactttggatcttta

SEQ ID NO: 480461 - DNA, 943 bp, Homo sapiens
  misc_feature (1)..(1): n is a, c, g, or t
  misc_feature (3)..(3): n is a, c, g, or t
ngntcctcatgaagtaggaactgtagggagggggtcatcgggagaagacaggcagttctctttattgtgtaataagtgggtgctgggccgccttccgtgtcggtttgctgcgtttgccggccctgtagcttttgcccgcgtttggctgacaagtggcgccacacggctttgtccccaggggggatttcttattcccgaggccaaaacaatgttggtggcaagaaccatttgtttgggggagtcaaaaccacctgtgccgaaggcttgcgcacaccgcgtgtgtcccaggggaacgcctatttccgacggggaaaaatatgagggcacccccccccgcccccaggggccggaaagatcgggcaccacatcgggcccccccccagtgggagggtcccctggtgtgggagccccgcgaaggaggccacgtgggtggtaatgacgaagaacgaaccacaaaatggggcagagacgaacatgcgccaaaccagaatattgagcggcacttgcacggcccaaaaccaaatcccggggtcacccgctgccgcgctgaaaacatcgccctcagttagctctctgcgaccgacacagggcattgggtcccccaggtctcctgagaagtgctggagtgcagagaaaatgtctgcagccccacaagtgccccaaccacgcccgcgggcaacagatcacatcggacccccccctctttcgaaactcccgttttaaaaaatgagcccagcagggtgtgaactacccaccgcgcaggactggtctcaccaccgcgagcacggcgccacgcaaggagagggctgtccaccacacaagtgacgaggaaaggaggccttgcccgactaagcacggcaagttgacgccggctcaccagccccgccccccccccgggggccacccccagaagccctttcccacaaccccacccaacaaaaca

SEQ ID NO: 480462 - DNA, 130 bp, Homo sapiens
gggaggatgtagcctcacactatcgcaaaggtccagggacactgcaaactaacttcttcatctttgcaccaatgggggtgaggggggtctttcagtgaatatttttcataaactatactgtcgacaagta

SEQ ID NO: 480463 - DNA, 421 bp, Homo sapiens
tacgaatcgagctcgtgtacctgctagctctctctgatgccccgttgtcaccaacgtgactgtgaaggcaggagtgtggacaagcaccttcatcgagtattacagagactttgagcgagtccgggtaaatggttggggtaccctattcctccgaaccagcatccccaccatcaagatggagaacaagagcacgtggttctcatgtggacattgactacggagctgcgtggaggagctgccggccgaacatcgagctgtggatggtgctggtggccgtgggtgcagggttgctgctgctggggctgatcatcctcctgctgtggaagtgcggcttcttcaagcgagcccggattcgggcgctgtatgaagctaagaggcagaaggcggagatgcagagccaggcatcagagagagggtgagg

SEQ ID NO: 480464 - DNA, 1522 bp, Homo sapiens
gagatttaggtactcttatgaccagtcatctccgccagttccttccaactatctggatcatcgtggtatccacacacttctcatgatctgtgttctatagaactatgattgtttaagagttccactatggtattaggaggatgctagccattcagctcattctcatgtgggagtgcgctatcatttttcactttcagaccatcattggtcgctcattgtaccctatcatcatcagtttgtccacaaacatgcacgagcacagttctctctacctcttcaatcacacagtcatgcacatcaggtaatatccattgggtgtataatataaccataactgttagtccatttcgtgctaatatgaatggatatctcagagctatgatttccatgaatctatggaaataagttgataggaataagatgacgtgagaatatggacagcatgggaggagacaggcacgcgtaatctactacttggaccaatacctgactttttgacacactactatatattggcgtaacaaactaccactgagaaagctggcgaactttcctggtgaacttcattaagtggagtacgcgtacttctacttcttcaaccaatctgggtcgtgacggacacacttctgcaattcaacaatttgtttcccacttcacatctggggatattacttaaaatttttacttgatgcccctgaaatagttgataacaaacagtacataccaccacgattttgcattgcacattttcctggggacaaatcacattgatcaatatcaatccttgttccaatgctgtgaaatgaaataaagtaacccgctttctggacacaggggctgctgcggcacttgagatgtcctcccaattgcgcggccgttgctacaaatatgttatgagtctgtgcccctacattgaacttaacgagcaaggccttggcagcgcatttttcgacaacactacttactagtggtaggagccccatatatgtaatcgtgctctgttagggaaacaacatgggtatacaatctccagtgggatcctactgtggccacatccttctaaaatctgggctaacacaatacgtagaggcacaaatagacgaagcagtgtggcagacgaccccctcaagagaacaattccgtgcgcaagcgacacgggagtcggtcacagcgctcaacacactggggggaaacacaacaaaaaggaggacaaaacaacagcacgacgagaggggccgaaccaacagcagtggatcacaaacaacgaccggagcgagccgtagacaacacccgcaaacggagaacacaccgaccacaacaattctgtgggtgtaacccactgccacagacaacatcaagaacgagcagagcgcggatgaaagtaacagacacgacgcgagaccgaaacaaacgcagacgtctacacgaagccgtacaagcccacacgtacacatcagatagcacagtgcaccgacacactaaccagcgacgcaagaccgaacgtacccagcacaaggacagg

SEQ ID NO: 480465 - DNA, 633 bp, Homo sapiens
ctcccatacacaatagacttcaaagagaataaaatacctaggaatccaacttatgaagggatgtgaagcaactcttcaaggagaactacaaaccactgctcaaggaaataaaagaggatacaaacaaatggaagaacattccatgctcatgggtaggaagaatcaatattgtgaaaatggccatactgcccaaggtaatttacagattcaatggcctccccattaagggacccatgaatcttctctcacagagataggagaaaactctactaaagagtatcatatgagcacaccaaaggagggcttgcatcgccaagacaatcctaagccaaaagaacaaagctggaggcatcacactaccctgacttcaaactatactacaaggctacagtaaccaaaacagcatggtactggtaccaaaacagagatatagatcaatggaacagaacagagccctcagaaataacgccgcatacctacaactatctgatcttagacaaacctgagaaaaacaagcaaatggggaaaggaatccctatttaataaatggtgctgggaaaactggctagccatatgtaggaagctgaaactggatcccttccttacaccttatacaaaaatcaattcaagatg

SEQ ID NO: 480466 - DNA, 253 bp, Homo sapiens
gagatgcggacacctggaccgccgcgccgaggctcccggcgctcgctgctcccgcggcccgcgccatgccctcctacactgtttaccgtggccagtggcagccagtggttcgccggcactgacgactacatctacctcagcctcgtgggctcggcgggctgcagcgagaagcacctgctggacaagcccttctacaacgacttcgagcgtggcgcggtggattcatacgacgcgactgtggacgaggaactgc

SEQ ID NO: 480467 - DNA, 330 bp, Homo sapiens
  misc_feature (49)..(49): n is a, c, g, or t
  misc_feature (300)..(300): n is a, c, g, or t
  misc_feature (307)..(307): n is a, c, g, or t
gtttaaaaaattttaaaaaataccttatagagtggggtcttagtatgtngcccaggctggttttgaactcctgggcccaagcagtccgaaacctctgcctcctgggttcaagcgattctcctgcctcaacttcctgagtagctgggattacaggcatgtgccaccacatccagctaattttgtatttttagtagagagagggtttttccatgttggtaaggctggtctcgaactcccgacctcaggtgattcacccgactcggcctcccaaagtgctgggaatacaggcatgagccactncgcccgnccttttcttataatatagttttt

SEQ ID NO: 480468 - DNA, 650 bp, Homo sapiens
ggtgcatttgcaccgacggctgggacggggagctctgtgatagagatgttcgggcctgctcctcggccccctgtgccaacaacgggacctgcatgagtccaatagcgaaggaactctataaatgctcctgatgcccccgggtactcgaggaaagtgacatagccagataaaagagacggagcccgagctgtgatcaacagcgagtcgcccctgccaggccagggaagagcaccatgcagtcggcatgactgacgggcaacaggcaagatcacgagagcacaaccaagagacccgaagagacaccaaatcagcaccactagaaggaaatctgactaacggcaacgacaaccaaccaacgccgccatacaaccattaacacaacaccacacaaaacagtcgcaaatatcacacagactaaacaaaaaaagacagatcaatgcacacattgagccaaaccagtcacgcaacgcaacactagacctcatagacacaccaaagaaccacaaaaccaagtgaacatcacacaataaaaaagaaacaagcacctaactcaaaaaaaaataaggatgacataaagggactgaggacgaaggacatcaggacgcggagacgcagagcaagagacagccccacacaagtacaggaggaag

SEQ ID NO: 480469 - DNA, 129 bp, Homo sapiens
tttggctggccggactctctcctgctgtttccccaaagtggaatggaaggctttcaaaccagagtgtctcactacccctctgagctccagaacagatggggcatgagcaagcgagatcagccatggctc

SEQ ID NO: 480470 - DNA, 378 bp, Homo sapiens
cctttttttcccctttcaaggggggaaggactcccccccccctgtgttttaaaaaggcggggccctttgcggggccctttttttccccacgcgtttggaacgggggctcccccaagttcttgttctcagggttctttgcacttcccccttaaccccttgtcgttgggccacattttaagatccccatctctttggggggtggggcctctttttaaggcgttcccggacaggggtggggtggcccaaaaccactttacaagcagccatcccctggctgtttgtggggggggttggacaagagcttctccctttccacaagggagaaagagagagagagagtgagagtttcaataaagtttgtacactttcaaaaaaaaa

SEQ ID NO: 480471 - DNA, 151 bp, Homo sapiens
gggagtgcggtcataaaataaacggtcgtaataattatctgaacagccggggcataagcggcttattttcaggtcattattacgaccgtttttctttttccaccgcggctgaggttgcatttttttacaactgtgtccgccgctttcggaa

SEQ ID NO: 480472 - DNA, 687 bp, Homo sapiens
gggggaaaaaaaacaacgcaagtagagtttacaaaacactactaatttttaaaataaaaaagataaaaacaccttaaagagcacgccctaataaataataatccttatctgctatctagccctgtatgcccttttcctaacagtcacaacacaactaactaatactaacatttcagacgctcaggatatagaaactcgtctgaactatactgcccgacattatcctagccctcatcgccctgccatccctacgcatcctttacattacatacgaggtcaaccatccctcccttaccatcaaatcaattgcccaccaatggtactgaacctacgagtacgccgactacagtggactaatctttaactcctacatacttcctccattattcctagaaccaggcgacctgtgacttcttgacttgacaatttagcgtactccccgatgaagcccccattctataaaattacattacaagacgtctgcacttatgagctgtcccacattacgcttacaccagatgcatttcccgactttaactcaaccacttttaccgtcaccgatggggtttactaccggcatgctttgacactttgggctaaccactgcttattccccacggccttcatcccctagtcttttcctttggaccctttttacctagtgctcttatcttacctctgtgggcc

SEQ ID NO: 480473 - DNA, 509 bp, Homo sapiens
  misc_feature (274)..(274): n is a, c, g, or t
  misc_feature (405)..(405): n is a, c, g, or t
gggagtttccaagctcttgctccccctaacgtctcaacaggcgctcactgaagtgtatgaatattttttaaaaaggtttttgcagtacagctagtcgttcccgctctgctattctcagaaaggcttacgtgatgccctagggccccaaatgcacggtgccgtggcatagcatttcctacttccacaatgctgccgctatttctagggcaccttgagagcatcagtggcgtgaaattccaaactagatgtggcgcagggcgagtgttgcttaccntgccctgctggggccagggttccctgaaaactgggttaattctttatagaaatgtgaccactgaatttatttaacaaaataataataaaaatttaaaacatttacaaataaaaaaaagcacagaaaacaantttacatgtatataggtcttgaagtgagtgaagtggctgctttttttattatagaaagggggctatagggggctttgggtaaaagagttggggatgggtactct

SEQ ID NO: 480474 - DNA, 789 bp, Homo sapiens
  misc_feature (18)..(18): n is a, c, g, or t
  misc_feature (90)..(90): n is a, c, g, or t
  misc_feature (107)..(107): n is a, c, g, or t
  misc_feature (109)..(109): n is a, c, g, or t
  misc_feature (112)..(113): n is a, c, g, or t
  misc_feature (137)..(137): n is a, c, g, or t
  misc_feature (165)..(165): n is a, c, g, or t
  misc_feature (170)..(170): n is a, c, g, or t
  misc_feature (172)..(173): n is a, c, g, or t
  misc_feature (192)..(192): n is a, c, g, or t
  misc_feature (375)..(375): n is a, c, g, or t
  misc_feature (394)..(394): n is a, c, g, or t
  misc_feature (399)..(399): n is a, c, g, or t
  misc_feature (562)..(562): n is a, c, g, or t
  misc_feature (608)..(608): n is a, c, g, or t
  misc_feature (625)..(625): n is a, c, g, or t
  misc_feature (744)..(744): n is a, c, g, or t
ttgaaaattgaataattngcccccctgggctgggatgggccagctggctccccccgttgccccctccgcctctcgggggcctcggggttntggcgtccatcttatgntnttnnccaaaggggggcggtcttgggggngctgcttactgttgaccttccttttggnatgtncnngggggggcggggggggggntctttaggcgggctgccatccgggggctgctattctgttcactgggattcagctgtgaacatctgttctttcttcctcttctgtctactgcatgcgggcccgggggctgagcgttagtcaagggtacggggggggaaaaggggggggggcaaggcccatcccccaggggggggggggctctgntgcggggggggcgggggcnggggnggggacggccactgcctctctcaccctctgttccatccctctgctcaagaaaaccaggcttagcagagtgggacagccgctttttattggtctggctggcgtgcctagtgggaagctcaggcagagcttcctatcttgccctggctcccatcttccctctccngggggttcatcacacatcccgggaggggagagtgtcctgggcagangtggcaggcaaagcggngtaaaaactccagggctgggaagcaaatggggctcagggtgatgcagaaaatgtgatgttgccaggccatccaaataaagcatccatcggggcagaggagaagctgtttccctgcaganactcctctgcccccaccaggaatgggaggggcaggaggaagagct

SEQ ID NO: 480475 - DNA, 930 bp, Homo sapiens
gatctggtcgaattcgggtttgtatctaaaaaactaaagtgtcgctgaaagaactacctagtaagagaggcccacatcatgggaccgcgctaagtaatcattactgaacgtatttgtatgtgatttgtggacatctgctagatttcgtagcgacgttcctacactagcttagtggcgtcactcatgcactctcataacattgcgcggtgagtaactcagatcgaattgaggaacgcaatgttaaacaacgtagagaggaaaggatgagcctgcgtggagaaatgaggaaaaaggaggcttgctttcaaagatagtggccttgcggatcatctggggattaaatctcgtacatagatgagccgtgaaacagatggtatcactctattgatgatattccttgtaggcacaattagagactcagagaaagttaactatgttagactatacatttggagtggcccgcgcaaagggaagaaccaagaaaaaacattgagatatcaaagaacacgcagtagaatataacaagagaagaagaatcgatacagggactgactttggagactaggttccgtgaattagaattggcatagtctaaggagagatataggttagaaattttcgagaaggcttgggtactctttcgcaagaaattggagcaaggaaggcgcggaaagaagaccaattgagcacattttcagttgggcatataatcgacatgaagtatggggagatagagtgaaaaaaacaagagatataatattaggaatgtgggagtgattaaaatccagagtagagtggggcattttccacagaatgtaggctacaagacagcttataaaggcgtgtagaagaggaaaggatacgttgaagggggaaacattggtacgaagggacaaggtcaagggactagtagaattaaacgaaaagatt

SEQ ID NO: 480476 - DNA, 360 bp, Homo sapiens
  misc_feature (81)..(81): n is a, c, g, or t
cacgccgcaccgccggttcaaatcttaagatgaagatgatacttttggtcaaattgtttacagtttggagccactataacnaaatcccaagttatagatccaaaaacactttaaaattgcacagacacaagcctctcaatgttttgaagaggaaatagagctcagagagaaacaacctttctgaggtcagacaaaatcagggtcactcttcaaagaggcaaatacctgatctcaaacctgcattagtttaattatctctttttattcagctccttttgaatgatcttgatttgttttgaccttggcacagtggtttgatttggttaaatcaaggtttctttgaaccggcggtgcggcgtg

SEQ ID NO: 480477 - DNA, 173 bp, Homo sapiens
cggcgtcggtcattcagcagtggggcctcctggagcatcttattcccatgtgcagcatgtagatatgttaccatgagagaatatttaggtggcatggtttactttctggtagacccattgtagccttatggagaacaggtttcctattagacttcacacctagggtgggcccg

SEQ ID NO: 480478 - DNA, 435 bp, Homo sapiens
  misc_feature (293)..(293): n is a, c, g, or t
  misc_feature (311)..(311): n is a, c, g, or t
  misc_feature (313)..(313): n is a, c, g, or t
  misc_feature (384)..(384): n is a, c, g, or t
  misc_feature (429)..(429): n is a, c, g, or t
  misc_feature (434)..(434): n is a, c, g, or t
ccggactcctggagtgtgggacttcctggtgtgtgggacctctgggtgtagggattgtattagttggctgtgatggtaaacttgatgtgtcaacttggcttggccacagtacacaggtatttgttgaaacaccagactaggtgtctctgtgaaggtgtttttttaagatgagactaacattaaaatcagtagactttgagtaatgcaaattatactccatgatgtggctgggcctcattcaatcacttgaaagtcttaaagaaaaaaaaaaagactgggatccccccatgaanaaaaaattctgcctcganantgcccttggattcgagctacattacctcttccctgggtctccagcctgacattctgctctgcacaatttanacttgccagcccccacagcctctctctctctctctccctcaacanaccang

SEQ ID NO: 480479 - DNA, 501 bp, Homo sapiens
aatcgggaggtgtcttgagattatcatccgtgatgatggatagagcacacactcggaaggtgtcttgaggctcagggagttatcaattatagaatgtggttgagtaggaggaggtggctggtggcccatcctgtttttaaagtttcagctgtgaggtagggccagtagggcaatcctgaagaatgacgatgctccactgccgccattctgacccggttgcaaaagaggcttccttgcagaagggggtgattttgcatcggtagtagtcctcgtgcccgcggcgggaacgcttgcgcacgttgaaacatttccatgtaggtgtgtatttctttcatatccaatttcccattttcctctgcctctgacacctgcctctcctttgctccgtgctcgcgtcctttcatgcttagtttcctcagatgttcttgggcggtcttcctctttccattgatttggtcatgacggttgacttttgttgtcaccttcatcttacggacttta

SEQ ID NO: 480480 - DNA, 561 bp, Homo sapiens
  misc_feature (147)..(147): n is a, c, g, or t
agaaaacatgagatagaagctgctatagtgcggataatgaaatctagaaagaagatgcagcccaatgttttagtagcggaggtaactcagcagttgaaggcgcgatttttaccaagtccagttgttattaagaaacgtattgaaggncttattgaaagagaatatttggcccgaacccctgaggttcgcaaagtatacacatatgtagcataaaaggcgttcagaaatttgatttattcttgggcggcacttttggcaggggcggggaagtttttttaaatcattaaaaattaaggcgcccattttttttattaaattccaggacatgttttagaccattgagatcaagcctttactccctttgagagtttccaacatcagttgattgagcttcaggctttacaacgtttatccctggaaaagatcttctttacagttcctcgggaaaatgtgaatgggcggggttttgtttttttttctgtatgaaaacaaaaataaaagagaaatttagaaaaaccggctcattccaataaaattgttggatttcatttccccgggtca

SEQ ID NO: 480481 - DNA, 300 bp, Homo sapiens
  misc_feature (53)..(53): n is a, c, g, or t
gggttgattctgggtctgcgtttacgcggccaacgaaactgtgatcaattttnatataatcaatatgcaggtcatgaagataagaaagccctgagtagccagtaccgaaatcatccagcgcgatgacaaaaccattttcatgcagaatgttcaaccgctgaaccagactttcatcaacattcaatggctcacgctcggtgacttccagaacaaggtttaaatcgcggcgggtaaaactgtcacgggaatttaaacactcgtcgacaaacgtcggcgaaataatatgcgaagcttaaaatt

SEQ ID NO: 480482 - DNA, 260 bp, Homo sapiens
gactgaaaaatgctgcgatgatccatggcaggagcagcgtgcatcactttcttagtgcttttgagatggggtttcgctctgtctcccatgctggagtgccgtggcttgatctcagctcgatgcagcctcgacctcccaggctgaagtgatcttcccctctcagcctcccgagtcgctcgaactacaggcgtgcaccagtacacgtctactttttgtagaaacaggttctcacaatgttgcctaggctggcatcctgcacg

SEQ ID NO: 480483 - DNA, 1239 bp, Homo sapiens
taattcacataccttacaattcacttattttaagggtacaatttagtggtttttagtgtattcacaaagttgtgtaaccgtgaccacagtcaattttagaacatttcgttaccccaaaaagaaaccctgtacccttgagcagtcacctctcattttctcccaggcccaccccatccccgagcccctggcaaccactaatctatttctctctctgtagatttgcttattctggtcatttcatataaatggaattctacaatattcggtctttgggactggcttcccaaatatgattttctatatggagtgagaaaattcttctcatcttgagaactcttattgctgtgaaagggagtggttggtaaaatcaatagatttcaggcaagagggccagatacctaacaggtttttctccgtgaatcttatgctgagtagtttttcctcataaccaagcatttatgatatattactacttataatactgtggctagtctctagaatggatgttgaaatctttgcctcctcagtcgggaagagtcctgctaaaaatcaggctaaaaatcaggccaaaaatcaggccaaatgacttggcaaataattgacaaagtggttttcacgtgtgtctatctttgctagcagcttgtatacctcaggccaggtgagctccccaaatttcttttttcatttactccagtgagtttctgctgtctttttcaagtatgtaccataggacttaaaggtgatttggatgcgttgtaacactgctaaatatgctaagtacagaattttatctacagtactgtgagacagtcaattattgcctagggtagttcaaaaatatgatgtgagctagttaagcctttgcttgactgatttcagtgatattcagaagtgtgtaccaatcaaggctctttaaaatacggaacgactcacttaataaccagggaaccagccaaatactgtgcagccgcagaatatgcatatcaatgagttggaggtgattattctctgtaactccctaatgattgttttctaagcattgtggcttctcagtggcttgacagcatcttcctggttgtatgtggcctgtttacatgatgtattgaataatgttgtttgttgtgagcatcaatgcctgtaacaccaaactaaacacgtgtttttgggatatgtttccaatctttaaatgaccttgccctgtccaataaataaatgattgtctcaccctgaaaaaaaaaa

SEQ ID NO: 480484 - DNA, 109 bp, Homo sapiens
tgttctccattttggtttcaacaactgcctcggattctttgatttcctgaacctcaatgccagccttcttaactgatcgatgttccattttttcggtcgaggtgaactt

SEQ ID NO: 480485 - DNA, 109 bp, Homo sapiens
ttatattaaggacggtggcgggagacacgctgatactctatccatataaataaagctttgatgtaacacagacccccacgaccaccactcagtaaaaaaaaataattgc

SEQ ID NO: 480486 - DNA, 1364 bp, Homo sapiens
  misc_feature (1229)..(1229): n is a, c, g, or t
  misc_feature (1231)..(1231): n is a, c, g, or t
  misc_feature (1249)..(1250): n is a, c, g, or t
  misc_feature (1252)..(1252): n is a, c, g, or t
  misc_feature (1255)..(1255): n is a, c, g, or t
  misc_feature (1260)..(1260): n is a, c, g, or t
  misc_feature (1272)..(1272): n is a, c, g, or t
  misc_feature (1276)..(1276): n is a, c, g, or t
taattcacataccttacaattcacttattttaagggtacaatttagtggtttttagtgtattcacaaagttgtgtaaccgtgaccacagtcaattttagaacatttcgttaccccaaaaagaaaccctgtacccttgagcagtcacctctcattttctcccaggcccaccccatccccgagcccctggcaaccactaatctatttctctctctgtagatttgcttattctggtcatttcatataaatggaattctacaatattcggtctttgggactggcttcccaaatatgattttctatatggagtgagaaaattcttctcatcttgagaactcttattgctgtgaaagggagtggttggtaaaatcaatagatttcaggcaagagggccagatacctaacaggtttttctccgtgaatcttatgctgagtagtttttcctcataaccaagcatttatgatatattactacttataatactgtggctagtctctagaatggatgttgaaatctttgcctcctcagtcgggaagagtcctgctaaaaatcaggctaaaaatcaggccaaaaatcaggccaaatgacttggcaaataattgacaaagtggttttcacgtgtgtctatctttgctagcagcttgtatacctcaggccaggtgagctccccaaatttcttttttcatttactccagtgagtttctgctgtctttttcaagtatgtaccataggacttaaaggtgatttggatgcgttgtaacactgctaaatatgctaagtacagaattttatctacagtactgtgagacagtcaattattgcctagggtagttcaaaaatatgatgtgagctagttaagcctttgcttgactgatttcagtgatattcagaagtgtgtaccaatcaaggctctttaaaatacggaacgactcacttaataaccagggaaccagccaaatactgtgcagccgcagaatatgcatatcaatgagttggaggtgattattctctgtaactccctaatgattgttttctaagcattgtggcttctcagtggcttgacagcatcttcctggttgtatgtggcctgtttacatgatgtattgaataatgttgtttgttgtgagcatcaatgcctgtaacaccaaactaaacacgtgtttttgggatatgtttccaatctttaaatgactgcctgtcaataataatgattgttcgaaaaaaaaaaananaaaaaaaatttgggggcnngnccnaaaantttaaacatgtngggngggccaagtgtatgtaggtgcaggtccaaaaccgggggatcggtgggtttccaaaaaccggggggggtggaaacaggggggggtggga

SEQ ID NO: 480487 - DNA, 1118 bp, Homo sapiens
cgtacgcggacgcgtgggccacaactgtacacctgaattccatggccaatgagagttcggaaagtgaagaaagtatgaacagggattcatcacagaccctggtggtccgtcagaccccaatggatctgcgtgctgtgtgatgtttattgagtgccgaacggcccgtgacatggtttctgctgtgtatcccagatcacagagcacaggtcctgtgatgtgggagccagcttgtgtgggcatcatctcctccagggacatttgattttcatcaaagaggaggaacatgacttgttatcattgtgaagagataatgacaaagatgggaagacttgtgtgtgtagacccttgcatggcatcaaactgaaggatgtgcaaatgaaattctgcagcgcagcaatgaagggaaagttgccacattgtaaatgaagatgatgagctatgtggacatcatatgcccggacaagaccctgacgaagaatcgggactaaccactagcctccaaagatgccaaagaaaaagctgatgagtggggcagccatatgaccactcactgaggattgacaaggaataggctggacttgatcgccacaaggctggacgtggatgtaagagcgaccggaaactacccaacggaaactcaccaacttccagatcaaacatgaacacgaaacatcacacgacaaaaaccccaaatactcccaaagatcaatctgcgaggccaactgatagcacaaggaagcgccaaagacaaaacaacaacaatacaagcacagcaagcatactagccaatcaaaagaccattgaaaaatgactacacaatagcactcaacaaacaagcgcggagcatgaaggagaacacaaacaaccaccaggacacacctgccacagacaccgcgcacagcggaccccccaatgcagagacgacgcccaacgcgcggcagccaccggaagggagagaggaaccaaaagcagaacggcaaccacgagagacacccacggaaatcaaagagaaggaaacaacacagagacacagccccaggcgacaagacaagaaagacaccccccgacgcgccagaaagagaggaaggaaaagagcaaagcacacgcaccacccccgc

SEQ ID NO: 480488 - DNA, 208 bp, Homo sapiens
gtacaatttatcctgagtccaactgttcttgctgcgaacctaggaaatcaaacatgttatgtgcttccaaaatacagtggttggagaggcataggataaacattcccattccagaaaggagaaacaggaaagaagaaaggagtaacaagtttcaagcaactccaaaattgaatgtgacaaacagtattaaaccttaagcctcaagaat

SEQ ID NO: 480489 - DNA, 1787 bp, Homo sapiens
taattcacataccttacaattcacttattttaagggtacaatttagtggtttttagtgtattcacaaagttgtgtaaccgtgaccacagtcaattttagaacatttcgttaccccaaaaagaaaccctgtacccttgagcagtcacctctcattttctcccaggcccaccccatccccgagcccctggcaaccactaatctatttctctctctgtagatttgcttattctggtcatttcatataaatggaattctacaatattcggtctttgggactggcttcccaaatatgattttctatatggagtgagaaaattcttctcatcttgagaactcttattgctgtgaaagggagtggttggtaaaatcaatagatttcaggcaagagggccagatacctaacaggtttttctccgtgaatcttatgctgagtagtttttcctcataaccaagcatttatgatatattactacttataatactgtggctagtctctagaatggatgttgaaatctttgcctcctcagtcgggaagagtcctgctaaaaatcaggctaaaaatcaggccaaaaatcaggccaaatgacttggcaaataattgacaaagtggttttcacgtgtgtctatctttgctagcagcttgtatacctcaggccaggtgagctccccaaatttcttttttcatttactccagtgagtttctgctgtctttttcaagtatgtaccataggacttaaaggtgatttggatgcgttgtaacactgctaaatatgctaagtacagaattttatctacagtactgtgagacagtcaattattgcctagggtagttcaaaaatatgatgtgagctagttaagcctttgcttgactgatttcagtgatattcagaagtgtgtaccaatcaaggctctttaaaatacggaacgactcacttaataaccagggaaccagccaaatactgtgcagccgcagaatatgcatatcaatgagttggaggtgattattctctgtaactccctaatgattgttttctaagcattgtggcttctcagtggcttgacagcatcttcctggttgtatgtggcctgtttacatgatgtattgaataatgttgtttgttgtgagcatcaatgcctgtaacaccaaactaaacacgtgtttttgggatatgtttccaatctttaaatgaccttgccctgtccaataaataaatgattgtctcaccctgaaaaaaaaaaaaaaaaaaaaaaaaaaaaaaaaaaaaaacaaacagaaaaagaaaaaacaaaaaaggggggggggcgcggcgctaaaaaaaaatactccccccgaggggggcgcgcccaaatgttcccgggaactacacccaggttgtttttcgaagacagaaggcggcgccccccaactgagggggcggctgtaataaatacacacgaggagggagagagcggcggcggtttaaacacacagcggcggacgagggcggagaaaaaaagcgcggcccctcggcgggggcccacctcttggtggagaacagcgaacccccttatctcggcggggggggggggacaaatactgggggggcacaaactctccctcccggaaaagtattttaaaacgcgccctcatgggggggacaatactattaaaaacttctatcgaccagggtgcttattaaacctggtggtgaacaaaaccaagccgggttcaaattgtctgtcggcggcgtatagagaaatcttggtgcactcagcggcaatatctcctcttcgaaaaacaaattttc

SEQ ID NO: 480490 - DNA, 1293 bp, Homo sapiens
  misc_feature (1266)..(1266): n is a, c, g, or t
taattcacataccttacaattcacttattttaagggtacaatttagtggtttttagtgtattcacaaagttgtgtaaccgtgaccacagtcaattttagaacatttcgttaccccaaaaagaaaccctgtacccttgagcagtcacctctcattttctcccaggcccaccccatccccgagcccctggcaaccactaatctatttctctctctgtagatttgcttattctggtcatttcatataaatggaattctacaatattcggtctttgggactggcttcccaaatatgattttctatatggagtgagaaaattcttctcatcttgagaactcttattgctgtgaaagggagtggttggtaaaatcaatagatttcaggcaagagggccagatacctaacaggtttttctccgtgaatcttatgctgagtagtttttcctcataaccaagcatttatgatatattactacttataatactgtggctagtctctagaatggatgttgaaatctttgcctcctcagtcgggaagagtcctgctaaaaatcaggctaaaaatcaggccaaaaatcaggccaaatgacttggcaaataattgacaaagtggttttcacgtgtgtctatctttgctagcagcttgtatacctcaggccaggtgagctccccaaatttcttttttcatttactccagtgagtttctgctgtctttttcaagtatgtaccataggacttaaaggtgatttggatgcgttgtaacactgctaaatatgctaagtacagaattttatctacagtactgtgagacagtcaattattgcctagggtagttcaaaaatatgatgtgagctagttaagcctttgcttgactgatttcagtgatattcagaagtgtgtaccaatcaaggctctttaaaatacggaacgactcacttaataaccagggaaccagccaaatactgtgcagccgcagaatatgcatatcaatgagttggaggtgattattctctgtaactccctaatgattgttttctaagcattgtggcttctcagtggcttgacagcatcttcctggttgtatgtggcctgtttacatgatgtattgaataatgttgtttgttgtgagcatcaatgcctgtaacaccaaactaaacacgtgtttttgggatatgtttccaatctttaaatgaccttgccctgtccaataaataaatgattgtctcaccctgaaaaaaaaaattcacttggccgccgtttacaacgtcntgactgggccctggcgtaccccacttt

SEQ ID NO: 480491 - DNA, 510 bp, Homo sapiens
gatcacgtgcattgtgccagcctagaaatacgtgttaaaaccactgagagaacttggcataaacgtctgttgcctttgccgtctctggccgtggaattagtccagctggtcaacacaggggcactggaacctacctctgggggagcttcttcaaatatggcttgcaggagattccggctcagcagatgtaggtggagcccccaaatttgcatttctaactattgcagggaccccactttgagaatcactggtcaacgtcaaccctctctataagcctcataagagatggcacagacttagtgcccaagacaacagcattcttcctgtctatcacatgggggataagaatgtggacatgtttggggccatattattctgtctcccacatgggattaggacgtggacatctttggggccattatcctgtatacctcatggggactaggacgtggacatctttggggacattatactgactaccacatggggataaggacggtggaaatctat

SEQ ID NO: 480492 - DNA, 100 bp, Homo sapiens
acctagagttactcatcaacctacacaccgccgttaccatgggagtgggctttaccagaagtagttagcctaaccgcaaggagggttagggtttcgatga

SEQ ID NO: 480493 - DNA, 1437 bp, Homo sapiens
taattcacataccttacaattcacttattttaagggtacaatttagtggtttttagtgtattcacaaagttgtgtaaccgtgaccacagtcaattttagaacatttcgttaccccaaaaagaaaccctgtacccttgagcagtcacctctcattttctcccaggcccaccccatccccgagcccctggcaaccactaatctatttctctctctgtagatttgcttattctggtcatttcatataaatggaattctacaatattcggtctttgggactggcttcccaaatatgattttctatatggagtgagaaaattcttctcatcttgagaactcttattgctgtgaaagggagtggttggtaaaatcaatagatttcaggcaagagggccagatacctaacaggtttttctccgtgaatcttatgctgagtagtttttcctcataaccaagcatttatgatatattactacttataatactgtggctagtctctagaatggatgttgaaatctttgcctcctcagtcgggaagagtcctgctaaaaatcaggctaaaaatcaggccaaaaatcaggccaaatgacttggcaaataattgacaaagtggttttcacgtgtgtctatctttgctagcagcttgtatacctcaggccaggtgagctccccaaatttcttttttcatttactccagtgagtttctgctgtctttttcaagtatgtaccataggacttaaaggtgatttggatgcgttgtaacactgctaaatatgctaagtacagaattttatctacagtactgtgagacagtcaattattgcctagggtagttcaaaaatatgatgtgagctagttaagcctttgcttgactgatttcagtgatattcagaagtgtgtaccaatcaaggctctttaaaatacggaacgactcacttaataaccagggaaccagccaaatactgtgcagccgcagaatatgcatatcaatgagttggaggtgattattctctgtaactccctaatgattgttttctaagcattgtggcttctcagtggcttgacagcatcttcctggttgtatgtggcctgtttacatgatgtattgaataatgttgtttgttgtgagcatcaatgcctgtaacaccaaactaaacacgtgtttttgggatatgtttccaatctttaaatgaccttgccctgtccaataaataaatgattgtctcaccctgaaaaaaaaaagttttttgggcttttttttttgggacttttaatctcatttcttctgcttttctgtccccagaaaaatgtaagagctaattttatgactgtatttttctactgtgatgctgttttactgaattcaatggataatttaattgtacatgtaaaatcttactgcagttttatgtttttaatagtcaaaatagaatgtataat

SEQ ID NO: 480494 - DNA, 201 bp, Homo sapiens
  misc_feature (86)..(86): n is a, c, g, or t
  misc_feature (99)..(99): n is a, c, g, or t
  misc_feature (108)..(108): n is a, c, g, or t
  misc_feature (113)..(113): n is a, c, g, or t
  misc_feature (115)..(115): n is a, c, g, or t
  misc_feature (121)..(121): n is a, c, g, or t
  misc_feature (134)..(135): n is a, c, g, or t
  misc_feature (142)..(142): n is a, c, g, or t
tgatgtcaggagagcagggatcccgcagtacatggcgccagcactggagttggtgagcatgtgctctctcttgagattaggagctnccttactgctccnctgggtganccaantntatttnttttttttttttnnggttagnaagtggacactaacatctgtgcaggtgttgacttgaaaaataaagtgttgattggctag

SEQ ID NO: 480495 - DNA, 1598 bp, Homo sapiens
  misc_feature (745)..(745): n is a, c, g, or t
ggaaaagtccattcataaaatcttttatcccacttacatgtgaattttaattacaggtgtgtttcttaacaatttagtgctgggattgtgtcatgaaaattttcaataagacattataaacaaaggctagccatcactcctcaagttatattctcccgtgtgttacactatttttatacaggcacatgtgccatgtgttatgaggacagagtttctcacaaaacaacaaaacaaaaacatatctccaaaaagagcgacaaaactctcctatacaaaagaagagttataaatctacgatgtgggtttatgtgtgtgttctccaggtggcgtgggcgcgtgtgaatatctctcacatgtgaaagtagataaatgtgatatctctcacaaggcacacatctctacattttctctcgctgtgcagcatctctttatactttgttaacacattgtgtgtgtctctataatggggtgtgtgcccataaaaacacattctaaatatatacacaaaaatataaaagtgtgagtgtgttgtgttgcgcacacaaaatatatatatgtacacacggcgccataaacacgagcgacggtgtataaacttatatacacacatatatatgtgtgggcatttttgtgtaacacgcgcgtgtattggcgtgcgcactttatatttcccaagagagattaaacagtgggggggtctacacacacactgtgtggtgttcatatacaagagggaaacaacacntattctgcgtgcagcaagggcgttgttgaatctacacacacgggggtggtgtattccacccctcttgttgtgcggcgtatttttcccccacgacgaagagtaaattatctacagcgatgggggcggtaacaaacaaatcgtgtgggggggggaaaatcacccaagaggggggaggggacaaatataaaatatatttatacataccgacaagaagggacctttatggagaaaaatggtgcttgtctcctcccaaaaaaaacctgctcttataaagaagtggatgatcccccccacaaaagaagaatatgtagtacatatacaacacccgcttgtggtggttgaccccgtgctggtggtacaaaccccaccatagagtgatgatctccctcgctttaatgatataaattaccgaccacgcaggagcatgaggaggatgatacacacacaacacccgcttgagttgttgtatgttgtagagcggcaagcaaggcattcactaacaatgagtgcggataatacaacactccttgcgtggagagaagcgacacgtatatataaacaagacgtgtgtggacacctttgttattaaaagcgcccccaccatagtgtgtgtgttcgccgcaaagagaggtgtcgtactaatgtgtggcacgaaaaactatttatattacagcttgtgggaagtatcaaaaaaaaatcttctcagcaagatgttccctcccaatatagtggtggggccacgcctcgtaacgtgagattagaagcaacgaggaggaaatatccccataacaatagtggtaaagaggggtgaataagaaatacgcccgccgattagttatttattagaagcatt

SEQ ID NO: 480496 - DNA, 1160 bp, Homo sapiens
taattcacataccttacaattcacttattttaagggtacaatttagtggtttttagtgtattcacaaagttgtgtaaccgtgaccacagtcaattttagaacatttcgttaccccaaaaagaaaccctgtacccttgagcagtcacctctcattttctcccaggcccaccccatccccgagcccctggcaaccactaatctatttctctctctgtagatttgcttattctggtcatttcatataaatggaattctacaatattcggtctttgggactggcttcccaaatatgattttctatatggagtgagaaaattcttctcatcttgagaactcttattgctgtgaaagggagtggttggtaaaatcaatagatttcaggcaagagggccagatacctaacaggtttttctccgtgaatcttatgctgagtagtttttcctcataaccaagcatttatgatatattactacttataatactgtggctagtctctagaatggatgttgaaatctttgcctcctcagtcgggaagagtcctgctaaaaatcaggctaaaaatcaggccaaaaatcaggccaaatgacttggcaaataattgacaaagtggttttcacgtgtgtctatctttgctagcagcttgtatacctcaggccaggtgagctccccaaatttcttttttcatttactccagtgagtttctgctgtctttttcaagtatgtaccataggacttaaaggtgatttggatgcgttgtaacactgctaaatatgctaagtacagaattttatctacagtactgtgagacagtcaattattgcctagggtagttcaaaaatatgatgtgagctagttaagcctttgcttgactgatttcagtgatattcagaagtgtgtaccaatcaaggctctttaaaatacggaacgactcacttaataaccagggaaccagccaaatactgtgcagccgcagaatatgcatatcaatgagttggaggtgatgtggcctgtttacatgatgtattgaataatgttgtttgttgtgagcatcaatgcctgtaacaccaaactaaacacgtgtttttgggatatgtttccaatctttaaatgaccttgccctgtccaataaataaatgattgtctcaccctgaaaaaaaaaa

SEQ ID NO: 480497 - DNA, 105 bp, Homo sapiens
tagccagacggggatgtaacgaaatggcttgtgcacaagataaggtgggagagtgttacccgaaaaaaatgaacaagtcataactatagaacaatactaacccaa

SEQ ID NO: 480498 - DNA, 212 bp, Homo sapiens
agggaggctgagggaaaatatggatcgagccgtaggaagtcgagacgagcctgaccaacatggggaaacccaatctctactaagaaatatttaaaaagtcagccggatgtggtggtacgtgcttgtaatcccagttacttgggcggctgaggtaggagaattccttggatgcagggtatcgcgagcatggcaggtgagtctgcagatcggtg

SEQ ID NO: 480499 - DNA, 174 bp, Homo sapiens
cgccagcctcagccaggtggggaggtatatagggtccatgtgcaatagggagggacgtcttctattttttgctgcccctccccgcccactgtctggggcaggggtgagaaggtacttttcgacgataaagcacaggcaccacccaataaatagtcgtgaagattgccactcaga

SEQ ID NO: 480500 - DNA, 538 bp, Homo sapiens
cccgaggattctgtcgctcggaccatcaccagatggttttatcatcagctgatccccacattcggcattaaaaatagaattcaaaacccggacgtttaatccatcctgctttcaccgttgacacgacctgtggtatactatgtgtcttgctctgcaatctgtgtagcaaagcacagtttcatgcccatcgtccgagcggagcgatcacttcaggacctgattccagccccatctctgaagccaggtcccctctgcagcagaacttccaggacaacaattccagggtcacagtggtatgtggtaggcctggccgggaatgcaattactcgagagaagacaaagaccggcaaaagatgtatgccaccatctatgagctgaaagaagacaagagctacaatgtcacctccgtcctgtttaggaaaaagaagtgtgactactggatcaggacttttgttccaggttgccaagcccggcgaagttcacgctgggcaacaattaagagtaaccctggattaacgagttacctcgtccgagcgga

SEQ ID NO: 480501 - DNA, 144 bp, Homo sapiens
attcattaagggaaaacgaggcgggggggatcgcttgggcccaggaattcaagaccagcctgggcaataaagcgaaagtccatctttactaaagaaaggcatactcagctgagtccacaggtgcgcgccaccacactcggctaa

SEQ ID NO: 480502 - DNA, 302 bp, Homo sapiens
cttctggatggcgcctccttgaaggcatgcaccgcttccgccatgcgccccatcccgtcttgcggccgaccgcgggcacatccaccgtattgtcgccccggcagggctcatggccggtcatggcgctcaccggcacggcgatcaggcggctcatcatccaggccatcacacaagcggcggccatggcgatcaaggtggccacgatcagggtgatctgcccgcgcatggtggcttcttgctcggccgtagtgcgtgaccaccgcattctcagccttcatgatcgcatcctggactcgcggacc

SEQ ID NO: 480503 - DNA, 466 bp, Homo sapiens
cgatccatatcgcagccttgccgccgatgttaccaaagcggacattaaatgcaggataaactccagaacctttatagacggctttgcagttcgtccatcctacaggtgagccgttgtagttgtaaccagccagtagtaagtcatacacccccgctgttccgtagtcgtacattcgcacatgaatcatcatcattgcgttcgtgtacaggactggtaattgaatctgtactgcgcccgtggaggctccggtagtaacctttgccgcaccaccatcagggcgagggatacgagtcaggtcattagtcattagcgcattaaacttagacacaccggagacttgagaattgccacctacttgaagcgcatcaacgtcgttatcagatgtatttacagtaacattgcctgtcgtctgcacgcgcaatgttgatttaccgtcgacgcggccgcgaatttagtagtagtaggc

SEQ ID NO: 480504 - DNA, 483 bp, Homo sapiens
ctctacctactataatatgtggcgaaactaccagttattaaccgacgtcagagattatcagagtcccaggcaaaattcatggtagaatatgacatacccctgataaaccctctatgaagtactggagaatgtaaaggttgtcgtatgcatgctggacctaccatcaagtaaaagacgttggtcctgttaaaaagaatattaaaaggctataattatatattccaataatgatgtggagataatggaatcgaataatgatgcagagcacattgaggcttataggagcgtgatataattacaatactggttttatgagcatcttttctctgcaacagttaaactgcctcagagtttgtgaattgctgcaattcctggaatggaaacaggaattagggtcactggttgattggaacaggatctttccatcgggtctggtcctgacctctctctcttgccttaccttcccccacacaccctcttggt

SEQ ID NO: 480505 - DNA, 143 bp, Homo sapiens
  misc_feature (35)..(35): n is a, c, g, or t
gcagcagagcgagtgtagagtcaggatcagagcgngagaggctgcggagttggtgcctgagctggcgcttttacttggtgacgtgcacagctctctctggggggctgcagctcatcttgttgggagcttgggtacggagctcg

SEQ ID NO: 480506 - DNA, 395 bp, Homo sapiens
ttacatatacgactcgagctcgtacctgtgggtagcagcaacctagggatcatttgcaggtggtaaagccatttaccaagatagttgtaggtaagaagggcagatttattagagaaattgtgaaaatatgttgcagtgggcggctcagcagagaaggggctacctgcaaagaggcaagggctggaggaaagttttatagggtcctgctgaagggtgctacgtgtggaatgaggtcattgtgcccgcaggttgtttgtgattagctgtctctaacaattgttcatacaataattgttcattattgttctcaacttggggctctccccaacctggggacccttccttattgttgcttacttatcaggtctccacataaaggtgtggaaacttcattc

SEQ ID NO: 480507 - DNA, 1079 bp, Homo sapiens
  misc_feature (493)..(493): n is a, c, g, or t
caccccaaagggggggctctttgtcctttgtctttggaagatttgtgggggggaatttttttccttggtggtgttttctttgttgagggtccctagtcccctcctctccggggcctttgctgcctaacccacgcccgggttctcctttcctccgtgggtgtgatgtatctcctcctgcgaccctcaccaacgttgggcgccaccccttccggtccgggcaccggtaatttgtccgcggaatgctcctcaccgttgtatgggtcccacccgcggagggatctattccggaagggccacacacccccaggaccaaggaagagttgtgtacacagcccccacacatactgcatgaaagatgttgtgtcgccaacaccaagtattctaggtggcgcacaccacagggctttttatgcgcgctctcggcgcccacaccgaggattctcactctcgtctgcccagaagactcgttctcacccaatgggaccgtaggtangtatccgggccgcttttgaggcgctccaagatggcccggcctttgctctcctcttgggcacaccctatctcacgccttgtcgcgcccaccccctcccgattgacgcgcttggagccagacgccatgggttggcccatgtacacgcttagtcacatctcggcccatccagacgagaggcccactgttgcattgcccccccgggccagggacacaagatggccacctgacaccaggcccacctgtgaacccaatggggtccatcacaggaggaccatcgagaatccctgggagccaagccaggcgagactggtctcatccgcctctccccggagggcccagcctggtaggtcgccagccggtctcatctgtcttagccatgaggtctttccggggtccatggcccggcgccagggcaccagggccagaggactcttgagccgccccctccccatgcctgcctggcctggtagagaagatggcaccggatggaggcccccccagacggaccagtgtacataagagatttcttgttgctcttaccaatctaaacctgagcaccctgtccctacaaaaataaataaataaa

SEQ ID NO: 480508 - DNA, 533 bp, Homo sapiens
tttttaaaaagctatgtggttagcacacagaacacttcatggtggttttggggggaaggggcatatgtcactaatagaaggtctccaaagcgggatggatgtggagaaaacacctttcccttctaagttttggagaagaacttccgtctgggctccccagggagggagggatatcccgtggacttgtgacacaacagtggccacctgggcgacaaaagcctggtgggtatagaaaacacaaattggttttaatgtcctcttctccctttccatctttctacagcatagaactataaactccctataagcccagaacattcgtggtgggagaaccgtggaccccttagttcagtggggttaccaggtggtgctcgaggcaactcgtgggacttttccagtgtgagtgcgcacgtgagaaagtggcaccgtggtcaaagagagccaggtggtctcccatttctagaatgggtggatcttcagaataaattcggccattttcatttcacttcctgaaagtcagggtcggctggtga

SEQ ID NO: 480509 - DNA, 499 bp, Homo sapiens
ttcggaacgaggtaggaccttgggctgaagagggatgagtgctggtgcagagcagggtggtgtgtgggggggctctgtgactgcccccagtgcacggggagctgctcaggaactggattcttgactgtctgccccctgagagtggctggggtcggtggtgctgctggggcgggtccaaaccctgccacccatgttgtattggacctgccatggagagggggttccaatgccctgcccacccacaccggtgtggacctgccaaagaggacaggctcgctcaggggttggctcccttccggggacgctggcacagaggcacggtcgccacagtcccttggatccccgaagggctggaaactctttgtccttcgcagtggggtttggatcaatacaatcaccccaggttgcagtttgtgagtcctcgtacagcaaatttcaagaaagggagcagatggtgtgggagtacttgatctgtaggtgttggtgctctgaaattcgt

SEQ ID NO: 480510 - DNA, 154 bp, Homo sapiens
ctaacgggaaaaaaatggggatggagttccaaggccagggcccccaaccttgggccccaaaaccccccttccccttttccctgggcagccaaggaacctggattttccaaaaccccaaaaaggtccctgctaataaaaatttttgaccctttaa

SEQ ID NO: 480511 - DNA, 156 bp, Homo sapiens
ggtggggggcccccccttttttgcccccttggggggggggggggggggggtttccccatgcccccccccccccccccggggggtttgggccccccaaagccccccccctgggggggggggtgaaggggggtttttttttttgttttttttttttta

SEQ ID NO: 480512 - DNA, 81 bp, Homo sapiens
cacaggtggtctggactggcaagggctccaaggcccatcactcttgatcctcaaaggactgtggccaaggcctctgcgcgc

SEQ ID NO: 480513 - DNA, 131 bp, Homo sapiens
tttttttttcagtcctcacactgcttgacctatgtataaccctcctatacttccctcttatgaaatactcctctaggaacttctgtggtagtcaagattccctccctgagatttatttcccatgagtctcg

SEQ ID NO: 480514 - DNA, 235 bp, Homo sapiens
  misc_feature (37)..(37): n is a, c, g, or t
  misc_feature (39)..(39): n is a, c, g, or t
  misc_feature (51)..(51): n is a, c, g, or t
  misc_feature (78)..(78): n is a, c, g, or t
  misc_feature (144)..(144): n is a, c, g, or t
  misc_feature (189)..(189): n is a, c, g, or t
  misc_feature (194)..(194): n is a, c, g, or t
acgcgtttgtagctccggccccgccgttccgaccccngncgccgtcgccgncatgacggggctagcactgctctactncggggtcttcgtggccttctgggcctgcgcgctggccgtgggttcctgacggagacttcgcccttnatgtggtccaacctgggcattggcctagctatctccctgtctgtngtttngggcagcctggggcatctatattaccggctccttccatcat

SEQ ID NO: 480515 - DNA, 855 bp, Homo sapiens
ccgtgggcctcggggaagcgggcaatgttttgtgccccctctctgcttggccgggtggtctcgcctcccgccggggagtgttgcgagcaccatagttattggcgaacgccctccagtattgagccctttcgttggtggtacccacgcggatgggagcagcgttggggcccctggaccccccgcccctggtgtggtgttatccccggccgccgcccgctttggagttaaggcaaccacacggcgggtccttcaggtggtgcatctcctggcggtcgtctgccctccccccttctgtccccgcggcgaggtttgcccacagggggccgcagcgtgcccacgtgagcagccctgcggtgccctgctgattgccccccagcggccccccatctcgggagccgcccgtgcgccccaaagccaacggggcccccttggctcttgtatgttctcagaagagcgggccccgcccctagccattcccctggctactccggggcccaaagggtgggtacgtccttcaagaagggcccccgccgctcccttggtgatgatcctggctgcccgccccgtggttcgatcgccgcacccagccccctggggggacaccctggtcgtgtcctgatgttattgggcaaccaacactgtgcacttccccgttgcacctgtggagaccccgggcgctaccgcgtcctcctcgccaccgcccgctctcgtctcccgctcccccgcccgcggggagccccgcttgtcttgtcaggaccactcctcgggacacctgcgcagacaccccccttttgggtcccctcggcaggaccacgggcccctcaaataatcttttgtttgaaagcccacataaca

SEQ ID NO: 480516 - DNA, 851 bp, Homo sapiens
tctttttatttcacacaaccacaatatatataacaaaatataaaattattctagcacattttacatatgggataagctattcggaaagatctcggaaaatggtaactagaagatcaaagtataccaacagaggaatgtacatctacctaataactgtctaaaatttaaatatgtataataaaataaatgttttaaatattaaaaaaaaaacaataaataaacaaaacaataaaaaaacaaccaaaaaaaataacaataacacatatccaataccctccccctcttgccctcaagggcgaatcttttgattcaattatccttttaattagggttaacactataccttcactatattaactcaatacgttatttctataatatgaattaaacttataactcaaaccaaaatatttttactatccattatccacacactcatagataaacccatcaaatacatatacgctaaacatccatattaggccatctccctttaataggtctactcgcataaactcaacaataacaactgcctcccctcatatcattccaaaaatatttcattacaacaataagttacaaaaacacaacttgttatacattttctcacttattaccatatcaattacaccttatactctttctgataacctcatattttaaatgtgatattattaatacgtatatttaatacttcctttcgacacacaatattatttctcattataaacaaacactatatattcaatcacctactccccggacatcttctcaccattgtactcgctctacattaaatttccccttaacaccctatccaatttttttatttttatattattataccatac

SEQ ID NO: 480517 - DNA, 311 bp, Homo sapiens
actgaacaagaaaagtcagaatccaaagggtccatcctctccagaatgccagaattcaaagaaagctccaactcaacacattcaaacacatacagagaaggaatgaggtcacatcctggaatcccagagactattctgatgtgtggtcatcattctacaaccccttctaacacgaacacagtgatacaagcattccagatacagtagcgatcactaagaatataggggacacagggtaagcagagtacagaacacgcatcataaccatagttatcattcagaccgcagagatgcatgggacaaaggaacca

SEQ ID NO: 480518 - DNA, 326 bp, Homo sapiens
tgtttcccaggctggaatgcaatagcacgatctcagctcactgcaatctgcacctcccaggttcaagtgattctcctgcctcagcctcccaagtagctgggatcacaggtgcccaccaccatgcctggctaattttttttgtatttttagtagagacggtgtttcaccatgttggccaggctggtctcttaactcctgacctcaggtgatccacccacctcagtctcctaaagtgctgggattgcaggcgtgagcactgcacccggcctgaattttaatctttaacttcataaggaaaggatggattgcattagtactcaatacag

SEQ ID NO: 480519 - DNA, 185 bp, Homo sapiens
cgcacaggaccttgggtcgggtaacacgagagctgcatcaaagagaacaaaggacagaggaatgtctgcgtatatgaacgccttattcgtgcgacgacttatataccattgatggataatgctgactcaagtcctgtggtagataagagagaggttattgattagcttaaacctgaccaagtaga

SEQ ID NO: 480520 - DNA, 389 bp, Homo sapiens
  misc_feature (1)..(1): n is a, c, g, or t
  misc_feature (5)..(5): n is a, c, g, or t
ntcgngggtatcataaactccaaccccgttcaagatctacattattttatttatttatttatttatttatttatttattttgagacagtttctcccttgttgcccaggctggagtgcaatggggcaatatcagctcaccgcaacctctgcttcccaggttcgagcgattctcctgcctcagcctcccgggtggctgggattacagacatgtggcaccactcccagctaactttgtatttttagtggagatggggtttctccatgttggtcaggctggttttgaactcccgacctcaggtgatccgcccgcctcggcctcccaaagcgttgggattacaggcgtgaaccaccgtgcccagccaagatctacactattatgataccgcgaa

SEQ ID NO: 480521 - DNA, 285 bp, Homo sapiens
atcgtgccgttactctccaacctggacaacaagagttaaactccgtcttagaagtggaccaggacaggaccacatcgtggtgtggtagggtctgattcacattgaggcagaggtgaggctccttccttctcctcctgatgggttggtggagctacaagccaggtaaggaaggaaagggtcccagatccagacttgctctttctgaaatccagggcttcccccagggactgggtcagccacctggtgaatgagagtgggggtcctgagctcaaacatggtgtagtg

SEQ ID NO: 480522 - DNA, 321 bp, Homo sapiens
accgctgcagaagtgaggggctgggtcatcaaccccctgtgatataagggtcccttctcctgtgcttgatatggttgccagacatgacatgcctcggcattcctggtcttcacttctcagtcgttcatgcgagacatatcatcaccacgcatcatcattctccaagcaaggagcgcatgctgcagaacgacatccggcttccaccatggatcatgctgatcagtcagttgccattcgagacggcattctgtgccctcgttctagtcctggacctctggttggatcgctgacacattccacgttcgctagggcggttaccag

SEQ ID NO: 480523 - DNA, 478 bp, Homo sapiens
  misc_feature (6)..(6): n is a, c, g, or t
ttttcnttgtcacatataaatttcacctgtcattgtcacagaatattattttgattttttttattcattaaaaaaagtaaaaaccactctcacagcccttacattaaaaagggggtgggggagatttgggtgggggtgggggtttgcagaccccagttctagaggggtaaactaatggtttaatgaccacagctggtggtcacacattaagggagacagacatggggggggggtggtgggtgatgggtgtgatttgggggctttgggggggtggggggggtgggtgagttggggtggggggttgggggggggggtggggaagatggtgtaaccggtgggtattgggaatagaaaattttgggtgggggtggtggggtgtgggtgggatgtggggtattggggggggtgggggggggggggtggttgggggtggggggtgggggttggggtgggggggggtggggggattggggtgggg

SEQ ID NO: 480524 - DNA, 340 bp, Homo sapiens
tcggccgcctactactactaaattcgcggtcgcgtcgacaccacattgactataagaagaaatttttggctgggcatgatggctcatacctgtaacctcagcacttttggaggccaaagcagacaaatcacttgagcccaggagttcaagaccaacctggagaacatggcaaaaccccatcttttcaaaaatacaaaaattagctggggtgatattgcgtgcctgtaatcccagttactcagggggctaaggtgggaagatttcttgagcccaggagttggaggcttcagttaccatgacactgcactccagcctgggcgacacagcgagattctatttc

SEQ ID NO: 480525 - DNA, 998 bp, Homo sapiens
gctctgtcactctgctgcaccgagctcgagtcttgcctgtttccgacttgttcgcgaggctatagagctactgtgagcactggggtgtcagttgtttggtccgacccagaactgcttcagttctgctctgccaccacggagtatataatagactgatctcgtgtgtgcgcccgtcttacatgatacatagtaatatgcgtaacatctgatgctagacaggaaggaagaccttacctcaacgagctgcagagacccaatgagtgaattcggtgacacgccctgcaggaaggatatggacagaggaagcgagagccagtttagaagaatctaggaagaacactgagtgaggaatggctgtgacctgcagcagggcatgtgctgattttcacggaggcaaaggagagttgcgtggaggggtaagggagaaagttggaggaagacagtggatatggaaattgagagtgtgttaagagggggaggcctcgggggagaggcagatatagtgtaagaaaaccggacccgaggagaagtattagtacgaagttccgcgagaaaacacagggagaggactggcgccgcgcgcggcaaagaggacaaataattccaaggacggttggagtcgatgatgaacgatgaactacgtaaagacaaaagtccagagtaggatgaggaaaaaacctacataggaaactgcaagagcagtacattccaccccttcaagatggtctgagacaccagcgaatgatcagggctaggtccatcaataccttaaccatggcaacaggatttgacagcctatggggaccccgttgaacacacaactatcggaaggagacagtgacccccgtaatcgagctaatccgcagcgaaggtgcattaaacgccgtaaggaaagagcacacgtgtaagattatgcacggacgatcaaagtggaggttcccacgattggacagaaacgacatagtgaatgagcacagactgagcgggaacgcaaaacg

SEQ ID NO: 480526 - DNA, 875 bp, Homo sapiens
gtaaagcattcttcctttccacgttggcacgctgctgagtggctctcgtcatagaaggttgcctagaagatccttgggccgttgactgcctagtctataggatagtgatacactgagaatagacccatcggaaattcacaacgtgcttccatggatgtggactttcagttgatgcgtggcacttacgggcatctcatcagacgcagttcgtacaatctgcccatcgatgagtcgatgtgacgccccagattgttgcgcattgaccaccaggctcaacaaaagctgtctgggccaaaggaactaacaggcattgtgcccataccgaatccgtgtggcggttgtccagtacacactgtactgacggcactgacagatttcaccaaattaacgctataatactttggttccctatgtacctgttaccacttttcaaaaggccacgatgccggcagataccaagaccctgggagggacagtccagccggcgcctgccggaagaaggctttaacctcgcttgacctatgaacggccgtggtggtctcaaatatagggcattcttgattgggaaaacttgtgttgtctaccggtcacccgattgacttaagtctgacgggggggtctaaacaaccagacccacggcttcaagattgtacacacgaacgcattggcgcacattccaacagtccaataattgccgacttatatagcgtaggccaaagggaagcccgcactggttacccatgaaacttgagtgcatggggtctgacattgaagaccttcggtcgagtacttaggaagtaacatcatctttgcactcacgacactgttggccgacaactccttttttaactaagtgggtgatcaacacctacagg

SEQ ID NO: 480527 - DNA, 1431 bp, Homo sapiens
ttgtgttgtcgtcgttgtttgggtcggtgtcgtcgcgtacttggcgcgcgggggtgtgtcttgttgttgttctgttcgctctcctcactacgtatctggggtggcgtggtgtggtggccggggcggcggggcgtagctatcaggatggtgttgtctggtgtcggcggcgcactggctgtgtgccttggggtgggggggtggagagtgtgggtgggctcgcgatctgcgcgtggggcgaggttggctgtgttctgtttgtttctttctttcttttcttcgtgtggcgctcgtggggaggatcttggcttggtatgcgtgttgatgcgtctcattctcatttgttgttgttgtgttcgccctcgtagtgtgtgtttttcggtcggatctggttgcgtcgagttctactatgccccacctctgttcgtgtgtttgtgttgctagccacggtgcgttggttcgtgctggtgggaatagtgtgtctgtggtcaggtctgtgttcatggggcggtgtcgtcatttgtgttggtgtgggtgtgggtgtgggcgtcgctgtgcattggttgtctattcgcggtctgctgtcgtgttgtgcggtcctgtagggtcggtggtggggggggatcgtgctggtgcgtggtagtggtggggttcctccgtcgtgtgtggtggttcatggtgttcttcccgcgtcggggtgtgtttgtctgttgagtgcgagtagcgcgcagtgctgtgtggtgtctggtcgggcggaggtttctgtgtgttgtctcccgtgcgtcagtgttttgggggcggtccactttgcgtgtccctcgtggatcggtgaggtggttgtcgtcgtttggggggcgcttgtggcctgtttgcgtcttttgcgttgcacattcgtttgtgggcggtgctgtcctgcgttgcggcacctcgctctccgcggctgtggagtggtatctcggagtctttcttcttgttgtgtccatggcgagcgcctggcattcgcgggtcctgtctgctggtgagggttttgttgggtccctcattcggttcgctgtgggttggcgtcgtaaggtgggcgctcccccgtctcgttttggccggttcgggctgtggtgagtgctaccaacaaggcgcttggtgtggcgtggtccacccccgtcagtgcgtggggttggttgtggtggtgtggcacagcgcttgccctgctcttggtacctccgctcccgtgctgttggttggtaggctgcccgcgtatgggccttgcgtagctagggtcgttgtgatgtatgtagcgcagctctgttggtggtgtgccgtccctcccctgtgctgccctactaatgtggttgcggggcgacctctcgtcggtcaacccccccccctcccccccccgtttctgtgttaatttttttttttttttctccctctacatta

SEQ ID NO: 480528 - DNA, 105 bp, Homo sapiens
ccaccggcaggtgtactgatgtgactaatggggaataacattatgtgtatgagcgcgaaccctatacaagtgcgactgcacagcgggggtttgctcctaggctcc

SEQ ID NO: 480529 - DNA, 971 bp, Homo sapiens
ccggcccggagcggtcatgtcccacgggcccaagcagcccggcgcgggcggcgtgccgggggggcgggaaggctccgggccagcatgggggcttcgtggtgactgtcaagcaagagcgcggcgagggtccacgcgcgggcgagaaggggtcccatcgaggaggagccggatgaagaaacgcggcatggcccatgggcaagaagcggaagaagattctgccgaattgggccctagaggctaccgggtcacgggctacgtgcagccttccgtgaacgagcggcgcgagcagagtccgcacgcgccagccggatctgtcctttcccgagatcaccaaggatgctgggcgcccgagtggagcaagcgtgcaggcaacggaaggagcagcggtacctggatgagggcgaggagagagaagcagtcaagtacatgagaggagctgggagcgtaccagcagtctgaaagcctagtaagatgtgcacggagaaagatccaggcagaagaagatcaagaaagaagagtcgagctctggtgctcatgaacacgtctcctgaatggacacccagggtgtggactgcgatgggttctccacttcgatgttccatcttcactgaagagttcttggacccaaaaaagccgcgtgtgaggggagactctgcggcgctgggaaagaatgagtgtgcgctttcgagggaggcagaacgggggtactgcagaggcacacgcagagcatgagcgaggcgcgcgagcgttgagcaggagctggggctggaagagcggaggaagctgagctgaggaggccaggcgtgccggggtcaccccggttgcccatgcgggccgacggggaaccccgcgggcttggtatatggcggtcgggcctgggccgcaaaggaaatggggtagacggccggcggcatgggggcccattggcttggcccccgcagggccgcggagcatgtctattttcagagggg

SEQ ID NO: 480530 - DNA, 921 bp, Homo sapiens
  misc_feature (2)..(2): n is a, c, g, or t
  misc_feature (205)..(205): n is a, c, g, or t
  misc_feature (279)..(279): n is a, c, g, or t
  misc_feature (281)..(281): n is a, c, g, or t
  misc_feature (314)..(314): n is a, c, g, or t
  misc_feature (324)..(324): n is a, c, g, or t
  misc_feature (331)..(331): n is a, c, g, or t
  misc_feature (363)..(364): n is a, c, g, or t
  misc_feature (366)..(366): n is a, c, g, or t
  misc_feature (404)..(404): n is a, c, g, or t
  misc_feature (421)..(421): n is a, c, g, or t
  misc_feature (446)..(446): n is a, c, g, or t
  misc_feature (475)..(475): n is a, c, g, or t
  misc_feature (503)..(503): n is a, c, g, or t
  misc_feature (524)..(524): n is a, c, g, or t
  misc_feature (546)..(546): n is a, c, g, or t
  misc_feature (550)..(550): n is a, c, g, or t
  misc_feature (571)..(571): n is a, c, g, or t
  misc_feature (573)..(574): n is a, c, g, or t
  misc_feature (588)..(588): n is a, c, g, or t
  misc_feature (683)..(683): n is a, c, g, or t
  misc_feature (918)..(918): n is a, c, g, or t
cntttgtcattatttactattgtttattgatttaacaatatttccacagaccaaagtattttattacatatatagctgagcatgtaattcataattgtataatatagaaaataaacttcttggtattggcctcagcatttaataatgaaaaactagtgacaaacatctttagaaaaaaataataaaatagtccttcagtattaanatttcctagtaaaaagcattagatcaaagttaagaatatgacatgttaatgcatagatgacttaggcataaatnanatgaatcaaatcccagctcttatagtaaatcanaataggtganatctgcnggttcacagtttgtcataggtcaattgccaanncnatgcatcattcatatttttcatcattctgaggtttttnatgatacaacatttaanataatgcatacccaggatataagcnatgtgctgcatacttaccaggtgattttnatgccactttgctgaatgccggattaanatatttgggctttttattgcntgggtagaaagtgctcattacntatntcatgtttatcatatagaccntnnacccccccattttnttcatggcctccctcacccggttgtgggggttggcttcctcaagatcgtcttcgggggttttggggcagtgggaggaggccggtggcggggcggncaggggggggcggtgacggtggcgggccccactccccactgtcgcgtgggaaaggagggagatggggtgtaggagggaggggagggccttggtgaggtatctttcccggtgggtggacaggttcactgtgtaagtggacctccctgtttttttatgttataccgggtatcacagtcaggacaatagccatggtactgtactttttcattaaaccgtaactcgttctcgaggcccngcc

SEQ ID NO: 480531 - DNA, 469 bp, Homo sapiens
  misc_feature (1)..(1): n is a, c, g, or t
naattccccgcggctggtcttgaacttcccacctcaatgcaattctgctgcctcagcttcccaagtagctgagattataggagtgtgccacctgtgcttggtttattgtatattttcaaatagctagaagagtaaattttgaatgttttcaacacacacacaagataatattaataaatgtttgaggtgatggatattctcattaccctgatttaatgattatacattatatacatgcattgaaacatctatactgtaccccacaaatatttatgattatgtgtcaattaaatagtgaaagctaaataaatatagacaggagaacctatacattttcatggggtaggggggtttcatgctttggtaggtttgtcggttttcgagacagagtctcactctgttctccaggcaggagtgcaggggccccatctggggtcactgcaacctccgcttcccaggctcaagcgaa

SEQ ID NO: 480532 - DNA, 1174 bp, Homo sapiens
  misc_feature (251)..(251): n is a, c, g, or t
  misc_feature (1174)..(1174): n is a, c, g, or t
gggaaagtccaggggtacaggaggcctctgggtgaaggcagaggctaacatggggttcggagcgagccttgggccgttggacctgagccatctgtgtgtgctgtcgtgtcgtcacgtatcatcatctgcgtatcacctgctcctgactgctgcctttacaagacgtgccgccgacacacgtccggtttgtcagcaccaccacgagtccagccgacatgtggtgcatgccccgttagtcctcagcctccaangtgtgcctgcccagcataccctggaccaagctaccaggggctaccagagccatgccgcctcagccagggatgccagcagcgacccatacccaagtgcagatacccaccaccttacccagcccagcccatgggcccaccggcctaccacgagaccctggctggaggagcagccgcgccctaccccgccagccagccgtccttacaacccggcctacatggatgccccgaaggcggccctctgagcattacctggcctctctggctgccacttggttatgtagtgtgtgtgcgtgagtggtgtgcaggcgcggttccttacgccccattgtgtgctgtgtgtgtccaggcacggttccttacgccccatgtgtgctgtgtgtgtcctggctgtcttatgtggttcctctgatgctggcaaggttggggaacaatccttgggcgagtggggctgggacccagaacttggtctcttcctcacctgagatgatggcttccctaaaattctcaaggccgaactccaagaatggggtcgtgaggggcacctgtgagtggtcccttacagtggagccctctccagggcactttggagtcttctccagctaaccataggggggccccaagttagggcctgtcaacacaggggtgggccaccatatcgggcgtaaagccagaaaggatgtccgggcactggagacaaagcacagccaggtatgaagccgtggtcaccccaaaatgggaccccgattcagaccgaaacagcagagagagacgcgagacactcacaatggaataataagcaaacccaccactgacagttgaagagacaaaagcacaccaacgaaaccacacagtaagagatgacgacaacgagaaggagacaacaacgcacgacacaacccatccactcgagaatccttatccgn

SEQ ID NO: 480533 - DNA, 969 bp, Homo sapiens
  misc_feature (55)..(55): n is a, c, g, or t
tcagggcttgtgccggccgggcaggtagtactttggtctccacttgagagattcntgggatcagtcatcatgagacgacatcttcaaagaataaatcaacaagaaacgggtaggggtacctaatgaccttctaagtggtgattgtaaagggtaaaatgctaaattgtccgcaaggataggatctgaactaacgtgacattccttcaccttccctcctttaacaagcttgttagaattatgattttcaccctaacctggcattaaaaatggactccattattttcttttccattcttatgttaacatatttctgcattatacagtttgctgtgctgtggcttctatgttatatggctaacatggacctggagatagatttctgcagcacacaggagcactgcgcacaggatctggccttgcagagaatagcataccagtaattatttgccttctggagtgaccgtgcagggaggctgattttgactctgagtctttattgaaataaaataattggctgggtgtggtggcttatacctgtaatcccagcactttggaaggctgaggcaggaggatcactgagcccaagagttccagaccaccctaggcaatatagcaagaccctctctctacaaaaaatttaaaaaattagcaggcatgcacctgtagtcctagctacttgggaggttgaggcaggaggattgcttgagaccaggagttccaggttacagtgagctgtgatcatgctgctgcactctgtcctgggtgatcgagtgagaccctgtctctaaaaaaactaacaacacacccgctgaaaacaaaaacttttttggggccccgcgggcccccgaaaagttttaaaaccatcgcgttggggcgcgggcccacgggtagacaagtgggccacgcggcccaaggaaaacgggccacgcaaagggggggcttcccaaaaaagcccgggcccgcctgaca

SEQ ID NO: 480534 - DNA, 960 bp, Homo sapiens
  misc_feature (960)..(960): n is a, c, g, or t
tatatgtacgaccacgccggtcgactacattaccggggctagaaaatgaaaattctatgcccaacgacatgacattcttagctgctaagcttaactattaaggccttttccacacgcattactagtcccattggtctcttgccatttgtaactttgcccgattgtcttactggcacatggtgtggacacaggatcgtgcatgggacgtctgcgcttaaacgacacattgcagcttcaactttatctctttagtgttctgttggcagaactaatacttaccgagtcagactttgtgttcatttcatttcagggtcttggctgcctgtgggcttccccaggtggcctggaggtgggcaacagggaacgtaaccagacacacgactgttgtccaggatggttttgcggactagaggctcagtaggtgcggagagatccctgcagaacccacacaagccagaacgtggtttgcctgaggtccgtaactgtagagaacagattctggggctgtcttatgacgaatatagacatactcacataagcccagttcagtcaaccatttcctcctttacctttcagtgcagtttcgtataaacacataaggctgtaggttcaaacttccgggagcacggactgtcagttcctctgggaagcgtggccagcgcatcctgccagggtttactcctcctactgtcttttggagaaccaggggctcttctcaggggctctaggcgactgccaggctgtatcagccaggaaaaggccacaaactcccaagaaggtgaacactggtacgaacaaggtggtcacaaactaccaacacacagtgggcgctctgggcgaactcaggtcggttccatatcccctcaaccatctggactagattggtacattacgggattcaagcatcgttctcaccttccctacagccctccccctctcacctcttttacatcacggcan

SEQ ID NO: 480535 - DNA, 109 bp, Homo sapiens
ctgctctagaggacccagcactgtgcagctcctttctctgcttcatttagcttagaaaatcattccttttttttttttccctgggagaattgttggaatcagctgaaac

SEQ ID NO: 480536 - DNA, 219 bp, Homo sapiens
ttatcccctcatagtcgcaggaagatctaggtggggaaggaccgaagatgggtaacagcatcatctaaggcaatcagtcactgtcaaaacttgcgagactacaacacattatcaatatttaagaaaagacaaggagttcagagtgctagaacacagtgctatgatgggaaggctagggccacattataccgagtttcgacatgctcatctatttcatca

SEQ ID NO: 480537 - DNA, 838 bp, Homo sapiens
  misc_feature (725)..(725): n is a, c, g, or t
ggtgtccagcccctgttaggtgtgtagtaggggaagcttaggagccctgtgaggccttcattttcctattagaaggatttcccttgccctcttgctgtgagttcctagagatcgtgctttctctgtctcaggacctgggatccagttggaggacggcggtgatggcagggaggatgccccgattgagaactgtgagtggctagcccgagatgcctctcgttgcacgatgccaggggtcctgggcactccgtgtcctcaggtcttagagagtcccagacctcagtcatgggcgtctaggtcaggcctggatcattctgagaggcggtgcccctcaccaggaagacgggcttcccatggggctgacaagccagatacaccatgaccccgaatgtggcaaaggcttcagcaagacgtcccacttgaccaagcaccagcgcacacacacgggcgagcggccttacaagtgcctagtctgtgggaagggctttagcgaccgctccaacttcagcacgcaccagagggtgcacacaggcgagaagccctacccgtgccccgagtgtgggaagcgcttcagccagagctccagctggtcatccaccgaggacacacagcggggagcggcctatgcctgcacccagtgcgggaagcgcttcaacaacagctcgcacttcagcgcccaccgcggacgcacacaggtgagaagccctacacctgccggctgtggncggggcttccgccggggaccgacctgcacaagcaccagggaccacatggggcagggtcctgcgaaagtccagccggtgggtccgtgagggcccgggaaaagcctgatcaccag

SEQ ID NO: 480538 - DNA, 381 bp, Homo sapiens
  misc_feature (353)..(353): n is a, c, g, or t
ggtcctctggtctcaaccagttcagttcaggagagagatcatttcgctatgactggctgattttcagcctaggagctgcttcaaatgcacagtctagttgaagtttaaaccccagcattcctccctataaatataaaatcctgtctaccctcaccccatcctttgacttatttttcttttaagattagcatctctgcccccatttcctcctgccttccttctctgagcgggctgggaccttggactgcattgggtccctattctatgtgacagaggaaggaagaatcagccggctcagtgggtccacaactcatgaagcttacacaccaccttccataaaggagtgtgccaantgacctctgcaagagcacaggaaagagg

SEQ ID NO: 480539 - DNA, 287 bp, Homo sapiens
taaaatttaatatttaacaagggataataattaacaagggataatttaacatttaacaagggatactaagtgtggccgggtgcagtagctcatgcctgtaatcctagcactttgggaggctcaagtgaggtggatcacttgagctcaggagttcaggaccagcctgggcaatatggcggaacccagtctctactaaaaatataaacattggctggacgcggtggcttgttgccctgtggtcccggctgctcgggaggctgaggcaggagattttgcttgaatctggg

SEQ ID NO: 480540 - DNA, 135 bp, Homo sapiens
gtcggcgctcgccctcgctctcctcgccctccgacccggcccggccccggcccgccatggagaagactgagcatgatccagaagggcaagctggccgagcaggccgagcgctacgacgacatggccacctgcatg

SEQ ID NO: 480541 - DNA, 139 bp, Homo sapiens
acgtcgcgctcagcagctggattcgcttcatgctggcgccacgtgcggatctcgaagaatatgacgcgctggcactggtgctccagcaccagttccgcgatctgcgcgttgccccccagcggcccgctcagatagcgat

SEQ ID NO: 480542 - DNA, 296 bp, Homo sapiens
gtaaaggagttaggatgttggcaggaggaaggatgtgtccccggatgaggaaaagaaagaataggggaatttggatgcagagacccagagaaaatgccatgtgaagatggatcagagacaaaagtgatgggggtgcaagccaaggaatgtgaagaatggccagccccccccggaaggtaggggagacgccagcccagattttccctgagagtatccagaagaaaccaaccctcccacccctggatttcagacttttgcccttgagaagtgtgagccaataaaacaactgcagtgga

SEQ ID NO: 480543 - DNA, 487 bp, Homo sapiens
gtgatcataaatgatatcatcaaggaatagtacggtatttgtgtattaccatgaaacgtaactagccaaagccctaggcactacctgactaaaagtataccagagtttgcgatgttacttttggtggttttgattacaccttcaaattatgtcaaaactgtggttgtttcttactggaaaggtaaattttagatttggcctagcatacacacagcacctgttatacgtgctggtaacactagaggacataaccatagtctttgcactggacagagcttacaatgagatgtagaacgttacaacatgtaaaagtagttaaaacttacagaaatactaaaaattactaaataaaatactactgaatcacttggtatatggccaaacatgtgctaatcattttcatgacttaactcgttgaatttccccaacaatctgtgcagcaggttactatcatatccctcttttatagagaaggaaccaaaaagca

SEQ ID NO: 480544 - DNA, 103 bp, Homo sapiens
  misc_feature (88)..(88): n is a, c, g, or t
tttggtattttgggtagagacggggtttcaccaatgtggaccaggctggctctcaaactcctgaccccacgctgcgaagatcacccangaacacagctctgca

SEQ ID NO: 480545 - DNA, 180 bp, Homo sapiens
  misc_feature (56)..(56): n is a, c, g, or t
  misc_feature (65)..(65): n is a, c, g, or t
  misc_feature (69)..(69): n is a, c, g, or t
  misc_feature (98)..(98): n is a, c, g, or t
  misc_feature (110)..(110): n is a, c, g, or t
gaattgcttttgtcgaggttttgggaattgtatttgcctgctgactccgtgaagantatcagaantggntaccgaggtgatgtaggggtcctggtgtncctccagcctcntccatctgggggagtggaatagtatgcctcccaggtttttccaattaaacggattattttttaagaaaga

SEQ ID NO: 480546 - DNA, 840 bp, Homo sapiens
gatcttgttgattgatcctttcaagatgctgtcgaatgcagtcggctaaatatttggctgaggaatggtttgcatctatgatacatcagggaatatggcccatagtttacctctgtcaggttctgagtatcacgaggttagtgctaggccttgtgacgctgagttgaaagcatgcccgtcctcttcaaagtttgagaagagtagagaagtactggtacttagtggtcctgtagagatgtccaagtaccaattcagcaattgaagccatcaggccttgagcttggcttatgatagggagattttggattcctgattcaatctccttagttgtcatggggtctgtccagattttctgtctgcttcataattcagtctggtaggtctccatgtttctaggaatgtatgcattgcttccgaacgtgttccattcctcttgcaatattctttccccaatgacttttcacctaattattgtagcatctattgatgatccttacctaagttggttatttcactgggactggaaattgaggatcctaattttcacatctttttgtacacttattaggcagcattgctctatttgtttaaaaaaaaggcttggctcatccatctgggttgaccacacgtttctcctacagaggcagaaaatgcttattatttccctttaatgacagtttcagaagagacacttgtgctaataaggccccaagaatttaatggggtcgcccgacggggaaaatctcctctcccaccaaatggtttcacctatataacacagccttgtgcgccgttttttgggcccctataggccttctttgttagcgcactaacatcgtg

SEQ ID NO: 480547 - DNA, 978 bp, Homo sapiens
ctcctatgttctgcactggatgcattcagcttgaggatgtgcctgatagtgcaggcttgcgcctcaacagagatgaccagcagagtcctcgagcacctggcctgttgctccaacattgcaaagacacattatcagtccctatttctagagggattactttgaattgagccatctataaaactgcaaggtcttgcttttttttttaatcaaaactgttctgtttaattcatgaattgtatagttaagcattacctttctacattccagaagagcctttatttctctctctctctctctctctctctctcactctctctctctctctctctctctctctagtgagtctgtaacaaagcctctttaaatcggtgtatccttgttgaagcagtcctttctcatattgagatgtactgtgattatactgaggttttcatcacaagaagggagtgtttctgtgccattaaccatgtagtttgttaccatcactaaactgcttggaacagtacacatgctacaaaataaaggctcctcatacaggtaaagtctcgacggcatgcgagaacggatatctctcatagtgtgccgtgttggctcacaaccgaatcacactgacagctggctaacaggatacaagttcttatgagttacctctcacaaatatatggatactgctgaccggggtccttatgaaacatgtccttttctctaaaacctaccttctatgatatctcaacgttctgctgacagtaatcacataacatggctgtgctatgacatgaaacagaaagcagtattataatcatgcactatcactatattcagttcacacacggatttaaccagtgccacgcaacgaaaccattttaaccaacactttcgctcatcgtaaagtgtaacaactccaaagtgattacaaaaaaatataatatgaacttaccaccaaagccaatcatcggttaaacacaaaccaaccgcaca

SEQ ID NO: 480548 - DNA, 975 bp, Homo sapiens
acctggtccctggtctggtgccatgtctggctgtgatgctcgggagggagactgttgttcccggagatgcggcgcgcaggacaaggagcatccaagatacctgatcccagaacttatgcaaacagttttaccatttaggctgggtcactgggactggaggcggcattagcttgacgcatggcgatgaaatctacattgctccttcaggagtgcacgagcggaacgaattcagcctgacgacatgttgtatgtgatatcacatgaaaaggacatacagtggaccttacgccatcgaagaagctaacaccaagcccgtgtactcctcttttacatagaatgcttacacaatgagaggcgccggtgcacggattcataacccaatctaaaagctgctgtgatggacagaattactctttccaggagggagtttaaacattacacattcacagaggatgatcaaccggacataacagaaatgtacttccggagggtattatcgatatgcatgatatcgtagtggtagcgcattcatatgcgcaataccgcctgacggcgaacgacctcacaggatagaatggtaatgcatgaatgcataccagatactgtgtaagatacgtggacgacggtaatgagagtctatggtgtggggaggccaagagtggaggaaggcgaaaccgcagttgtgagcgtgatgccaatcattgatattgggtgactctcatgaacgaaagttaggcatgatcttacacgtaccagatggcaacatggacttgtttagacaaaagaggttaaaataatgaggaataacgtgccgtaagtatcaacgacggtatcacaggctggagtctgggatctagtgcggaaatgaagggcggatactgagaaggggacggataatagtgagagaaggaatcaaatgtatagactaaagagggagttcgaagaaacaggaacaaaagaaaggagagaagaagt

SEQ ID NO: 480549 - DNA, 756 bp, Homo sapiens
ccagtggcgagcagtgcccagtgagtgaatgaccatgtgctgattcatgaacttcccactgctgtccctgtggtcccctgtgctgagacctgtgtgagtgacatgccccagtgtgtcacccatgactgtgtgacaactgtgcacctggaacactggctgtggttgtattgatgtattgttgatgcactggcatgtgctgtccatgtgttgccgatgttgctatggatgaatgatctgttggatgcccctgctggctatgcttctgtgcctcacctgccaaaggatccgtctgatggcctattgcttgcctaagtgacatgcgtcttcgttggagaacttgcaggctggctacattgtgcccatgagcagtgccatactgtgaaccattgccccacattatgagttcctggcaacatcttgttgacaccaagcttggagacgcatttggccagaggatttgcctgctaccatgggaggttatgcgaggccaacgtgaagaagcagtgtcatgcgccagccttcaaacaaagccgccctgagagagagccgcaacgtcggcgttgtgattgtggcctgttacagttacatgccaccaaccaaaatgccacccttgaagaacccaagatgatcagacaaccacaaataaatgagataaacaagcaatagagtgctccatccttgggaaagatggcttgccatgcttgcagagaggggagatcgccaaaggagcagtgggtctccaatgaaggaggaaac

SEQ ID NO: 480550 - DNA, 490 bp, Homo sapiens
cttatagaactctagaatgtcattcatatgctccttatcaagtgaatactgtggtgttcaaaaaggctcattctcaggcaaatgcattctggatcttccgatggttcataagagcatgtgggtgccagagctgcttgcgatgatactgattatgttcttccctataggggcagatgtgttccttacaatgtcacagaagacataatactatagtcggggcatagaatatatacgcctgctatccttcaatatcccaccaccattagtcagcaggcgcaacagcgatctgccgagcagaaagcgcgcttgtgacgagcctttaggttactgtaagctcaagctgggcaagtaagataacataccgggaacgggagcctgaataccttccagattgcaccgttaatatgcccaagtttaactcttttccatataagttattacatttgagaaatctgctacatccatctagcaaatggatactgtgtcctca

SEQ ID NO: 480551 - DNA, 160 bp, Homo sapiens
tctccttttttctcttgctgcccacattgtgccttaatttaatgacccccagttttctggggcttagttaaaaaaaaaaatcaagtctaacactattgctattaaaaaagcttatggtcctgggataaaaagtcatacactttacaaaacaaaaaaaaag

SEQ ID NO: 480552 - DNA, 291 bp, Homo sapiens
  misc_feature (286)..(286): n is a, c, g, or t
gaggtgactctagcggatcccttcgtaatatgtaacgataatgccatggcacttggcaactcaaaagattagatagaagaaagctagagtgcacgcttggtgcaataaccctaagtgtttaggctggaggaagtccagaaaatagcttcaatatctcatatcatatgaaatgagacagattattaagaactactagaagcactatgaatcaacagtattggctgggaaaccagatggctagtcacagtaattttctcccagtaatcaaatgttagtttcatttacnaaaag

SEQ ID NO: 480553 - DNA, 296 bp, Homo sapiens
  misc_feature (23)..(23): n is a, c, g, or t
  misc_feature (162)..(162): n is a, c, g, or t
  misc_feature (181)..(181): n is a, c, g, or t
aaaaaaacagttatgtccctttnatcatactattagcataaaagactgatgccaggtgttgtggctcatatctgtaatcctaccactttggaggccgaggcaagcagatcacctgaggccatgagttcaagaccagcctggccaacatggtgaagccccgtntctactgaagatgcaaaanttggctgggcatggtggcatgtgcctgtaatcccagctacctggaaggcagaggctgcagtgagctgagatcccaccattgcactcaagcctgggtgacagagcaagacagtctc

SEQ ID NO: 480554 - DNA, 856 bp, Homo sapiens
gggtgatgacattttacacgctttggcaaatctgaaaaagtcagcattttctcctaaacttttaaatatattttcatgggatatggaattctaggtagactttttcttgcagtacttgaacgatattgttttgctctcttctggctagtattgtttctggaaagaaagctgcatcatttttggtctttgtcctctgcaataattgtgtcatttctcccgggctacatagcaagatttcatctttgtcactggttttaaacaattttattatcatgtgtttgtagtttgctttatgctttcttttgcttggggttcattgtgattctgggggcctatggtatacactcactattacgtcacactcttgacacacaacttcaacatactgctctcttctgttcttccacagttctttcttcttcagccgattcatacttacactgtactatgaacgtcgctcctaagcttaaacataattccctgcccatttcacttctgctcacttaacgtctctgtgcttaattcaggataactttctaatgctgtgtcttcaagttcactcatctttatattcctgcagtatcaaattctgccgtgaatcccatccattggtcttctgtaactcaacatcatacgttatcatctctacacagttctccaaacatctcttacatggtctttccattaattcatgtcatgactcttatcctgtagcctctctgacataacctgcgaatcacaattacggttaataaacctatttcaagtgctgaccatccattcacgcctaacatgcctcgctcactgctgcgaccagcttcgactggactgacctcaatgcccccacaccgacccc

SEQ ID NO: 480555 - DNA, 116 bp, Homo sapiens
ccggcttgcaactgttttggggggttgaaaagtggtttaaccctgagactaacttaaacacttccttgccctttttgtggcctgggtactcaagcaataaaatgattgtttaacta

SEQ ID NO: 480556 - DNA, 134 bp, Homo sapiens
cacgagggagaattcacattttacctgcattggccttcattgtccgggcatggccgctccattggtgggataaacccctaggtttcctaatgcacatgaaggaaagtttttgggagggcatatccccatacagc

SEQ ID NO: 480557 - DNA, 528 bp, Homo sapiens
cccgggctgtaggaatttggaccaagagctcacaagctagtgatggagggatataaatgtggccatgaccccaatgtgttaacgaggttcagtgctatcaaactataggtattgatgtgggaaccacaatggaatcatgggacttgacgatactctaaaatactttttgttgcagtttgagccacaaccttgcaaaggcaagccacatgttactggtggtacctcagactacttactgtggtgagaattttaaacttgtacagtgttgacatggaccatatatcggcctaatggaaatgggaagagcaacaattgctccaaagtgtgcaaaaatagttaacattcaacttggtttcacatggaccctttagaatgaaccacttcattgcatgctgaaacgacattgttggtcaagaaaccagtttatggcataacgctatttgaagagaccattgcgttatctgagagacagcagatattcagatgtgcacattaacacctcgagtacactatcttcatatagctatt

SEQ ID NO: 480558 - DNA, 1235 bp, Homo sapiens
taaaattttttttatataaccacaaattttcaccaaaaaaacccccaccaaaaaaatttcccctctctcccacacaccaaacacccacacaccaaaaaaaaattctctctctccaatctccccgcggagaaaaaaaaaaaaaaacaaaaaaaaaaaaaaaaaaaaaacatacaaaaaaacaacaacaagaagagagagagaaaagacggagacaggaagcaagcacggagcgacggccacgaggggcgagaggagggaacgggcagggagtcacgcgcgcgagggggttcgaggcagcggggggaattaaagaagggcaggagggggagagggggggggggagagaggagaggggaccggagcgggagggcagagcggagtgggcgagggagggaggaagggacagaagaggcgagaggagggtgggagcagagagaggcgagagaggagagggagacgcggcgagaagaagcacgaggaaagggagggcggcgggaggagacaagcgggggagggagcgggaggaacgaacgagcgtaagaagcgcgtggcaggcgaacaagccaggccgagagagggacgaagagggggggcggcgacagccctggcgcacccaacgcgcccgtcatccgtttcaataaagaaagaaaaagctaggccatacagaacaacgaagaacagaacagcaggcagacgataaaacccagcggcttatctcctcccgcgcctcataccgacagaaacgacatacatgcgcacagaagagagacaaaagatgagggaagcgggcacaaagcgcaaccgaccatgcgaaggcgggagcaggagggcgcagacacagggagaagaacagcacaacgacccccgacacaaaggagagcacgagcagcaaggcagagagaaggaagaacgcggacacacgacgagaggcggcgcgaaggcaccagaccgggcaggcgcgcacggcggcgagggaacgacgacgagaaggcagaagagagccggagggcccagaacgacagagcactaaacgcgagggcggacgggggggacgggaggggcggagacgagaacgacgacagcgacggaagacgcgggaaggcagagaagaggcgaccggcagggcacgcgaggaggcgaggcgaagacgagggagagagagagagagacaagaagcacgcgagacggaggacacagagcaggacagaccagaggcgagagcgggccgaggcggg

SEQ ID NO: 480559 - DNA, 389 bp, Homo sapiens
agagtaaacaccccgtctcataaagaaaaaaaaaacaggtatgatttcttacccaaacaaaacacttagattgtattatgccctatctcttaagatataatggtgggaatagggatatccacaagaagaaattcagaaatctctaagtaagatgaaatacgatgaattcacagctacatatttgtcaatgggggagaaaatcttcagaggtaagagtaatcagaaagagctgaaataccctgtatgtaatttttagttaataataaccggtttcctaagtctataatctattggaatatttgtaacatttgatacatcatttttaagattcacttgcaaattagcaaatctaaatcctatgaatattataagctattttaacttaaccc

SEQ ID NO: 480560 - DNA, 148 bp, Homo sapiens
tccgaccttgacaaacttgaatccatggactgcacatcataaaacgtctgcatcttgcagatacgctagtaagcggctatctacttgcttatccaaagtcctaccttgactagctcactcagatcctcaatgaatcgcgcacattcag

SEQ ID NO: 480561 - DNA, 922 bp, Homo sapiens
tcgggggattctgggccgagatggcagcatgtgaggaaggcgcttccgcggagactggtgggcttgggtccctccgggatgtcagacctcatctatggtgacttgaccatagtgcgggtgaacattgtggtcatgttgtggtccccgaggatgtgatcgtgacccacatatgaaagacgaatagtcgatatgtactccaggtgaaaatcaagctgatagacatgctttctgaaggcaggactctctgttatagaaaccaacagacttgtgtctcctaagtgggttccccagagtgggtgaccacactgaagtcttgaagggcattcagaagtttcctggcatcaactacccagtccgtgaccccaaatttggatagggcttcgaggctagcggttgctgatggagccaaggaagtagtcgattctatgggagctgctcagagatgattgatctaagaagaacatcaatgttccataggaggagagtgtgtcagaggttggacgcaatcctgaaaggagcgcagtcagggcaatatttctgtgcgggggtacagtctgctggtgatcttgggtggcgttatgaagggaagatttcccccaggaacgtagctgaggtcacgagaagtgcgaagcaggggctgtacagaaatcctggggacacaatggcgggggcaccccagggtgcggaagaactgtgcttggtgcgaagacgaatggcccggtggccggggcactgcatgggcgcaggcaacctggacaaactggggggcgaaagcggagctgtcgacaccgggacaaggaggaccaccccgggtgaaaggggacaaccggaaagacagggcacagaccgcacaggggacaaccaccacaaaatctgtaaatcagcgagggaacacgaacatggacgtgagccacgcaaccgg

SEQ ID NO: 480562 - DNA, 1398 bp, Homo sapiens
ggcagacccagcgccgagcccgagccatggcgtcgagcggctccctaacaggcccgcctgtctgctcgtggccagcggcgccgccgaaggtgtgtcggcccagtccttcctccactgtttcacgatggccagcaccgccttcaacctgcaggtggccacccctggggggaaagccatggaatttgtggatgtgactgagagcaatgcacgctgggtgcaagacttccgcctcaaggcttacgccagccccgccaagctcgagtccatcgatggtgcccggtaccatgccctcctgatccccagctgtcctggggccctgaccgacctggccagcagtggctccctggcccgtatcctgcagcacttccactctgagagcaaacccatctgcgccgtcggccacggtgtcgctgccctgtgctgtgccaccaacgaggacagatcctgggtgttcgacagctacagcctgacagggccctctgtgtgtgagctcgtcagggcccccggcttcgcccgcctgccgctcgtggtggaggacttcgtgaaggattcgggcgcctgcttcagtgcaacccagacaggctgacctatgctgaccctgggagccccgcctggagttcgaggctctcagtgggtgaggtggacattgcctgaggtttggtgccctcggtcctccccagcaagcgagcctgacgctgtccacgtcgtgctggaccgccacctggtcacaggccagaatgccagctccaccgtcccggccgtgcagaacctgctcttcctctgtggcagccggaaatgaacctgctgggtagatgcaccccctgagacagcccaggtgtctccagaggcagccccgtctcaggcttcagggaccccgcctcttccctcctgacaagggccctggatggcagcctggtctggccctgatgggattgttggaggcctcctggaatcagctctgagggggtgtcggctctcctggagggtccaaacccccatcctcctgcatgttctctggtaggaggcagagaaaagaccccacgtgcctggagagctgtgctagctgctaggtggtcctcgggaattccaggctgggttttctagggaggactggttgtcacgtgtgtcactgttgactagacagacctgtctccgcgtgagctgcctgcaggcccctgcgtcattcctcagctgcgtgcgaggcctctggcttggagagcctccccgctgtgcacagttctctctttgccagggcagggcttggggcagcaccaggctggggcagaggaggaaagcaagaggacagacctccagaagagcagcggagggcgggtgaggatttccccatataccagtgtgtgttcatctacccatgaggaataaaaccatgcagcagca

SEQ ID NO: 480563 - DNA, 916 bp, Homo sapiens
cggttcctgttactcttttcctcttgtctatcttcttcttctgtgtttttgcttctttttattcttgtttttatcctgactatttcactattgtttctttaatagtgttgcgttcacctttttgattatgtctctgtttcattttgcatattctggattcttcagtcccaattgcacatttatatacgttgcttatattgattgttcgatgttctttttctctcacgattgattatatattctttttatttggctgggtcatctatgtcgtcttagtttacgcttttttatctacctttcttgtatttgttattcaagcatactgcattttatatcctctcatgttgttaattactatttacatttttattaatttgcgtttctctttttctatcttatttgtttatcttttttatttatatttagcctcaatttattttaaattaatgtcttattcctattttctttatgtatatcatatcatttccttatatttcgtgattggctctttccttcaaagtaaatttattagtctattattgtgatttttctatcataatttttttgctttccaaacagttgattgactatggctctcctacagctaatcatatgtagaagttatatataaggtcttatctagacttcgtataaatttattcgctattatagtaatatatcccctccttctaaatattataaagctctgattgtacaagaagttacctgtgctagtctagttgttgtttttccttgaacaactttggataaaatggatttgacagtacataatcagttctactaaccaccaagcttgtatttggaaatttactttttgtacaaattgaattatataatgcttgaaaatactgtggtcaacttataagcagatgcatagtaatcacttgttatactg

SEQ ID NO: 480564 - DNA, 270 bp, Homo sapiens
caagcaggcccccacctgcccttagtgatgtttggagtcgttttaccctcttctattgaattgccttgggatttccttctccctttccctgcccaccctgtcccctacaatttgtgcttttgagttgaggagccttcacccctgttgctgggggaattgttgaattcttcctttcacctcccgcccaatccccgcggaaaaggttttgaggccccccccttgttcttgaccaatcaggtttctaattaaccaactggcccatcaaaaaaa

SEQ ID NO: 480565 - DNA, 1247 bp, Homo sapiens
ggcagacccagcgccgagcccgagccatggcgtcgagcggctccctaacaggcccgcctgtctgctcgtggccagcggcgccgccgaaggtgtgtcggcccagtccttcctccactgtttcacgatggccagcaccgccttcaacctgcaggtggccacccctggggggaaagccatggaatttgtggatgtgactgagagcaatgcacgctgggtgcaagacttccgcctcaaggcttacgccagccccgccaagctcgagtccatcgatggtgcccggtaccatgccctcctgatccccagctgtcctggggccctgaccgacctggccagcagtggctccctggcccgtatcctgcagcacttccactctgagagcaaacccatctgcgccgtcggccacggtgtcgctgccctgtgctgtgccaccaacgaggacagatcctgggtgttcgacagctacagcctgacagggccctctgtgtgtgagctcgtcagggcccccggcttcgcccgcctgccgctcgtggtggaggacttcgtgaaggattcgggcgcctgcttcagtgcaagcgagcctgacgctgtccacgtcgtgctggaccgccacctggtcacaggccagaatgccagctccaccgtcccggccgtgcagaacctgctcttcctctgtggcagccggagcagcagcctcctgccccaaggccgaccggcactggcagcactttcctgttgaagaaatcttcctggcgtgtggtttcaaagtggcagggcttggggcagcaccaggctggggcagaggaggaaagcaagaggacagacctccagaagagcagcggagggcgggtgaggatttccccatataccagtgtgtgttcatctacccatgaggaataaaaccatgcagcagcatgcaaatggtgtcctggtgttcgcagcagaactgctcatggtaatggataagttgttttcatacagtgggttgtcaatatgtttaataattgttggtatctattaataagggcaatatattcatatggtggattatttggctattaaaatggaatgaagttattttaaaaaaaatggtgatggctggtgagtggatttacagtgagtaggtcggagctttgatgctatggtctacactcgttcgaaaaggggcacctgcggtgggaaaccgcgtggaaccgcggggattaaggggaagggaagagcgaattgtcaagaattggacaaaaaggggt

SEQ ID NO: 480566 - DNA, 102 bp, Homo sapiens
catcttggagagagaaaacaatggagttactatatttagaaaaataagaacagaaacgttatctcttcccaggagaggctagaagtagcttctctgtctttt

SEQ ID NO: 480567 - DNA, 690 bp, Homo sapiens
gctggcccccattactttgtacaggcagaatgccagctccaccgtcccggccgtgcagaacctgctcttcctctgtggcagccggaaatgaacctgctgggtagatgcaccccctgagacagcccaggtgtctccagaggcagccccgtctcaggcttcagggaccccgcctcttccctcctgacaagggccctggatggcagcctggtctggccctgatgggattgttggaggcctcctggaatcagctctgagggggtgtcggctctcctggagggtccaaacccccatcctcctgcatgttctctggtaggaggcagagaaaagaccccacgtgcctggagagctgtgctagctgctaggtggtcctcgggaattccaggctgggttttctagggaggactggttgtcacgtgtgtcactgttgactagacagacctgtctccgcgtgagctgcctgcaggcccctgcgtcattcctcagctgcgtgcgaggcctctggcttggagagcctccccgctgtgcacagttctctctttgccagggcagggcttggggcagcaccaggctggggcagaggaggaaagcaagaggacagacctccagaagagcagcggagggcgggtgaggatttccccatataccagtgtgtgttcatctacccatgaggaataaaaccatgcagcagca

SEQ ID NO: 480568 - DNA, 305 bp, Homo sapiens
ccagggccttatttgggcctgggggccctaaaacactcctcctcctgagcctactgccaaacgtcctcagtgttgtttgcccctggtcggaatcctttagccgccccttaaggggcccctccgttccagtgccccccctttggggccaagggggccgtccctttttactttgtgttttttcccccctttggggaatttggccctgtttgccagtcccagcccccccgttttttcctttttagttgcatgggtttttttttgttcatggaatgttttttcctttttaaatgttggggaaatcccca

SEQ ID NO: 480569 - DNA, 1327 bp, Homo sapiens
ggcagacccagcgccgagcccgagccatggcgtcgagcggctccctaacaggcccgcctgtctgctcgtggccagcggcgccgccgaaggtgtgtcggcccagtccttcctccactgtttcacgatggccagcaccgccttcaacctgcaggtggccacccctggggggaaagccatggaatttgtggatgtgactgagagcaatgcacgctgggtgcaagacttccgcctcaaggcttacgccagccccgccaagctcgagtccatcgatggtgcccggtaccatgccctcctgatccccagctgtcctggggccctgaccgacctggccagcagtggctccctggcccgtatcctgcagcacttccactctgagagcaaacccatctgcgccgtcggccacggtgtcgctgccctgtgctgtgccaccaacgaggacagatcctgggtgttcgacagctacagcctgacaggggcctgggcctgtctcaggagcccccaccccgctcccgcagccctctgtgtgtgagctcgtcagggcccccggcttcgcccgcctgccgctcgtggtggaggacttcgtgaaggattcgggcgcctgcttcagtgcaagcgagcctgacgctgtccacgtcgtgctggaccgccacctggtcacaggccagaatgccagctccaccgtcccggccgtgcagaacctgctcttcctctgtggcagccggaaatgaacctgctgggtagatgcaccccctgagacagcccaggtgtctccagaggcagccccgtctcaggcttcagggaccccgcctcttccctcctgacaagggccctggatggcagcctggtctggccctgatgggattgttggaggcctcctggaatcagctctgagggggtgtcggctctcctggagggtccaaacccccatcctcctgcatgttctctggtaggaggcagagaaaagaccccacgtgcctggagagctgtgctagctgctaggtggtcctcgggaattccaggctgggttttctagggaggactggttgtcacgtgtgtcactgttgactagacagacctgtctccgcgtgagctgcctgcaggcccctgcgtcattcctcagctgcgtgcgaggcctctggcttggagagcctccccgctgtgcacagttctctctttgccagggcagggcttggggcagcaccaggctggggcagaggaggaaagcaagaggacagacctccagaagagcagcggagggcgggtgaggatttccccatataccagtgtgtgttcatctacccatgaggaataaaaccatgcagcagca

SEQ ID NO: 480570 - DNA, 564 bp, Homo sapiens
gcttgtatataggttttatctctggttgaatccctcgaacaatagacagtacctttccccccctttcatggcccattttatgtctgcctttcagtactaagtatgaccgttcctatctcagatcttaataaagaagaaaaaaaaaaaggcattcaggttaaattgggccttaattaatatactggttagcaagcgtgtgtgacagagagtggggaaagctacgatcatggaatatttggataaacttgaccgacattgagttgggttgattgttcccttttcctaaattaatagacactgacggtaatttatgtccctgtttgcacgtctctccccttcacattctggccaggagtttaagctatctgagatcggggaccatcagttgtgcactttagagagtgtctctggatctaaacctgtttatcagaaaagtggtttatctggatcttagtgggaaaaatctggcaatttacacagaattacttggttagacccaaagaatatagccccgttgtgcaactgtcgattcaggaaatttagacaagacaagaaatactggag

SEQ ID NO: 480571 - DNA, 694 bp, Homo sapiens
ggcagacccagcgccgagcccgagccatggcgtcgagcggctccctaacaggcccgcctgtctgctcgtggccagcggcgccgccgaaggtgtgtcggcccagtccttcctccactgtttcacgatggccagcaccgccttcaacctgcaggtggccacccctggggggaaagccatggaatttgtggatgtgactgagagcaatgcacgctgggtgcaagacttccgcctcaaggcttacgccagccccgccaagctcgagtccatcgatggtgcccggtaccatgccctcctgatccccagctgtcctggggccctgaccgacctggccagcagtggctccctggcccgtatcctgcagcacttccactctgagagcaaacccatctgcgccgtcggccacggtgtcgctgccctgtgctgtgccaccaacgaggacagatcctgggtgttcgacagctacagcctgacagggccctctgtgtgtgagctcgtcagggcccccggcttcgcccgcctgccgctcgtggtggaggacttcgtgaaggattcgggcgcctgcttcagtgcagctggggcagaggaggaaagcaagaggacagacctccagaagagcagcggagggcgggtgaggatttccccatataccagtgtgtgttcatctacccatgaggaataaaaccatgcagcagca

SEQ ID NO: 480572 - DNA, 346 bp, Homo sapiens
ccggtaaatgtagatactgtgacatttcctgagtacctactaggtgcctggcactgtccttaagtgctgaaggcacacgggaagggtgcagactctgtgaaggactgtttcacggcctagtgtggggatgtggaatgaaagcaggcagtgacaacgcagtgtggcctatgtcgtggaccgggggaacctgaggaggcagctaccgcagcaccagggatttctgatcgtgagtgatgtgaatgtactggacagtggtgatgagaacacaatagctgaagtgcatggcatatgatttacatctcattaaggaagtgataaaatagaaagagcctagtctcctggtgag

SEQ ID NO: 480573 - DNA, 1029 bp, Homo sapiens
ggcagacccagcgccgagcccgagccatggcgtcgagcggctccctaacaggcccgcctgtctgctcgtggccagcggcgccgccgaaggtgtgtcggcccagtccttcctccactgtttcacgatggccagcaccgccttcaacctgcaggtggccacccctggggggaaagccatggaatttgtggatgtgactgagagcaatgcacgctgggtgcaagacttccgcctcaaggcttacgccagccccgccaagctcgagtccatcgatggtgcccggtaccatgccctcctgatccccagctgtcctggggccctgaccgacctggccagcagtggctccctggcccgtatcctgcagcacttccactctgagagcaaacccatctgcgccgtcggccacggtgtcgctgccctgtgctgtgccaccaacgaggacagatcctgggtgttcgacagctacagcctgacagggccctctgtgtgtgagctcgtcagggcccccggcttcgcccgcctgccgctcgtggtggaggacttcgtgaaggattcgggcgcctgcttcagtgcagctggggcagaggaggaaagcaagaggacagacctccagaagagcagcggagggcgggtgaggatttccccatataccagtgtgtgttcatctacccatgaggaataaaaccatgcagcagcatgcaaatggtgtcctggtgttcgcagcagaactgctcatggtaatggataagttgttttcatacagtgggttgtcaatatgtttaataattgttggtatctattaataagggcaatatattcatatggtggattatttggctattaaaatggaatgaagttattttaaaaaaaatggtgatggctggtgagtggatttacagtgagtaggtcggagctttgatgctatggtctacactcgttcgaaaaggggcacctgcggtgggaaaccgcgtggaaccgcggggattaaggggaagggaagagcgaattgtcaagaattggacaaaaaggggt

SEQ ID NO: 480574 - DNA, 171 bp, Homo sapiens
cccggagtgcgtgacctggcctagtgctgggtaccgaggctctttgaaatggctttctttttcttataagctgctggatcattgacttttggccatctgggttccatgaacacagggaaccactgtcctctcagagtagctgaggcaagaggacattccagaggcacccac

SEQ ID NO: 480575 - DNA, 780 bp, Homo sapiens
  misc_feature (77)..(77): n is a, c, g, or t
tccacctcctgggttcaagcgactatcctgcctcagcctcccgagtagctgggattacaggcacccgccatcatgcncagctaactgttttatttttgtagagatgggatttcaccatgttggccaggctggtctggaactcctgacctcaggtgatccgcccgcctcagcctcccacagtgccgggattacaggcatgagccactgagcccagccagaaacatattaatactataaacaacagaaatcagtttcagttttggaggctggaagcccaagatgaaagcaccagtagatgcaacctcttttgtaagggtgatggtcccatgatgaggctgtgcccctgccctgtgaccggatgacctcccaaatgccccacctaataccatccccttgcaggtgaggacttaagcaggtgggttttggggggacgtgctcaggccacagcagggtgcatgaagagccagtgagcctcattgagcccctctggtcagccaggctggggcagaggaggaaagcaagaggacagacctccagaagagcagcggagggcgggtgaggatttccccatataccagtgtgtgttcatctacccatgaggaataaaaccatgcagcagcatgcaaatggtgtcctggtgttcgcagcagaactgctcatggtaatggataagttgttttcatacagtgggttgtcaatatgtttaataattgttggtatctattaataagggcaatatattcatatggtggattatttggctattaaaatggaatgaag

SEQ ID NO: 480576 - DNA, 176 bp, Homo sapiens
acatgtaaggagcactcttctcgctgtaaccgcacattgctgccagaccgtcatcgatgaatctctcctagctaacaattaagagttgcaggattgagattaaaaataacacattgggtaaatcacgctcttctatttcaatgtctaggttcactattgcattccacatttggcgc

SEQ ID NO: 480577 - DNA, 1135 bp, Homo sapiens
ggcagacccagcgccgagcccgagccatggcgtcgagcggctccctaacaggcccgcctgtctgctcgtggccagcggcgccgccgaaggtgtgtcggcccagtccttcctccactgtttcacgatggccagcaccgccttcaacctgcaggtggccacccctggggggaaagccatggaatttgtggatgtgactgagagcaatgcacgctgggtgcaagacttccgcctcaaggcttacgccagccccgccaagctcgagtccatcgatggtgcccggtaccatgccctcctgatccccagctgtcctggggccctgaccgacctggccagcagtggctccctggcccgtatcctgcagcacttccactctgagagcaaacccatctgcgccgtcggccacggtgtcgctgccctgtgctgtgccaccaacgaggacagatcctgggtgttcgacagctacagcctgacagggccctctgtgtgtgagctcgtcagggcccccggcttcgcccgcctgccgctcgtggtggaggacttcgtgaaggattcgggcgcctgcttcagtgcagcagcagcctcctgccccaaggccgaccggcactggcagcactttcctgttgaagaaatcttcctggcgtgtggtttcaaagtggcagggtttgggcaggcaccaggctggggcagaggaggaaagcaagaggacagacctccagaagagcagcggagggcgggtgaggatttccccatataccagtgtgtgttcatctacccatgaggaataaaaccatgcagcagcatgcaaatggtgtcctggtgttcgcagcagaactgctcatggtaatggataagttgttttcatacagtgggttgtcaatatgtttaataattgttggtatctattaataagggcaatatattcatatggtggattatttggctattaaaatggaatgaagttattttaaaaaaaatggtgatggctggtgagtggatttacagtgagtaggtcggagctttgatgctatggtctacactcgttcgaaaaggggcacctgcggtgggaaaccgcgtggaaccgcggggattaaggggaagggaagagcgaattgtcaagaattggacaaaaaggggt

SEQ ID NO: 480578 - DNA, 443 bp, Homo sapiens
ttctttattcttcaattttcaaatgctgaaaatagaataaattccattttcatgatgtattgcccttttcatatatccatgatgtattgcccttttcatatatcaatggatatagtttgctaatattttgcctaagatttttggatcataaggaggatagacctagactgggtgtggtatctcacgcctgtagtcccaacactttgggaggccaagaggaaggattgctttagcccaggagttggagaccagcctgggcaacgtggagagacctcatctctacaaaagattaattagccaaggatggtggtgcacacctgtggtaccaaatacctgggaggctgaggtgggagaatcacttgagtccgggaagcagaagttgcagtgaaccgagattgtaccactgtactcccacctgggcaacagagcaggagcctagcgtt

SEQ ID NO: 480579 - DNA, 1069 bp, Homo sapiens
ggcagacccagcgccgagcccgagccatggcgtcgagcggctccctaacaggcccgcctgtctgctcgtggccagcggcgccgccgaaggtgtgtcggcccagtccttcctccactgtttcacgatggccagcaccgccttcaacctgcaggtggccacccctggggggaaagccatggaatttgtggatgtgactgagagcaatgcacgctgggtgcaagacttccgcctcaaggcttacgccagccccgccaagctcgagtccatcgatggtgcccggtaccatgccctcctgatccccagctgtcctggggccctgaccgacctggccagcagtggctccctggcccgtatcctgcagcacttccactctgagagcaaacccatctgcgccgtcggccacggtgtcgctgccctgtgctgtgccaccaacgaggacagatcctgggtgttcgacagctacagcctgacaggggcctgggcctgtctcaggagcccccaccccgctcccgcagccctctgtgtgtgagctcgtcagggcccccggcttcgcccgcctgccgctcgtggtggaggacttcgtgaaggattcgggcgcctgcttcagtgcagctggggcagaggaggaaagcaagaggacagacctccagaagagcagcggagggcgggtgaggatttccccatataccagtgtgtgttcatctacccatgaggaataaaaccatgcagcagcatgcaaatggtgtcctggtgttcgcagcagaactgctcatggtaatggataagttgttttcatacagtgggttgtcaatatgtttaataattgttggtatctattaataagggcaatatattcatatggtggattatttggctattaaaatggaatgaagttattttaaaaaaaatggtgatggctggtgagtggatttacagtgagtaggtcggagctttgatgctatggtctacactcgttcgaaaaggggcacctgcggtgggaaaccgcgtggaaccgcggggattaaggggaagggaagagcgaattgtcaagaattggacaaaaaggggt

SEQ ID NO: 480580 - DNA, 348 bp, Homo sapiens
ccattggtccgagagaaattagatgcatcacctagtattttacaacagtagccattaatcttgttgcgttcatcaacattaactgtgtttgctttcattacgctgctgtaggaatcagttctttctgtagtggttcaatcgtaatgcttattgcgaaatgtgcaagttccttttgtacatttacaaaagctttatttactctgttaactttttcctcattcataatgtttatcttcttaagattagtggtaactggttttgctttgtttttagccttaaagtttttttggctggctatgtgaaatacattcctggacttcggccctcctaatttctctcggaccaatg

SEQ ID NO: 480581 - DNA, 651 bp, Homo sapiens
taaatgtgtgtcccataatagggggtcacagcccacactccatgagactcttcacagtcacacaatgggggttataagcgtggagaaaaagtgctttgtggtttttcgtgtgtataaccacagatcacattcctaaggcggaaaaagtgttttttttggtgtctgttgtgcttttaaaattaaggttaatttttaaaatcttaagttttccaccacttttctaagagggccaccctgagcacacaagtgccccgtaattctgagaggtttagcacttctccacggctgaattctggaaagtgtgctaagtattgctccctaagtggagtaaaccctaaatcttttaatacacgtgtccgtgcattcccctcttgtctttcagagagagagaaggtggcgtacagccacggcgataacactatcccctgtgtgcactaagagggtctcttcaagtgtgaagcttggcattccatcaggtttttctaaagtctttgctcaacaggtcaaccgttaaaatgatgttagacacacaggtcccagtcagttccctttattttcacccaattttggtcacaagccatattggcccgattagtggtagctgtttgaatcacgtgtgtgatcccaataaaggtaactgctgaccactta

SEQ ID NO: 480582 - DNA, 919 bp, Homo sapiens
ggcagacccagcgccgagcccgagccatggcgtcgagcggctccctaacaggcccgcctgtctgctcgtggccagcggcgccgccgaaggtgtgtcggcccagtccttcctccactgtttcacgatggccagcaccgccttcaacctgcaggtggccacccctggggggaaagccatggaatttgtggatgtgactgagagcaatgcacgctgggtgcaagacttccgcctcaaggcttacgccagccccgccaagctcgagtccatcgatggtgcccggtaccatgccctcctgatccccagctgtcctggggccctgaccgacctggccagcagtggctccctggcccgtatcctgcagcacttccactctgagagcaaacccatctgcgccgtcggccacggtgtcgccgctcgtggtggaggacttcgtgaaggattcgggcgcctgcttcagtgcagctggggcagaggaggaaagcaagaggacagacctccagaagagcagcggagggcgggtgaggatttccccatataccagtgtgtgttcatctacccatgaggaataaaaccatgcagcagcatgcaaatggtgtcctggtgttcgcagcagaactgctcatggtaatggataagttgttttcatacagtgggttgtcaatatgtttaataattgttggtatctattaataagggcaatatattcatatggtggattatttggctattaaaatggaatgaagttattttaaaaaaaatggtgatggctggtgagtggatttacagtgagtaggtcggagctttgatgctatggtctacactcgttcgaaaaggggcacctgcggtgggaaaccgcgtggaaccgcggggattaaggggaagggaagagcgaattgtcaagaattggacaaaaaggggt

SEQ ID NO: 480583 - DNA, 167 bp, Homo sapiens
atcgtgattgagtgagggacactggaagaggtagctgataggacacgatcgggtgctgcccgttatgagaatggtggatgcacgaaatggacatcgtggaggggcgcggtctttcctgacgcccagggcaacgcccgccgtagcacatataaaaactggagttttag

SEQ ID NO: 480584 - DNA, 434 bp, Homo sapiens
  misc_feature (23)..(23): n is a, c, g, or t
  misc_feature (30)..(30): n is a, c, g, or t
cgggttccaagtataagcctgcncccctgncacatctccccagtaccctcgaccctgccgagtatgacgtgtctccggagaccagaagggcgcaggtcgagcgcttgagcataagggcccggcttaaacgggagtatctgcttcagtacaacgaccccaaacgcgtgtcgacatcgaggatcctgccttgattcgctggacctatgcaagatcagcaaatatttatcctaatttcaggcccactcccaagaactcacttttaggagctgtggcagggtttgggcccctcatcttctggtattatgttttcaaaacagacagggacagaaaggaaagacttatccaggaaggaaaactggacagaaaatttaacatctcctactaagttcggcaaggatgactattcttgcataaataaatctcctattaattaa

SEQ ID NO: 480585 - DNA, 289 bp, Homo sapiens
gtcgctgcgagaatcggcatgtaccaccatgcttggctaatttctgagaggtatatatacctgtgagatcgaggtcttgctctgttgcccaggctggagtgcagtggcgccatctcggctcactgcaacctgcacctaccaggctcaagtgattcccctgcctcagccttccgagtagctgggattacaggtgcctgccaccatgcctggctaattttttatatttttagtagagatggggtttcacatattagccaggatggtcttgatctcctgaccttgtgatctg

SEQ ID NO: 480586 - DNA, 294 bp, Homo sapiens
  misc_feature (132)..(132): n is a, c, g, or t
  misc_feature (265)..(265): n is a, c, g, or t
agagactctgtcaaaaaaaaaaaaaaagaaaggaaggaaggtaggtaggtaggtgggtatttggggccagctggctgttaatcccagcacttggaggctgaggtgggtgaatcacttgaggtcaggagtttnagaccagcctggccaacatggtgaaaccctgtcactactaaaaatacaaaaattagctgggcgtggtagtgccacttgtaatcccaactactggggaggctggaacctcggaggcggagattgcagtgggctnaagatcgtgccactccagcctgagtgaga

SEQ ID NO: 480587 - DNA, 980 bp, Homo sapiens
  misc_feature (75)..(75): n is a, c, g, or t
  misc_feature (98)..(98): n is a, c, g, or t
  misc_feature (143)..(143): n is a, c, g, or t
  misc_feature (148)..(148): n is a, c, g, or t
  misc_feature (162)..(162): n is a, c, g, or t
  misc_feature (175)..(175): n is a, c, g, or t
  misc_feature (187)..(187): n is a, c, g, or t
  misc_feature (239)..(239): n is a, c, g, or t
  misc_feature (269)..(269): n is a, c, g, or t
  misc_feature (298)..(298): n is a, c, g, or t
  misc_feature (300)..(300): n is a, c, g, or t
  misc_feature (308)..(308): n is a, c, g, or t
  misc_feature (338)..(338): n is a, c, g, or t
  misc_feature (340)..(342): n is a, c, g, or t
  misc_feature (354)..(355): n is a, c, g, or t
  misc_feature (384)..(384): n is a, c, g, or t
  misc_feature (389)..(389): n is a, c, g, or t
  misc_feature (419)..(419): n is a, c, g, or t
  misc_feature (421)..(422): n is a, c, g, or t
  misc_feature (438)..(438): n is a, c, g, or t
  misc_feature (455)..(455): n is a, c, g, or t
  misc_feature (458)..(458): n is a, c, g, or t
  misc_feature (463)..(464): n is a, c, g, or t
  misc_feature (471)..(471): n is a, c, g, or t
  misc_feature (477)..(477): n is a, c, g, or t
  misc_feature (489)..(489): n is a, c, g, or t
  misc_feature (510)..(510): n is a, c, g, or t
  misc_feature (518)..(518): n is a, c, g, or t
  misc_feature (520)..(520): n is a, c, g, or t
  misc_feature (923)..(923): n is a, c, g, or t
gaacttcagtgcttttcagagctggataaatcttaattactaatgccacacagaaattatacaatcaaactaganctgaagcaaaatttaagaaaaanatcaacattttttgtgctttaaactgtagtagttggtctagaaanaaaanactccaagaaaaanaaaattttcaaanaaaacccaaaanaaaagctttgcttagccctgttagggatccattggagcattaaggagcacanatttttattaacttcttttgagctttcaangttgatgtaatttttgttctctgtgtaantnaggtaaantgcagtgtttaacaaaaaaaagtttaaaanannnagttgtcagtannaaaaaaacctggcattaaagggaaaaaanctccnagaagttagattatttgctactgtgagaananngtcaccactggaagtnactttagttcatttaanttnaaaannaaatttngtgaanattttaagaacngtagagctgctttcaaaatcnagaaaaantnaaatgagtgtaaacacaccaaacttaaagaaaaagaaccgcttgtatgattttcaaaagaacattaagaattcaaaagagtcaaaactatagcgaaatgctgtgtttattaagccagggattgtgggacttcccccaggcaactaaacctgcaggatgaaaatgctatattttctttcatgcactgtcgatattactcagatttggggaaatgacatttttatactaaaacaaacaccaaaatattttagaataaattcttagaaagttttgagaggaatttttagagaggacatttcctccttcctgatttgggatattccctcaaatccctcctcttactccatgctggaaggagaagtactctcagatgcattatgttaatggagagaaaagcacagtantgtagagacaccaatattagctaatgtaatttggagtgttttccattttacagttta

SEQ ID NO: 480588 - DNA, 1123 bp, Homo sapiens
gggcgaggggcgtgttgtggagccttggcaaggcgctgctcttcctcgcgcctcggtttgcggtctgtgaaatgggtgttggcagtgcctttgcagtgtacgcggcgaactcaagcaccagcaagcggactcgaactcaaagggtttcagtgatgtagacgaccagagcgcactgagtgggctccatggtcggcccgctccggagccgggagatgtaacctgcgtgcagggaaatggctgcacggcagcctcggtgcctcccttccctccaccggacgggtgactgactaggggtgaggtcctcacctccaggctgcgcagctgagttctggaagcttgcgtcaacgagatggcccatgggacaagcaatgagccaagctgtggccagagcccgtttcacttgacccatgaacacatggcccttcgggaaaccctggaggaactgcgaggggcttattaatgcggctgaggaagaaacgttgaagagccccgtactccatcctctctaccgttcgcaaatgagccgacacaggagccacttcaagcggtagtacgaccccagatggccgcccttctgaagcacggtgtcacgtggcccaggtctgacggttcagacggttagagagtacacattaccattgaacgttgggccataaagtaccgacagtgggcggaggcataattctaaaagaagaacaaggcgtgcccgatgggatccgtacgcctggaaacccttggccatcaagcctagacgcgcgaccaggcgtccggaggaatgggacaacaggcgcaaaggcccagcgtggcgggtcacttaaagatcccaaaaaaggcacgtgacacgagccgcgaccggtgagcgcccgatgaagcgagtagcgtggcacagccagggaaacagagcgggggcaagggcaggagcccgttgacacgccaagcccagcgcgtgtacagacccacggcagaaagccacagagcggaggacaccagaggagaggtccagaccaggagacaaacagactgagccgcacccagagaaaggcacggcatgaagggggaaacgcggccaacggaacacggagcgagagtcacgacaccgagagagggcggcagaggagcgccc

SEQ ID NO: 480589 - DNA, 431 bp, Homo sapiens
  misc_feature (107)..(107): n is a, c, g, or t
aagttggttaacagggtgttggagggccccctcaagggcatttgtggttcactgagccccaggtgtttttttttgatttaaacagggacccccattcctcccccttngaggttggggggggcattgccctcaaggacccttttgtcaagttcttttcttggtatgccaaagaatttggttacagcaaaagggtggtggcccttttggcccccatggcctccaggaggttaaacccttggccccccggccccagcaagggcccaagaggaaaaaaaagcccctccctgttggggggtccctgccacattcagtccccccccccattgattttcccctcttcccagtttccatgtagcccccttaaaaagggggggggcctagggacccgcccctttttatgtcccatcaataaagtcccctgtgttcaccca

SEQ ID NO: 480590 - DNA, 969 bp, Homo sapiens
  misc_feature (282)..(282): n is a, c, g, or t
  misc_feature (588)..(588): n is a, c, g, or t
tcgagaccacggtgaaaccccgtctctactaaaaaatacaaaaaaaattagccgggtgcggtggcaggcgcctgtagtcccagctactcgggaggctgaggcaggagaatggtgtgaacccgggaggcggagcttgcagtgagccgagagcgcgccactgcactccagcctgggtgacagagcgagactccgtctcaaaaaaaaaaaaaaaagaaaaatttctctttaggctgggtgcggttcctcatgcctataatcccagcattttagggaggctgaggntgagctggattgcaggagcctcaggaagtttcgagaaccagcctgggccaaggttggcaaaaccccgtctctactaaaaaaaattagctgggccttggtggccaggcgccctgttaattcccaggtactcgggaaactgaggcaggagaatttgcttgaaccctggacaggtggaggtttgcacgtgagtttgacgatcacacccaattgcactccagccagggtgcagagttgcagcagcacgtggtcctccaaaactaacaacaaaaaaacgcaagagaacaacacagtttcttctcttatgancctcggtgagaccgggcaagttcccagaagataatccctttcaaccaagaatttaccccggtggttcccaggtgtgacaactgtggtgacgatgtgaagcgcccgttgtgaaacccccttaaaaacagtgggaactagtgggcaacccaaggggggcaggggtcctattccgcgcaagcctttaaagcaaggttgaccttttcactcacaacccagggggaaactttcccctaacacgcggggttctacaaaacaagcaaaaccactagacgatctgccacagcaccaccacacagagcacgggggcgcgccgccctctatgaagaagaaactcccctcctactagggtgggccccaacgatcctcagacgcgaggaagcc

SEQ ID NO: 480591 - DNA, 199 bp, Homo sapiens
acggctcagtcataacgagtatacggagtgttagcacggatgctcacgtttcgacggaacttgtacaggcaggcatgcaccgcagtggtgaatacacgtctgaccaggctccatcttaacgatatgaggacgtcctcacggtgctcacgtgatcgacggaacttgtccaggaaggcatgcaccgcagtggtgaatacac

SEQ ID NO: 480592 - DNA, 301 bp, Homo sapiens
aacatctgctgctgtaaaaaaatacaaaataagctgggcatagaggtgcatgcctgtgtctctagctatgcgggagattgcttgagcccatgagattgaggctgcagtgagctgtgatcgtgccactgacctccagcctgggggacagagcaagaccgtgtctcaaaaacaatttagtctgaaacacaatttgtgcttgaatctgtcttgactataactctgaccacacatgaaccagggctgcccctgtaatccccacagtaagaaagttgtattggcatattccaacaagtatttggtt

SEQ ID NO: 480593 - DNA, 398 bp, Homo sapiens
aagcagttaatacagactcaacttttagatgagatccgggaaacaagtgagtcaaaacctgtgaacactagcaaagcctttccttttcatttgatgtatagtgtgtattaagacaccttttttaggctgggcacagtgtaatcccagcactttgggaggcggagacagaaggattgcttgagctcaggagttcaagaccagcctgggcaacgtagtgagacccccatctttacaaaaaatttttacaaattagctgggcctggtggcacacacctgtagtcccagctatacaggaggctgaggcaggagcatcacttgagtctgggaggtcgaggctgtagtgaagcatgattgcgccactgctttctagcctgggcaacagagcaagaccctgtctc

SEQ ID NO: 480594 - DNA, 310 bp, Homo sapiens
aggatccaggcaaagctctaattggagttatctgttacagtcatgatggctagtctcctgttctgtgttgactctaggaatctgttgctaatatgaagagtatggaacattcgtatagtctctgtgccgcatgcggggagggcagaccattctttttcttataggcttaatgctcacatgtcatagtctcctttcacagaattgctgtgcattataaatgcacgcagcttaagtagaagacattgaaggatgcattaatttcgcggaactattctgaatcatgaaaagatacccacttgaaacacattat

SEQ ID NO: 480595 - DNA, 447 bp, Homo sapiens
tgaaacaaacgtaccctgtgctcttgctaagtgggaaggcaccagcctgggagtggacaagatcacaggtgaacccctcgaggcacagggatggcaatgccgccactgaaggaggtccgaggagggaggacaggatttagaactacagcgtcagcactggaaagagggggccagatcatgtggagaggcagaagccctaaacacagtgctttgtccagacattgaaacttgcttcacgaagaaagggaaaagatctgagggtgctgccacgtccctgtaatcctagcccctggagagtgaaaacaggtgtaccggaaactctaggccagcctcacgcatacagggaactctatcaggaaaagaggggctgagtgagggctctttgggtaatagagcttactaacacagtcatgaggacctgagttctaatccctagaatccacgttt

SEQ ID NO: 480596 - DNA, 175 bp, Homo sapiens
gagactctaaggatccccgtcggcgtggtacaccaaagcctcttcgcgtcttcctctcgtatcccccaccttaacccacaagtatgggacatctctactccttccctggcaactgatcacatgcccattaccatcccgttaaaacctaatcacccttaccccgctcgacgccaac

SEQ ID NO: 480597 - DNA, 451 bp, Homo sapiens
cttgcgggcctcatataacgcacgggcaataaatcctccttaaaacatgtcatccctttatacttgagaacttcacagtcttaatggccagtccttacaaaatgtgcataggattaagtatatttaagagagcagacaaacgaaacatattgtaaaactagtattctccagaagcgattgccattctcttccttccgtcctgcaatctggtgtctgatctttagctagtgctctgtcatcccataagaaagctgaacagaggtaaaaacatccagtctgcttgaattccctgagtgctacagattccggtgagatggacggtcatacataacagttccaatgctggtgtggtaaagggagaacataaataaactgggtttctgcaggttagtgagatgacatgatgaagaggaataaggttgtccggcagtatgattaggctcgtgggtgc

SEQ ID NO: 480598 - DNA, 182 bp, Homo sapiens
gttgctcatcattggtatatcgtcgagtgtagtcggttagtactgcctacgtatgaggagcgttatgagtgaagtgaaatcacattgctaggccggagtaattaggagggctagagagggcccctgtaaggggtcatgggctgggttttactatatacataggcatagtacattggtgggac

SEQ ID NO: 480599 - DNA, 515 bp, Homo sapiens
  misc_feature (80)..(80): n is a, c, g, or t
tatttccacagggtccacgatagaaccgcttccggccctcgctgtcgcctctaacaagttctcagtcaataccaatgatngatgctgactcagccctgcgtcactgatgatgtacatgatgaaacaggatgccagtgtgatgtgatcagtggatgaccatcaccccaccaataaaaactgtgcatccgagctatcagaattttgaaatttcatgttgctaaccggaggttttgggatgcattacgtccatttgatgtataagatgtcgttgaacaatattctgctggtcatctagggcatgttgtgttgaattatatgccttcaaatcacgtgttgatcaaagtcttggaaaagggtcgaatcacatcagatgataagagccgatataaaatagcagctgaccatgagaccacatacgatctcagtatgctcggccggctggtcaaggttgaaaaacaggtaccctgcatagaattcaagctggacttgctactatacctctatcaatgggtcct

SEQ ID NO: 480600 - DNA, 423 bp, Homo sapiens
  misc_feature (162)..(162): n is a, c, g, or t
cgatctaagatccactatatgtacttcatctataccatcgcaagcaagggagtagtaaatgggtcttgttcactttgtctagatattttcctcttgcattttcttatgttctccttgcccatagcttcatgcttgtcattcctttccattaaactcctggtntcttgcttccatcatcttctttttggttgtgatcaaagctttaagcttataaatactgtgtatgatgtacatttatcctgtgtgttgctattgtacagtactgaccacatgacaaaacaagaaacagtcaggaggtaggggagtgggttgtcatagcaacagactgatttgcaaaatgtaagcagtctgcagcagtgcaaggagaggaaagagcatgtccccaaagtgtcataaatctgtctaaccgcagttgatgcatga

SEQ ID NO: 480601 - DNA, 450 bp, Homo sapiens
aggtagatggagaggccggtgaatctgggcttatgggatacagctggacaagaagattatgacagattacgccccgctatcctatccgcaaacagatgtgtacttaatgtgctttcccattggtgagtcctgcagtcatttgaaaagtgtccagtgcaaagtggtatcctgaggtgcaggacaccagtgtcgccaacactccgcatcgatcctagatggagaactaaacttgatcttagggatgataaagacacgatcgagaaactgaaggagaagaagctgactcccatcacactatccgcagggctctagccatggctaaggagattaggtgctgtacaaatacctggaagtgctcgagagcaacaacacagcgaggactcaaagaaagtgatatgacgcaagacgatccgagcaagtcctctgaccacgaactcccggtgcaagaat

SEQ ID NO: 480602 - DNA, 441 bp, Homo sapiens
tggcatcaaaaagcttatattcccattgggcccaaggcttgtaggatagttaaaaaagctgccaatgggctggaggaagaggctattaggaagaagccctataatttggcaaggggcccttacaaaagtcgctgggctcaacaaggctcttagtcgtgcttgaaagtgagcctttcgaagagatactcgcccagcccagcctcggggccacccagcctgttggaggtgggctcagggggtcaccccatcttctgtgataagcttcacttcctccatctaggaagtgagtctccaggaagtcaccagagcatgggggtccgtgcgggcagaaacccagggcatgaagatccaaagagggccgtggtatcagcttttcctccaggccagggcgagcttccagtggcgtctggggtttacgcccactcatcttcagcgggctcc

SEQ ID NO: 480603 - DNA, 454 bp, Homo sapiens
taaaaattctcgtttttcaaagtaaagaaagtgtctgtctgtagtttaaagataccacttctcagtttgtgcaaacagctgtcgcagaagtatcacattggtataggcagtgtttatgagctcatattccacctcactatgaacctcagcttgtaatccattgaggtcttcagagatttcatatatggtgaaggtgtcctcccacagcttgctctctttgaggtcttgaaagcaggaatctacagttttgagtccaaagcctctctttgagcgagcaaagcgcatatatttaataacttcttttagatggtgctcatttaggccaatctttgccatggcggcagacagcggcggcagcctaaagaacgggaagagcccaggcggtgccccacaaagcctggtatcgcgagtgctgatgacctagctacctcaagaggattactgaaccgtgcca

SEQ ID NO: 480604 - DNA, 460 bp, Homo sapiens
  misc_feature (30)..(30): n is a, c, g, or t
  misc_feature (41)..(41): n is a, c, g, or t
  misc_feature (458)..(460): n is a, c, g, or t
catttaattacccccgacctcaattgaggnccctactgtgnccccaatagggtttggggctgcagggcaggccagcaccgaacaaaactgatgaaactcttccctcatggagatccttaccgtactgatgaagacacacaataagtaatatcattataaataatacaggggcccaggcacggtgacccactcctataatcccagcactttgggaggccgaggtgggtggatcacctgagttcaggagttcgagaccagcctggccaacatggtgaaaccccatctctactaaagatacaaaaattagccagaaatggtagcgggtgcttgtaatcccagctacttgggaggctgaggcaggagaatcacttgaacccgggaggcagaggttgcagtgagctgagaccgcatcattgcactccaggctgggcaacaagggcaaaactccatctcaaaannn

SEQ ID NO: 480605 - DNA, 268 bp, Homo sapiens
gatcacctgccaatttctcagtcccttcctcccaccttaatgatcccaaccaggtaagtcaactacttcaactaattccactaccaggcaacagacttattgcttcccaagaccactactccctttttctgaacctcatcttcaataatccccaatactccccactattctcacacccaacaaacaacaagggggcgctaagattatgacccccccgagaactcactggtggtatttttgacaaccaaaacccctcctcctattactg

SEQ ID NO: 480606 - DNA, 93 bp, Homo sapiens
ctgaagtgggagcggccgtatctcatctctccgcaccaagatggccctgctatccccagcattggccatcttggtgcggagagatgagatacg

SEQ ID NO: 480607 - DNA, 165 bp, Homo sapiens
aacgcctaaggtgctctgaggattgaataagataacttaaaatccccagatgtcagctgaggtcactctgtcctctaagttttaataaaattgacgtttcctatctcacattccatgggaaataaatgtcctcccaaggttctgtggacgtcagaagcttaaatc

SEQ ID NO: 480608 - DNA, 154 bp, Homo sapiens
atagtgactaataaggtacactgggagtctccagaggcagaaggggacccgaaaaatagtataaagaaataatattggaaaatttccaagtttggctgggaacagtggctcaaccctgttaatcccaacacttggggaggccatggtgggtgga

SEQ ID NO: 480609 - DNA, 910 bp, Homo sapiens
aaaaaaaagcgccgtggggacgcgtgcccgtcagcgagacgccctgaggactctgtgcgaccacaaggggtaaaaagccttcggaaacacagagcaggggtgtctaacgacgttaaagagctagtcgccaatcatgtggggcgggaaccgcaacaaaacaagacccacgtcgtttcccacgggcggcacagcgctgtcccggccggtcgccagggtgcgccccacagcggtcggaccagcaggccccccagtaccaggaccccaatggggaccaccacagccttcctcagcggaaaaaccaatgctggcgcgccccctcttaacgagttctcacgtaacaggtaacgccggcgagtggccccggcctccacccacagggtatccgggacaccgtggaccccagcagtccggctatcagcaagagaaaagtggctggccacccacatctggggggagggcgggccacccgaagacggctatgtggacgcaagcacgccttgccacacggacagaacttgaaaccccccaggggcgtcctcgcgaacaaaccagtcggcacgcttccggccaccccgacaagaccaaaggagagagattaattgtgcgcgccacaaaaaccacggggccccacccacaaacgggcaccccggctgccgcgtcaaccgcatctgaaaacaagggaactactcccagtgcgcctctacggggcacgaacagcgatcgctgcggaaaacagatggtccgggacacaagaagcacagcccacaactagagggcaccttcccgatcggcaaacacaagggggcactcccgcggctgtctaatacaaagggagagagccttcaggcccccggagcaacaccccgaggccgttttccgggcagagaacaccccccgaaaaaaaaagaca

SEQ ID NO: 480610 - DNA, 804 bp, Homo sapiens
aggttccccctgtggagctcccctgtccagcccctctgtgtctcccagagtagggtctctgttctggtctccctgtttcaagaatgtgtagttcgagcctcgccaagcgtgaaagttgttccaattcgtgcataggctttgtaggcctttatctggcaacacaggactacgttttaccagcatggtaggtccctgagctgtctgcagtagccccatgtgattattctgcagttcccagtccagcctccgacatcggggactctgccgtaactcggaatcgtcataggtcatactctgaaatcttcaatggtgtaccatgccaccaaccgtggctgcatagggagcagtagtcactggcatgactcccggcctagggcccccaggattctaggatctccccaggcagcctccattgtggacatggtcccggagtgccttaccaagcacagtctccatgctcccagattcatcgaccttcaccccaggcccagggaggtgcagcttgcgtcatgcctctgtcgtgtgtgctgatttgagtggctaagcttgccacagcgcaacctcttctgtccctttcagtcattttgctgtacttccctgtggcacgttaccatggaagccgctccagggtgggtcagggtgcaagctgctggtgaggtttggaagcatctaggctcacgggtgttcatgtgtgttcgtgcagtgctgtgctgtcgtacagtgtatataacatgaagctgtcatgtaccggaatgccctttgctagccatgggctggtcaatacctcgtgggtatgcccgccca

SEQ ID NO: 480611 - DNA, 194 bp, Homo sapiens
  misc_feature (2)..(2): n is a, c, g, or t
  misc_feature (101)..(101): n is a, c, g, or t
  misc_feature (184)..(184): n is a, c, g, or t
  misc_feature (189)..(189): n is a, c, g, or t
gnacggggtttcaccgtcgttagccaggatggtctcgatctcctgacctcgtgatccgcccgtctcggcctcccaaagtgctgggattacaggcgtgcacncgcgcccggccaaagctactcttttctgtcggcccagtgtagcatctggcggttttcttctctccaccctgctcctccgaagngcggnggttc

SEQ ID NO: 480612 - DNA, 105 bp, Homo sapiens
tatatagctgcccctgttattcgtgtcagtgcaaacagacgactcacatacttcatagacagcacgtgggtggcgcagccttggtaacgccatggactgcagggt

SEQ ID NO: 480613 - DNA, 269 bp, Homo sapiens
  misc_feature (27)..(27): n is a, c, g, or t
  misc_feature (92)..(92): n is a, c, g, or t
  misc_feature (189)..(189): n is a, c, g, or t
attattatcttatactcaattaatctngagtaatctcgataataataaaaatacccgcaaacaaagatcacccagctactaccatcattcangtagcacaactatatattgccgctaccccaatccctccttccaacataactccaacatcatcaacctcatacatcaaccaatctcccaaaccatcangattaattactccaacttcatcataataattaagcacacaaattaaaaaaacctctataatcacccccaatactaaaaaa

SEQ ID NO: 480614 - DNA, 413 bp, Homo sapiens
gggcagctgtttgaccctgccccggcctgctgtgagcccatccttgatcacaatccttatcccaagctagtgagcaaatatgccccttcttgggcccagaccccagagacaggctgggcagcctatgggggctctcggaactggaatgtgcccctggcccatctcagcctcctgagcctgtgggtccccactcaccccctttgctgtgaggaatgctctgtgccagaaacagtgggagccctgaccttggctgactggggctgaggtgagagaggaaagacctacattccctctcctgcccagatgccctttggaaagccattgaccacccaccatattgtatgatctacttcatagctccttggagcaggcaaaaaagggacagcatgccccttggctggatcagggaatcc

SEQ ID NO: 480615 - DNA, 232 bp, Homo sapiens
agatcccctgtcacgccatgtctatatctatgggcacaagcactattcatgacacaaaatgttcacacccatcttttattttatttgtaaaatatggcatattttacaatgtaataatcaagctaaatatgacacagataatgccccgttattccttccacctacacaaaacagcatgatacatgggagcacatcatgcaaaatccttccgtccccaatcacctgaatttca

SEQ ID NO: 480616 - DNA, 302 bp, Homo sapiens
  misc_feature (295)..(295): n is a, c, g, or t
gaccgaaagcttactagtgcagtctcaaaaacaacacacaaaaaaaccaaatgttcttgccaattcttccatttaatatttaattttgaattatattggtatctttctaagggatggtttcttatataagcaaagatttttcagtgctaaacatttacgactggctattcagaaatgggttatttacaagctctttttggttttaagcaaaatgggctgttcaagaaaatttaaattagtatataaagccacaacaaacatatttttggcttatggatgctctggttttgcagancttcttc

SEQ ID NO: 480617 - DNA, 684 bp, Homo sapiens
  misc_feature (262)..(263): n is a, c, g, or t
tgctggaaaaaaaaaacatgtgcccaaaaaaccctgattctccaaaaacctaacctgttaataacatagcttatatgggaaaaaaaaaaataagggcttgcccactcagaatggatacagttgggtaatcggatgcctaacaatcctaataaaaattcaagcccagttaaaagagatgttaaattcctagttaatagaagctgaacagattgtgctgtgttctgaccataggacacagtggaactattgctgctgttaatcnngactctgtcctatgaatactttctggaagtgtaaggaattgcattttaaaatgttgttaaaatgagtaaaggaagtctcagttaacaatattaaaaaatcatgtggataataggcacttaaatagtggaagaatgcacagagaaaaatgtcttcctgtgttatcccattcttacgataggtcccatctttcagactgaaaagcctgcattctcctgttttattctttggagatctcttacactgaagatgtttaagcagaatcttacttccttcaaggaacttcagaaagttgatgattacaattctaatggagttactttttcttcagtggataatgtttctgaaattataccagcaggatctaatacaaaagccaggggtttatttaaaaaaaaaaaacaacacacaaacaaaaaaaaa

SEQ ID NO: 480618 - DNA, 586 bp, Homo sapiens
gtcacatgacatctgccaaaagcaatttacaaattcaatgcaattcccatcaaaaataccaccattattcttcacagaactagaaaaaaaaacttaaaattcatatgaaacaaaaaaaagagcccacatagccaaagcaaaaagaacaaatctggaggcatcacactaccctacttcaaactgtactataaggccatagtcaccaaaacagcatgatacgggtataaaaataggcacatagaacaatggaacagaatagaaaagccagaaataaacccaaatatttacatccaactgatctttgacagagcaaacaaaaacataaggtggggaaaggacaccctattcaacaaatggtgctgggataattggcaagccacatgtagaagaatgaaactggattctcatcttaccttatacaaaaatcaagtcaagatggatcaaagacttaaatctaagacctgaatctatacagattctacaaggtaacataagaaaaatctctctagaaattgagttaggcaaagacatcaagaccaagaatccaaaagcaatgcaaaaaaaacaaggtacaagttggccttaa

SEQ ID NO: 480619 - DNA, 426 bp, Homo sapiens
  misc_feature (335)..(335): n is a, c, g, or t
cgccggagcatatgcagaaggaagaggaaggaggagctggagaacatgatgctgctaaccccagatgaaagcgtgtttgcaggaaccaggtgggaactcctggagacggcaggggaaccaggtggagggcggctgctcagttgtatctgtacatgagacttcaatcagcgccttcgctagcccattcattcacctggcatttatagaacgctgctggtgtacagggtgaacacaacagccaaacatcttggttcctcctcagagatggccggcccagagcctggacatctgactcaccaatactctagtccgtcaaaaggacacacaccaaaggngaagggacctgctggccacaggtggggctgaaatgggttgaaatgtgttacacaactcacatctcatgggttcataactatcccccccgca

SEQ ID NO: 480620 - DNA, 352 bp, Homo sapiens
  misc_feature (57)..(57): n is a, c, g, or t
  misc_feature (87)..(87): n is a, c, g, or t
  misc_feature (171)..(171): n is a, c, g, or t
  misc_feature (227)..(227): n is a, c, g, or t
  misc_feature (290)..(290): n is a, c, g, or t
aagagtaaaagagagaattgggaggctttcgaagccctattgtaatatttcttaaancacattatttattgctaaatatatttagtntgagccatgtaaaaattgccatttttggaggtcaaaaaccgttgaatatcagcaatctagtatggttcaatttatgtggtttcnaatcaaatgtacaaagtacaataatttcgtttcatacttgattttttatttcttangctgagtcattaaaagttgatcagtgataaatggcaaaattatttaaagtgcttgaggaattngggagacttgctgcttatgtgatcagatatccaaaaataaagtttttcatttcattaaaaaa

SEQ ID NO: 480621 - DNA, 153 bp, Homo sapiens
  misc_feature (32)..(32): n is a, c, g, or t
  misc_feature (66)..(66): n is a, c, g, or t
  misc_feature (79)..(79): n is a, c, g, or t
  misc_feature (141)..(141): n is a, c, g, or t
atgggctaggcatggtggctcacaattgcaancctagcaatttgggaggctaaggtggcagcatcncttgagccccggnggttgatgctgcagtgagctatgattgcatcgctgcaccccagtctgggcgacagggtgagntcctgtctttaa

SEQ ID NO: 480622 - DNA, 1343 bp, Homo sapiens
gaggaggctcgtacctgcattaatgaatcggcagctagactctaggaactatccgagctccatccccacaaatatcaaaggaacggagagaaccgggaccccctgggggacccggaactgatctgacaggatggcatctgatgacatttgacatagtgattgaggacatgctggaagatcccatataaaaaagaagaggatgagacaaaaagagaaagaagttaaaaaggattatcctaacaaataccacacaggaagaaaccaaggaaacagtggcaaatgaagaccagtggaagcaaaaacaaatacgagaggaagacaagcaaacgtagtcgagaatcgggaatcggtatagcacaggcagaaatagtcggagccgaaaggtcccaggatcaggacagatagatcgtacaacgatagaaccgtaagactggggatcagtacagacaatggataatagagtcagacagaaagatcagggaaccatcgatcagatgagggaatcgaagatgacaatataccagcgaagtccatcacaaatagaaacaaatggaattataagagatagtggaacagcagataaagaaagttcctcaatatatcaagagaacgaagcagcaccagatacaagaagaagaccaagattgactaacacctagcaagatccactgacaggaaagacagtggaatggacccagccaacaaggagtcacatagggagtggcacgaatacgcactgcacccagaacaatagacgagaacatcgaagcaaatcattgagcagcgaacaattaacacaccacctgaccatggcagagagacacaagggtagcaacaagacatggaacaagtacatgaaatacatacagactacgtgacacataccaccgatcaacaaccactaaacagacacaatctgacgaataaccaatatgagacaaaatccctgaggaaacaacgtcacaaagccattgatagacccaaacatgagaaccacatacagagcaacacttggaacccaggagaacaaaacgcagagcaattggcgtgataaaagcatggcacataatccaaaactgcaaatacgaatggacacttacaacacacaggacaaacacgcaacatagacacacctgaaactggaaagaaaccaatggaccaacacgacaaacaagaacagaatcagagaacaaatagcagcaaacacaataacaaccacaacagaaacaaactccccatacaaaacaacaaacacatcgcctacaaacaacataaagcccaaggacaacctgtaagaacgccattgggcaaaaatataaaaaatcataaacaacacagaaaaa

SEQ ID NO: 480623 - DNA, 139 bp, Homo sapiens
gctcgactgaaaagctattagccaggatcatggtcagataagacataacgtttttcctttagaattattttattaaatcatagctgtacaacagcttcttaactctacacacgcacttaaatttttttaaaggtcgacg

SEQ ID NO: 480624 - DNA, 213 bp, Homo sapiens
tttatccgggaggaaaaaagataaatcaagtatgactagtgaacaatagattgatttacaatgtacaccaatctttgttaagttcttaaaatgttaataaaaatgcgttatttgagggattgaaaaaagaaaaccaaaacactagaccatagcatgtaagtagggtaagaaattattaataataaaatcctcaaaatatggtgtgggtaccga

SEQ ID NO: 480625 - DNA, 555 bp, Homo sapiens
gctacgaatattgttgtagtacagaaacccactttgcccgttagtgtgtggatagtatgtgtgtgtccgcactcatgataacttgaatgttgaaccagacatagggttcatttttgaaaggttaaaccacactgtttcaggaacttgctccaaatactacttggttatcccttcctttaccagttagaactacagagtgtgatgtatgaacacactgggttgggattttctgttgaggatatccagggccattttggcatgaggcaaatacagaagcaagatttcattctacttggtgatttgaatcatgccagtcctcattccaatttctcttttgttctctctggcactgggtacgctctgtatttcaaaatcttgctttgctctttccggagcttgcctctctgtacgtgcatattgtgaaggtgtatacatctatcattcaaaggtccagtgtgtcagcagtggtgtcgccctcaggttagatgtggtcgtgtcctatataatcagtggcatcgtgtgtgctgtgtgcatagtttcattttaatgcccgct

SEQ ID NO: 480626 - DNA, 795 bp, Homo sapiens
caggggggtcacagctcggcaagacctttcccgtacgccattacagggcagcctggtcggtatgcaggaacacctgccccccatccccaggaggagcccccgttccctccatctggcaaaacctggggaagggggcaaacacagggaaagggacaaccagtctgcatcatggaggacagggtcagacgcacaggagttgcgtgtagagaacttcgggggctagcagccccatcttcatgggtctccaacgcacattcccggtctctcagtctcagtcggcaatcatcattccatcctggcagcagctcagagcaagtttcattctccatgaccagatgccgtcagagatccggcggagaactgagactctgaggctgtgggaacgccttctctgcccgttctatccagctccgttaacacgagatggccaagtgggcttcccgagcttccttgtgtcaccataatgtgcagggcgctcacccttgcatgcaatgactattttgtagtacacatgagagcagtaaggcgaaaggtagagtcaggcagaatatgagcacgttctgctcctccgtgataagagttgtgcccaagggtcgcttaaggaatctgccccacagcttccccccatagaaggatttcatgagcagatcaggactcttagcgaaatctgaaaatcggatttactctcacttgaccagcagagaaaggaaagtttaataccagataagcttttgattctcttgtaattgttctgcatccccttgccctcaatcaataagttcttttttagttcca

SEQ ID NO: 480627 - DNA, 674 bp, Homo sapiens
  misc_feature (237)..(237): n is a, c, g, or t
  misc_feature (507)..(507): n is a, c, g, or t
tggagtgggaagggggcttgcgccagggcggtggaatcttcatggatcttcatgcagcatacaaagcccgtggttccaagagaatggtgaagttattcgacagccttctgctatctgggagtatgaccccagtctgttataagactgttaagttgtgtatacattgttactttgattgtgtgtcaactggtgtgtgctcccttcttccgcatcatcgttccctttttccatggaacncatttggaagttcttttccaatgtttccgcaaatttggatttggtgcgccattggcatcatttattcaagggaaatcaaatgggaattttgtgtagaagaagagctacaataagaaacaagacttggaatttccttaggaatatactttggcatgttatactggcagtgggatctatgaggcaatattaaaaaacgggcaatttctacctcattaaggggagtgcgtggttggcccgcaggttattttacgggacacgatttggggcccngtgggacacggcaactcatgtggaccacaggtatttctctttggaactgacccaaccgggtagttgggaaacaacagtgcctgtggtgcactagaaacttacgggagattacggggggagcattgtgtggaagcggaaggaaagaatcgcctagtggtgtttctcct

SEQ ID NO: 480628 - DNA, 127 bp, Homo sapiens
gggaaggaaatggtctgagagcagatgatgtccgtggagattttaagaggggaagaagctaggttgcaaaatagacctacaagaaactatagcaggagcctccttcctcatgctgatcccatccccg

SEQ ID NO: 480629 - DNA, 976 bp, Homo sapiens
  misc_feature (682)..(682): n is a, c, g, or t
  misc_feature (778)..(778): n is a, c, g, or t
  misc_feature (976)..(976): n is a, c, g, or t
tatcttaaaggatttatcaggtcagaaaaagacataatttatgattggatttgggaaagttggtcaaatatcaaaggtttagaacttgatatcacaaaataggatcacaggtcattataagataagtcattcttttaaccaaagcaataactcaaggatttcaaaaagaaggtgaaaatctccattccttgagagcggagactggatttttcaatcaataagccctaataaaaacagcatgaagccaattaaatttatttttcaaaatttggtaaacaatctataaaattttaatcttgaccataagatataacttccataagccttttataacctttataacctttattaaggggctggttaatgcttcaagaaaatctggttaatctgatgcaggggctcatgtgctgcttttgcatcagtgtgcctttgacattcatgattcatttataaagaaacttaacctattttatctttaaaaaatcagctctgtgcaatctcatgcacccactctttcgcaatagtccctggcgcttgaagagttgagtagctttaattttctgggcccgggtcttaagaatgcacgtatcctgagtgggacttttaacaaggcgaagaaaagagtaaatgcgcgcacgcttaaaatgggcggcgcgggggccaccccgttgttgccgccctntggagcgcgcggcgcgacgtgaggcggcgcaagcacgctccgtgaccgggcagccaagcaatggtatacgccgcggccggccgcgccggccgcccntgctcggctcagccgtgtgccgtcgcccgtacactcaaacacacagcaccacacgcacaccaccacactccgcagtctgtgtggtgttacaaccaccctaccaccgcacacacaccacaccagccaacaaacgagaccaaccacaaaccaaaaaacccacaccacaccccacaccaacaacccacccgccggatgggn

SEQ ID NO: 480630 - DNA, 276 bp, Homo sapiens
cttgaacccaggaggcagaggttgcagtgagctgagatcacgcactccagcctgggtgacgaagcgagactgtcaaaaaaaaaaaaaaccaaaaaaccttatttcactgagtggtatagcatttggcatgccttttctgcagtccttatcacaccacataatggttatttgggggaaaccccagacccttattggagtttgggagtatatcataataaatatcttttatctgcagcacttagaaggggcacaataaatttttgaggagtaaatcaa

SEQ ID NO: 480631 - DNA, 826 bp, Homo sapiens
gcctgacctcgcacccagctcggagcccggagcgtgcctcggggcctgtcggttttcaccatgagcagctgagctcagaaaaacccgtttcgcctgtgacctgttcctggcgttgagtgagaacaatcgggtggaaacatcttcatctctcccttcagcatttcatctgctatggccaatggtttttctggggaccagaggtaccacggcagcacagtgtgtccaagatttccatttcaaacacggttgacgaggtccattcaagattccagagtctgaatgctgttatcaacaaagtggagcgtctatatatacttgaaatgtgctaatagattaatatggagagaaaactttacaatttccttcctgagtcttggtttcgacgttcagaaaaacatatgtgtgtgacctggcaggtgtggattttcagcatgctctgaagatgcaggaagaccataaaaccagtggtcaaaggacagacagagggaaaaattccgggactgttggcttcggggcatggttgataatatgagcaaaagttgtgtagtaaatgcatctatttcaaggaaccgtggagggataacatcctggaaagaaacaggaggatgcaccatcaaatggattacgaagccggaccacggtgccctggtggttccgacgaaaaatcgcattggtaacctcgaggacttagggcggtggggaccgcctacacgcgaggagcacacaggaccggggcgggaatgagaagcccggtgaaattgcaggttggcagtgtggtacctcaaccctgaggagtgcgcaggaaacccccgcttggcaaaagggg

SEQ ID NO: 480632 - DNA, 302 bp, Homo sapiens
  misc_feature (6)..(6): n is a, c, g, or t
  misc_feature (47)..(47): n is a, c, g, or t
atttgngggggggccccccccccggttgttgcccccaaaaaaaaccnggggggggtttccccccccggttttatcggggcggggggggggaacctttttttccccgggaacccgttttgcccctgggcccttttggggggccccttaaaaaccagggggggtcacaaaaagcggggggggccgggccgggatttccggggattttttcccccccggggccggggggaatttaacccttggttttttttttttttagggggaaccccctttccgccaaaaaaaaatttcctggggttttttta

SEQ ID NO: 480633 - DNA, 83 bp, Homo sapiens
gcgtcgacttcaaatcattaaactggggctgttatggtaggttgttctggagatactaattacatgtcaggtagtatcagttg

SEQ ID NO: 480634 - DNA, 126 bp, Homo sapiens
agagtatatatcaagctgtgtaggtgttgggaccagcagaaggcaaacgtccagccaacacacaggcactgtaagaggactctgcagctactgtgcctctgtagaaggacccctacaggctattgt

SEQ ID NO: 480635 - DNA, 685 bp, Homo sapiens
gaacagcctctggcatgtggaacgtggttggctcagggtttgacatgatgaaaagacaaataaatactgtattaataaggaaaaataaaatacaaaaaaaaaagaaaatgaccaccgttgtggctcggaccccgaaagattcaaatcgaaacgacagtcgggtaacagcggcccgcgtcagttcaatgttgacttaggggcagatcggtgttccctaaggaacaccgggtcttgagaagccttcgctgtggcgttcgtcgccaagttaaaaaagtcgccgggggaacccctcggagtgttttctgaaaagatgaccaatatgggatgccccggcggagccatacgcgggatttcagaaagaaggcggttcctacagtaagcggcgtagatcaaaaattggacccccgggctggtgaggcccaaaagcctggtttcaaggccaaacgcccagtggactccactgacctttttcccaaaaaaacaaacaaacacaaagaacagcaaaaaaacaccgttgtctgacgtctctttgcgccaccgagaaaccctcttctaaaaccacactgtgtttgggaggcgcggcacccaggtgtttatagggatcaacccaggtgtatctgcgacctgggtccacagagagaacccactggacagcgcaacggcgcggtgacacccacccaataag

SEQ ID NO: 480636 - DNA, 711 bp, Homo sapiens
gggggcgtaatgagtgtttaagatcttctcaaaaacagttatagttttggtattaaacttgggcgataagacaatactactgtgtacaacctacaatggtcctgtaatctctgttgtaagccctggatcaaccctaaagtgccgattttgcattcatttgatccatatacctttaagtttacaaatattattggttgaccgcctaaagctgaatgctaaggactactcccttgaaagctttttgcgcataatcagcaccggggccataaacatggtctgggagtggaaaccccttgatgtccaagacttaagggcttttttaaactaccccattgtaacctgcagcgaattttgaatggggtcgcaattggggctcttttgccaaatttcgccctccgtggagcgaatgaaaattttctggcgtattatttcatcaaatttcctggtaattttttggagtttccccctcttttttatcaacaagtgttgaccttttaaatatcccttaaaatcggccatttaccccccccaaattggttttttttcccaaaagtttatatctaaaaggcctcttttataacgctaggggtcttcattttgttgaggtgaaaatcccttttttaagtgacctaggtccattttgtacacattgccctttagttttttggttctaaagttcttaccccttctcggccccttggggccccccct

SEQ ID NO: 480637 - DNA, 998 bp, Homo sapiens
agaaaatgcatatagaaaattgttagattttaaccaaaatacttgataatatatagatctttagatattgctattatagataaatactggagcaaaatattattaaatggtatggttattaatgttaaagaaccacagaatgttgtaaatatagattcatatacaatttctcattaaagtcgattgtatgcctatcagcaaaacaatataaacatagagatttgaatataggataggaagaatagctctacatatcataataaagaagacagtataaaagtacaatatttgctagaattgaattgttgctgggaatttttgctggagaaaagataaaggactcttgaggactaattatataggaaggtagcagaaggagaggtcctaccagaacagcagatagacgactaaatataacaaaaaatagcgtaggctacgttcagctaacgctcttatttactagagtaagaggccaggcaagatactggttcaggtagagagaacaaactgaaactaaccaaaaacataccctaagcccagagagagtttctctttctacttttggtcattctcgtcctcgttcctagttttgcagattccaccaaagtagacacaaagtaccagccggagagtacgattccaaccgaaggctaatgagaaaccaagaaaaccaccaccgcctacaacaccatgactcccatcatccagatgagtcacatagaagtccgacctagtttcagatctgaaaacttccctgctaaactaacataatataggcacccaaagaaaccaataccttagaaagaagcggaaaacggtgctccgggcgcgccaatggttgcttcttagagaaccagtgatcccgcgtccataacaggtcccctagtgcttcgtctcatgatcctcattcgtcggcggggtattgcggcctcgtctgcgcatgttgcctcgttccgctgctgtgctccgcccgcctctttcccttctctggcttcgcc

SEQ ID NO: 480638 - DNA, 106 bp, Homo sapiens
tcatgtggaaatctacgtgtaaacaggtccaaaccagacttcatgaaataatgtagtggaactgatacgcagtgagaggaatattaaggtgctgcttaactggttt

SEQ ID NO: 480639 - DNA, 208 bp, Homo sapiens
tgtccccgtgcactcgggcagcatcagacgcccgcgcgaactgtccaccctgagcggctgcgccgcgcacgcgcagcggatggccacgcagatatcttccaggacccgatgtcctcgctcaatccgcgcaagcgggtgcgcgacatcatcggtgaggcgccgctggccaacggcatcatcgcgcgccgcgactacgacgactacgtgg

SEQ ID NO: 480640 - DNA, 127 bp, Homo sapiens
tcccaagatgagaaactggagtagaaagttggttataagggttctgctttcacagaatattccaggtttatgtgtcaggtggtgacttcacacgccataatggcacggggaattctcatcctgggag

SEQ ID NO: 480641 - DNA, 960 bp, Homo sapiens
gactttcggaactcaggcactttcagaggattttgtgtgtatgagggcttcggctacagcaagaattagaggagcagctccataaggaaatgtttcaactcgtgctcacgcatactatgatcccaattcagaatgctgacaagtgaaactcgtgaaggcagcaaaggtcgtggaaactcgcagaggtcctggtgggtgagcagcagcagtgccaggatgccaagacgccagcagaaggagcagatactatgctgctggagaagaagagatcactgcttactcccaggtgacttctccgactgacctcactgtgcagcagaggcttcttcaagaacactcggactgaagactcaatccgagctagaccgcatcaatgcccagtacctggaagtcaagtgacggctagctatgatccattaagctgaggatggaggagctaaagattgttgtcacgacacgttacactgttgagaaagtggaagttcatcgtctgattagggaccgtttggagggaagccattcacctaacaggagacagcacatggagaactcaagacaggtcctgaactcctatgaggttccttgggaaggagttcgacaggctggtgaaaagagtaacacctgtactacaagcaggcaacagacgaacaagtcggtagggccctcccacgtgacgatcgatgacaacggtctaccgtctcgagctctgaacagggaccacgagagacatggcttctagcatacgtctgctgcctcctaatcttcactgcaacgtagggaccaccttcacctggggctgccttcagtacaagagagatgtggaaatgctagcgcattgaaacactgcagtaatttaggcactctcctggtttctcatcatatttattatgactgggcctcatctggaaattctagcaaggagattatataattttaccacaggggtgtgtaaagtgttca

SEQ ID NO: 480642 - DNA, 430 bp, Homo sapiens
  misc_feature (52)..(52): n is a, c, g, or t
  misc_feature (400)..(400): n is a, c, g, or t
tatcaataatattacatttataaaatttttttagttttttttgaattatagngtaaagttgcaaaagatttgccattttaacccatttgtaagtgtacagttctgtggcattaattaaattcatattgttatgcagccatctccaggactgttttcatcttgcaaagctgaaactatgtccattaaacaataactcgtcattcctacttcccctcaacctctacttacccctagccaccattctactttgtgtctctgtgattttgactattttaagtacctcacagaagtggaacaatacagtatttttccttttgtgactggcatatttcactcagtataatggcttcaagattcattcatgtcatagcatgtatcagaaatttcctgccttattaanggctgaataatattacattggaagtatatg

SEQ ID NO: 480643 - DNA, 327 bp, Homo sapiens
ccaccttttacgctgggggtggcattgccctcaacgcccctttttcaagctccttttctggtatgaaacgaatttgggtacaacaacagggtggtgggcctcatggcccccatggcctccaaggagttagacccctgggcccccagccccagcaagagcccaaaaggaaaaaaaagaccctcccttttggggagtccctgccccactcagtcccccccccccctgaatttcccctcctcccagttgccatgtagacccctttaaaaggggaggggcctagggaaccgccccttttcttgttccctccataaagttccctgtgctcca

SEQ ID NO: 480644 - DNA, 884 bp, Homo sapiens
  misc_feature (11)..(11): n is a, c, g, or t
  misc_feature (13)..(13): n is a, c, g, or t
tggtggtggtntngcgaaggagaagaagtacgaagagaggggaggacacaaacaagaagaaatgatccgtgagccgtgacccgagagcgacgagacatctgtatgtgctcgcgaagttaatgccgttgcactgacaaaggagataggagtccccgcgcagctggaagtccgagggtgcagcgggaacggctcttgccggagatcggcccccggcctgggggggggcataccggcaagatgtaaagggcggctggcaaacagcaccgggccccgctggaggccaggaaaacaccgttgtcgggcgccccacagggtgcctaaaggccctgcctgccctgggcgtgggccacaacccgcacaaagtgaatgcttgcgccaacagcgccaataaggaacaggtgcatgcccacgagcaaaacatagatgactgggtttcccccacgcccgggagaacatgaacatgctgaaatcccccggggtgaaggaaacaccactcccctgggggaaggatccatgaaacccgccgctagggaggttcagtactataacaggtgagaacaaacggccgaaaaacaccccggggtggtcccgcaggggccccgacggatgtacaagtaagtgaaaaacaacccccggggagagaattcacgcggcgcccggtgtgcgtcgtccacaaacggggtgtcccggcctataaagagaggtgtcatcgaggcccaccactcgcaggccaccagggggcacagggccgccgctcccgccacaatgtgacaagctgccgcccttgcgccaggggatatgcttaatgccccctcagagaggaggggtttcttgggccctatccccgtttggaaacttacctcccttttaaaccccacataaca

SEQ ID NO: 480645 - DNA, 261 bp, Homo sapiens
aataattgtgacacaagttgtcaacacctttgggataaagcaaaagcagttctaaggggaaagattatagcacaaaatgcctacatcaaaaagtttgaaagatcacaaattgacaacttaatgttataactcgagaaactagagaaacaagaacaaacttaacccaaagctagcagaagaaaagaaataacaagaatcagagtagaattaattgaaattgaaacaaaaaatacaaaacgtcaatgaaacaaaaagctgatt

SEQ ID NO: 480646 - DNA, 333 bp, Homo sapiens
  misc_feature (13)..(13): n is a, c, g, or t
  misc_feature (15)..(15): n is a, c, g, or t
  misc_feature (107)..(107): n is a, c, g, or t
  misc_feature (134)..(134): n is a, c, g, or t
  misc_feature (217)..(217): n is a, c, g, or t
  misc_feature (227)..(227): n is a, c, g, or t
  misc_feature (243)..(243): n is a, c, g, or t
  misc_feature (270)..(270): n is a, c, g, or t
  misc_feature (309)..(309): n is a, c, g, or t
aagaggctgaggnangagaatgacatgaacctgggaggcggagcttgcagtaagccgagactgagccactgcactccagcctgggcaatagagcaggactccatctnaaaaaaaaactgtctttgcttacattnagaataaggctttcaaaactgtgggtgtgctggtttcgtgagccttctacttgccccaaagacagtatttttgcagctgtatnaaatgaaccnagttggaggaaattgntaggagtatatcttaatggcctcagcnaactgtttattgggttttggcaagaatgaagctggtttnaaggactggagctgtaccccccct

SEQ ID NO: 480647 - DNA, 1821 bp, Homo sapiens
  misc_feature (364)..(364): n is a, c, g, or t
  misc_feature (1688)..(1688): n is a, c, g, or t
attaactaagttcagttggaacgaatctgtaaactctgggggacaggtgacccgatagaccagaacgaatggtcccagaagtcaaaacatatcgtcttcgcactctagacggcattcatggtacgtgtggacaagtggtggctaccataactgtcgatggggactgtgcagagcacgcatgaggagtctatcagatgcctctacaacttctaaacctgtgtggaccttgtggaccggggaccattgaccctgcacatgtagtcacaccacagagatgatcacatgagagagtctctcgagaggcgtctctagaggttgtcgatggtttgcacgatagtccatgcgcgcctggacatagaatgcnacgagagagaccacagtgagtcacagtcatgcacatctataaaacgtctaacataaatagaacccggtatattactcaacacggagaccatgtagactcccacgcaatactatgggatgttggagttgaacacaggacgcaaactgtaagtctgcggaaccgcggtaagaatgccataggcgagggcccccgctatgacgattggatacggctgtccggggtgtaacgcgcacgcttctataacccgtcactaaatcacgggcgtatgtgggcgaaccttgcctgagtgtcttcgctcgacgccggagtttttgaacacttttcgtcaaagtttacccttgtgaattccccgccggtcctaaggtagaggttcttgggcttaggccctctgtgtggcggcctgccctattttaggtcctttacccttttacgcggcgttgtggtgcccttgcttcgttagcgcccttgctccctttggggcgctaagctccagacctcgcagtcgttccgttgaccccctccgtgggcttcttttcaccccgttataccagtcaggcggacttacttagcgccggtaggtgaacgccttgcccttttcggtgacggctctctataggcgaggcgggcttaccggcggctcgccgccccttggtggggtttggcctagacactccgctttgtgggggcacgttacacccgccccgcgatagcgcccacgagcttcgagggggggtgccccctctgtggcttccattgccgttgtaacccccccccttggagggtccctagcgttgtccttatggtcgccccccgaatttcgcgttcccattgcaaagccccttgccgaaggggtgccccttttccctttcccaccgcttttccacaccaacggggtgggcccctctctgaggtgcgggacactgtccgtgccctgggtctcgatgacacctccacggcggagagcaacgccgttggcggctatctcctctccttcgtaaacatgtgtccgggactctggtcaccatccatggatattcgtgttccccccacgagcgtataaagccaaccttcaccatattggtcgccacattatacgagaacacatcggtagtatgtattcacccgagcggcagaaacaatggcgggcgcgagcacaccacacaacgcgggggggcccgcccaccccgcgcgagccgcgcaaaacccccgcggccaactgcccccccgacacgtatacaccatgcccgccacggggcggctcaccccgcgtgttagatcacgatgcaacggcccgacccgacgcaccccaacaaacacagtggtngcccccacacgaaccgtactccgccgacatccctactcacgtaggcgcaacaagggcagggctgcagacaaccaggacacccacaccagacacgccccaaccccccgaccgcaccacccccatcccacacgaa

SEQ ID NO: 480648 - DNA, 329 bp, Homo sapiens
  misc_feature (38)..(38): n is a, c, g, or t
atagtgccttaggaattttaacatatattgatataggnccgggccctgtggctcacacctgtaatcccgcactttgggaggctgaggcgggcagatcacaaggtcaggagttcgagaccagcctggccaatgtggtgaaaccccatctctactaaaaacacaaaaattagccaggtatggtggcgggcgcctgtagtcccagctactcgggaggctgaggcaggaaaatcacttgaacccgggaggtggaggttgcagtgacctcagactgtgccgctgcactccagcctgggggtcagagtgagcctctgtctcaaccaaccaaagga

SEQ ID NO: 480649 - DNA, 733 bp, Homo sapiens
  misc_feature (183)..(183): n is a, c, g, or t
gtgtcgttcgggtgggcagtgtccatggtaggtcagtgctgaacagatctgttcgttcagtggatgtgacgctgttgaagtttgacaagttggattctgagaaggctggacgctgtgtgtcctagagctcgcaggttgagtactcctggatcctgatggggcatgcgttctatcgttgacatncagaattgcttattcatttctctaggagctgttgctcagagggagcaggtgtgtgcatgggtattacgtcttatacatgggcgtgctgaactacatgctctagcgtttctagaaggtcttatggatcttacataggttgctgcatacacagctccagaacagccgagtctaggaacttcagtctgtcattgtgctggacatgatgtatgatggactcgagggcatagccgtcgtatgaggcattagcatggtgttgtagtgggactggcccgtctcattagacgggatgtgtacaagtgcaatttctgttggctacacgagagcacactgtgaactgttcaggagggcctgttcattctcacaggtctttggctgtattacctataggggcggtctctatactatgtggcctacatatcaatttggctccgctgtgataccaccttatccccatcaattgctatgggatgagtgtttgatactctgggaaggggccgggccctaattgggctatatggagttggatacaagtatttcttcgtcgttacgg

SEQ ID NO: 480650 - DNA, 734 bp, Homo sapiens
  misc_feature (289)..(289): n is a, c, g, or t
  misc_feature (313)..(313): n is a, c, g, or t
  misc_feature (329)..(329): n is a, c, g, or t
  misc_feature (373)..(373): n is a, c, g, or t
  misc_feature (386)..(386): n is a, c, g, or t
  misc_feature (421)..(421): n is a, c, g, or t
  misc_feature (427)..(427): n is a, c, g, or t
  misc_feature (468)..(468): n is a, c, g, or t
  misc_feature (475)..(475): n is a, c, g, or t
  misc_feature (479)..(479): n is a, c, g, or t
ggatttctgaaggggatatggttgtgatgccgtctgtgagaattcattgggtaatatgcgaattgccatgactagaactcgtgttatgagagagagcaaccccgggagtaggccaaaatttccttatgggttaaatgggtagcgcataggtatagtgagggactaggtcaggggaggaaagacataaagacttcccttcaccatgtgtacaacgatatcgctacaagggccaggggttcctccgtgctagttatactaccatgctataaccagtcagtcgggaagagcnacgtggatggcaataacaccactnctgagcgataaggggntcgaagattttatattaccctttatagtttagaaccttgtcaanatcggctcgatcntaaatagaagatggctaagttgcgtcactaaattntgagtncatcctcaacgagctatagtggtttagctagggttcgatanctccagntagncaattcgaggaagcaaagatatagttgaatacattactgctggtgcactatctctacttagaattggccgattcttgtagtccctttgggtgagggggatgcgagtggaatatattcacctttggttttttttgggaacgctaaggactaaaatacttcctctatagggtgggaaggacgtttttctttttgaaagcggacccagggggggaagggctttttgaaagaagttcccgccattcaccagaaaaaacg

SEQ ID NO: 480651 - DNA, 423 bp, Homo sapiens
  misc_feature (315)..(315): n is a, c, g, or t
  misc_feature (334)..(334): n is a, c, g, or t
  misc_feature (369)..(369): n is a, c, g, or t
  misc_feature (381)..(381): n is a, c, g, or t
  misc_feature (399)..(399): n is a, c, g, or t
ggcacgcttggatctagatcagtgaaataaaatatgaagacaggaacctggagactgcagaacacacagaacatgataaaagtagcattttaaatcagtgagggaatttattcaaagggtgttgggataactgggtagccatctggaaaaaaataaagttggatctataatttatacctccaccagaatgaaatttaaatggatcaaactttaaaaggcaaagtcacaaaagaaatagaactaaggcaggggagaaaacttgtatagtttaggaatgaaagtttttttttcttgacattaaaaccctggaaacantaaaaaaaacaagatttcntagttaggttgtattaaaaattaaaggtttttgcntactttaaactnccccagtgttgggggttnccggcctgcttaccccgggcccgg

SEQ ID NO: 480652 - DNA, 574 bp, Homo sapiens
tttattttggagacagtcttgctcggtcgcccaggaaagagagatcagactgttactgtgtctgtgtagaaagaagtagacataagagacttcatttggttctgtactaagaaaaattattctgccttgagatgctgttaatctgtaaccctacccccaaccctgtgctcactgaaacatgtgctgtgtcaactcagggttcaatggattaagggctgtgcaggatgtgcttggttaaacaaatgcttgaaggcagcatgctccttaagagtcatcaccactccctaatctcaagtacccagagacacaacacactacagaaggccgcagggacctcgtgcctaggaaagccaggtatggtccaaggtttctccccatgtgatagtctgaaatatggccccgcgggaagggaaagacctgaccgtcccccagtccgacacccgtaaagggtctgtgctgaggaggattagtaaaagagggaagacctctttgcagttgagataagaggaaggatctgtctcctgctcttcgctgggcaatggatgtctcggtgtaagctggatgtatatccatc

SEQ ID NO: 480653 - DNA, 880 bp, Homo sapiens
gaggagatttctagtgaagatgatgagctggtagaagagaagaagcagcaagaagaagggtccctgcaaaggaggaagctggagatggaggactatcccagttcatggaaaggctttgcgatttacagtctacaggaaccgcacacttcagaaatggcacgataagaccaaatgcttctgaaaactgggaagggttcgggtgcctttgaacgctcaatcttgactcagatcgacatatctgatgggaccaacgagagattacttcgaaggacacagaccaagcgctctgtcctatcgagttcttggaaacctgagccagcagctcagcctgtcccagagagttgtggccaggggaaaccggagatcttcctcaagccctgctaatgtcaatctgaaggacttgggatgaagaaatctttggatgatgatgacttttaccacagtccttcgagaactcatagaaggaaagacaggtcttggatcccaagatcaggtggcatggaaggcagtggtttgaatcagaagttagaagaaaatccaaaaaacgtagataggaagcagcaatggcaggaaacttcgttttcatgtcttagcaagtatgagtttatggactattgacatatacactgatgatgatgccaggcgaactgtacggtcttttgggagtcaccttccgagaggcaggattgaatggcaatcgaaaccaggggcctgttgtgggttgcgtcaaatgaggacacggattacgggggacatgggacccgcaaatctgtcactggtaaaaagggggcccaccgtttagcaattagtgtcgcaaaaaaaaaatggggcgcaataatgggcgagagattaacgatgtaacggcctgttctgcatcggg

SEQ ID NO: 480654 - DNA, 178 bp, Homo sapiens
cgagctcgtacccttacccacaaaccccgtcaggcgactagtcattgtatgcagcaactttagatccgcaaaaatgccgtaaacaagctcttgccaaaccaatcccttccttctgacgatgccacaaggacgctgcttatgagggcgcaaacttctcggcttgtgctcggacccttta

SEQ ID NO: 480655 - DNA, 109 bp, Homo sapiens
  misc_feature (2)..(2): n is a, c, g, or t
tnctcaggatagtgtgtctcgagaccgagcacccgcagcagtttatccgtaagcgatgatagagtctgggcgaaagatctcaactatctcaacttaatggtagaagccg

SEQ ID NO: 480656 - DNA, 431 bp, Homo sapiens
  misc_feature (12)..(12): n is a, c, g, or t
  misc_feature (68)..(68): n is a, c, g, or t
  misc_feature (106)..(106): n is a, c, g, or t
  misc_feature (150)..(150): n is a, c, g, or t
cgtggtgtgatngtataattcaatgttagcgtctgtcccgggtttactatcctgggtttctccttccntgacgacgcgttaggactaccgagtactttagcacttngttattctgtacataattgaccacacttactaaaggagtatccntgtagcactagaacccctcttttttaagatgaagtccaatgtgcctagcttcctgtgtatttagttgacaacagattgagaggagagtgggattgaggagcaactagaccagtgattctcaaaccctatgtgaccaaattcccttttatattaaaaaaagttgcaatgcctttactctcctgaaatgaaattgatgtataacatacttaagctatactaacaatttcaaaaaaagaaaaaaatgtaatggcttaactataatataaaggagaaataaaagt

SEQ ID NO: 480657 - DNA, 459 bp, Homo sapiens
attgcttacaggggtctctttatcatcgatgccaagggtgtccttcgccagatcacagtcaatgacctacctgtgggacgctctgtagacggagctctccgcctagtccaggcctttcagtatacagacgagcatggggaagtctgccctgcttgctggaagcccggcagtgacaccatcaagcccaatgtggatgacagcaaggaatacttctccaaacacaactgagatgggtaaacatgggtgagcctgaagcttggatttcacctgtgccccaacctggatgtcctgtgctggcccagaaaatgctagattttcctccactctctgaaggggctggagtctaggctgaggttttctcattacccacctggaatctggtgaatagtgatcctgccctgagcacacctagctgggcccaggtctataggaaaccaataaagtattagggacagtgta

SEQ ID NO: 480658 - DNA, 111 bp, Homo sapiens
cagatctttaagcatcctaacagatgtgttttgattgattcagcacagacttgccctcccgtgaggcttgaccaaccacagctcctggcatgggatgcactcccaccgctc

SEQ ID NO: 480659 - DNA, 137 bp, Homo sapiens
caactgtcgtgatcatttgaggactcaggaagttggaacctatactgttgtgtagggccttgccttaatgttgatgggctgctgactgatcaggacggttgtcgttcaaggttgctattgaaacttctaaaactagg

SEQ ID NO: 480660 - DNA, 607 bp, Homo sapiens
ccttcagcctttgtgatattaatgcacagcaacacatttcccattacacccctgaacacacacacacagaaaacccaaaagtttcactgattcttgctcttactactctcagtacactctgtatttaaattggcgataaagtgtgccctatactgattatctctggacaaagtctgaatggggcttggctctaatctctagtcctcattggacattttacatacctggcctttgcctccaccctgatgtggagtgatcatgggggtgcgaaatatagctggatcctaaagctctgaactgtggatggaggtgtcacagctgaggctaggaccattctgcagggcacttagtgtgtacagttgtatatctatcaggggtcaactcgctggagtgacttgagaacagatctctgagcacaaagcagggcctttgccctgaggcttggtatgtgccttagcctacacggtttttccctgcagtcctgttcaaagcccattaacctaagtaccacccccaggaataaggctacctttacatccaggaaggtttaacctggggaagaatgtggacccaattttttatgaaaggaggtccctcgcccctgcgt

SEQ ID NO: 480661 - DNA, 402 bp, Homo sapiens
ttttggctcccggagtaatccaagtgtcgctctggcagttgcgagcacgattttcgaaaatgtaattattgaacagggctccgagtgcaaaattttgttcacctggcggaaacaagacgccaaagcctacgacttttgctttactttcaggcttcgtaaaaacagttgtactcgtgattggaaccatagaaatagtttttaaaatttcagctctgggatctgagcaggcagatagtaaatcagccgcttgctccactgacgttgccacaaccagccaatcacatattggcaattgggtgggcgacgtcacttcaatatcgtaattaatttttacgccgcttttgataagataatcagtgagtttagagattaactcacccattccatttttcggagccaaaa

SEQ ID NO: 480662 - DNA, 418 bp, Homo sapiens
ggctcatttcagtccattgcaaggtggtgtgacaggctgactccaggtgttcttttggatatttactactgaatttgctttattacaattgacgtacagaatcttaaattatttattaatgaaattatggatacaatggttctggggttaatgtacatacagtgatgtaggaaactaaattgaaatgattacagacttaaatggtcctctggaaaaattagcctttggagataaaagaaggaaggatgggaggaggaaataaaacaaatgtaaggatttaactttcgggggaagcaactgaatgggagatagtccctattcttaagaaggttaccaaagttatgtaggaaaagaatgtgcttaaactttataataaaggggctggggagtcttacagatgcacataaactgaaatgag

SEQ ID NO: 480663 - DNA, 396 bp, Homo sapiens
cgcggcggccacgggaataagaggaagcagccggcccgcagcagcccctgtacgggtggcctgcaactcactgaacttgactccctccaggtagagcacgctctggctgtaggccaggatccagggcattgagcgccaggatctttaacatctgtcgcgtggtcaccagcgtgccgcgtgccctgcttgatcacgtcgcagatgcactggctcgatgagagcttggaggtgaagggtgctgcgatgctcgcatcccccagtttcaccatgtgcgtactctcgtcctcgaggtctcgcagcacctggctcaggccgtccctctgggaggttggctgctcctcggacgggagggagccccgaccgctgcttggctgtcctggccgtggctcccatgcc

SEQ ID NO: 480664 - DNA, 852 bp, Homo sapiens
gaagtagatacgtatatagttactattagacatctgatgtttgttaattgtccgcatgacgcatagtggtgtgcctttctgtagcctctgaagacaatggcgctagaccccttcggcaacaaaaatgtccggggcatacactacacgttgtcgggtgtcccccctccatggtgagcgttacaaaccgggtccaaattaataagccggtgttcgccaaaacatttcaacgcaatgtggcccaacgaatttctgcccatttgcgcccaatgacatcccgctttataaaagccgcactgtgtacacacgttctggcaaataggcagcaatttatgtttctcgatacagacccccctaatttccgcgttcaatgtcggcaattacaaacccacttctcctcaaatatttctggaacacccctgttctccccaagatctttccaaaagatctcatccacgttggtagatgttgcacccaataagcgctcttgaattatcattttggagctccctatcctttccatacttctgcaaacccccggcccctgtttcgttttttcaacatcaacccacccacattctatgatggcggaatattacgagacagcgcacatgtttcccccataaagatgcaagtgacgactaaatgcttaaacagacaaagttcgggctgtcaccccccccccaatttatagtttttaattccctcacattatctttagtatgtggcccaattcccatgtaggaaaacatgtctttcagaaatctgtcacttctggacccacctactttccgggggtagtttccctacgcaaatgcacatgcgcccaatttaaaggaaaccgcccaaataaca

SEQ ID NO: 480665 - DNA, 147 bp, Homo sapiens
agacgcacactcccttagaggcccattcttctgcatgtaattagcacccccagcacagagagtctcgttagggaggggatgacccatggcccttctctgtcttgtgcttctcctgtattggggtttgtcctctgtgaagcctgcgtc

SEQ ID NO: 480666 - DNA, 192 bp, Homo sapiens
catgactccatgtgaatgagggtttatgtggttaatgtggtgggtgagtgagccccatggtgttgtggtaaatatgtaaagggagtatagggctgtgaactagttatgttgagtccgtgtaagttaggagaagtgatattggatcaggagaaacgttggttactagccacagtggagtttcatggggttacc

SEQ ID NO: 480667 - DNA, 363 bp, Homo sapiens
cacgcgagaacatacacatagatgtgatagggcctcagtatgaggagagtgagcgccacaggttaaaagtgggggcgctatatcaccaatatcctctatataagaatggaggggaagagaagagaagaggaaatccggagagataatccaagcgcaacttaaggatcacacacacactttaaacgggaagagaacaatggttgagcaattttcaattgggaatgagagaattccgaaggccgtgaaatgggtggggaggttggtttgaaggcaccgtggtaatataaaggtggaaggaccgtgcacctatggttagaagtgccaattaatcgccctgtgaaccaagtgtgaagagaagtagtg

SEQ ID NO: 480668 - DNA, 163 bp, Homo sapiens
tgacgttcattgagctatccatagcacgtcccgcgacttttttactcagacccagaccgagtttcgtcatccgcatgcgagccttgaaccttatcgagttcaacagcctgtagtacccgataagctgctcgagcattgcggctattcgagttaccacagtcca

SEQ ID NO: 480669 - DNA, 984 bp, Homo sapiens
ggggcctgcggttgggtggtgtagtgtcggcgggcttgggggtggcttgtggtgcggcgcgccgctggggttgtgtcggcgcgccggttgtgagcgcgttgtttccgggaggtcggcggtttgatgttggagcgaattctgttggcgggccggtgtaacggtgtgtgggtttttttgtgagagagggggggcgcggccaccccccccctgggggggttgtttcgccgcactgggcggggcgccgttcgtccgcgtatatgttcgggggggtggaccacgcctagtcgttgttggtgggaaacgagccccgctccccgcccccctgtgtgtgtgagaaaaggggacaaggagttggttggtgaagatgacgaggaaggtgctatagtgcgccttgtattaatggccacccacaggaggaggtacatctcctcccaccccgtggtagaaggatttttggttctccaccgacgcgtgatggtgtaaggatgttcccccgctctgctacgccccccaagttaatattgtgtgcatccacgaagagcgagccccttttatggactgacccccttgtttgttgttgggtggagggacacaccacataatatttcttctagggtaggggaagggtctgttgtgagaatgtgtccccacccgcgctgatgagtgcatccgccagctctccagcagggttgctctgagtgtggtggaggcagaaggaggagtcgccacagtgttgtgagcacatgatgtggaagccctctggttccctcccgacgacagggatgatctaggagggtgaacgtgtgtggtgttgaaataagaggaagaggttgtgcgttggtgcgggccccgcacagaagaaggaacgggggggaaaaacccgggggcgcgccccttgggaccgggggggggcggcggggggggcccgggggggataacccccccaactattttttgccccccaaaaaaagatttcccccccca

SEQ ID NO: 480670 - DNA, 309 bp, Homo sapiens
agtaagcctttgtcccgcctactaaattccatccatttgagctctcagagatcgatgcccaagagctatcagtaatatatacagcatattgagtctagttgcatcaattatgcctgacgagtttaatacccatccaagtccaaaggtggaagaatacatacactggtatggtaataggcaagagcaggctgtaaaagcaaaggctggctgtgctagtgcagccctgtgggaagttttcttccacagaggctgagtagaacagtcctgctaaagaaaccagtggaataagaacagtcaacgtaggaagag

SEQ ID NO: 480671 - DNA, 428 bp, Homo sapiens
gagcatccccgttctggcattcgtgaaatgatggtgaaagtaaatggtagcttttcccttctttttcttcttatctttgtgattgtcccaactctgtgtaactgacacgttatggtactatgttagccccataatattgtgttttgcctttcaaatacacttccataatctggactcctcagtccaggcactgtgtgcccagcctcctaagttccatctccactccagattctttacagctgcctgcagatactgttacctcctatcagaagtttctcagctcccaaggctctgagcaatatgtggctcctgggggtactttcttcctcggctgtaggactagatggctccttgacattgtcgagcttctggaacttggagactggtatgatagatgagtgtgcctctgcctgtctcccccaccatga

SEQ ID NO: 480672 - DNA, 846 bp, Homo sapiens
  misc_feature (454)..(454): n is a, c, g, or t
  misc_feature (698)..(698): n is a, c, g, or t
gaacgctgaactaaagtatactatagtgagtggaaacaataaaggctaattccggatgatccagtaacaggtaacattactctggaagaaaaaccagcacctactgatgtgggatgcatcgttggtggtcaacataagtgacctggggtaccctaagtcttgcacacgctgtgcttgtattcctttatgttaacgacactgctggaaatgcctcctatatctatgacttgatccgcaggactatggagaccccgttggacaggaacataggggatagtagccaaccctatcaaaatgaggactatctaaccatcatgattgccatcatcgccggtgccatggtggtcattgtgtgatcttcgtcaccgttctggtgcctgtcgccatgcatcaaggttcaaagcagctcagaggagcaagcaaggtgccgaatggatgtccccaaaccaggagnacaagcaaaacaagaaaaaacgacaaagaacgaaaaggaagtctcccaaaagctctctttgaacttgttactatcgaagagtccaaaccccgatgatgcagttcatgaacctatcaagtgcgacaaataacgcctgcgggtgaactggaggagccacagtatacggaagatttgactggggcgcggcacctccaacaaaattcaaggcctaagagtcctgactggcaaggataacaactctgtntcccaaagcctgttttatctcaaccagaactccaggttccggaaaacccaggtgtcaggaccctggacaacttgggggtgtttacctttaagctcaagtaatcatgggcgaggggccagggttaaaaaggcaccaagttcttgggaaa

SEQ ID NO: 480673 - DNA, 374 bp, Homo sapiens
  misc_feature (340)..(340): n is a, c, g, or t
aatcccccggctgaaggtaagttggtaacctccaaagtcaaagatgaaaaaatatccaatggtgaaagattgattgttccatatagagaggacattttttttccccagactgtaaaactgaatccttgttgaatttaaagagaaattctggcagaggcagatgaatcacctgaggtcaggagtttgagaccagcctgatgaatatggtgaaacccagtctctactaaaactacaaaaatagccaggcatggtggtgggtgcctgtaatcccactcgggaggctgagtcaggagaattgcttgaacccggaggtgaagattggagtaagccaagattgtgncgttgcactacaccctgggcgacagagcgagact

SEQ ID NO: 480674 - DNA, 920 bp, Homo sapiens
taaagtagctctgtgaaagccaccatgccctttgcccttgccttttgggactgaccaggagctgttcatgtgggtgagagtgggaaccatttccttgcggcagtggcttccgggtgccccgtgtgctggtgcggttcccatcacgcaaacaggaagggtgtttgggcactttgatcaactggaacctttgtatcatgcggctgaattccctttttcctttactcaataaaagctacatcagactgaaaaaaaaaaaaaaaaaaaaaaaaaaaaaaaaaaaaaaaaaaaaaaaaaaaaaaaaaaaaaaaaaaaaaaaaaaaaaaaaaaaaaaaaaaaaaaaaaaaaaaaaaaaaaaaaaaaaaaaaaaaaaaaaaaaaaaaaaaaaaaaaataggggccccaattacccaaaatattttaaaaataaaaaaaaattataaaagacccccaatataacaaaaaatgggcaaaagcccaaaaaagggggttataaaaaaaacaaaagaggcaaattaaaaaacaagaagtgggaaaaaaccgggagtgcccacaaaaaagacaattgaaaaaaaaaccttttatgaaaagggagaaaaaaaaaaaaaggccctaaaaataacccttttaaaaaaaatagaaaaccaaaatgggaaaaaaaaaatttaaagcaaaaaattattcaaaaaaaggggaaaaaaattattaaaaatgaaacaataattaaacaaaaaggggaaataatacataaaacccacttaaagaaaaaaaaatttattcccgaaaagagggacaatgtttctaaaaattgaaaaaaaaaaaacgctattataaaaaaaagggacccaaaaagccataagggagaaaaaaacatgttaataaagagtaatatcacacttatggagataaccctctatggtgtgg

SEQ ID NO: 480675 - DNA, 191 bp, Homo sapiens
cgactgtttggtgcatgaggagaaacaccagcctctccacacctggaacaagccgacgcttccagaccaggcggaaaaggccttttgtcatggaaatctcgcgagggttactcttctcttgagcaatggcagtcaagaacatgagatggttcactatgactacttgagcatgtgccaagtctggcgaagca

SEQ ID NO: 480676 - DNA, 608 bp, Homo sapiens
taaagtagctctgtgaaagccaccatgccctttgcccttgccttttgggactgaccaggagctgttcatgtgggtgagagtgggaaccatttccttgcggcagtggcttccgggtgccccgtgtgctggtgcggttcccatcacgcaaacaggaagggtgtttgggcactttgatcaactggaacctttgtatcatgcggctgaattccctttttcctttactcaataaaagctacatcagactgatgctctttctccagatttttagtctcccctcggccacatggagccattatcccccttggcagaaagatttttctttaaaaaaaaaggctagaataacccaagaaaccacatttaggattatgcttccctcaagggaggcaggcagggaggacaccccaggggctttaaacccctgggcatgttttctttctcccattgggcaatggggacaaggacgttccctgtaacgggccttttccttcggcctttttttttttttttttttgctcccggccaaccggggcggaccattcttaaggcctttttgtatgccaaaaacttcatactaaactttctaaagaattaaactttaatgatgggca

SEQ ID NO: 480677 - DNA, 141 bp, Homo sapiens
acagactgcaaacctctatctctacatacgactagcctactccgtcctcactgcactatgttcccatccaccaactaacataaacagtaaaatgacaattcgacacacacacaaacaaactaaaactaccttcccctcaac

SEQ ID NO: 480678 - DNA, 873 bp, Homo sapiens
gagcggtgcaccgtcttgctgaatggcggagtaggatgaggcccgcgggcgtggctccggcgtcggcgggggcagcagcagctgaggcagcagctgaggcagccgctgacggccgggcccccaccgtagaccgtggattagctgcaggatggtccgttgtggctgcggctgatacctgtgggggcctgggtggggacgtgcttagtttcccgaccagtaaggggcaagtacatcgcgagggttacagcggtcacgagttctgagcgagccgggcagcaccatgagagtagcacacagtctccgcccgatataacatcgcagcgtcactagaatctacgcgtcacaatagacacgctcgtgctccaggactagaaagacaagaccgttgtagagacgcgcgcatataatgccacggtcacaatgataacaacgacacccaacaggcaacagagactagcatgacgggatcagcgatcctcgcacgacagaacgattagcactatgtagttaagggtgacgcgtggctatttattagcatgggtgagaatattcgcacggcggcctcagactccgaatggagcgctcgcacagccttcgtaggatcacgatattccggaatcaatgcacgacgaccgcgctgcacacccggggaacataccgaatacatatacgcacgctacgcgatagctctcggccgtagaacgcgcagcgcatgcgaccgcacatcaagaccatgtacgagcacgccgctcacgaaccactgacggaagcataatgcctcgcgagcctgacaaccgtcgagcgtaaacacatccagcagagccgaacctggcctgtccgttatcatgcagttacaaagcgcagcaacgctaa

SEQ ID NO: 480679 - DNA, 138 bp, Homo sapiens
tagaccactcgagacgctcaaatcgtcagcaacattgaatatgcgtattgtcctcatagcaatgtacagctgcgagtcagactgtctagtgtgaggtcagatgataaacactgctactcttactgatacatttaggca

SEQ ID NO: 480680 - DNA, 108 bp, Homo sapiens
ctgcgcatgtatatattaggccacaatcttcaatgagtaaacatattcctcaatcctgtggtgtcttggtacaccacgatttataggagtttctgaagggcagtggag

SEQ ID NO: 480681 - DNA, 433 bp, Homo sapiens
  misc_feature (72)..(73): n is a, c, g, or t
  misc_feature (77)..(77): n is a, c, g, or t
ataaataattaacattttattttgaaaaaatagtcagaattaaagggttgagtgttaaaaagtaatatctcnnatgnccctaatgtcgagaacaattctttttggctttttgggaatcagaaaattagcagtttgggtgcagtggttcacgcctgtaatcgcagcactttgagagcctgaggtgggcagatcacttgagcccaggagtttgagaccagcctgggtaacatggtgaaactctgtctctacaaaaatacaaaaattagctgaaaaaatgcaaaaattagacacacgtggtagcatttacctgtagttgcagctacttgggaggctgaggtgggaggatcacctaagcccaggaggtcgaggctgtagtgagccatgatcgcgcaactgcagtccagcctgggcaatagagtgagactctgtctca

SEQ ID NO: 480682 - DNA, 883 bp, Homo sapiens
tgccccccaactgggtggagcatgatcctgtgatggatgttgctggtggttgctggcctgtgacagagtgatccatgtgttcaccatcctggcccctggaatgaccccccagttcccttcagtgatgattggtgagtgatgctggagtgcccctgtgtgatgatgcatgctcataccatgcaaatgcctgtgttgcctactgtggcttgccaaccatgctgtgcttgcatgcatgttgctgtggcaactgtgcttgatgtgcagatgtgtgttgatgctccatgcatgcctgatgcctgtgctgatggaccatgtgatgctgtgtgatgtgtgtgcccatgagttgaagcatgtgcatgcattacctgtgcatgcctgatgtgcttgcctacctcagtgcttgacctctctgagggtgaccttgcatagtgctattgtgtgcaatgctgcaacaaatagggtttggcacattggcaccccacggttgcatatatcccccttgtgtgtgtgtcccaggtcaggggcaacccaaagaacatgagcaaatatccacctgggtaggtccccatggcccccagcctgattgtcagttgttgaccaccatggtggctgcccaccattccttaaattagctttggtgtgctttggtagtggtttcaatacacggtacggtacatacagttcagttgcctgaagtttcggggttggggaccccaacctcatgcttggcttctggtacgttgctgttgacacttgagtgtgccccaattgggggttacttggcacgagtgatacgtggacgctttagtctgcttgtactttgttgatatcttggatgcatggaccaccgatggcctgtggtctgcagttggggccctttgag

SEQ ID NO: 480683 - DNA, 607 bp, Homo sapiens
aggcggatagatcacctgaggtcaggagttcgagaccagcctggcaacatggtgaaatcctgtctctactaaaaatacaaaaaattagctgggcgtggtgatgcatgcatgtaatcccagttactcgggagggtgaggcaggagaatcgtttgaacccgggaggcggagtttgcagtgagctgagatcgcagcactgaactccagcttgtgagacagagcgatattccatctcaaaaaaaaaacaaaaaattgctagtcttccatggtggcttataatagtcattccagccccccagtcaaccagagaggagaaaagagaaaatgggcttgaaggctagatctcctgccatcaatctgatgggatacaacgtgcaagagatgtatgaggcccacgcttggatccaaagaatcctgagtctccagaaccaccacatcattgagaataatcatattctgtaccttgggagaaaggaacatgacattgtgtctcagcttcagaaaacttcaagtgtctacatcacagaaattatcagcccaggaaggacagagttagaagattgacggagccggggctgacctcattgaggtggatataaccttgaggat

SEQ ID NO: 480684 - DNA, 340 bp, Homo sapiens
ttgcggaccatattgcagtgtggacttaggtccaaggcctccagaggaagaaactggagtctgtcactgtcctactgagacagcacagcaacctagctcagccacatttgttttagtctagaactctatctacttctagaatacagtcaaagatacacaatctgacacagcttcatggggtggactctcaacagtagctgcaatgtactagaatgagcattacttctctagcaatctagatctgaactccttggcttctttacttagttcaggccccagtctaggaacgccagttacatcacagttggctcaggagtcttagagcttacctcattatgag

SEQ ID NO: 480685 - DNA, 269 bp, Homo sapiens
cggtccccgtaagtgccaaatgtacatatataatgaatggtaaaaattgtagcatatccatacaatggaatatcattcagccataagaaagaaatggcaggccaggcgcaacagctcatgactataatcccagtgctttgggaggccgaggcaggaggattgcttgaagccaggagtttgagaccagcctgggtaacatagtgagaccccatttttacaaaaacttttaaaaattgaccaggcatggtggcacacctgtagtcccagct

SEQ ID NO: 480686 - DNA, 410 bp, Homo sapiens
ctgcccccccgggttcaagcgattctctcgtctcagtctctcaagtaactgggattacaggcacacaccaccacggccagctaattattttgtatttttagtcgagacgggaactcaccatattggccaggttggtctcgaactcaccatattggcctcaggtgatccgcccgcctcggcgatcccaaagtgttgggattatgggcgtgagccagccacggtgcccggcctgttttattgtttgaaaaacaagtacaggttgttattatccaagaattgttgatagagtatatactgtatttgaagtgtagaactgaggcagaggctgattaatataactagtttacatttgttagcctttcacatctgtgaaggaataaagtacagacaaaagtggaaaacaaaccagg

SEQ ID NO: 480687 - DNA, 714 bp, Homo sapiens
ggctgtgctgaagagagatgggcgatatatatattacttgattacaaagaacagggctgcgcacaagccaacttatgaaaacttacagaagagttagcaaggcaagtgaagtcgtcattgtctgaacaatggagtcactgtaggcactcatccatgcccaggattggatgtggtcttgatcgtctgcaatgggaaaatgtatctgcgatgcatcgaggaggtattgatacgtgcatacagacatcaacatagttactgtgtactcactctgaaccagctgaactattttggatgtttccgtgttctcctgtgtcatctctactgggccataggaccgggcagaacctaccttaagatagtaggcagaggaaagtttcatgagaagtagtgtgtaacacagacagacttcggttgcgtgtcattcacagtattggcgacttatgacgtgtggaggtagggcctcgctgaacgatctgtggtagagcgtgcgccgtcgagcacaacaacaaggacgtctggcccactcgcaataatccccccttccataaccaaaagacaggacgtgtgtaccttgtaactactcccatcatcgatacgatgcattcaagccggccgcggcctagctatgctgaacacaatagccttgctaatcccctcgcacgcaagagcccatcgtagggaccatgtcccctgcatgaactcgccctcgtcgtc

SEQ ID NO: 480688 - DNA, 131 bp, Homo sapiens
actcgcgccctactgagagaatacatttctgttcttgtaaatccaccccgtaggtggaagttgtgatggtaaacactatggacaactaataccacatgacatacctccaactcaggtatatctgctcgtgg

SEQ ID NO: 480689 - DNA, 252 bp, Homo sapiens
agatcgtgccactgcactccagcctgagagacagagtgagactctgcctcaagaaaccaaaataaaaaaattgcagtctgagcttactatgcaaagtggtttgttaaattctgtgactgagaacctgcttaagcacgacactccataggttcaaactcaggcaccttgaacaaggagaaccaatggaggtcatcctgatgagcagcaaattagagcctcattcatcattgctcagatgagattcaaatgcct

SEQ ID NO: 480690 - DNA, 130 bp, Homo sapiens
ttctgtcgattgaggatccgtctgcacaaaggatgccttcttcaagctgctcagcaggcgctggttgggctccagtgggccaggcttggggaacagcacctgttccatgctgctctcagagcctgagggc

SEQ ID NO: 480691 - DNA, 866 bp, Homo sapiens
  misc_feature (22)..(22): n is a, c, g, or t
  misc_feature (65)..(68): n is a, c, g, or t
  misc_feature (88)..(88): n is a, c, g, or t
  misc_feature (90)..(90): n is a, c, g, or t
  misc_feature (93)..(95): n is a, c, g, or t
  misc_feature (123)..(123): n is a, c, g, or t
  misc_feature (146)..(146): n is a, c, g, or t
  misc_feature (149)..(150): n is a, c, g, or t
  misc_feature (153)..(155): n is a, c, g, or t
  misc_feature (167)..(167): n is a, c, g, or t
  misc_feature (219)..(219): n is a, c, g, or t
  misc_feature (223)..(223): n is a, c, g, or t
  misc_feature (227)..(228): n is a, c, g, or t
  misc_feature (232)..(232): n is a, c, g, or t
  misc_feature (237)..(237): n is a, c, g, or t
  misc_feature (257)..(259): n is a, c, g, or t
  misc_feature (295)..(295): n is a, c, g, or t
  misc_feature (304)..(305): n is a, c, g, or t
  misc_feature (307)..(308): n is a, c, g, or t
  misc_feature (310)..(310): n is a, c, g, or t
  misc_feature (356)..(356): n is a, c, g, or t
  misc_feature (360)..(360): n is a, c, g, or t
  misc_feature (362)..(363): n is a, c, g, or t
  misc_feature (415)..(415): n is a, c, g, or t
  misc_feature (432)..(432): n is a, c, g, or t
  misc_feature (471)..(471): n is a, c, g, or t
  misc_feature (596)..(596): n is a, c, g, or t
  misc_feature (626)..(626): n is a, c, g, or t
  misc_feature (795)..(795): n is a, c, g, or t
  misc_feature (846)..(846): n is a, c, g, or t
ccccaaaatggacaatcatgtnaagcagctcaggtcaactgcagggccacattcccacactgcannnncctccacccaccctcaactnanatnnnccctggatcagcaggtctaggctgaaanaaaaaacagtgaggttcccaggntgnnagnnnggtttgacaggnaccataccccaacctgctcaaaaccctaagttagcaaaggaagacagaagantggnttgnntgcncattnccctccccccacccccaatnnnagcttcaaatccctgatcagtaaaattgtgattttnaggtgctanntnntngggttttatcagcccctgggtgattattaccaaacggcccagaggncagntnnagagggcaggaatttgccccactacctgctcagtattagccaagctgctgcnttcagcttgtgcctgtnggtgcctccagcccctctcccttccagaacaggtatggntggaaaccagttctcctgacagaagaagtaagttccaggaggtcctttctcccccagcctgggaggatgggttgtgacgcctgggacagctacacaagcttcttggcttcaaagaagctcttttngtgccgcatctgccagacaccgatggccangaggatgagggtctgcagaatggaccaccacagcacccgctggttggtgctctcactgggtctgccggaagcgctcctctcgccaccgctggtagttctgctctttctggatctgctccacttgttccaccagctgtcgcactcgtagctgcaactcactcaacttgtntttagcagccatttctgcatagtcattggcatgttcacctacctggatgtncaggtgaactctcagcatgc

SEQ ID NO: 480692 - DNA, 1185 bp, Homo sapiens
actaaaagccaatacatgggaacaggaagacagactcatatcaacattgtcgtctttggacacgtagattccgggcaagtccaccacgtactggccatctgatctcataaatgctggtggcatccgacacaaaagatacccattaggcaaccagattttgcagaacggcatggctgctggagactcgtgccgacacaggcgctctcttcaagagtatgccatgtggtcgtatggataactactgacatggctggcagcgtgaagcgtgcgtatcactcaatttgcatactctgccttgctgagaaattgtagacgacccagcacagttactatgtcgacgtatcattgatgtgccccagggacacatgaagatcttgattcacaaacctagtgatttacatgggactagtctcaaggtctgatcgtgtgcctgtccgtgattgttgctgctggtggttgcgctcgaatttctcgacagctggctatctccaaagtaactcgtggcatggacccgcagtacgtcatgcaccttctgggacttacaccactggtgtggtgcattacatcaactgaagttcgtgcggtgcttacacagacaagttgtgcattccaactgcagcgcaccccttactaggcctagcactggagatcactgcacggaacaatgggtcgaaatggcacatgctccacggtagccttttaccatttactgtacacagatgtgggtctgacatatccccgtgacagcgagtagccattgtgtgcccaattctctaggtgtgcgaataggtgaacaaacaatgctggaagcccgaaggtgctgagcaattgcccttggctttccacaggggatggggaagagttcagccccggttaaaggcgagtcggcaatgggccagtgggaatccgacggcttgctttgaagggctgctgggactggcaatccttaaccgaacaaaagtcggttccaagctggacactaagtccgcttggaggcctggctgtcttccgagggcatgtccttaacaagagatttgggttgggcaatttgggtaactgtttccctgtgtggccgaattgggaagagggggtgttccccaaagccccggagaatgggtgggtcacccctatggcgatcccagtgcagcagttgcagggaaggttaaaccttggcgaaatgggccg

SEQ ID NO: 480693 - DNA, 547 bp, Homo sapiens
  misc_feature (225)..(225): n is a, c, g, or t
  misc_feature (254)..(254): n is a, c, g, or t
accctgtggaggtgcagtgcagtggtacaatcttgatcatgaaatctccacctcccaggttcaagcgattctcatgtctcagcctctggagtagctgggtgtataggcatgtgccatcattcccacctaattttttttttggtatttttgggaagagattgggtttcaccagtgttggcctggactggtctcaaattcctgtccctcgacgtgatctggcccacnctcggcctcccaaatgtgctgggatcacnaggtgtgctgttttttggttcggtttgtttggtttggtttttggctttttttttttttttttttggaaacagattttggccctgtacccagggttaagaagcagggttgcaatctcagctcagtggcacccttcggccttccagagttagcggggattccgggttgctgtgccattagtgccgggtatattttgggaatacaaagcaaaaacagagtttttggcctgtgtggcccgggcgggctctaacttcgtagactaaggtgagtcatgggcagccttcccggggggacc

SEQ ID NO: 480694 - DNA, 355 bp, Homo sapiens
caagcaggaaatcttatccacaatacaatatattttggtatatgaaactgataatatatcatgtaatgcacaccaaataagttgtgcattatctattaatttcccttctcaatgtttcagtatgtcgctacttaacaattcacttctcacaaaactaaatttttatattttcacatttttatttacacttacagttttgtctttcacattccaaaacacagcagctccttccctgatttatcaaaataaaagacaacaactaagatacagatggaatacattctttagggtcgtatatgaaaccatgtaacttctagaatgtataccggatgcgatttttcaaaatatgatggta

SEQ ID NO: 480695 - DNA, 804 bp, Homo sapiens
aaaaaacaacacaaaataaggctaagaagaggaccgggaggttgaggcatacataatgagtcggcggctgatttagaaggaggttcaggcatacggatgagccgaagccaacaggagccatggaagtggacagagcccaggagccccactgaagaggaggaggaggaagaggagcactcggcagagcctcggacccgcactcgctccaatcctgcaaggggctgaggaccagggcagatagagggcacagagccagcgatgggcagccagcagcgagggtgagggtgaggccgcacagatgcatgatgatgggagcctcaacaacttccaggagccaggcctaaagtcctggcaggtgcacccgccagccccatgagagtccacaattcaggacaccaagggtcaaacatgtccagagcaaagtgattcatctgcctggacctgtccagaggacacatgtccactgccgaaagctggagtcagttccaacggctccaaaaccgaacgccctcaaatgtctcccagcaagatgatctgagatgttcgtgcggcacacaacacaagatcgacaaaagccacgagtttgcactggatggtggtgaacgatgacaacggcctggctggtctggcctgcacctccgaaccccacgacgagactcgtgtagctgcctcttatgatctggagacggacatccatgtgccaactttcaaatctggaaggcattttcaggcctcatccagcagaaactgagctccggtcacagagaacgtgcagaaaatcccccgcaatgtggccgacatctg

SEQ ID NO: 480696 - DNA, 165 bp, Homo sapiens
ataaaatgtagtgatataattaaccagccattttattgcaatatagtactcatttaagcacttaaaaatggaaggtgtacaaagattaaattaagtgcttaaatgagtactatattgcaataaaatgtagtgatataattaaccagccattaaaaatttacttct

SEQ ID NO: 480697 - DNA, 204 bp, Homo sapiens
gctgagctcaggcactccaccgctcggctcccagagtgctaggattacaggcatgacgcagcgtgcccagacttatcatcccttttctgcagataagtcaagatgaattacctggcgaatgtcatgtcactgtacgaggtggagctgaacttgggcctaggatgtgtagctctatcttaactactgctccaggaatctaatgcg

SEQ ID NO: 480698 - DNA, 105 bp, Homo sapiens
cttttccttcctggtccagctctcacttccatcaggcgtgatagctggtttctgtttcaacatcctgtagctacagatccatttccaagcttcacacccacaatg

SEQ ID NO: 480699 - DNA, 256 bp, Homo sapiens
  misc_feature (24)..(24): n is a, c, g, or t
  misc_feature (70)..(70): n is a, c, g, or t
  misc_feature (231)..(231): n is a, c, g, or t
  misc_feature (250)..(250): n is a, c, g, or t
cagagcatgttaaacactgcttcnggcttactcaggaattcgatatctgcacagacttataccaatcacnaagataaattacaggtgaagaatggtatctaccatgcagtgaaagatcagtgtatgtgaagcagtgaatcagttggcttaattcctgacatggaataatacagagtgtaatttagagatctggcttggtagtctactctttaatgccactgaggcttgtanaatttggtcgcgaaggttngattcg

SEQ ID NO: 480700 - DNA, 263 bp, Homo sapiens
agagcagtctgcacacgtctgtgctccacggtaattatacatgtgtcaggatgtcacaaaagcaattctcctgcctcagcctcctgagtagctgggactacaggttcctaccaccacacccggacaatttttgtatcttgagtagagatggggttcaccgtatcggcgagtatgatctctatctcttgacctcgtgatctgcccggctcgggctcccaaagtgctgggattacaggcgtgtgccattgcaacacggtctctca

SEQ ID NO: 480701 - DNA, 390 bp, Homo sapiens
ggtcgacagcgtggcagcagggagccgtgcaggttgaacgcgccgttcttggcggtggccagcagctcttcgctcaacaggttgcggtagtagaacgagaagatgtagtccgggctcagcttggcaatgcgctcgatccacagaggatggttggcatcttccggggcgtgcacagtaatgcccttgcgagcacagagttgcgctacggaaccgtagaaggcgttctccttcgggtcgtcggcatgggtgaacactgcggcgatgtcgtaacctgcggcgagcaggactcgatgccggtgcaaccaatatcgtgataggcgaagacgacaactttcggattcatggtgcgacctgattggaggtagtagtagaaggggtatcaccagcagc

SEQ ID NO: 480702 - DNA, 736 bp, Homo sapiens
agcgggttcttctttgggacgggtccaggaggacgaagcgctacaaagcaagccactgtgcttactgaacgggctcccccgtgtgatcgcttaatgagaaggtatacaagagctctcagtccagccagagaccaaggccgaaaggtggtgcgggctgcaaccgaaagagtcaaggagcggatactctggctaaaggcacggacaaagtactggcatgaagacggctgaagtgtgccggctgtgactgtcgctgggagaggctactttggtgtaacgggaaagctgcgctgacttgtagtaagctcatccctgcctttgagatggtgatgcgtgccatggacaatgtgtaccacctggactgctttggcatgtcagcttagtaatcagacgatatcgtgtaggagacagaattttttcctacagaataacatgatccttggccagacggactacgaggaaggttcaatgataccgaaggttaggcaccccaggttcgctgatctatcaatcatgcatcccgagttaagaatacaaaagcacgtacattgctttatattcttatgtgggtcgcacagtgtaccattaagaatttgacgaccaggtaacgtagtggaagtagcggtaaggtataggaacggcagcgagtggatagacttggcccttgaaaggcggtacttgcgatctgtatgtagttgaaagttgcccaaggccgagttgagtgttattatttaggaaa

SEQ ID NO: 480703 - DNA, 440 bp, Homo sapiens
gacttgaggtgcatgtacgctgcgatcatgcctacgaatccagcctaggcacagagcaagaccctgtctcacacacacacacaaacacacacacacacaaaaaaacactgaacgagaacgcgcaccctcactgtacgtacgccggcccccaatgaccactcatggacagcactcatccatcctggctgacttttccatcagaaacaacagcaagccagaagcacagtagaatccccatcatgccagtcctgaaaaaacaactgtccagccataaattctatcttgccacaacactcatccctccacaaattcacagtgaactaaaggccttatcaaataaataaacactgaaaggaattcactgctagtagacttgggctacaagaactaccaaaggaagtcctttggagagaatggcaatgctactgtatgagaacttg

SEQ ID NO: 480704 - DNA, 1288 bp, Homo sapiens
ggagcagcccagcgtgcccattccagcgcccgcgtcccgcagaatgccgacgcccccgcctgctggccgcgctgtgcggcgcgctgtctgcgccccctagcctccctcgtctgccctggatatctgttccaagaaaccctctgcctacaacggtggtttatgcgaggagatttcccaagaagtgcgaggagcatgtcttcccctcgtacaacctttgcaacgtgccttaaagggctacggctgggcaacccactgtgagacgacatcgtcgtcggatgccacttggtgccaatggacgcaatggggaacatttgccaaacttcacaggatcgacccgccctcatcttgtcgcggtgtgaccctttcttgggggttaagcacgacaattaggggtccctgtgagccttgggcccggacttgaaacacgggccagggcaattggtccaaatgcccttgagatcaatcccaagcagcaaatggacgactaaaccccttgtgattccaagcgttgaaccttggtggcgggagggatcgtgggtaaacagagtgatgggtgcacgcaagtggtagccacggccgctttggcccaaggtcaactgaggtaaccccttgaactgggcccttgcaaaacggttgcgcccttcacaggacccttctacagtgggaacacccgaaaatttcggacacaccactcccaagcgacactgttatccataaaaaaaaacaacgagcaaagcgaagcttttcgagggctacaccctcggcaaaaccatacacaaacgcgcggagtgcatcgttccaaacccatgttataggaggaaacaccccctgtaattcagagcgacgcatacaagataacggttgacacactttggtacccccccaactgaaggctttgccaacaaaggggccttgcgcagcttccatggcggctttagaaagacacaagtaggggtgtagtaggaagctagacacggaaatcgatcgcacaggctccaccgtatggggcctcgaaagaaactaaacccaggcgaaatcccctgtatcgaaagaccaaaattcaactgggccatcccagaggacagggataacgaaagcaacattgtgggccttggccgtacactattcaagacgtgggaagccccacttcctatatattgcagcgggttgtgacacaaagacaggaggacaactattccaaacggccttaagtttgaccagggagagactaacgtgacacacgaatagcgagtgcaactgccgagtgtgaaccctggggactcctcaa

SEQ ID NO: 480705 - DNA, 171 bp, Homo sapiens
tcagcctccgtgacatcttcagtttattgctgcccaacccatactgaattcaccaactgggggtatatacccaacactaggctcccaccagccatatgccttctcatctgggcacttactactaaagacctggcggagcttttgccatcagcgtgcattcaccagcccatg

SEQ ID NO: 480706 - DNA, 412 bp, Homo sapiens
cggggtaaccaaagcacagcggcatgaagcccaggagccagaaatggcttcctctctggattcgtgtcacagcacagatcttcaaacttcaccaagagcaagtgaatgcccattgcaatcaacatggctttaaactccacacacgtttctcgttgtgctcgatattgaggatttggtgcccagactccagttccaattgaggctccaccaatgaccattaacttccacagccatattggacgcaaagccagcccagtacctccactgtatgatgccatccaaacgaagggccagcagcacagagacacagcagcagacaggcatagatgaggaatttactcgggttaatgtcctggaagaggcccctcaggttcatggcggagatcttcactcgtgccgtattcggcacgag

SEQ ID NO: 480707 - DNA, 755 bp, Homo sapiens
  misc_feature (458)..(458): n is a, c, g, or t
tggaaaaaaataaaacaatttaatggatgggtcttccttgaatttacaccacaatctcctaaaacaagaaggacaaatatttttctctcccatgcatcgggtcacaacgaatgttcagggaccaaaaggcaaccccaagtatacaggtggcgtggtgggtgtctcagactccacgcctcagccctcgagttctcagtgtttccaaccagacgcgtcgtaggctcaagtgacgtggtggcacacggtggggagagagagggacgtgcccagaaccccttcaagttgcaggttgagtgggacctggcaagcagaagttagtgcatgtggtgcacctccagtggccccagggtgcgagaaagtgtgccacgaggggcacagcgaaacacacagctctccaggttgcacccttgaagaacccaggtgggcctcagggggcccagctcctcccaatcagaagncgtgtccctccagggcgtggaagcgtggaggctaggggctagaaggcgctagagggctggagagggaggtggtgataacagaaccatctgcagaaaggaacacatgctgattgctggggccatagctttcctcccagacatctgagttcctgaagacccagctttatcttccaggggtaacaactattcccaagactcagagctggaagggcggcaaagtggagcccggagagaaagatcgatccatcctgaagccgctcgattgttcctcccttttggcctgaggccgaaaccgat

SEQ ID NO: 480708 - DNA, 902 bp, Homo sapiens
taggctaggtagaggctggtgtgaatcggcgagggtgcggctcctgcaggctgagatctgctggcggctgggcagcaccctcgggggtagcatgctgactccagctggtacagctttggctctggtggtggctatggcagtggctttgggggtgttgatgggctgctgttgctggaggtgagaagggcacgatgcatgtaaactcaactgaccgagctggcctcctacctggacttggtgcgtgccctggaggaggccaacactgagctggaggtgaagatccgagactggtaccaagaggcaggctccggggcccgcccgcttgactacagatcagtatctacaggacaattgaggatgtctgcagaacaaagatccgctcacagtcaccgtgcgataatgacaacatcctgctacagattgacaaagcccgtctggctgctgatgacttccgaaccaagtttgagacatgagcaggccctgggcctgagtgtggacggccgatcatcaatggcctgtcgctgtgtgctggatgagctgatacctggatcagagccgaactggagatgcatgattgatgaagctcaaggatgatgctggctaatctgaagaatgaaccacgaggaggagatgaacgccctggaaggcaagtgcggtggtgtagcatcccttgtggacgatggacgcgtgcccagcgcgtggcaccgtgtagctcgcatcctcagaggagatgcgtgagctgtatgagcaagatggcagagaataacctgggggatggccgaagatgggttctgcagcgcgatagagggactggacccgcgaggtgggcagcaacgagtgagctggttcggattggccgagtgagtctcggggctcggcgccctgcagggctggggattggg

SEQ ID NO: 480709 - DNA, 776 bp, Homo sapiens
cacagcagcagctccgcctacctctgagcccaggccccctccctccctcagccccctagtccctccctccatcttccctggggttctcctcctctcccaggctccttgtccttcgttcacagtgggggtccccgattccaatgctgtttttggggagtggtttccaggagctcgctggtgtctgctgtacatgtttgtctactgcacaagcctcggctcgccctgaccagctcggtaccgatgcgtgggctagggctcagcggtccctctcgtcccatcttcggtgcccttcacgtattcgacgcctgctattcgccactctgcctccacccctcgatccatatgtcacccactgccttcacgcacggcgcactcaagtccgtctaccctagaaagaaccatcctctcgtcgcgcacacgaacactcgctgcgacacactcgaccacgatcccctgctgctcggctcttcccactcgaccatcctagtctcccacagtgcacctcgacgcacgcttgacaccgtcccatcctcggcctgatcgacatcgcgcgctcagcacgcccatgcaacacttcctcgcctacacgacgcgctcttcgtcatccgcatagtctccccacacacaccacgccttctcacgcgccgcccacatccggggcgcagcccacaatccaactgcgcttcaaactatcgtcgtccccaaaaacaaacaacatcagctacagcggctcagcactctctcgcttgcgccacatgctctggtcacgagctgga

SEQ ID NO: 480710 - DNA, 724 bp, Homo sapiens
caagaagagtcatacagggttgcagaaattacacgaggaccttaaaggatacaatatagaggcagaaggcctttttatcagaagctttttctctaagtgagcacaacagcctccaaggggcctgtagtgtgttatggagcatgtctggtacaggcagaaaacaatggctcgcatggcacagtgtttgtagtgcttgatgctggaaatgtaagcaggataccatacacggggttcatcttgtcagtggtgtgtcatgcccttagagtgctgcaccaagagagcacactacgagtcgtccctgtacagacaggaggtaagccaagaaaggaaaccaggattcaagtggctaaatcatatgacccaagtagctcccagtagccgaagaaatcagcgaagaatgcatgtcgtcctatgttatggatgacatttgcaggtcactgagcattgctgatgccatgacttctgaaacaggtttttgaaaatctgttcaaaagacggggtcgtcggtgtggcaacatccaacagggcaccggaagatctctataaaaatggactccaagagagctaactgtgtaccattcgatagcagtcttgaaggcaatattgtaatacagtccagctagattctgggcatagattaccggaagagggcaacttgctgctgcgggaaaagtctactagctcacaagtgaagctgatgtggaggctgtcatgggtaagatgg

SEQ ID NO: 480711 - DNA, 211 bp, Homo sapiens
ccgtgtcagtgtcccggacgataaggtcctcatgcattgtagtgagatcagaaatctgctggcccgcgtagtcgctcatgttccccagtgccaacgagcctcactgaccccttgctccctgaccacggctccaccatgatcacacggccgtgctgtccagtgataacggcccactgagcaagcgcccgtggtctgggagactgctggaccc

SEQ ID NO: 480712 - DNA, 160 bp, Homo sapiens
gacatgtagatatagaacgttgattttagaaaggtcattagtttcttgttacacattattgttagatctggtttttgttgcttatcgggtttaatattgttcttgaacattgtttatgctgtgttatgtattacttttctaataaaagttgtgttataag

SEQ ID NO: 480713 - DNA, 838 bp, Homo sapiens
cgggagtcttttagtgtgtgtaggcggctatatcgcgcgagggtgaacgacctggttttcccgcggcccccgtgaattggccacaagatgtcttgacacaaaggacggccgtatcccccaggccgtctgctcgcgaaactctcccccgggggtgccccatgtggtcagttcgcgtggggcgcacacgcacaggttttgaagcaggaagcccgccaacggtcgctgcgaaacatcgggaggttccttcaaaggtgttgaccgcagaaatcttgcggtccggtaccattggggcccgctcgcggagggtgtgaacaccgcccccggtctggctacccagaaataataacatgttttcttataaaacgttcccgtgattgccccccgcatacctgctcgctccgcttgagtgtcgtgttttatacaccccctgaagctctccgtctaaaaaagattatgtctttttcgaaatacacttgagagacctcgtgcatataatgggaatatctttcccgcgacgactagtaattttcttatcaaaaaggaagtctccttccaacatgagacgcacccacgcaatgtcctcggccccgtgctatagcacggacatggtcccgggcttcaatgcttctggccacagtgtacgttctttgtttcaccccgggcctcaggcgccaccagcgatttcagaagggaagactgggggtccataaatatagagtggtaagaatacaggaaatgatgcaggttgctccaagcgccccgaagggttgacgacaggctgtaagagcccaacactctggaagaactgcgccacaaaaaaaaaacattcccccacaaa

SEQ ID NO: 480714 - DNA, 318 bp, Homo sapiens
ggtttgacattggagatacgctcgtaactgtgctaccatactctaaaacagaagaactttctgctactcaaaactgcctttttacaaaatcactgtaaatatttgtaaaataccataacactaaactttaagcccaaaagcagagatagagccatccgttcagttctggacctgctccgtgcggcacagtgccaccccatcacagtgttgctctcatcaggccacagtgaatgtttgtttatggcaaatccgtcttttgcgaatggcttacttctgacactacctttctgggaaatgctcataaattttcaatattca

SEQ ID NO: 480715 - DNA, 1404 bp, Homo sapiens
  misc_feature (311)..(311): n is a, c, g, or t
gttgcgatagaaagatgatgtacagtgaacgacactgaaccagaggatgaccttggagattatgctatggtcatcaggcgagagaaaccaagaggaatgtaaaagttccgctacatgaggtatgaaaatagctgatgagactgatgaagcatctagaagatgaagcactaggcatagaacaatgcatacatggtatctcattcatctaagtcaggtagagggcctggtatgcgccgcggctcggaaacgagactagacataggaggaagcttgctgaatcgcgtgtgcatctgtcgatgaacgcgggacanagaaagtccacgaatattgtgtgtagactgagtggacgtcacccagggacatatttcggctcgagtgaaagaaccctaccagcaaaaggttcggttctcggaagttagagagaaccagtgaagaaaggtatcctgctctgatgcaaacgtgtgtaaacacgcgcttatgcttgataaagacttggggtctcatatatgacttgtgcttagggttaaatccaaagcgtggctaaactcgaaaggggcaaagaatttcccaaaggagaaacacaggataggataacactgttctgtgacgtgacagcatatctatccaaggaacattagtggtccacctctggtccatgagcatggccggaatccacccggtgatcacaaatggtcctggcaagaaaagggaacgacagcggaacctcttagttttcccttaacaagtatggcggagaaaccattgtggtcgacgttgcactaagaaattggtccgttgttgtggcgcaagtaatgtcagaatagagccggtgctatccccacgaggctttgtgccaccggggacatagcggaagcaacaaggatgcctggtgcaccagagaacggctaaagcgtaactttcggactaaatcagggtagaagattgggaaaagacctttggttgtggtggcagcatggttgggcgagggaccaagggttttggccaatacagaggtggggattattacccaggggagtattgaaagaaccatgaatagaaacaaaggttggtgcaggaaattgtatagggtgagggtgggaggggtcctggaaagtaccttgggaaaaaaaggcgggaatgaatcaaagggtgttgagaataacttaatttgggttaatttaaaagacctggtcagaaacgaaacgggtatactggggataagggagggaccgctctccaaaagatccgtgctacaccgtctgcgacaaagcccagaaaactagaacgtaaacaaaccgggcaaagcccagaaagacacacaagacaacgacattaaccaaggacgcggaaaacaaaaacagtgaatgcacactgctgcgtaccccaggattgaaaagggaacta

SEQ ID NO: 480716 - DNA, 1044 bp, Homo sapiens
caagaagtgaacatgaatgacattccagatggacatagaattctctctcttgactctttgaccaacatggtacttaaggggtttcttctttcccaatgtactgtactgtgccctgcatgctgggccttacttgatagaatgaaagcatccgagcttccctaatgaatctggctagttctgtggtctggcgtgaggatactggtagctgtgggacatccacctctcgtgatccctcgagcagtcgcgacgaaaatcgctttcagtttctgctgtttctggagatggtacttctcgctcctggttttcctgcccgggctcctatggttttgagttttcgtagtggtctgctggtactccttctccttctacgtacatgctcggttggtgactctgttcccgccgtggggcagtccttttcttgttgttttccactctcctttcctcttccatctgatagtggcattcaagctgacttgctcattcaaactgttcacggattctgacatctgccaagcgttgcgctgcttgtgaatgggctccacccttgaataagggccacagtcagggtcaaattttccccactaccatggaatacttgcaaatattcacatcgacaccacgttctacgtctagaggccgaaattatatttcctttatattcaaactaactatatggacgcaactaataagtaccatcacataaataacgtttattgtgggtgcatgtgacctattctccggttattttatatccaccttcgagttagggctttctagcaaacgtgtctggtctttgcgagtcactggtgatcctgcgtggtggtcagttgctacgggtactggatcccggggcgctcgcgttttgccgaacgaacaccgggtgtacctggtttgatctggccgcaccaagtacttgtttagaggaaccgggcgggctagttaccgggcccttccgcacccttttaaggccacggggttaagcgccgccctggacactgctttgcttggtggtgccacatcattgctgtgtgccgatccacccta

SEQ ID NO: 480717 - DNA, 261 bp, Homo sapiens
ttctggtgtatgagcttgcgagagtagcgcgtgcgagcgagctaccatcagtgagattatgcgatgcgcgcgtataagtcggcatgacgcacaggcggaccgagcgtgtagcgtgaggggaacccgcgtggcctcgcatatcgcgttcccttctctgtcccctccgcggtcccccccgccccctgaacagccccagggcgggggggagggcgagagctcagtacgaagcagctccctgggtccggtgcggagtgcccttag

SEQ ID NO: 480718 - DNA, 807 bp, Homo sapiens
tggtcgcaggtacggcctccagtgtaggtctctggtgcgggacgcgctattgggtccgctatggggaggccctgttgggtacggtcgtattagtcggtatggctgtcgcgctctggataggagtgaacccccctgggggtttctcgcgtatggtgttaccctcttctgtgcactgcgtaggcgcgactgtgccatgcgactcgatgctgggttagtatctgagtcatgtcgtcctcgaatccggggtttgttggatatacctagacacttctgcactcggtagaacaggtagtcgctaaccaagtgttaaggcccctataaggcctgcaaggcttcctcccgcctacctctttccgcccccgggtggtgactcgtggcacgacggtggccctggtggcatgcgggtgatggcaatgaggtggcctcatggattcgtggtggtcctcggtggacatgtttcatgaggtggtccgtggtggagatcagacgcgtggcgttccgctggtggtccggggcatggatccgaggtggatttggtggacggaacgacgagttggaccctggggggtccccctggacctttgatggatacagatgggaggaagaagaggaggacgtggaggacctcggataaactggataaaggcgagcaccgtcaggagcgcagagatcggccctactagatgcagagaccccgcagagctgcattgagctaccagattcatcgtctttaaacacgagaaaatgttattaaattgtactaattcctatatttatcaatgttggccacaacattatcgtctattg

SEQ ID NO: 480719 - DNA, 109 bp, Homo sapiens
acatgacccaagcctcagttgtattggggtcgacgtgtatacaccacatgcggtgatgcctccctgtactagttccgtcgacacgtgagcacctgtgctgacctccaaa

SEQ ID NO: 480720 - DNA, 316 bp, Homo sapiens
tcttcatagtaaagcgatcacagcaggctggatatgaccctcacgcatcgttaacaagcacataaagtcccaggaaatcttagctttggatccttattgcacccttaaatgttagaatgtagcagaagaatatacagtggtactctattccttatatggagttgttgaacacagaggtactatgaggtcggggccttacactgcctatgccaaggaaagaaccgcaactcgtcatctctctaatcttgtacttctcggtgatataccacaagattttgaaatggaatcaaaagggcagtggttacacattatggcg

SEQ ID NO: 480721 - DNA, 178 bp, Homo sapiens
tgggtgactgaggatcgaatgacgaacacacacatactagaccaactgggatagatacccactatgcttagcctaaactcacagttaataacaaactgtcgcagaacactacgagccacagttaaaatcaaaggactggcgtgcttcatatcctctagaggacctgttcgttccattt

SEQ ID NO: 480722 - DNA, 389 bp, Homo sapiens
  misc_feature (20)..(20): n is a, c, g, or t
  misc_feature (29)..(29): n is a, c, g, or t
  misc_feature (137)..(137): n is a, c, g, or t
ttttccttaaatttgccatncgtggatanttagcccttatttttgtaaatttataagtcctatggccatagtttatcaaagacccctaaaccccatgattttttaaaataaaaatagaaaccggccgggtgtggtgnctcatgcctgtaatcctagcactttgagaggctgaggcaggtggattgcttgaagcccaggaattcaaaaccagcctggccatcatagtgaaaccccatcactactaaaaatataaaaatcagctgggcatggtggggcacacctgtaatcccagctacacaggaggctgaggcacaagaatagcttaaacccgggaggtggaggttgcatacagccaagattggccactgcactccagcctgggagataga

SEQ ID NO: 480723 - DNA, 871 bp, Homo sapiens
  misc_feature (127)..(127): n is a, c, g, or t
agcggagctgtgggcccgggccgtcgtgggctccgtgcttgcgtgcggagatgagcgggtccctcggccgacgctgcgcgcggctctgctccgctgggggcgcggcgcgaggcagcaggatgagacntctgtggggtgactcacagatagtgatcagcgcatgagatcgaagcaacggaccaacggcagcgaagataatcaacccataacatgaggcaacagccagcaagcaaagcaccaagcatgcccagacattatacagacaaaccgcacatgaagcatgcaacaactcccatgagggcagtgacacaccagaggccgctcacagcggtagatatcaacaacaagcgacagaatagcaagaaacgcaatggaatgagaccagagccaccagagatacgcgatcacagaacgaacatgaggccacaattagcaacacgatagcataattcacagatcaataggtaagacacccaacagcagtatccatccaagcacaacagggatggtaacacactctccagagaaaaatgtaagagacaccagaatatactaaagagatagcacaggcacggggcagcaactaggactgacgacacacgcatgcctcaacttacactgtctaggacgacgacaaaacttgacagacaccagaaggaaagacaactagcagagacacaaaacctttaaggcgtgatacaactgcacagcggacaaaaccgcatggacaatcaaccaaactcacactacgtaatgtcggagacaagctgtacagtgtcatccaacggatcatcacactaacatcaatattagcgcagacgcagaacacgtagaccaagacaacaacgcagacacactaacaacgcagact

SEQ ID NO: 480724 - DNA, 677 bp, Homo sapiens
  misc_feature (385)..(385): n is a, c, g, or t
cgatgccctaaaaagccccctcctagtagtaactaccggactcctacccctcacaatcatggcaagccaacgccactgtatccaggtgaaccactatcacgaaggaaaatctctagctctctaatacgtaagtctcccgtacaaatctccttaagttgatagcattcagcagacacagaactaatcatatcaatatcttcttcgaaaacacgacttatgccgcgactggtatcatcacccgatgaggcaaccaggcagaagcctgaacgcaggcacatacttcctattctacaccctagtaggctcccttcccctactcatcgcacgtgatttacactcagaaaaccctaggctcactaaacattctactactcactctcaatgnccaagaacatatcaaatcctgagccaacaattaatatgagtagcttacacaatagctttaatagtacaagatacctctttaggactccacttatgactcccctaaagcccatgtcagaagcccccatcgctgggtccaatagtacttgccgaagaactcttcaaaactaggcggcctatggtatcatacggcctcacacttcattctcaacccctgaaaagacaatagctaacccttcttgtaatatccctaatgaggcatatttataaccagtccatctgctagaaaaaga

SEQ ID NO: 480725 - DNA, 185 bp, Homo sapiens
atgggcattgtcagggaagctgcagagttattgaaccacttggacaccttaccctgtgagtccaacaacttggcccccatgtagagctgaatggtgtcacccttgatggcaggatacagaatgtcaaactccagacggtcaatgctgggggaaatgggcactggtcaaggacaagaagcaagttc

SEQ ID NO: 480726 - DNA, 318 bp, Homo sapiens
ggcggtgaaaggattcaccattctggaaaggaacttaagagacggcgaggaacataatgagacctcacttctacaaaactttttcaaaattagctgggcatgctggcacatccctgtagtcccagttactcagggggctgaggtgagagaaccactttagcccaagaggtcaagagtgcagtgagctatgatctcaccactgcatcccaacctgagcaacagaatgagaccctgtctctcaaaaacatagccaaggccaggaacagtggatcatgcctgaggctgaggcaggaggaccacttgaggccaggagtttga

SEQ ID NO: 480727 - DNA, 181 bp, Homo sapiens
acagttgataggggataatgaccagtttccacttcccaagctggctgcggaacatctgttacaggcaaagatgatcgtattgtcaggacctggccttgctatgagtctcagaacttactccagcaaaaggactgtaaacatggattatctgtcgcttctaagggatgcccttggtacagcc

SEQ ID NO: 480728 - DNA, 493 bp, Homo sapiens
acgtgaggctcagcagagtttaagacacatagtcactattcaccaattaaatgatgaagctgccatgtaaacagtatatcatcacactcccgagcacttcttctccagtagtgtaaacaagcttaatgagcatgcagacactaccatcataaaattatgtagagacatacttgagagttacagtttaaagacaaacaaggtgtcatcatttggtaatacgtagcattaacatatgcttgaaaccttctgctatatatacagtaagattaatttatactaacaaatatcttgataatccccctgattcccagactccttggaatagctccacagctatcagtggttctgacaaaggttcagagccttcccagtactgacttcttatttgagaggtgtgctaagagctatcaagcagaaggttcaattgtacacagattggaagtttaggaaaaagtcatatcttccactaatatttagtcaagcatgtagaggt

SEQ ID NO: 480729 - DNA, 117 bp, Homo sapiens
  misc_feature (99)..(99): n is a, c, g, or t
ctcggtacccttatgtttttctatcctcagattcactgattcttttcctgtttgcttcattctgctgttgagcacatccaataagtttttaacttcagnttagtgtacacatcaatt

SEQ ID NO: 480730 - DNA, 143 bp, Homo sapiens
tgcactagcaggcatcccgggggcggctcctcggtccagtctcagcaatctccagtccggatctccagtcctctagcacatctcccagtcccagcacatctgcccagtcccttccagcacatctgcccagtccggggtcaccg

SEQ ID NO: 480731 - DNA, 175 bp, Homo sapiens
actggaatttagggactagaatcagattcagaaatccctagataataaaactgaaatcattattattttgtataaatatatctacattacttgcttatttaataaaggaatacatttttaattttctagagctattatacatgaaactgttgcttatggcttttcgctttactta

SEQ ID NO: 480732 - DNA, 173 bp, Homo sapiens
  misc_feature (2)..(2): n is a, c, g, or t
  misc_feature (132)..(132): n is a, c, g, or t
angtataacgggaagagatcaggactcgctgtgggcagagataaacgagtgatggcacctattgtcctgggctacaagagctcgagctggaggcgaaccatcaccctgaaccctggcttcagctgatctgancaatagcagctgcccatccccatcccacacagtacagcgca

SEQ ID NO: 480733 - DNA, 786 bp, Homo sapiens
gaaactcggtggtggccattgtgcagtaccatacttcgctcgtattcgtgcgcctcggcttcggcttgtttccttcgcgcaaatgcatgtcatgactagaatccccgagtatgtgctagcattgatctgcacgtaaaccttcgatatacgttcgcaaacttggaacagaacgacttaggaggacgtcacaacgtagtacacaaagtcttgatctgacccttccaagagagagacgtatggaactaggagcaagcaaggcacggacgtaatcgatatagtgaggtgcgttgcgaccgcgcgaaatagtgcggctgataccattttgccatcaaagccatatgcgcctttctatactgatagccttttccctttagtcctgatttagacctcctgtgtaagactgcaaacgtaggttgtgcattcacatgttgtgaaacatgagctgtgccttgcccctcgttttccagcaattcgatgatgcatagcttagcgtgggaactagacttgcagatgggcccggcgccccttggtccggtttgcgccgaattctggctcataattcttgaattccctgggcctgagtcgaacgagagaacaccgcgcatagaaggataactattgtccacttgcttaggggtttggaaaatgggtcacgtaaaagattgcgggtctcgaggagaggcaaagattgagagcgttgcgcgaaacgtaactgtgtcgcaactggttccttaggagggttaaggaccccccaaaggcgtgtccacccaataggttgttcccttg

SEQ ID NO: 480734 - DNA, 218 bp, Homo sapiens
caggacaggttgctgaggttcagcagatactgcggccagcagaaaagctggtgacaagcagtacctaagcagctgggtgacttctggacagcgcgattgaggagctccgccaccaagcccggcagcagggggcagaggctgtccaggcccagcaccttgcggaaggtgccagctgatgcaggcattgagtgccctagagggatttgccgaggtgcagt

SEQ ID NO: 480735 - DNA, 596 bp, Homo sapiens
aagctcattgcgatggaattgacctccaaaggttaaccaactgtcccagctgagaagatgacgcccatccgggtgctgtctctctattgatggaatcgctacagggctcctgtgtgctgaaggacttggggcattacaggtggaccggtactttgcctcggaggtgtgtgaggactccatcacggtaggcattgtgcagcaccaatggaagatcatgtacgtcggggacctccgcagcctcacacagaagcctatccaggagtggggcccattcgatctggtagattgagggcaatccctgccatgacctctccatcgtttaccctgctctgcaagggcctctactagggccctggccgtcttttctaagatttctacctgtctcctgcattatgcgcggtccaaggcctgagattatctccccttcttctggctccttgacgaatgtggtttccatagctgatactgacaatagggacatatctcgatatctcgagtccaaccctatgatgaatgatgccaaagaaattttcaatagacacatggcccgctacttctgtggtaaccttccctgtattaaccgggcgtttgcatcc

SEQ ID NO: 480736 - DNA, 768 bp, Homo sapiens
  misc_feature (31)..(31): n is a, c, g, or t
  misc_feature (69)..(69): n is a, c, g, or t
  misc_feature (73)..(73): n is a, c, g, or t
  misc_feature (84)..(85): n is a, c, g, or t
  misc_feature (93)..(93): n is a, c, g, or t
  misc_feature (112)..(113): n is a, c, g, or t
  misc_feature (115)..(115): n is a, c, g, or t
  misc_feature (119)..(119): n is a, c, g, or t
  misc_feature (122)..(122): n is a, c, g, or t
  misc_feature (129)..(129): n is a, c, g, or t
  misc_feature (139)..(139): n is a, c, g, or t
  misc_feature (146)..(146): n is a, c, g, or t
  misc_feature (154)..(154): n is a, c, g, or t
  misc_feature (177)..(177): n is a, c, g, or t
  misc_feature (200)..(200): n is a, c, g, or t
  misc_feature (203)..(203): n is a, c, g, or t
  misc_feature (208)..(208): n is a, c, g, or t
  misc_feature (249)..(249): n is a, c, g, or t
  misc_feature (268)..(268): n is a, c, g, or t
  misc_feature (386)..(386): n is a, c, g, or t
  misc_feature (513)..(513): n is a, c, g, or t
  misc_feature (603)..(603): n is a, c, g, or t
  misc_feature (613)..(613): n is a, c, g, or t
  misc_feature (617)..(617): n is a, c, g, or t
  misc_feature (659)..(659): n is a, c, g, or t
  misc_feature (670)..(670): n is a, c, g, or t
  misc_feature (686)..(686): n is a, c, g, or t
  misc_feature (698)..(698): n is a, c, g, or t
  misc_feature (753)..(753): n is a, c, g, or t
gggggtaaaggaagagtccagggttaagganttttcattctgccttggcaacaaaaggacaaagaaganaggnaggagggttgnncgggtagngggcctgggggttaggggnngntggnagngggggtnagtgcgatgnagcagcntggttttngctcgggtgggcaatgagtgggntggggggggggtggggccatgangcncaggntctgagcccacatctgggaccagctctaccaagggcctgtngggcccacacaagcttgcntgttcctagttaggctggtaccggcacctcctgaaatgggtcaccctccggttcctgctcagcagctctgagcccttttccagcctcttggagggaagtaacaacaacagcatctgcngaggagcacacggttcaggctccatcaatgacggtgatgtcgaggggccccagggctaccctccacctcgagttacctttgatcacaactagggcatctttctggctgagttaaggtgagaacagtnccctgaagcctcccccaaataagttaaaagtgctctactgtggggtctggaaagaagaaagcaaaaagcagcctattcacgttcacagtngaaaaatgtnagcnaaattgtaaacctgctcaaagaaaattctagaaaggcctctncccctcctganataccttccctatganaggaatccaganacccaagttaaaaagaaactgagcccctgaatctgattttggtcgagggatcgtnggtcagaaatgcata

SEQ ID NO: 480737 - DNA, 129 bp, Homo sapiens
  misc_feature (38)..(39): n is a, c, g, or t
  misc_feature (87)..(87): n is a, c, g, or t
ggaggaacagcgggattacgtcttctacctggccgtgnngaactaccggctcaaggaatacgagtaggccttaaagtacgtccgcgngttgctgcagacagagccccagaacaaccagccaaggaactg

SEQ ID NO: 480738 - DNA, 888 bp, Homo sapiens
agcggaacagcagcggtggctgctgaggggacaggaatcgcctccgcttgcaggcgttacctccaacttgcttctccgcccagctacaggcccccgccctcgcgccccagcgcggtgtccgagctgcatcggcatcgcctgagagccagcccgcaagagcgccggagcgggtgcgggctcctgcccgggttcagatccttggccatctccccccgcgcggaaagcgggagcaggcgggcgggagggacacgcgagcaccgagagcgcgggcgggacaaagcggccatagaataatcccggggtcgggggcactcagggtgtccgctgggggttccaaggatcaccaggttgaggagtacagcaagcatgaacatcccgggacccacaaggggaaaggcagggaaatcacgggcccgagaggaaggcagccacggagtcgccgcatcgtacaaggacaagtagtgcactaccgggataaggcaggaaaagagcacgcacgaatgggaggcgccagtgggagcggcctggaaacacctgtgtcagggggagaagatcaccacgcaagtttcgctcccagaagatgggggcaccacaggagggaacatgagggggcgaaagacggcggaactacgggcacaggccgcacttccgccggcccgtccaggggaccaagcggcgccaaacggacggagaaaagcccaacccaaggacctcatcggtgacggcccggaccgttacgagcgatcacagatgcgacaggcccgccatgcaaacagctaaagaggatggcgacaaggtagcacaggggggaacgggggggaacgatggacggcggaaggaaccgaaagcaacacgaacggcaccgcccatgcggcgaccttcttccat

SEQ ID NO: 480739 - DNA, 503 bp, Homo sapiens
  misc_feature (58)..(59): n is a, c, g, or t
  misc_feature (158)..(158): n is a, c, g, or t
  misc_feature (178)..(178): n is a, c, g, or t
  misc_feature (203)..(203): n is a, c, g, or t
aggggggggggcacaaattgggccgaccccgccacttttaaccgaaccggggaaaaanntggccgggagggctttctggacaccctgggggtttttccccgggccggggggcggctggaaggggccaaaacctggggccgttttcccggggacctggnttaagaaatgggcccttccnattttgcccgggacctggggggggntttgggggggcccaaaggcagttaccatggccgcataaattccccggaagggccctccgacatccccgatttaaaaaaccaaaaagggttttagaaacccccgggaactttgattttcagttcccgaaggttcttcaggggcccaaatggcccccccccaaccccccccgcttttggagtttttttttaaaaaaaaaaggtttttaaaaaggcctgcctctttaaaggaaaaaaaagccttcccccccccccggaaaaggccctttaaatcattttttaaaaattttttttaaaatggta

SEQ ID NO: 480740 - DNA, 688 bp, Homo sapiens
gcttgagcccgggagacagaggttgcagtgagtcaagatcgtgccgctgcactccagcctggcaacagagcgagactgtccccccccaaaaaaaaaagagagagactgcattcaaagaggaccaagactacagtgaaattaaaactgtttggctgggctgggcatggtggctcacacctgtaatcccagcacttggggaggccgaggcggttggatcacctgaggtcagaagttcgagaatcagcctgaccgacatagtggaaccctgtctttactaaaaatacaaaaattagctgggcatggtggcggcacctgtaatgccagctcctccagaggctgaggcaggagcaatgtgcttgaacccagtaggtggaggtcgcagtgagccacagtgtgcgccatgtgcacctccagcctgggcaacttgagtgaaactctgtctcaaataaacaacactaacccttaacacacctattggtgactttggtcttccattcagtttggaaacacgactattggcaaaagtacagagttatcttcagcaatcacttcacaaccttagatggtacccacgagtgacaggagatctggtctggcacgatcattattagatgccacaaggagaccacgtgtgattcctggtaacctattggggaaaagacctaatgacctatatgcattctgtctg

SEQ ID NO: 480741 - DNA, 178 bp, Homo sapiens
agatatgaagtccttgagagcggattatgatgcgactgtgaatgcgtacgtagtatgagtatgctaggcagaatagtcatgacggatgtaagtccgtgggcgattatgacgaatgacctgcgccggtgaagctacagaggaggattaggatgagaatggctgttacgccgatgcggga

SEQ ID NO: 480742 - DNA, 133 bp, Homo sapiens
  misc_feature (12)..(12): n is a, c, g, or t
  misc_feature (33)..(33): n is a, c, g, or t
actctttcccangcgtttgtgccattaggacanatatcatcagtgggcttgttgtaaatgtaacccacgttggtgaacatggtattaaaagttcgttttggccatacactctgaagcagcggggatcctctag

SEQ ID NO: 480743 - DNA, 978 bp, Homo sapiens
  misc_feature (5)..(5): n is a, c, g, or t
  misc_feature (9)..(9): n is a, c, g, or t
  misc_feature (12)..(12): n is a, c, g, or t
  misc_feature (31)..(31): n is a, c, g, or t
  misc_feature (38)..(38): n is a, c, g, or t
  misc_feature (58)..(58): n is a, c, g, or t
  misc_feature (65)..(66): n is a, c, g, or t
  misc_feature (77)..(78): n is a, c, g, or t
  misc_feature (80)..(81): n is a, c, g, or t
  misc_feature (89)..(89): n is a, c, g, or t
  misc_feature (95)..(95): n is a, c, g, or t
  misc_feature (97)..(97): n is a, c, g, or t
  misc_feature (107)..(107): n is a, c, g, or t
  misc_feature (110)..(110): n is a, c, g, or t
  misc_feature (117)..(117): n is a, c, g, or t
  misc_feature (120)..(120): n is a, c, g, or t
  misc_feature (133)..(133): n is a, c, g, or t
  misc_feature (138)..(138): n is a, c, g, or t
  misc_feature (156)..(156): n is a, c, g, or t
  misc_feature (159)..(159): n is a, c, g, or t
  misc_feature (164)..(164): n is a, c, g, or t
  misc_feature (183)..(184): n is a, c, g, or t
  misc_feature (187)..(187): n is a, c, g, or t
  misc_feature (193)..(193): n is a, c, g, or t
  misc_feature (198)..(198): n is a, c, g, or t
  misc_feature (214)..(214): n is a, c, g, or t
  misc_feature (219)..(219): n is a, c, g, or t
  misc_feature (235)..(235): n is a, c, g, or t
  misc_feature (237)..(237): n is a, c, g, or t
  misc_feature (244)..(244): n is a, c, g, or t
  misc_feature (248)..(248): n is a, c, g, or t
  misc_feature (267)..(267): n is a, c, g, or t
  misc_feature (271)..(271): n is a, c, g, or t
  misc_feature (281)..(281): n is a, c, g, or t
  misc_feature (300)..(300): n is a, c, g, or t
  misc_feature (303)..(303): n is a, c, g, or t
  misc_feature (321)..(321): n is a, c, g, or t
  misc_feature (329)..(329): n is a, c, g, or t
  misc_feature (332)..(332): n is a, c, g, or t
  misc_feature (334)..(335): n is a, c, g, or t
  misc_feature (363)..(363): n is a, c, g, or t
  misc_feature (383)..(383): n is a, c, g, or t
  misc_feature (387)..(388): n is a, c, g, or t
  misc_feature (391)..(391): n is a, c, g, or t
  misc_feature (412)..(412): n is a, c, g, or t
  misc_feature (424)..(424): n is a, c, g, or t
  misc_feature (456)..(456): n is a, c, g, or t
  misc_feature (465)..(465): n is a, c, g, or t
  misc_feature (471)..(471): n is a, c, g, or t
  misc_feature (519)..(519): n is a, c, g, or t
  misc_feature (547)..(547): n is a, c, g, or t
  misc_feature (549)..(549): n is a, c, g, or t
  misc_feature (639)..(639): n is a, c, g, or t
  misc_feature (644)..(644): n is a, c, g, or t
  misc_feature (651)..(651): n is a, c, g, or t
  misc_feature (700)..(700): n is a, c, g, or t
  misc_feature (784)..(784): n is a, c, g, or t
  misc_feature (796)..(796): n is a, c, g, or t
  misc_feature (820)..(820): n is a, c, g, or t
  misc_feature (877)..(877): n is a, c, g, or t
  misc_feature (890)..(890): n is a, c, g, or t
  misc_feature (948)..(948): n is a, c, g, or t
tagtntaancanttttatttcaagggtattnaaaaaancaaaaatgggggttcaaaanccaaagnngaaacatttanncnncaaagccncagaantnaacaaccaantgnagaccangcntcccaaatccagncttcnttgccatttttcaaaacntcngaganccagtattaaaccgccccnntcnaaatgnaaagntttagaaaaggattgnacacntgtggaaaaggggttncngaaagcngtcnaacaaaaaaaaagaagggntccnatccaagaancagcagtgagggaagaaanaanaaacacccaccaagaaancaatcatncantnnaaaaaaaacagaaccagggccgcccccngtcaaaaaagagaacatggnaaanntanttttaaagacctggggaaaanttcacccccccncagaggccctcaaccccacctaaagagatttnacacacagnaaccancaggattcaccgaggaaaaaccccagggattaaccacgccccccaaangggccaccccaaagaggaacagggtacntntgaggaaaaaagctgccttggtaacttccctcaaatgtttattttaaataaaaatggttgatggaaatattttttaaaagaactttgggnataanatggcanactgcccatcaaacaaaaaaggaaataaaactttctttccatttataanaagttttccacctttactatcaagattacaacttattgaccttttatgcttgcttggtttttttgactgcctaatccaatgttnaaatttttaagnctgcatttcaatgtagtaggggtnatttttcaaataatcttcagacccagaatacagagcaactctcagaataccagagcnacactctcaagtnatacttttgaacccagaataccagaataccagacttcagaacccagaataccagagcnacactctcaagtaatacttttgaccacaat

SEQ ID NO: 480744 - DNA, 341 bp, Homo sapiens
ggatgacattcaaaaaatgaaaacaagtgttggcaaggatgtggaagaattggaacccttgtacactgtcagtgggaatgtaaaatggtatagctgctatggaaaacaatatggagattcctcaccaaattaaatatagaactatatcacccagcaattctacttctgggaatttatccaaaagaattgaaatcaggatatagaggagatatttgcactcttgtgttcattgcagcactattcacaatagccaaatgtgggaacaacccaaattctatctgcagatgaacagataaagaaaatttggtttttaccttccattggactttttttcacccttt

SEQ ID NO: 480745 - DNA, 1101 bp, Homo sapiens
cggacgcgtggggttctagatcgcgagcgccgcccttttttttatttttttggccgggcaataaatatttaaattggtttcattattaatgatgacaaataattttcaagtttaattctccttattataaatcacaaagctaaaccacaaacgaggtataatcaagaacatgggtgtctcactattacactcccatcggaatcctcttccaattggcgtgaccacgtgaccaggcatagcgggggggtgggagggaagactttctaaggtagcaccgtcgtgaggcccgagggtggggtagggggggaatcaaagacgaggacagcctcatcttaccgtgtctccattcacatttataccgtgggaccaggggtgggcaggaaacaccaggctcagggcatccgtgagcccgggcccccgtggacgtgaagggacacgggtgtgaaaatcagtctctgatgaagggcgggagcgaagcagtcacctattcctccgtgccttcacagtataaggtgaaaaccttagccatatcctggatcccgggggggctgccgggccctgtgtgctcccttgaacaccggggtgcctaactagaggctggcagcagcggccggggtacaggggtccggggctcctaggttcacacctaagctacacagttgcgtactagcaggaggacacggggtgtctggataaacaacaaggcatagacagaagtttttggacatttcagaccaaaaggaattagggtgcaatgggtgaaggatagtcagataagaaatatggtcccaattaaaatttaataaggatagaggtacatatcaatgtctctctaaaaagtcaaaacaacaacaaaaaaaaaaacacaacacaacactccacaaagaaacgcgtaagcggccacgacaagaagaagagaagacaagaagaaaagagatggggacaagacatccgagaggaaaaaagaaagcccaagtgcaggaacaaagaaaaacccgggcaacgaaagaactaggtccacgacacacagggcactagagatcctagagtcgggtggaagtcaacaccacagaacatcgagaggcaaaagctaaaaagaga

SEQ ID NO: 480746 - DNA, 1487 bp, Homo sapiens
gcacgacaactggcacctcgcaaaggggacaggacaacagaacggacagacacacggtcactcagtcctcgagacctcagcgcctggctgacagcgcagacgaactgtacttctggctgctctggcccatactcgtttgacatcccttcacactgcacgacctttctggtcccatggtacactgaactctcttcctgtggcaaacgcaatacgccattcctgtccgttgtctgacctggcctgcgcgcactgacacggctcaaacgcgccaagtaccctgtacgcactgcaactctcgtctatctcgatcttactgcgcctggcgcttactgggctgtgcgtcccctaggcgccccacgctgtcacttgtcttgcggcctctccacgtcacgcgtgttggctcacttcgcgggcgcgcccctggagggcccttactttctaccctgcgtgctcgctcttaccctaccactttccaggataatgtctttcccctggcggtggtcctccaatgctactgtcgtccatgtcggcatacgtctttaactgctagtaatcctgctacagatcgagagctcgccacctccagatagcggagaaccccccttggtggctgtcagtatcatcccctccagcggctcttcccagatcgtcatgtgccgccctcgttcccgtcgttcgctgcgatcggtcgctcccgccctgcccgcctatcctgggtgcccgcgcctcctcgggtatcctccattttccctgcgatccgtctcggtccctcttcacaccgcttctgtgacacggacaggctgccacactctttactccgggcaggtgtggcctcccagcctggggctgcaacccttgtcattgcggcacaacccgcccggctgacgcttctatgggcgctttctccgtcatggctctgctcccgcctcatcctcgcctgtaatgagctgtttttccccgcctccgcgctcccagctgtttactctcctttggggcgaaatcctcatcgctgcgcgtcctgcaatcatcctccatatccgctggggtctcgccatcaccgcggcgtcgctgcactaacatcgcgtcggtctcgttgcgtcgctgcgtgactttttctttgtgtcctcacccccggctggcattgggggtcggcaacctattaccggggcgctcatccgtcggtcctcgtccccctattggggtgccttgggctcaagcacagtgcgcccgtacgctcagcggcgcaacgagcatgttactcacacgtccctactgttttccttcttacgcatcgagtggcacatgtctatcacaacctttgctgtgatgcgtgtggtcttgcccctacttttcggggcgtctgttcttcttgtcattcagagccgtgttttgtcagtcaggcggctgaacactctcttgactcctgcggtcctcgctaccccttgacactttctgtttccgcgcgcacctacctatttgtggggcct

SEQ ID NO: 480747 - DNA, 453 bp, Homo sapiens
  misc_feature (289)..(289): n is a, c, g, or t
ctcgaggccaagctcgacctgccggccgacctcggtggcgaccgtcaccaccccggcgaacggggcagcgatgtggtccgggttggcgcggtcggccttctcggcggcgggcacgtcgatggcgatgctgcggtcgcgcaccaccaccggtcgcagctgcccgttgagaatgcacatcacggtgcgcatgccgcgttcgtcgggatcggagatggcctccaggccgatcagcaactccacgccgcgctcgagttcgacgcggtgttcgtcgccctggcgtaatccgtanaagaactggttggcgctcagccccgaggtgtcaccgtactgctcgcggtgctcctcgagctccttggtcggtcccgggaacagcagccggttcagcgccgcctgccgtcgcgcgcccggggcgaccaacgctgcttcgtcctcagcggtcagcggctgctccgg

SEQ ID NO: 480748 - DNA, 682 bp, Homo sapiens
tgcagtggctcaggcctgtaatccccatactttgggaggcagagatggcgtggatccctcaaggccaagaatttgagactggcctagccaacatggtgaaattgcatctctactaaaaatacaaaaattagctgggcatagtggctcatgcctgcaatcccagctactcaggtggctgaggcacaagaatcgcttgagcccaggaagtggaggaagttgcagtgagctgagatcgtgtcactgcactccagcctgggtgacagagcgagactctgtctcaaaaaaattaaccaaataaaataaacactacaaataaggaaaatgctataagcatacagttatcccaacttattatcactagtgaaccaccttaaaaacaacttagacaaatactcaatgtgagctacaagttaactaagtaggatatccatctgaggcaaatatagtacagccattaaacataagcttattcgataactactctttaacgacacaggataacctgggtgtggccagtgtgtgcgtctagttaccagccatttgggaggctgaaggcaggaaaatccctttgagctcaggaggtctgaagccagcctgggccacacagtgagactctgactctaagaacagaaatcagcacatggacactaacactatacgttacgatttttaaaaacagttc

SEQ ID NO: 480749 - DNA, 146 bp, Homo sapiens
agttcaccaggatcccgacgatcaacgccgccggacacacagtcttgtggttccggggtcgagtctggttgcctaagctgaaagttaacaggtaatagacggaagaggcaccaccaggtagtggagcctgcggcgttggatgcagt

SEQ ID NO: 480750 - DNA, 364 bp, Homo sapiens
cggcgctgccaactgcttcatgtgagctgcgcccaggctgcggtgtaatgatgcagcctgacgactgccttttgtggtcttcattacctgctttcggcacaagattcctaaatttgagcggtgcaggggccttgcaagcatcactgcgggcagaacagtcattagcaagcatagaacgggcgctttcttaccaagtgtggaaagtggtcaggctcaccaccgaagaccttctattaagtcaactttgatgatggctccttcagcgacaatctttatcctgaggacatagtgagccaggactgtctccagtttggtcctcctgctgaaggggaagtggtccaagtgagatggacaggacgggcaa

SEQ ID NO: 480751 - DNA, 373 bp, Homo sapiens
  misc_feature (7)..(7): n is a, c, g, or t
  misc_feature (33)..(33): n is a, c, g, or t
  misc_feature (59)..(59): n is a, c, g, or t
  misc_feature (73)..(73): n is a, c, g, or t
atggatnaagtttggagtgtccaggagttaggnaggggaccaagcttttggaattgganggtttggggccccnctttggggttaataaaatggccaatggaaatggcccttctttctccctcatatatactgataaggtcctaaaaaaaagaaagaaaaaactatgcaaaaatagcatttgaacaatcccttgcatgatatgacttcatttcaaaaacaatacattcttctctaaacagaaaagctaatgatttcatttttctgaaatcattaatttttctaagaccactgcttagccttacaaaagtagtctaaaggaaaaaaaaatattttgccaaaacatctgctttaaactttaagagatagtaggcaa

SEQ ID NO: 480752 - DNA, 1765 bp, Homo sapiens
  misc_feature (1138)..(1138): n is a, c, g, or t
  misc_feature (1622)..(1622): n is a, c, g, or t
  misc_feature (1765)..(1765): n is a, c, g, or t
gaagtgggaaacccatactctcaaaccaacctcagcatatgcatgaatggagcttaaagatccaaaccaatagagcgccatattcgttgtagagctcacgcattgtgaagccagggagcaacaagcaagtaaatggccgttaccggaacagatatcctggatagtaagtaacacacaggacctatatatcgtgagcgacgtctgtcatatacctgtgagatttctcctctggattgatggtacatcaacggaagactcctgatcatgtcgtgcctgtaagtataacctattgagacatcttcatcctcgtcgaaatatgtgcataggtacggcaagttttaccccatatgggcagcaatcgaatctttcacatttacgcttgtgagtcggccgtccataattgttccgtcaagcaattgaatacaaagtgaggagacataaaagttataacgggagtcttgcattgtggccgatcgaaaatatctctcagacggcagaattaccaccttgttttcgccacgtcgggacaacgggcaggcacttggtggcccaattgctacgtgaacacacattctcataggacggttttcagaaggtggatccttcacaccggggtgtttatgttacccacagggcgccgacacaattctcagcatgtgcgcttaaaccaaactactgtggtgattaccgccaaattaacaaacatggggagaacagtcgaaataatccgtgggtcgcacatccttgtgcatttcggcccaccgaagggttcattatcattgagaattctacttttcgaacagaacaacttttgggaagtcgggttagggggtgtacgcggcgcacttctagtgctcaagttcaacaccgaaactgctgggcaaaacgaggttcctaatcaaggacaaaacgccgcattttataacagctaatgtatccgttccgaaaatgatagattaccttaaagaaaatgagcgcgtcaatgaacaccattgcctttatccacactgtcaacttctaattgagtccaacaagatacgtggatgactaatggaacatctatagtcgaggtgttatcaacacaattgggttactggttccctatccaacgagtataccccatacattcccgaagaantctagggcacagtatgaagcggacacaaataaatgaacagagcgcttgaacaagttatgtgtaacgacgtttaatatcacctgttataacagtatatttgaccataacacaaacacccaattgggtaacacgatccacagagtttggcacacgccgacaatctgttttgcaaaacgacttaaacgtgggtctgttgccaatttagcaagacaacacggtgtgcagcaataaccccacttgatgaggcacaattacaaccatagtggggactagacacaccaaacaactggtgtcgtgcgtgtaccagatcaagtagcaacggacaagtgcatcctattggtgtagattgtggtataaaaacccacatattttgcaccgaatgtgagtgtatgctatggtaacacacacgggctgtttatccaaaacagtcttaaatggtagtacttgtgacaagagttgtagacacaggctataccacggtgtnatcatgggtagtgataaccagagccatacacaaaacgagcagggtgataacacagaaacaacaacaagaacaaacagcaaagttgtcagcacaggacggagaaaaatcaaacacttgcggcgccgacgcgagtagcagaaacn

SEQ ID NO: 480753 - DNA, 157 bp, Homo sapiens
aatgtattaggggaacagcaagaaaaagaaaaatgatacttctcgtttatttagctgtgccaccgacatacaattcaaagtgctgttttgtgttatttttttaccaattccaatttcaaaatgtctcaatggtgctattgaaacttctaaaactagg

SEQ ID NO: 480754 - DNA, 1467 bp, Homo sapiens
  misc_feature (581)..(581): n is a, c, g, or t
tttttttttttgggctgcttggagttaatttcccgtcttggtgccatggtgcacagtcccaggtgtcatggaaagtctagctgagtgctgggtgcctgggctggtaaaaatcgctggggctctcacttggtttttgggtggtctgctgtgttagatcgcagaagtgtctggcttgctggcacgcccgccatagttttacatgtggttggggtgtgtgtggagatgtgtgtggagatgtgtggtgtgcagatagtgagattctgcgcgagacgtttgtgtgagaagactagtgtgcgctgtgtagagatgtgtgtgctctctagttggtgtgagcactataccgcggcgccctctctcgtgaaatggtgcctgttggagcggccactggagggagcgataaacccgtgcctctcaatgttgctcagtgagaccgtgtgggtgcggccccaaagggcgcgcttgtgggcatgttgtgcgcttttgagacctatttgcaccacgcgcgttgtgagattatgaggtctctcccctctcgagtgggggcggttgatcccccaagaatcgcccctagtgtggcccanatagtggggcgatgagcaccaaactttgccattttgcttgttgaagagtagtggccctatttagtggagaggaagaagatggttctcccccgagaagtatgtgtggccctccatctgtagcgagagagaactcttcccacaaaagaccaatcccgtgggtgttgtggcctcaatagttagaacacaccgttgtggaagaagcagctggtgttgtggtggacacctcatgattcccccccgtggaagattaacaccagcagaaaactggcttgttgcggcccccaccaacctacaaactattttagtcacccccccgcggaggtcgctcaccaacacgcccctattcgtgggcggtcgggaggacaacgaaacccccttgcgggggggcagtgttcgttagggcagagcaacatttgtggcggcttcctcccccccacgaggtgagtcgacaaacctccccgggaggacacaccttttggcctttcgccaaacgagaaacacctttgatcctgcgtctttcggagcacaattgttggggcgaacccccccaccatgtcgtcttggcggcacccccctgaatggtactatgatcaacagtcccagcggtggtgctgtctttgggccccccacgagtaatcgagcacgaaatagcctctggtcagcttcggccaaacagagggcggtacaatctttggtgccccgcggcaaccaatattgggcttatcgtaaaagcacttgattgacgcgttcggtagccattcggtcgtttggagcaaacatccatggggggagcacgggaacaaggacccccccccttccgcgccgtggtggagcccaatcctagcagggcaaacgagcatattccaccgcatagttgttggcgcgg

SEQ ID NO: 480755 - DNA, 108 bp, Homo sapiens
gctatccgcacatcatctgatgctgctgatgatggtggttctgacagcaggtctggagggtcatgagatcagaggccagttccccattagatccttctttctagtaag

SEQ ID NO: 480756 - DNA, 309 bp, Homo sapiens
ggtcgctcttttataaagtctggccacgccagtggctcgcaactgtaatctcagcactttcggaggcaaggcggtcagatcacctgaggtcaggagtttgagaccagtctggccaacatggagaaactccgtctctactaagaaatacaacgaattagcgtgggcatggctggcacactgccttcatgtcccatgccactctgggaaggcgtgaggcaatgagaagctgcttgacacctggtgaggcagatggttgcatgtgaaccagatatcaagcgcatttgcactccagccgtgggcaacacgtgt

SEQ ID NO: 480757 - DNA, 358 bp, Homo sapiens
acccgtcggtgctggggactgtttgatggctggtcccctttatttggagagcctctcccgaaggattgcagtcagaactctagtcgcatcttgttcttgggtcagagctttggaatgttacagacctttgtctcatacacacgtgacctgactggtgccctcacgttggacgttggatacttggggacacttctgttccttactgtgcacgacgttacttttcccttactcacgacacacccaacgctgtgggactgtccacaacctttactttcccgacactgacgtcttcccttcctctgtgtgggctggacggttggacccaactgccctggacctacggtgactcggtgcgctc

SEQ ID NO: 480758 - DNA, 905 bp, Homo sapiens
atcagatagatcagcttctgattcatcagcaagttgaacttctagaagtcttaacaggctttgaaacaaataacaaatttgaaatcaagaacagcctcgggcagatggtttatgttgcagtggaagatactgactgctgtactcgaaattgctgtgaagcgtctagacctttcactttaagaatcctggatcatctgggccaagaagtcatgactctggagagacctctgaaatgcagtagctgctgcttcccttgctgcctccaggagatagaaatccaggctcctccaggggtgccaataggttatgtgactcagacctggcacccatgtctgccaaagctcactcttcagaacgacaagagggagaatgttctaaaagtagttggtccatgtgttgcatgcacctgctgttcagatattgactttgagatcaagtctcttgatgaagtgactagaatggtaagatcaccaagcagggtctggttgtgtgaaagaggccttcacggattcggataactttgggatccaattcccgctagacctggaggtgaagatgaaagctgtgacgcttggtgcttgcttcctcataagattacatgtgtttgaaggctgtgagtaggaacagaaatccgacctgagtaggaatcaactgaaaagaggacagagaagatctggaagtctacaccacggagatcatatgatggagagaactggggccttttggatttctttcatgtgaaatttctcagaaatcaagctgttattcttgaaagcctagtatgttaccatttgggtttcaaatgggacgttaatccttacattctttggcaatcgaccgggtaatttttttatcactttaaaattgggccccttttcgtttaaaaacaccaaggagagttttta

SEQ ID NO: 480759 - DNA, 187 bp, Homo sapiens
gagccccgggccggaaacaggacgagtcccccagcagaggttcccccaagagagagaaatttgcccgtgggccaccacttgtacacaaggggcctcccgggaccaggttgtgcccccaatcgtacaccctgagcctcagaacattgataatttttaaaatacttatttatattaaaagtcttttcca

SEQ ID NO: 480760 - DNA, 206 bp, Homo sapiens
aggagagtagatggtcccctatcacgagagattataataccctacaggaagcactaagtaatatggatgatctatgacaaaaccatgcttggagtctgcattaataggtgtaagcactatcgttcagcaagaatggggtgatgcaataccttgccaggttgtcctgatgacagacggcagtcttggccattggtagagggtcactg

SEQ ID NO: 480761 - DNA, 248 bp, Homo sapiens
ccgagattgtgccactgcactccagcctggtgacagagcaagaccccatctaaaaaaatttttttaaaaagctgagtgcagctttctataatacagatgcactcatgagaggacttgttttgggagatgacattttgcttcattgggttcaaatttaatgttctttatcaccaaaatcaacaacaaaggtgcatccattagtgctggcttatagtgagttcatgtgtctcctctagcgacagcaggca

SEQ ID NO: 480762 - DNA, 259 bp, Homo sapiens
ctaacgatacagttcagagagaaaagatggtgcggtacctgcggtcagtgcagcccccgacggtggcgggggcctgcacatggaggataagtcgaccggggtagggactgcgctcatgtatgtgtctctcagaattctgggtgtcgggcctgacgatcccgacctggtacgagcccggaacattcttcacaagaaaggtggtgctgtggccatcccctccggggggaagttctggctggctgtcctgaatgtatcgtga

SEQ ID NO: 480763 - DNA, 1396 bp, Homo sapiens
gagacgcaagatggcggctgtggtgctggcggcagacagcggttgcagcggggctcgagggttcttggaggctgttcgctggctgactgttatgagacctcctgtcgctatagacggtttagtagctcgcgtgtgtgcctagtccccaacattccgcccatcgtctttcgtcccgttacgcctggatgtacctcaagccgtgtctgttgtgctaacaggttgcatgggacagcggaacacacggttgtggacaacccagaatgtacaccgacctattggcacttaagtggcgacattcgcaggtggctagtcctcacgaagtaacgctttggagagcacgctctgagctaacaggctagcgcaattcattattcaagttcatggactcgacgatcagtgagaggcgaacagtagcctttagatgggacattgtcgcgtcacatgtgtatatgcgacacaagattaggcgagtttctacgttcctaccgaggcctctgatttgtgctagcaagcgcgagagagtactggcaacatttcccctgcactttagcgctgtgtgcggcagaaatggcagtgcgggcgggtctaactctctgttggaacattgtctcgagtgacaatgcaaaggtaggaacacagctcgagccaccacttgtgctacttttgcttggtggctgcgttgtccgtggaattacgcccgtggagcacgggtctcttgtggggcaagcagcgggcgaattgaggttcttgtggcattataaccttttgagaggcctttggaccatgccttggggatttgtccctggtcagagggagtcgcacccctgggtgtgtaaaagcgaaggcaagtatgaacaagaggcagcagcgctcgtggacacgcacttcggcacacaggccaggagacaagttggagacagggcgatacacgaaagaatattctggtcaaggcccatgggcgatcaggggcaacgcccttgtgacaaatcgtcgtgataggcgaggagtgcggcccttaggtaactctcacgcaatgcaaggtgcccaatattccattgatcgtttgcaaccgacaggaaaggtaagctagacaagtttatccacctggtgaactacagcctggggtcagatataaccaaggtgggactcacaggaacgatcgagcctcagggcgtagtggacggctgcctttccccaacccccgtaggtatgaacattgggtcgccaccgacactacgggataacatgagcggtattaatgagcacacataacggcaacttcccaaaactccaggaaggtgaatgaggcttgtacgtcgtaccattattccccttatacgccgttgtcaaggagagctgactcttaacccttaagcgcatgcgtaccacccgagca

SEQ ID NO: 480764 - DNA, 200 bp, Homo sapiens
ggcgtttttttttttaaagggattggggggtgcctgggggtgccctaaatgccttgttaaagggggggtagggataatgggccctggggttttttggtttttaacccctgggggcaaatccaaaatggaatgttacgcctgggtctttttggaaaaggcaaggttccccccatcttaggaaaatgttttttaagctttga

SEQ ID NO: 480765 - DNA, 362 bp, Homo sapiens
agaaaggattctgtaacagtcctcagctaattgcataagtgctatgctgttcatggctggtagattgtaaagagatctgtttaggcctggtgcggtggctcacgcctgcaatccagcactttcagaggctgaggcaggcagatcacttgaggtcagagttcgagaccagcctgccaacatggtgaaaccccatttctactagaaatagaaaaattaggcggctgtggtggtgctcgcctgtagtcccagctactcaggagggtgaggcaggagaatcgcttgaacctgggaagtggaggttgcagagagctgagatggtgccactgcattccagcctaggagccagagtgaaactctacctc

SEQ ID NO: 480766 - DNA, 671 bp, Homo sapiens
ggcgcccgagtggactgaagatggcggctgctgtaggacgggtggctccgagtcgtcggttgcccgacatgtgagtgccattccttggcggcatttctgccactgaagtcctctaggcctgctgcatgtggaatgaacgagcttgacaaattatatgcgtgttctggttgccagtcgaagcaaagattattcacgcgaccagttgcctctatgcacatgtcaccgtgctgtcacccgagcatgcaccctattttagagggtacaagcgcgttgtcaatggagagttcagagacctaagcctgtgatgactttaagggggaaatattgggtgctttcttctatccttggaattgcaccttgtgtgtgtcctacagaaatggtggcttaaagtgacaaagttaaggaatttcgacgatgtggaacgtgtgaagttgtcgcagtctcagtggattcccattttagcctatctttgcgtggatgaaatacaggcaaggaacagaatgggtggtttgtgggccatatgaaggatggcaactctgtgtcagacttaactaaagacagatttcccgagattaccggtgtgctgttgagaaggttcatgggtctgaggttaagagggtctcttcataatgtgagcccaatggagttcatcaaagcatttgagcgttacg

SEQ ID NO: 480767 - DNA, 1134 bp, Homo sapiens
acgtgaccacaccaaaatgccatctcaaatgtgaacactgccatggaaaccatgatgtttacactttcacaacacttctgcttgcggtgactaaacgtgctactctacacacacatgtgacgtgaccctgacgcaatctacctccatgtgcaacaagcgacgattccactggcactctcttcttgcgacaaacactacaacacacatgcaccctctactgcgacttgcttgccgacacacaactaactagacatgcgcacccctgcgaccgcagcttgctatgcacgacttgcgcacacacgcttgcgctgctatcccacgcagccctactccttcttacgccctaaactacttgcctgtgtggcccccctaccagcgccgatatcttgacacttgcgcaaatcttgactccatactatctccttggtaaacggtaaccaacatttcgaacaaccgccaacggaccaggtgcggacaccacgcaccactgctaatcgtggcactcgcacataacgtatgaagcgcagcgatactacctggcactacacactacgcccccttgcaccttacaccggaacgctacttggctaccccccgaaagactgtggagcttcctggcgttattcaccagcgtgcaccaactccatttggccactctccaaaccaagcgtacctatttcccttctccccaacttaaatcgaacacacgtggaacttatacttgccacctttggaacgcgcctatggaacttaccacagtggaaacgcaacaccattaataagcggccaacaacaacgcttggttcacacgcgcaacaacgtttacacagcagcagactccgtcttaagcagcactatttctcgattcgtaagactttattattatggacgccgaagaaatgggccaacatgaagcggaaaaccacgtcggatcacgacggaactccgctgcttacacgacatgacgtaatcgccgaatctgaactttaacagtgcggccctttctcttgcatctggcacgtgtctgctgcatacactgggctatcgctcatagaggtcgatgtcaatgccaaacagtatccacaccccgccatgtaatgtgggacgcccgcctatactcgaagagactaaaag

SEQ ID NO: 480768 - DNA, 365 bp, Homo sapiens
tctagttaataaagcctttaccatagtgatgagtatacgtgctcacagccacctgtgctacccaactcaagagcccctttgttacactcttcatgaacccattacgcggcatgccaaatgtttccaaaatagaagttattgccaccaaccgctattacctccctaacgtatataaatatcttataggccacttttaagataagctaaaaaatatagtgcttgaaatttatctgaaagtatcgaaatttttctcctttagctctaatatatattccaagagtaatacacatgccatattaaaagtagcacaccccaaagcagctcacatttacacgagctcgagatcacctgtgaactcgcgtgcc

SEQ ID NO: 480769 - DNA, 663 bp, Homo sapiens
gtaatttcatgatacaagtatttaataccttttttaagtcagtaaatattctagccatcaataaatgcagtagagtattaagaggggacaggatgagtttactcttaaaattaatcagtatcaaactaagtctactgtgtgtgtttttttttttttgggtttgggttttggttggtttactattatagtaaagtctagtcttatttaaatgggattttggtatcccagtttatatgacaaaatagactagatcagcgcgggtggtaaatgcatgctggtacctcacggttttctccccataatgccgttaaactggctcgccaggtggtgcttaacttatggtgaacgggactggatttggtttggtttggttttttttaaaaaaaaaaccaaaattgtcaggggacagtgcataagcctttccttggtaaagtcaggggggttggctttttcttcaggatgggatggcttgtggtccacgggaatggcctacggcaggggttaacacgtgggcaatatgggcacgctttaaatcctggagttactacaggtctccaggtcaaaggcatagggttgtagcatatcaggcaataactacttttttataggaaaacactttttcactttacgtgagccaatccactttcactggtcgattgtcta

SEQ ID NO: 480770 - DNA, 321 bp, Homo sapiens
cccccttttttttaaaccaggggcttggaagggtttttttttgggggggggggggaaatcccccccgttccgttttagatggggggtgggcaaaaaaaaggggaaggggggggccccccttttttaaaggtgtttcttagggcgggaattttttttaaaaaaaagggggggtaaatgggggggggggggggttaaccggggggggggcttttttaaaaggggggggggccccccccctttttttacggggttggtttttaaattccctggtttaaacaaaaacttttttgtttttaataaaggatttttggccccccccca

SEQ ID NO: 480771 - DNA, 675 bp, Homo sapiens
gggcgcggagacgcttctggaacgaacgccgggatggctgcgcagcgcagagccccaggtccagttcaaacttgtattggtgtggtgatggtggtactggagaaacgagcttcgtgacacgtcattggactgggtgaatccgagaagaagtatgtagccaccttgggtgttgaggttcatcccctagtgttccacgatcaagcagaggatctatatacgttcaatgtatgtggacacaggtccgggcaggagaaattcggtggaactgatgagatggctattatatccaagaccagtgtgcctatcaataactgttttgatgtgacatcgagagttacttacaagaatgtgccataagtggcatagagatctggtacgacggtgtgtgaaaacatcgcaccaatggtgttgtgtggccaacaaagtggatatcaaggcacaggaaagtgccaggcgaaaatccattgtgttacagcgaagggatagaatcttcagtagtacgacgtatctggccataagtaactacaacttggacacgcccttcctctggtcttgcctaggaagtctcatggagaagagcgcctaaactttggtagagttgttgccatgacctgctctcgtgcccattcagaagtaggacaataggagcccaggatttggccagcaccagtatgg

SEQ ID NO: 480772 - DNA, 111 bp, Homo sapiens
cgatcacttctcagcttggtattcgaaaaaacaaaaaggtaggtgtggctgatatatggtgggtggcagcggttccctgacactgatgtacatcgacttccaagaaaacag

SEQ ID NO: 480773 - DNA, 531 bp, Homo sapiens
  misc_feature (27)..(27): n is a, c, g, or t
  misc_feature (47)..(47): n is a, c, g, or t
  misc_feature (132)..(132): n is a, c, g, or t
  misc_feature (179)..(179): n is a, c, g, or t
ggtgaaccccccatttctactaaaatnccaaagttagctgggtgagntggcagatgccgcttcacctgctgataatggaaataaatggaaatgccagagagagagagagagagagaaagaaagagagagaangaaaaagaaagaggaagagaaagagaaagaaaaagaaaggaaaaganagaaaagaaaagaaagaaagaaagaaaagaaaagaaagaaaggtgatgtatttcacaattaatagcatgtcacggttaactggcagcattctttctttcttagtggtacacaaaacactggtgtgagttataatcgatgagattatataaccgaggctttaactcgatagcatgcgataatttccaggactcatttacaaaccccttctcttacttaaaaactgatctccttgtcatatcctaaggacattggaagtgtgtcaaagggtgtgttaaagtttgtactttaatacttcacatgaaaaatgatacacaaaacaacttcccggtgtccatgaatctttaacccgca

SEQ ID NO: 480774 - DNA, 156 bp, Homo sapiens
caggatcgtgggcacatcttcaggatgtgtcgtgggaggccaggaggttggaggtgagtctgtctgctcccccgagagcattgaaagctccgttggtatgttctggacctgatagcgtgtccccaaaggctgagcttgtgcgattacatgccgtca

SEQ ID NO: 480775 - DNA, 147 bp, Homo sapiens
  misc_feature (13)..(13): n is a, c, g, or t
gaggatcccgagngagacgacagaagggaaaaaggggtctgagaaataggtttctcggtatgtgtatgtttctgtgtaagaaagaaagcgagagaggaaaaagatggcaaaaagggagagacagtacccacactcccccttagaggc

SEQ ID NO: 480776 - DNA, 435 bp, Homo sapiens
gccaagtactttacagattcatgcaatacctattaaactaccaatgacatacttcacagtactattaatagaaaaaactattttaaaattcatatggaaccaaaaaagagcctgaatagcttaagcaaaaagaacaaagctggaggcatcacactatctgatatcaaaactatactacagggctacagataaccaaatgggcatggtactgaacaaaaacagacacatagaccaatggaacagaatagagagcccagaaataaggccacacacctacaactatcttatcttcaacaaagctgacaaaaacaagcaatggggaaaggactccctattcaataaacagagctgggataactggctagctatatgcagaagataatatgtcatacctcacatggggaataagcataaccctgagattctcactaacga

SEQ ID NO: 480777 - DNA, 131 bp, Homo sapiens
cgtcacaaacatccataagttgaacatcatgaattcgggatcactgtattcagtaccatgcaatagagtaatctgactaaaaagtctacacaactatttgccgaacatacacagaaatcaaggagcttgtt

SEQ ID NO: 480778 - DNA, 229 bp, Homo sapiens
ataccgatttgtacatgtgtaatgtagttacatgactagtgaaaaagacagaggcatgcctgagtgaagatcacagacaagtgggcagtgagaagcaacacaacaattcccaaacagtgtgaacagtgctgagagtgtgggaaggagtgtgatggggagtgcagagagagcttctggggggagctctagtgaaggggtaaccactactgtggctccaaagcctgttagg

SEQ ID NO: 480779 - DNA, 178 bp, Homo sapiens
attcgttttgctctcgtgaaggtgggcttgctgcttggccttctccacatcagccttggtggcgttgatatcctggtctagccgttcagtactattggaggtcttaggcatccccttggcatatctcaattgccagcatcacttctcttgcaacttggaggccatgacgtaagtaagg

SEQ ID NO: 480780 - DNA, 453 bp, Homo sapiens
  misc_feature (26)..(26): n is a, c, g, or t
  misc_feature (120)..(120): n is a, c, g, or t
  misc_feature (388)..(388): n is a, c, g, or t
  misc_feature (433)..(433): n is a, c, g, or t
  misc_feature (446)..(446): n is a, c, g, or t
caggattctaattaatagcaataatngaaggtgctcggttaaagcctccattctcacgatttagaaatacaagagcatctcatgtcagttttggtagattcagaatacgagaaaataagnatcttcatttcataaatattataaagaataaagcatttgtaaactatctttttttaatttacaggtctgggagtaaaatcaatggaaatggttcaaaaatttgtctattggagatgaccagaaattcccatctatgattgtccaatttaaacatcaaagtctccagcttatggtgcaaagagaatgtacgattgatcatgacattccttaccttcttagcttgtttaaaaaaatatagcatttattgtacaaaacttaaattttgtanaacaatataatctttcatttttattggaaatcctgttcatacttngcataaagtctcntaatgca

SEQ ID NO: 480781 - DNA, 542 bp, Homo sapiens
  misc_feature (314)..(314): n is a, c, g, or t
aagtgccagaaggtgtttactgtccaaaaacaaaaccagccacagaaaaatggagttggaaaacaggctttaaatggcctccagtatataaaatatgtccctatattggatgcctactatccaatagatggatttggatccatacccaatagcttctgttttggtttgctgaaggctaaattcacagcgctaagcaattcttaattttccttaaggtggtatttcaggtttaaatggcccctcagaataagcttccccccccccgtttttggtgcttgaaaatattggtggcccggatttttggtaaaattcanttgtggtatccctttttaaaaggaaatgggccgggtgcccgtaaaaaaaaaaatggcttcagaattaaaactatgaaatattttcccgtttttcttggacagaggacttggctgctagcccaaggttaaaaagttcataacagattttttttttgggctggtttgttgggcagggcctgataagcttcaaagctgctttattccataaaaaaaagaaatggaaaagga

SEQ ID NO: 480782 - DNA, 175 bp, Homo sapiens
aagtcccaaggtttggagaagaaagaggaggagggtaaggaggaagctggcaggcaaatcctaccaattgtaaaggagatctggagaaccaggtctgatacatctgccacgtctgtctttctcaagagttgctccctatgccccatttcccaatgatctcgtttgggtcatgcat

SEQ ID NO: 480783 - DNA, 150 bp, Homo sapiens
gtgatgctcgactgtatgcgtttgtactgttgaccgctgtgggttacgtaagtggggttgtggggttttcttctaagccttctcctatttatgggggtttagtattgattgttagaggtgtggtgcggatggaagccgtcgagtcaacgc

SEQ ID NO: 480784 - DNA, 378 bp, Homo sapiens
tggcgtacgcagataggcaggacatccgtgtgtactgagctcgagaacagtaacttccgtctcatgagttgtcacccctgtgttgaagttgttatcctgaaaagttctggctgtactggcttgtccatgtgttgcacgaggaaaagcttggattatagtgcagtaggcattactacctgtagcatggctgatcttcccaaaatagctagctcattatagatgaaatagaccaactctcttcagtgaagaggacaaatagtattatttaaagcatttgttccaatacaataaatagagggaaacttggatgctaaaataccgtgaataggaatcttcctggcacttagtgtttctatgttattgaaaaatgatgttcca

SEQ ID NO: 480785 - DNA, 844 bp, Homo sapiens
  misc_feature (47)..(47): n is a, c, g, or t
  misc_feature (89)..(89): n is a, c, g, or t
  misc_feature (116)..(116): n is a, c, g, or t
  misc_feature (119)..(119): n is a, c, g, or t
  misc_feature (128)..(128): n is a, c, g, or t
  misc_feature (157)..(158): n is a, c, g, or t
  misc_feature (183)..(183): n is a, c, g, or t
  misc_feature (213)..(213): n is a, c, g, or t
  misc_feature (258)..(258): n is a, c, g, or t
  misc_feature (330)..(330): n is a, c, g, or t
  misc_feature (366)..(366): n is a, c, g, or t
  misc_feature (369)..(369): n is a, c, g, or t
  misc_feature (420)..(420): n is a, c, g, or t
  misc_feature (426)..(426): n is a, c, g, or t
  misc_feature (430)..(430): n is a, c, g, or t
  misc_feature (437)..(437): n is a, c, g, or t
  misc_feature (444)..(444): n is a, c, g, or t
  misc_feature (450)..(450): n is a, c, g, or t
  misc_feature (462)..(462): n is a, c, g, or t
  misc_feature (480)..(480): n is a, c, g, or t
  misc_feature (490)..(490): n is a, c, g, or t
  misc_feature (538)..(538): n is a, c, g, or t
  misc_feature (541)..(541): n is a, c, g, or t
  misc_feature (634)..(634): n is a, c, g, or t
  misc_feature (681)..(681): n is a, c, g, or t
  misc_feature (735)..(735): n is a, c, g, or t
  misc_feature (775)..(780): n is a, c, g, or t
  misc_feature (842)..(842): n is a, c, g, or t
tgtaaaaaataggtggtacggtccggaattcccgggatcggcgagcncagagcctcgcctttgtcgattcgccgcccgtacacacccgntgccagctcaccatggatgatgatatngcngcgctcgtngtcgacaacggctccggcatgtgcaaggnnggcttcgcgggcgaggatgctcccngggccgtcttcccctccatggtggggcgcnccagggaccagggcgtgatggtgtggcatgggttagaaggatttntatgtgggcgacgaggcccagagcaagagaggtatcttcaccctgaagtaccccatcgagcacggtatcgtnaccaactgggatgacatggagaaaatttggtaccanatnttctataatgagctgcgtgtggtttccgaggaggaccctgtgctgctgatngaggtncccntgaactncaaggcnaactgngagaagatgatncagattatgtttgagaantttaacaccncagctatgtacgttgctatttaggttgtgctatttttgttcgcttctngcngtaccattggcatcgtgatggactttggtgagggggtcactcatactgtgcccatctacgaggggtatgccctcccccatgccatcctgcgtntggacctggctggccgggacctgactgactacctcatgaagatcctnaccgagcgcggctacagcttcaccaccacggccgagcgggaaatcgtgcgttanaataaggagaagctgtgctacgtcgccctggacttcgagnnnnnnatggccacggctgcttccagctcctccctggagaagagctacgagctgcctgacggccaggnca

SEQ ID NO: 480786 - DNA, 115 bp, Homo sapiens
cgggagcctactagggtgttgcaatagcgaagtctgtgcctgcgttcaggcgttctggctgcgttgcctcatcgggctgatgcatcgccaaggctgggcgattagctgtgcgttt

SEQ ID NO: 480787 - DNA, 1693 bp, Homo sapiens
gcgtgtgactgggaagtgggacccacccgagggtccagccaccagtccccctcactaatagcggccaccccgtgcagcgtgcgtgcagcagcagcagctgactgcatgcagtgctgacatgctcatgatgcatgtggatggcctgctgcctacctagagtggcctgtgcctggatgctggtgcatgccccatgtgcccacctccccatgtgtgcaccctgctgttcaatagcaaacgccttggtgagcacttgggcaccacagacaaatgatctcaccaccttttaacgaacgaccgaacgaacatgaccctattaaagtcccatggcacagtggaccaaacttactacctacgagcgacggaacatgcatatgagacatgatatgaccgctacgggacgagacacatgtgcctggtcaccgggccgacacagacacgctcacgccggcgcacctaaaccagcgcacccactaaccacgaacaacccccacccgaaccccaccggaaccaaaactccccacaggaagagaagaaacaaagaacaaacacaatcagacagaccacaactcaccaacaacaaccccacaccacacacacaaacaaaatatttcacataatacaaacacacttaataactaaatactctcaaaaccgcaacactaaccactacagcaaactaaaccctcactatatcacactgtttcacctacgccgctcacaaacaaaagttatagagtagtacaagaggaaatcactacactatacaaataaacacaatttactacctagcatcccataaacaaactagccgacggtattggacgaagcagacgagaagagcggaagtagcgacaggctacgaattgagctaggatccgaacggaagatgagcaaggcgagtatgatctgagaggccgggagcaaacgactgagagacttgtgggactgggtaagagatagaaggcagcgaacagggatgagacacggtgcgggccaaggcgggcagaggaggaggaatgaggacagacgatcaaagaaggagagaagcagaaaggaaacaaacaagagatgaggccgaggatacgagatagcgcgagcgactaagtagagcgggacagaccgagagacaggggagacgaagcgaccacggaagaccggagaagagagcgtagagcgaacaagcaggacagcggcacgaggacagaatcgagacgagacgcaaagagcaacgggcaagcaccactgacagacagggataaataatagacaggagaggagtgaaatagcgagaacgcggagcgcgagaggcagctatcgcacctaacgcgagaggcgatccgacctgcagagagagctggctgagtggagcggcgcgtcggccggaccgcaacgtcatagtcccaactcagggcgagagtagagcgacggagacgacgaagcgggacagagtgtgaagacgaagtagatagagatgcgtagtacgagcgataggacgacgagagtcgagagcgagtgtaagcgatagaggcagggaggcacgtagagagggaggagagagtgcatgtgtagggtagcgagtgtagggacgccgtcagcgagagcgatagagcgaagagagcagggagggcgaggaatagaggcgaccggatcagaggggccgaacgtgagcagagaggcagagggacggcgagcg

SEQ ID NO: 480788 - DNA, 121 bp, Homo sapiens
gtgtgcgcgcgctccagtccgcaccgtacggcccaggctaagtagccctcaccatgccggtcaaaggaggcaccaagtgcatcacagagctgctgtacggatttaacttcatcttcggggc

SEQ ID NO: 480789 - DNA, 486 bp, Homo sapiens
  misc_feature (6)..(6): n is a, c, g, or t
  misc_feature (13)..(13): n is a, c, g, or t
  misc_feature (22)..(22): n is a, c, g, or t
  misc_feature (338)..(338): n is a, c, g, or t
  misc_feature (357)..(357): n is a, c, g, or t
  misc_feature (426)..(427): n is a, c, g, or t
  misc_feature (465)..(465): n is a, c, g, or t
gaattnggcacgnggtggcgtnacctgtaatcccagctactcgggaggctgaggaggggaatcgcttgaacacgggaggaggaggttgcagtgagttgaggtcgcgccactgcactccagcctggtgacagagtgagaccccgtctcaaaaaaaaaaaaaagttcagttttctgtgaaattaagttagttcctttctaaggttgttggaggattaagtgaattactatttacaacaatatctgacatgagtaagtattccataaatgatagctattattgttgttcattttgagggaagagagagaccctctaatattgttctatactcagaaaaggnaacgcgaagaggaaactanaaggcaagggttagcccagtgcctaggggaacccacaccttgaaacccagggccttaggccttcccttnnccctaaagccctgggtagttaaaaattcggcccggtancctttagcaacttattgttta

SEQ ID NO: 480790 - DNA, 184 bp, Homo sapiens
ggtcaggactgaatgcctcagtgtgccaggcacccagcaggcaagagtaccctctagttgtcagagtcctgggtggcagaaaaccaacctaaactcacttaatgctcacctgtggatgtgtatttggttcattttggccagagaagtcccaaatgtagggccgagctcacatgggtttccatgc

SEQ ID NO: 480791 - DNA, 327 bp, Homo sapiens
  misc_feature (226)..(226): n is a, c, g, or t
gatctagaggatccgcgcgcttcttcgtcacatcagcagctattgatgagcgcctccagtgtgcttaggtccctatgcggcgcgggtacagcagtggacagacaggccggtcctgtccttcgaggagcccatgatccgcggggagacaggcattaacgacgatcacacgatcacttaaatacaactgttgtgaacccgggcaacaaaaagggagggacgcgcgggngtctgcggggaatgacgatggcgacctcgtcttggacccagggagggcaagggtggaccaggcaaagggaacagaggactggtgacctggaagttgctagg

SEQ ID NO: 480792 - DNA, 372 bp, Homo sapiens
atttaatttaaatggatgcaggttgtctactaaagaaagattatatataactatgctaattgttcataatcaacagaaaccaagatagagctacaaactcagctgtacagttcgtacactaaactcttcttgcttttgcattataaggaattaagtctccgattattaggtgatcaccctggatgatcagttttctgctgaaggcacctactcagtatcttttcctctttatcactctgcattggtgaatttaatcctctcctttgtgttcaacttttgtgtgcttttaaaatcagctttattctaagcaaatctgtgtctactttaaaaaactggaaatggaaaaaaaaataaatctttgccaaatccttc

SEQ ID NO: 480793 - DNA, 200 bp, Homo sapiens
  misc_feature (28)..(28): n is a, c, g, or t
  misc_feature (30)..(30): n is a, c, g, or t
  misc_feature (32)..(32): n is a, c, g, or t
  misc_feature (79)..(79): n is a, c, g, or t
aacctgaccgtggttctacagaccaaanantngctttcaattctatcgaagaaagtgtttgaatatgtccatcaatttntttcacgtcatctccgcacaaccttcacactggtggtggtgacacagggtttcaggagagccccgtggcctcatggaaggggagcagagttgaagcgagcccctccgcgggaggctgagct

SEQ ID NO: 480794 - DNA, 884 bp, Homo sapiens
tgccgtgtgtgatgacgaagggtacctcaccactgacatcagggatagattagaatgggagtggaaggctatggaacgaccagacatatttggaggagatcagacagtgccactaccgagatgagttcagccaccaggtgcaggagtggcaccggagctggaccatggtcatcgagcgggcttacacagcgagttcctctatgtgcagatggcaaagaactcaagaacaagctgctggctgtatgcctgaggaatatgtcataaaggcctgtagtcgaaagctctacaattggttgagagtggcaccctagcgacagatcagcaggtggccagaagatgacgactttatggacgagaaccaagggaagggcattcgagtcctcggattgctttctcctctgccagagatcaccctgtgttctagcgccctggtccactggtgaaggagaagtgacagaccttccttcgaatggcccattttaccaaacggcgaactgcatggagagaggaagagcgggaaacgacggctcaagacattgaaacgctaagagaaatttctcctgaactaagaagcctcattgtagtgacagttgcagggaggagcacacaggggacgccccagatgtttgcttgcagatgttgacgccgcattgtacatgatgctggaccagggccaagcagctgtcatctactggggcgtacaagcctgggtgagacaccgaagtggggccttgctctactttgaaaacccagaagtcagaggcacgattccgggactaaccccccgtggccgaaacaggccgattccatggccgggcttcaggcccctcgtatacttgcccgtgtggcccataaacccctggcccagttacccttcgaacttt

SEQ ID NO: 480795 - DNA, 164 bp, Homo sapiens
  misc_feature (144)..(144): n is a, c, g, or t
aatttttcgtccaaagcgggcaagtggacctggctagcgggccggctcgatcacattgcagttggtccgccccgacatcaggcagtcctgcatcttgctcgcggccgtgagatcacgcgcgaccacaggccgaccgcagaatgncgcagcaatgatcagtccgc

SEQ ID NO: 480796 - DNA, 218 bp, Homo sapiens
cccccggtatcattcacttgtatcatttgaaggtaaacaatatatggagctggatcacaaaccctgaggatgccagagctattggtccagaacatggtgtggtattatcatagcagagttcagaagggtctgaactctacatgttaccagagaacattatgcatttcatgcattccacttagcaattttgtccaataccagaaacagacccctagagt

SEQ ID NO: 480797 - DNA, 1062 bp, Homo sapiens
cacagctggcgagtgtacccgtttctgcgagagaagctaaagaatgcccttgcgtgaggaaattaaatttatgttcaagctaaatgtcgtttatggcactgggaacacaagcattgtcgtaacaagttctggtggaaatccgtacatggatacgttctcattctgggggcggtctccagttcctttctcatgagggagcacacgtccatctgcctcattgcagtggcctcagggatatggaattaagatccacctggtgtgatgaataaacccagactctcagcaacgcaggaaaatacaacaacaaaaactggttggcgatctggagtaaaggatcctcacatccacgtgaaccaggaaactctgtgcccaagatcgactgaaaaagagaacacactggggcagagccgaactaacaagtcttttagcacggggtaccagccctagaatttccagtagaccagcagacagccgggaaaccagatcctcatcaaaagacagaaagaaaaaaattcgaagccagcctgagaagggccctatttcaatgctgttaaccactgagactgcatcctcaacagtgagacaggatggaccaacatactcaagctcaaggaaacatctaacaccggtcggaaactcatgggatcaccggtacctaggattaggccatataaagtttaccgttacagaaccgcctactctcatattacgtctcacaatggacacttatccctacctatccggacaagcccctgggcatagggacctagctgacaacacgcagtaccaagggccttaaaagcagcccagacccccgtctcggcacaggtgccacatcacgagacgctatggctaaaccacagtatagacgggcgcccaaatgagaggacaccggccgccttggttgtcacggcacaagagcatcgccatcagaggtagggcatagaacatgactactacgcggagggcagcacaacgcaacacaatatatacagaaagaatgaaacgtacagaaacttcagcaagtgatctgctttcttgtgttgtcttctcctgaccggg

SEQ ID NO: 480798 - DNA, 240 bp, Homo sapiens
caggtgacgcccgagttccgcaccgtgggggtcgtggcagccgcttccacgcgccacgctcatccgccgcacaacgcaacggcggccagctggagccgggccagcgggggcaccctcgccggctccggcgctcccggccgcgccgacggccagccccgccgacctggtctacttcgaaaatctcccgacttctgcgcgggaccgcgcctggactcggcgggcaccgtgggccgcctgtgc

SEQ ID NO: 480799 - DNA, 1152 bp, Homo sapiens
  misc_feature (1152)..(1152): n is a, c, g, or t
gcaccgtatgatgagaccatcttaacgatagcatataattaagcatcacttggtcgtatccctagatacaaccggcccattggaacgttactacaccttgtcaatattgctcctatagatgtgagttgactgccaatgggatatctatcatagcaaattatggcctgtctatcttatcttgaagtcttcatgtgccagagtgataactggagcttcgtgcgtacctgtctcgtttccattgaattgggttttgacaaggtcgaccattggacattgcctaagttgtaatcaatgctctttgcctttgttcctcgagacacgtattgacactgctggcatcttttcctagacaatgcagtggtgcatagtgaactacgtagtaggtacaatagatactacaacatactaattaacgtgtatccacagacatgacaccgtgacgttacgacttctagaaaaggtagatccgcctattcattctaaaaaagcttctctagtctagcgcctcgttgatcatggcgtcgtactacatttcttaatcaggctgggcatattgaagccattctagattgagttcctcgctaagtaccagctgttaactaacaggctagtttcacttcatactaagactaaaagattgttttcgctaacaatggcgcttgaccactagagggaaattttataatgttgcgaacggagtgtacatagaatgaaaacaaaattgcattgaatgttgtcggaggacaatatttagtttccagagaatgagtgcgtaggaattatctattgtcaagttcgactcaaatgtatatttaaaaaaccgcatgtttaaattgaagttggttaggagaaaggtaaaaatcagtaattaagtgagtcttcactggcactcgtcaaaagtggaaggggtctgcaacatttggttaacagaggcaattaattgggaacgtataaatcgtaaggggcacccgttgtaacgtttcctgcgtatacaagtacgagaaaatgtctggtaaacaatggtggtcagtttaccataaaatttctcaatgttttgggcatttgaaatttgattaagttaattgtcccttcctttgtaacgttaatttggtcagtttgttacacacaaatatttatttcagggacggtaan

SEQ ID NO: 480800 - DNA, 298 bp, Homo sapiens
gcacgaggatagatagatagatagatagatagatagatagataggatagattagatagatagatagatagatagatagatagatagatagatagatagatagtctcatcaggactgccagaaaataactcacatgaagtttaactttaatgtcagttttttacgtgtggcctaagaaagcagtcttaccttatacaaacatgaaaagaaaattaatcaacagagtagaattttctactgttaaaattaaaagctagattgtgcagatttaaagagtggaaaacaaactgctctttttg

SEQ ID NO: 480801 - DNA, 182 bp, Homo sapiens
agcaggtggccatctcagcctcctaatgacctccggcctagcccatgtgtgatttcacttccacgtccactaaggctcctcatactaggcctactagatccaacatcactaatccatataccagatgatggcgcgcatgtaacaccgagtaaaggcagcatagcactggggccactcgtgga

SEQ ID NO: 480802 - DNA, 1033 bp, Homo sapiens
caggttgggttactgtatccccagttggaggtaatagctggatttattccggtgccctgttagtgacgaaaggccatataatgtgccccaagatatctgttagtctcccagagaagcttgctgaggctaaatgttagaagccgtaaactatccacccaatctctgcccaacaagggttctcagacactctgttttgggctggtgcccgcactcacaggtggtacctatctggacatgccagatcccccacttgacagaaattatgttggcttggcagctgaaagtgtctcccgaatttcaacaaggaaggatatagcatcttttcctcagtctttatggagtcaaatttgcacttgtactctaacttattggcacatggaagtgtgtgttaacatgcctcttagggattttttttttttttttttggaagcactggaatacagctttattcctacacgattagacccgttaccccgtgggtctggccgaccgtcctgacttggagatccctgagctgcgccgacgcttccttcgtcaacattcagcagctacttgatgagcgcccttcagagggccttaggtccctatgccggcgcggggttacaggagaggacagacaggtcggtccctgttctctaggagcccatgatccgcgcagagacaggcgtttaacgacgacttacacgatcacttaaatacaactgtggtgaaccgcacaagatggacgcgcggtggtctgcggtgaatgaccaggccgacctcgtgtgcgacccacggagggcaagggtggaccaggcaaaggggacagaggactgggacctggaggtgggctggaggcgtttggatcattggaggaaaggaatagccctgtgtgtgatgagcattgagaggaggtatggctagcaccatgtatggctgaagaactaggcaatgggttagcgcagtcagctgggcggacacgtgagccacggcatgaagaaagggtttgggcctagagtgcgggttcttctgtcttggtctttagatcttttgg

SEQ ID NO: 480803 - DNA, 383 bp, Homo sapiens
  misc_feature (36)..(37): n is a, c, g, or t
  misc_feature (365)..(365): n is a, c, g, or t
  misc_feature (371)..(371): n is a, c, g, or t
aagcgcccagatgcgacttgtgatttaatccgccanntgagctgttcgtacaatggctgatgctctgaatttgtcccattcacgccacctctttttatttaatttgcgataaccgcacttttcgtcatgccaaacccaaccaactgtactacgtgtactattgtacatagtacagttgaacgtgtcaacacgtgacaagcttactgctggccacttttgcctcataaacaacgcaaaaaagcaccgcaacatgattgttgcagtgcttttttgacaaacgaaaccccgtatctgcttacaatacgggggattatatatctttaagattgagaagagaagagattttttaggagagagaataaatngaaatnccccagtattta

SEQ ID NO: 480804 - DNA, 720 bp, Homo sapiens
  misc_feature (4)..(4): n is a, c, g, or t
  misc_feature (61)..(61): n is a, c, g, or t
  misc_feature (68)..(68): n is a, c, g, or t
  misc_feature (70)..(70): n is a, c, g, or t
  misc_feature (85)..(85): n is a, c, g, or t
  misc_feature (87)..(87): n is a, c, g, or t
  misc_feature (93)..(93): n is a, c, g, or t
  misc_feature (99)..(99): n is a, c, g, or t
  misc_feature (108)..(108): n is a, c, g, or t
  misc_feature (110)..(110): n is a, c, g, or t
  misc_feature (132)..(132): n is a, c, g, or t
  misc_feature (134)..(134): n is a, c, g, or t
  misc_feature (141)..(141): n is a, c, g, or t
  misc_feature (153)..(153): n is a, c, g, or t
  misc_feature (174)..(174): n is a, c, g, or t
  misc_feature (210)..(211): n is a, c, g, or t
  misc_feature (213)..(214): n is a, c, g, or t
  misc_feature (220)..(220): n is a, c, g, or t
  misc_feature (225)..(226): n is a, c, g, or t
  misc_feature (237)..(237): n is a, c, g, or t
  misc_feature (246)..(246): n is a, c, g, or t
  misc_feature (253)..(253): n is a, c, g, or t
  misc_feature (256)..(256): n is a, c, g, or t
  misc_feature (306)..(306): n is a, c, g, or t
  misc_feature (326)..(326): n is a, c, g, or t
  misc_feature (340)..(340): n is a, c, g, or t
  misc_feature (345)..(345): n is a, c, g, or t
  misc_feature (349)..(349): n is a, c, g, or t
  misc_feature (358)..(358): n is a, c, g, or t
  misc_feature (368)..(368): n is a, c, g, or t
  misc_feature (375)..(376): n is a, c, g, or t
  misc_feature (378)..(378): n is a, c, g, or t
  misc_feature (384)..(384): n is a, c, g, or t
  misc_feature (401)..(401): n is a, c, g, or t
  misc_feature (407)..(407): n is a, c, g, or t
  misc_feature (410)..(410): n is a, c, g, or t
  misc_feature (416)..(416): n is a, c, g, or t
  misc_feature (433)..(433): n is a, c, g, or t
  misc_feature (436)..(436): n is a, c, g, or t
  misc_feature (446)..(446): n is a, c, g, or t
  misc_feature (526)..(526): n is a, c, g, or t
  misc_feature (547)..(547): n is a, c, g, or t
  misc_feature (595)..(595): n is a, c, g, or t
  misc_feature (646)..(646): n is a, c, g, or t
  misc_feature (719)..(719): n is a, c, g, or t
tgangtaaatgactttactttgagaaatgaaggaaaaaaattacaggaacacatggaaaanacatgancnccaagggaaaacaancnaaccanaaagcnttaacgccngncagtcaagccgaagccgaaatncngggagcntgacacgccgcngggccaaaaggaatggacaancagtatcccccccccccccccccccccccccccccnncnnaacccnccccnncccccccccanccccccccnagggccnccncacccccccgggccccccaaaacccccccccccccccccccccccccccnccccagtcaacaaaggcccncctggcaaacaccnggccnaacntgtggcccnggcgagcccnggccccnncnatggcngtggtgttgcccacgcntgcccncancccccngtcccttggccaggccnccnccaggccccncagtgggaggctggtagttgatgccaaccttgaagccagtcgggcaccaatccacaaactggatgctgcgcttggttttnatggtggcaatggcagcattnacatctttgggaaccacgtcaccacggtacaacaggcagcaagccatntatttaccatggcgagggtcacatttcaccatctggttggctggctcaaancaagcattggtgatctctgctacagaaagctgttcatggtaggctttctcagcagaaatgacaggggcatatnt

SEQ ID NO: 480805 - DNA, 180 bp, Homo sapiens
atgggtaaaaaggcatcctgagagagttctagaccgacccatgttcctgtggacacactatacgggtcacgaggggtggcaagacaggcctaatctctatgacggtgaatctcagggctatttgtggatttgttataaacagacattcttttggccttttcctggcactggtgttgccgg

SEQ ID NO: 480806 - DNA, 328 bp, Homo sapiens
gtgatatgccttgatgtgggtttgtttttattcaccgtgctatgtaattggtgggtacattcaatctgggaactcattttttttagttctggaaatttcttccctttcatttttttggtgtgatttcttttcctggatcacatattatttggatattggatttactagatttccttggattttggatttcctggattttcttatctttcctgtcttttatctgtgtttttttttgttttctttttttgacctcactttctgaagcaacttcttacaactttatctcttaactcttttattgcggtttgcatttcaggcactatgattt

SEQ ID NO: 480807 - DNA, 813 bp, Homo sapiens
  misc_feature (1)..(1): n is a, c, g, or t
  misc_feature (71)..(71): n is a, c, g, or t
  misc_feature (113)..(113): n is a, c, g, or t
  misc_feature (136)..(136): n is a, c, g, or t
  misc_feature (144)..(144): n is a, c, g, or t
  misc_feature (166)..(166): n is a, c, g, or t
  misc_feature (175)..(175): n is a, c, g, or t
  misc_feature (198)..(198): n is a, c, g, or t
  misc_feature (208)..(208): n is a, c, g, or t
  misc_feature (237)..(237): n is a, c, g, or t
  misc_feature (267)..(267): n is a, c, g, or t
  misc_feature (269)..(270): n is a, c, g, or t
  misc_feature (275)..(275): n is a, c, g, or t
  misc_feature (306)..(306): n is a, c, g, or t
  misc_feature (313)..(313): n is a, c, g, or t
  misc_feature (321)..(321): n is a, c, g, or t
  misc_feature (325)..(325): n is a, c, g, or t
  misc_feature (502)..(502): n is a, c, g, or t
  misc_feature (508)..(508): n is a, c, g, or t
  misc_feature (543)..(543): n is a, c, g, or t
  misc_feature (550)..(550): n is a, c, g, or t
  misc_feature (558)..(558): n is a, c, g, or t
  misc_feature (583)..(583): n is a, c, g, or t
  misc_feature (588)..(588): n is a, c, g, or t
  misc_feature (593)..(593): n is a, c, g, or t
  misc_feature (605)..(606): n is a, c, g, or t
  misc_feature (630)..(630): n is a, c, g, or t
  misc_feature (634)..(634): n is a, c, g, or t
  misc_feature (636)..(636): n is a, c, g, or t
nactggaagtaacagtcaaaaaattcttaaagccactggattagaggcagagagactgaaagaagagaccngggaagaggttgctacagaaatgcagtctgggctgctaaggntgatgtgtggagatgccaaaganagcctcangcagtagaagctggggctaggnatggtagcngctcacacctgtaatctgaacantttgggaggncaaagttggtggatcagttgagcccaggngttcgagaccagcctgggcaacatggtganannctgtncccacaaaaaatatttaaaaattagctaggnatgatantgtgtgcntgtngtcccatatattattacttggggggctaaggtgggaggattgctttagtacaggaagcggaggctgcagtgagccaagatcatgccactgcactccagcctgggcaactgagtaagaccttgcctcaaaaaaaaaaaggcagaagctggagatgaggaaaggtagcctcctactgtncagatncaagtcccaccagaatatctcatcctcctttgcanaaaaagnaataatgncctagagcagtgtcctaccttattntactnaccanaatgggaaatannattactttctaagttgaattgagnttgnantcagaaggtacagctataggctgggcatggtggctcacaactgtaatcccagcactttgggagggcgaggcgggcagatcacttgaggtcagaagttcaagaccagactggccaacatggtgaaaccccatctctactaaaaatacaaaaattagcgcacacctgtaatcccagcta

SEQ ID NO: 480808 - DNA, 117 bp, Homo sapiens
ccactgcctgctggtgaccctggccgcccacctccccgcccgagttcacccctccggtgcacgcctccctggacagattcctggcttctctagcaccgctgctgacctccaaatacc

SEQ ID NO: 480809 - DNA, 195 bp, Homo sapiens
tagtcactcggacatgtttactctcatgtatttcctgatgtctttcccagttttattaggaattttttgctgtcctcttactttatttattttgttagttttgttttactttattttaaatcttttctagagatgggggggtctcactatgttgcccaggctggtcttgaactcctggggtcaagcattctactc

SEQ ID NO: 480810 - DNA, 104 bp, Homo sapiens
ctaaactacagcagcaacagagagagctaaaacaattgcaggaagacagaacgaaactgattgacattcaggagaaaattcaagcattgcaacacggtctctca

SEQ ID NO: 480811 - DNA, 280 bp, Homo sapiens
gcaggagaaagatgtccatctccgtgagcgcgggatgcagtgtaagatggtgtagagctactactaggttttagtgacaaatttacgtaaatgaaggccctcaggacccagatgctcatgcggctcacttcaattgcatatgattggcgaatgggacattcgggaatttaaatctttgagataagaagggcttgtcgttaaatatggaggcaattatttcattctaggtccaatacgcaataacaatgtgtttcggttttccactcagcaccttcaaaac

SEQ ID NO: 480812 - DNA, 105 bp, Homo sapiens
acagaacccaaaaaaacccccgcaaaaattcaaagcccttgcaaaattttttaaaatgtcagggtttgggaaattaaatccaaaaaaaactttttgaagggtgta

SEQ ID NO: 480813 - DNA, 323 bp, Homo sapiens
  misc_feature (208)..(208): n is a, c, g, or t
tcctccccgcacgcccaaaagtacaagtcaatccagccatgtcttcagctgaagagacggtctgcctggttatagatgttaacctcatggggcgcttagtaaagctatctcctctaaggaagccttatggttggcagctttcctgttttttcctaaagtataaaaaaacaacaaatgaggcctttctcatgtcatcttgattctttgngtcatgtttactttttattggactgataaagtccagagttttcaacccctgaatagacaggggtgattatcatagttggttatggcagataatgtacacaggagatgcaggccat

SEQ ID NO: 480814 - DNA, 420 bp, Homo sapiens
  misc_feature (420)..(420): n is a, c, g, or t
ctttcaacttatgtgcgtgtactgcgtagctgcgtccgacgtctgtggtgacctcttgacctttgctgaccacagaaatgggcagggctgtatcctggaccactcactaggatatctctcaccccgactgaatcttgacgtgttgcgtcctcgtggagtccctgaacagagatgagcatgatggcctcttggtggatcaccctgatatgactgacaatttgcggtttctacaagtgggcctcctgggagcccctagtgccgggagggccactgtctgcccgcagctactgggccgaaaggggatccctgaatccgggaatgtgcctactacttctatgccaagatctgtaggtgatcacgattggaacccaggtgatgctacttgacacacatggcattataactcctggacacactggn

SEQ ID NO: 480815 - DNA, 109 bp, Homo sapiens
cacgagggcgaccatctcaaccaaatccgacggagagatggtgctgccaggcttcccggacgccgacagctttgtgaagtttgctcttgggtccgtggtggcagtcacc

SEQ ID NO: 480816 - DNA, 931 bp, Homo sapiens
cacgccgaagggttcgcgccgtctccgcgccttgagggagcaatttgtggcgctctcccccatttccgtggtgtccaaccctcagtgttcccgggtgccccccctttgggttgcgcggtcagtataagccgtattgcggggtgggcaggcacccccgttttggtgtacgcggcttttataaactgtttatgtagtatctggccagaaaacgcatcagttgtgcatcaccgcgggggcgccgccgccaatgattgggggcgaaccgctccgtccactgcccagtttttctcccaataggcgccgctgtgcaatggatcagctgtgccacccccagagtcgaccgagcggcgcaaacagcactgggggcgcaccaaacttgcagatgccaaggtcatccccgggccgacccctggccacggctggcttaaacgaagtagaggggtcccccagtccacgggcccgtgatacgtggccgacgactagcgacacttgggactcgagagggtcgcctacaacaagttcgcccccagatagcggcccgacaagagtgtcgctataactagactactcctactcccagaggacgacttcacgactacgacggcttacacgaccagcggtcgccacacgcgcaactgcgtggcgcacccagggcgcctccccattggccacgacggagcggtctaggagcacccgagtatcgcaccaccccgaacggcggggggataacaagggggcttacaccaagaacagtcaccgcggaggaccaacacgtaggatctaacccatgcgtggggagttggcctccaaaaaaagcgaggcaaaaaggcggggggaagagcccccccaaacgcacgagttcgggccaaaaaatggggcaggggtgggacattttagaaaaaacccccatacccgccccacaataacgacc

SEQ ID NO: 480817 - DNA, 243 bp, Homo sapiens
tgtccgcatctggggaccgctctgcttcataccaggtctcacatgaagttgatctcctctgtacagaatgtctagcctatggcttgcagttcaaccttgatttcatgttgggtgcatccacttccttcgtacagagtcaccaattcattctctgctgctgtgcgcttcttgatttcatccatcctatttatccttaacagtcctccaccatgtcctgcatgtttctcagcattcctcgcaaca

SEQ ID NO: 480818 - DNA, 259 bp, Homo sapiens
attcgcggccgcgtcgacttttttttttagatggagtctcattcactctgttacctaggataaagtgcagtggcctgatcttggctcactgcaacctctgcctcccaggttcaagggattctcctgcctcaggctcccaagtagctgggattacaggcacatgccactatgcctggctaacttttgtatttttagcagagatggggtttcaccatgttggccagggtggtgtcgacgcggccgcgaatttagtagtagt

SEQ ID NO: 480819 - DNA, 314 bp, Homo sapiens
acgatcgcttatgtcgcgtgcatgttggagactctcgtcgtatccccccgaagggcgtgacatcaccgtacggaccaagccgtccagctctacaggtcatctttgcaggtggtcaggacaggtacagcacaggcagcgacagtgcgagctttacccacaccaccccggtcatgtgactcaaacctgagctggagggaccacctctagaggcctataccattcaaggacagtatgccattccacagccagatttgagcaagctgcaccagttggtaatgcaacagtctcattttcccatgacacatggtacgcgg

SEQ ID NO: 480820 - DNA, 400 bp, Homo sapiens
gaaacaagccctcccatgccatgtccccgtgggcccccccttatgtaagaatatttccatatttcagtgggccctccccaccccagcacttgtccgtagggtcccacgcgtgccccgttgttgaatgtatgttgggtatccccaggccctgaaaaggtggaaaaaaaatcgggtccatttggatgataaagagaaattaacttttcccaaaggaagttttgcccttaacccccctttttcctaaaaaattgttcctaaatgggattttcaaggggaaaattgtgagaacgccactcccgtagttgatgttgtgggctgtaaaggattttaggaggaattttaaaccggaaatttaaaaggggggaaatttttaaaaagcaataaacattcccggatttga

SEQ ID NO: 480821 - DNA, 1338 bp, Homo sapiens
tcacaggatttttatttataaaatttaagtgggtaggggggcgcccgacccaaaagaggcagagggggtgggggggtggggcaccaactgcgagggcgacacacacagagaaaacacacaacaaaacagtgtggccagaggcccacacaaatttcttctgtggcgggggggaacagagagggagtgaaaacaacaacaaacacgccgggcgctgcgacacgcgcggggcgtgacaaagagggcggagggcggaccccagcggggcgcggtttctcccccgcgcgccccccgagagaaaccacaccccttgagccgcgcggtgacacacctctctcgcacgcccacgcgcgtgtgcccccctataaaaagatactcacatctctctttcatgcgtgccactctgcggcgccccctgcgcgggggctcttctctcctcgcgtgagcccccccctgtagagacatgtcttcccccgcgcgagacaagaatcttcccccgaggcgagagacgacacaacaggtctctcgaggggccgctgtgaccccccccaaacaccccccccacaattaacccccactcttttttgtgagagggcgggcacaccccccctgtgtggccgcgggccccgtgtgtgtctgcgggcccccccccctctttataaaaaccctcccacaccgcgcgtgtgtccccccccccccgtgtgggggaacacaccagcactccgtgaaactcccgctcactctcccatctacccactctccccatccccctacccccccgcgtggggacacacaacaaccaccgagggagcaaaaacaaaaagaccccacaaaaccaccccgcgggggggagcgggggcgcctcacaaaccaccaccgcggcgcggacacacactcgccctgtgcaacgcgaacacacaaaaacacaacacccccaccgacacaaaacagaacgcccccacaaaaccccccgcggcaaaccacaccgcgcccagcaagcccccacccacaaaggcaagcaggcggcaccccgggcacaatgcgcagcgcaccccgccgtcccctggccccccccccgccccccggggcacaggggaccacccaccaccacccccggggcggccacatgaccagcggagccgcaccacctcaaaaaacaaggcccccgcaacacaccacccggcagacaccaccgacgaaaccccgcaaaaaaaacatcccccccaccacacgaagaagcaccccggcgagcacacaacacaaccgccgccacaaacgagcacacaccaccccccaacaccactctgctccaccccgcccaagagactccccccccgcaca

SEQ ID NO: 480822 - DNA, 380 bp, Homo sapiens
cagcttatcaacagattcacttagagctacagacattttactctacattaagcttctcatctttcacttctgtagtgaaggtcgctcttatctttatcctctgaaatcataaacaatgcaaaaaagaaaaaaatatatagctaccctctatatagtgacgttctactcaatctctggcttaagagccccaaaccatgaggagtaataatagaaaacctaagactaaaatgtaagttatcacagccatacagtcagtgacttccataaatcttttaatttgccctccactttaataatcacctcactgaattgctatgttcaacaggctatactagaactagatctaattattgaataaaaatagaatgtatcaggccggg

SEQ ID NO: 480823 - DNA, 231 bp, Homo sapiens
aggcatatccaggataaagagcatcccctccgaccaggcagaggctcatctttgcaggccagcagtctggaagatggccgcactctttctgactacgacatccagaaaagagttgaccctgctcctggtcctgtgtctgagggttgtctgctaatatcttcagtcatggcattcgcagtgcccagtgatggcattactctgcactatagccattggccccttatcgattgg

SEQ ID NO: 480824 - DNA, 102 bp, Homo sapiens
cgtgaggttattgattctccaagaagaactgaggttgtggagcgggcaggtaggacctattgttcccgttgcgtcttggctgctgtgggatgctgttgattc

SEQ ID NO: 480825 - DNA, 214 bp, Homo sapiens
agccaatagatactatgatactatacatatgtagctaggcgtagccatggcgcaagtagatactacctatctagcatacctagtcgggacaatagccatgggtaacataggtaggtagcctgccagaaacatgcactagtgtataggcgtaacagtgtactattggcgggatagtacccacgctacacactatacatagatagggatattcgaa

SEQ ID NO: 480826 - DNA, 598 bp, Homo sapiens
cgctcgcgtggcctggagatttaccagaggaaaccgcttttaccgttgttacgggtttcttgggcaggcatttaagaggacaaacacttattgcccatttttccacatacacgtggagcagtttattagaaaaacaaaacttaaacacaagattctaaatgcgaggggcagtttaatggataaaatatgacctgtggcgaaacaagcagctagctacaaaatccatcaccaccaacagtttcaatgttagcactaagtattaaaccaaagtaatgcatattctgggttagcttcttcaagaacagcccgtttattctggttcaatctctctgaacaatactgggaggtaatagctacactgacaattctcacaaaaaaacagtgttgggtcttgccatcactgaatttatagtataaatctcccaaggctttaatctagttcatcagtgcagtttagataagagagccatacaaacaaatgggcatactgtcagttaatgagaaatacaactgcacatgcacaattaatattactctctcttaatctactaagagaacagtttattagtagatttaacaaaaaccatctctagaattg

SEQ ID NO: 480827 - DNA, 748 bp, Homo sapiens
  misc_feature (207)..(207): n is a, c, g, or t
  misc_feature (276)..(276): n is a, c, g, or t
  misc_feature (312)..(312): n is a, c, g, or t
  misc_feature (384)..(384): n is a, c, g, or t
  misc_feature (401)..(401): n is a, c, g, or t
  misc_feature (408)..(408): n is a, c, g, or t
  misc_feature (413)..(413): n is a, c, g, or t
  misc_feature (418)..(418): n is a, c, g, or t
  misc_feature (426)..(426): n is a, c, g, or t
cggccgctcggcggaggggacgggccgggtactctcctccttcctccccgagctccagctgccggcaggacctttctctcgctgccgctgggaccccgtgtcatcgcccaggccgagcacgatgccccctaaaaagggaggtgatggaattaaaccacccccaatcattggcaagatttggaacctcactgaacaattggtattgtnggattgccaaactgtcgggaaatctactttcttcaatgtgttaaccaaatagctcaggcttcagccagnaaaacttcccgttctgcactattgatcctaatgagnagcagagtacctgtgccagactgaacaggtttgacttctctttgtcaagtaccacaaaaccagcaagcaaanattcctgccctttctanaatgtgngtggnctatngctggccnttgtgacaggagctcacaatgggcagggcctggggaatgctttttatctcatattagtgcctgtgatggcatctttcatctaacacgtgctatcgacagcactgatgactattccacggcccgggttgcaagggacagatggtagcatccctatcccgcagccatatcagacaatcaatcacatgaacgaagcttccagttcaacgactgccggcacatgatcggcgccaatactgctcaatacacaaaggtggctgtgacacgcagggcgtacaaacctcaacccgaccatgataccacgccccagccaactctgggcacc

SEQ ID NO: 480828 - DNA, 563 bp, Homo sapiens
  misc_feature (254)..(254): n is a, c, g, or t
  misc_feature (316)..(316): n is a, c, g, or t
  misc_feature (321)..(321): n is a, c, g, or t
  misc_feature (325)..(325): n is a, c, g, or t
aattttccatggagctcctggaaacctcagagataaaattatccacataaacctgtgagttcaagggaatgatgagacgggtccagaaattaagcctgtcctcgttctgatatgcgtattctcttggtccctcggtaaaatacctcccttcccatgcctggatttacccttccgaatgccgtgtgaggttcactcacttttatgttagaaaggacctacacctccgagtctagaaagaaacatttattcatggnagagcacaagcttttgaatttgataaactagattccaattaagctgtggcagtcaccagctngggcnggtntgtaacagaatatccatatcacaagtataattgtgtaaaagaaaatcatgatatctacacacaggatgttagaaggagtgagagagaatttatgtaaagtattgtgctgtgtctgaaatgagtggttcacaatatatgttatttcccttctttacatcctcctttctgctaaattcagtccaccaactcgggtctctgaatcccactcaagtcaccatttgcccgactcaggtggtgt

SEQ ID NO: 480829 - DNA, 199 bp, Homo sapiens
agctcaggagtctgagaccagccttgcaatgtagtgagactctacctctcccaaaatatacatataaaaaaaattagccaggtgtggtggcatgcacctgtagtctcagctgcttgagaggctgaggcgggaggattgcttgagcccaggaggttgagactgcagtgagtttgtttgtaccactgcactctagcctggg

SEQ ID NO: 480830 - DNA, 447 bp, Homo sapiens
  misc_feature (288)..(288): n is a, c, g, or t
tgccacatgaagaaacccaaaggggagaaacataaaacctttatatgtcagtgatataaaattctagaaaatgcaaactaatccatcataaaggaaagtaaatcaacagttgtctggaggaccagagagagcaggaggagagagattattaaaggggttaaagtaaatttgggagtgcccttccatttttaaatactatgaaaatgaaagtaaaggcacatgcatgttgtaaactaatagtaacaaacagaatgggttggagtggggtgttgtctggggacatcattncaaaatgtaagccagtttatctaaattttgaaaagcccgtggactctgatctgactgatgaatgttggaagagataagtgtgctgcaaatgggggaattaataaaacagctgtatatagactagtcatccctgtcccccctgggtcataaaaccaaaaa

SEQ ID NO: 480831 - DNA, 348 bp, Homo sapiens
  misc_feature (281)..(281): n is a, c, g, or t
tcacacacacacacacacacacacacacacacaccacaatttcttcattcatctgtatatgggcactatagcctggttccatatcttgactatgtgtgaataatattgaatgaccaagagagaccagatatctctttgcacatatttattccagttcctctgtacctttttgaggaccctccatattttggttattccaaaatagctatacctatttatattcccaccaatagtgtctaatggttcccttttctccacatccttcccaacacttgttatcntgtgtctttttgagcacagccatcctcacatgtgtgaggtcacagctcagtgtggttttgattctca

SEQ ID NO: 480832 - DNA, 711 bp, Homo sapiens
  misc_feature (352)..(352): n is a, c, g, or t
  misc_feature (520)..(521): n is a, c, g, or t
  misc_feature (532)..(533): n is a, c, g, or t
  misc_feature (541)..(541): n is a, c, g, or t
ttcccacgggggtatgggcccgcggcttttcccaggccacccttggggcttccccctgcggggcctttggggtttgttctcgcttttacctggtgtgcggtttgcccggcccccatggggcgggaaggcggttttctcgggggttttccgtttcccccccccttcggctatggggggtttgtttggcccccaaccccgggcctttcccaaatttgtttcaacccccccccctttccccaaaggggggggggggggggcggggggggggtttttttaacaaagcctttttttttaaccccccggttccccgggggccccccccccccttttttttccccccttaaaaaacccnggggccgttccccccccgggttttttacttgggccgggggggggttaccttttttccccgggaaccccttttgccctttgggcctttttgggggcccctttaaaccagttttgtccaaaaaaccggggggggccgggccgggatttcccgggtttttttgccccgggnncccccccgggnncccccccngggtcccaaaattcccaaatttttccggggggggggggggcccccctttttccccccccctttggggggttggggcggggaattccttttacccccgggggcgggggttccgggtgggggggttcttcccccccccccccccccggggcccgggggggggttgggtttta

SEQ ID NO: 480833 - DNA, 521 bp, Homo sapiens
ctgcaacaaatgcccatggcccaactatatgacctctatccttggctgaccacagccctgcccacaggcgagaatccatggtgctgattctatccagttgtcccgaaacaaattttcaatggaaatctgaggccccaaggcttcccttgtagggcaggtcactgataaggttccacttgcctcaaccagcctatagctcttggacatggggagacagagtcagacgcaacacctgtcctgtgtcccagacagtgggggatggaggacacctggggccccagtgctcacccgtggcacaagccctgatacgttagctcttctatactaagtgcaccaggcttgagccccacacagggaacaagggagtgggtgggctgaggccttcagctacctgggagcccagcagtgttctcggccagacatgaaaatgctcctttaaaccaaaaatgtcatggctctgcccccaacctgcttaggcacggagggtgaagcctggaggggggcaattcctatgctccaca

SEQ ID NO: 480834 - DNA, 675 bp, Homo sapiens
  misc_feature (352)..(352): n is a, c, g, or t
  misc_feature (520)..(521): n is a, c, g, or t
  misc_feature (532)..(533): n is a, c, g, or t
  misc_feature (541)..(541): n is a, c, g, or t
ttcccacgggggtatgggcccgcggcttttcccaggccacccttggggcttccccctgcggggcctttggggtttgttctcgcttttacctggtgtgcggtttgcccggcccccatggggcgggaaggcggttttctcgggggttttccgtttcccccccccttcggctatggggggtttgtttggcccccaaccccgggcctttcccaaatttgtttcaacccccccccctttccccaaaggggggggggggggggcggggggggggtttttttaacaaagcctttttttttaaccccccggttccccgggggccccccccccccttttttttccccccttaaaaaacccnggggccgttccccccccgggttttttacttgggccgggggggggttaccttttttccccgggaaccccttttgccctttgggcctttttgggggcccctttaaaccagttttgtccaaaaaaccggggggggccgggccgggatttcccgggtttttttgccccgggnncccccccgggnncccccccngggtccaaacccagggaggggcggggggggggggcgggggtttggggtttgggtttttttttttttccccccaaagcccccccctttgcccgtttttttttcccacccagggaataaaggggttctttttttta

SEQ ID NO: 480835 - DNA, 159 bp, Homo sapiens
acgaaaatgggcaagaacataattgccttgccgatgaaaaaatagtggtcctgccaggctataaaaagcagcggtgcaaaacttagtcctatgcccgcccacgctggcagcttgcgcacggcccacaaaaatatattgaacaaaatgagcgagtgaata

SEQ ID NO: 480836 - DNA, 755 bp, Homo sapiens
  misc_feature (352)..(352): n is a, c, g, or t
  misc_feature (586)..(586): n is a, c, g, or t
  misc_feature (588)..(588): n is a, c, g, or t
ttcccacgggggtatgggcccgcggcttttcccaggccacccttggggcttccccctgcggggcctttggggtttgttctcgcttttacctggtgtgcggtttgcccggcccccatggggcgggaaggcggttttctcgggggttttccgtttcccccccccttcggctatggggggtttgtttggcccccaaccccgggcctttcccaaatttgtttcaacccccccccctttccccaaaggggggggggggggggcggggggggggtttttttaacaaagcctttttttttaaccccccggttccccgggggccccccccccccttttttttccccccttaaaaaacccnggggccgttccccccccgggttttttacttgggccgggggggggttaccttttttccccgggaaccccttttgccctttgggcctttttgggggcccctttaaaccagttttgtccaaaaaaccggggggggccgggccgggatttcccgggtttttttgccccccggggcccctttttttaatttaaaaaatacctctttcccggtttggttgggggccgggaattaaccccncntatatggggcccatttttctgggcccggccttttttaataaacccggggtttttttccccccccctttggtttgggggaggccccaaattggggggggggtggatcccggaagggggtttggggggtttgattttcccccccctttattaattttttctttttccca

SEQ ID NO: 480837 - DNA, 594 bp, Homo sapiens
  misc_feature (352)..(352): n is a, c, g, or t
ttcccacgggggtatgggcccgcggcttttcccaggccacccttggggcttccccctgcggggcctttggggtttgttctcgcttttacctggtgtgcggtttgcccggcccccatggggcgggaaggcggttttctcgggggttttccgtttcccccccccttcggctatggggggtttgtttggcccccaaccccgggcctttcccaaatttgtttcaacccccccccctttccccaaaggggggggggggggggcggggggggggtttttttaacaaagcctttttttttaaccccccggttccccgggggccccccccccccttttttttccccccttaaaaaacccnggggccgttccccccccgggttttttacttgggccgggggggggttaccttttttccccgggaaccccttttgccctttgggcctttttgggggcccctttaaaccagttttgtccaaaaaaccggggggggccgggccgggatttcccgggtttttttgcccccccgggccgggggggttgttcaagggcctccccctcctttaatttaaacccccctttttttgccgggggggtttttta

SEQ ID NO: 480838 - DNA, 765 bp, Homo sapiens
ataagatattataagaaatctagtaaatgatttaaaagcatacaggaggatgtgcatagggttatatgcaaatactatgctatataatatatgggacgttgagcatttgtggatttcgatactgggggcactcctggaaccaataccaccttcatggaatgccaaggatacagactgatatgttatactattctccattcacatacggctagttgattgaaccaccaatgctcagataagtccattaatgcatggaatatggagccgtgtgaaaaacatgtctcttgaagtttggagtccgcgtggtccaccataaatctaccttcaatatcagaggtccatataaattgatgcctaaaccatacaggaaacattagagtcagaaattcttctttagaaaatattcaagatgtgttggtatcccgatgggattattctgctatcaccacaggagtgtaaaaaaatccactattaatgatccatctaagtatagtgctcattgggtccttatctgaatgattgacaggttctttgtcaggtgtatcatatccgtcagtcctgtcaatagtaaggactcatacctgaagagtactgaatgcaggacttctggtcagaagaatgctcctggaatctgggtttgaatgtttttgacaaagtacgtattggcatgtccgtcacgagagtgtggggtaagagtgaccttgtgcggaccggcgtagtacattctcaaatgttcctcagggtctttatctcgtgtactattgg

SEQ ID NO: 480839 - DNA, 1224 bp, Homo sapiens
  misc_feature (391)..(391): n is a, c, g, or t
tgacggccggtgagattggaagtggcggcgtgcggcaggcggcaggaggggagtcctgaggttatgcgttcctctagaatgagtccctgcggaagatagcgcttacgggcgtctaaggaacctagcaggactcaggggttgtcgtaccgtggagtcatcctcaagagaccacagtggtccttgtcccactgcaagcatgactggtcatgtagacagtcgagcgagcatcgcgcaccatcctaggaggcaatgattccgtatcacgacggtatgttcggcaacgtgctcggattaacaaacgaacctgaaagatccctaggaactcattgtagacagccttataagtgattgtgggattgtcagtaggaccactttatacaagttgcggtantctttatcaaagtagcttcatcagacgaggccgttgccgtctagtgagtttagaccaaggggcaagtccgggactgtaatggaactagttcttacaattccgtcgggaatacctatcaggtagaacacaatggcgcgtcctgcgtgggcccgttgagcttgtgccctggtggtgttggctggagtgcacaaagccagcactgcgttgctagtgttcgattgttgcgcttccctggattaggctgtagtggttacattcgtctgctcgtcgtctctacagaagcacagaaacgtctcaatgtttgcactatttcccaagagttttactgagatgactgatagcttagaccaattacgtgcgtgcagtcccctggtttataccaagtagcaaaaatttaggtaccggtcagttggccaatggatggagtaaccatgtgctggctatatggggccagagaatgcacagactggtagtagacagagggaatgacccattcatggctaccttcagtcattcttacatccaggaaataaccataaaccagattgcgaagtcaaaatggacttttcctaaagggacaggatgggaggacccctgtagaaacaaagggacaccatatcaggaccgaacagcaaatacacagattaacggcagacaaacgcgttaccacaaagaaaaggggaagccaaacaaaatcaaagcaggaggaggaacaaaaaggaggggacgggaagcccagaagagcaaagaggaaagaacgagcagaacgagacagaagaggcggacggaaacacagggagagacaaggaaccgaaaaggaaggaaggacgaag

SEQ ID NO: 480840 - DNA, 155 bp, Homo sapiens
acgcgtcacataacctatttttttctctattctctccaatttatgtttaaagaataatgtccaaagtcagatctggtctagtttaacctagaattatttttgtctcttcagagcggtaccgatgctcgatattcgtgactctgttgtccattgct

SEQ ID NO: 480841 - DNA, 529 bp, Homo sapiens
  misc_feature (175)..(175): n is a, c, g, or t
ttatttaaagatgtaaaaaatgcgggagccttgagaagaaaggccctggaaggccccctcgatggatccctgataaatcccccagggattgttgatccatttcaaaaacttggggcagcaaacaaagcggttccccttttcaaagtggggaaaatgaagccaagaactctttttnctggaattattttccccccttcccccaaaaacaaaatttcagggggtttgaaaaaatttgggatctccgccaaagccccttcaattttaattgtttcccttgaagggggggaaaacccaataaatcaagaaaccccaatttttcaaggagaagggcctcggggttttttgaaaaatcttcccgaaaaaatgaatattcccgggggccaaaagaaaaataaactcttttcccaaaaagaaaggattgggcccttattgggggctatcctttggagaagggcccccaaaaatgttttatgaaagggccgaaaaattacccaaaattttcggccttaaagaaaaccttgattttcca

SEQ ID NO: 480842 - DNA, 106 bp, Homo sapiens
tcgtgggcgtccgcaagaccgggcagatctggcccaacgatggcgagggcgccttccatggagacgcaggtaaaagcccgggtcttaggctaaatcacaatgggga

SEQ ID NO: 480843 - DNA, 143 bp, Homo sapiens
acacgtgaaattcaacaactgaacgtactggtactctaaatcccaatacagcaacttcatgtacgaaacacctctctttccaataccgaagaaatatttagctagtatttagaacaaagtatcataaacattaaaaagctgtc

SEQ ID NO: 480844 - DNA, 273 bp, Homo sapiens
gtatatgtaccatttggcgcaggtatcaccaggaatgccagtgtacactatggaaataatttcacaggagtattactacatcacatataaacgtgtaataaaatcagtgttaaggagcaaatcagtgtttttaacacatctaataatgagcccaagataggcttagaataagaccaacagagagctcactaaagaaagggataatttatctaaaactggttcagaagaaaacgggctaaaattgaattttctcatattgttacatattacggg

SEQ ID NO: 480845 - DNA, 116 bp, Homo sapiens
aggtgccccgccctgcgcgtcactcaggcacagtctcagttctcctcgggctgtcggctgtcggtccacaaggctgaagcatcttttccatcatgttgaagcggactcgcgctttg

SEQ ID NO: 480846 - DNA, 198 bp, Homo sapiens
cctttgggggggagggggggggccccccccccccccaggaagggcctttttttttttcgggggtttttttttgggggggggggcccccccccccccccgggttttttgggggggggggggggtttttgggggcccccctttttttttttttcccgggccccccgggggtttttttgccccccccccccccttggggga

SEQ ID NO: 480847 - DNA, 447 bp, Homo sapiens
gaccgaatttgcgcgtctctccagctgccctttctgacctgcctagcaggccacataagccaattctttgcaataaatcttatattacagatgtctacggttctgtgtctgtggttaatccaagactaacacagaatgtgttggagccagcgtggtggctcatgcctgtaatcccagcactttgtgagtttgggttgggcggatcacctgaggtcgggagttcaagactagcctggccaacatggtgaaatcccgtctctactgaaaatacaaaaattagccgggcatgcacctgtagtcccagctacttgggaggctgaggcgggagaatcacttgaacccgggaggcaaaagttgcagtgagctgagatcatgccattgcattgaagcctgggcaacacacagagactctgtctcaaaaaaacaaaaaaaagaatgcgttggaga

SEQ ID NO: 480848 - DNA, 304 bp, Homo sapiens
tacggttggcactccctgaagctccctggtcacgacgttggatcaaaacgtggtcgtgtggtgacatcaggtcgtgactgcgagacaaccctagcagttagaagccaaggagattcctttatctacctagggttcattttcaaaagaaaatttaaactataatttaaacaattaacgttcttttctacaaaaaaaatgcagggacttgatttttttaaagagcttcactgaattaggatatttttattgcttttaaagaaaatacaaagatgcagtttctgcagggtgtggcgtggaccagtgc

SEQ ID NO: 480849 - DNA, 287 bp, Homo sapiens
acctatcagtcgataagctataacgaggttgtcccagttctttgtaaactatagccatgaatgtaaaacaactgatttttacaacagaattgtataaccctgcacaattaaaagtacctattattaaaaaaggtaattatgctgtaattagtttgacacaagacattaagcagattattatcaaagccagggaaatagtaacttcaaagcaatttcccttcttgaaagaggcatttacatgctgccattggaacatgatccttactcgaggcactttttaatgcagg

SEQ ID NO: 480850 - DNA, 682 bp, Homo sapiens
gccgggggccggttgggagggagtgcgcccctgccccccctccacacgtgtcaccacagttgcaccgccgctgcctggaggccccactatcccgtcgaccccgcgggaaggtcctgagggcgtgccgaccagtcgttcccccgatatggggccgcagggtgcactgactgcacagctccctatactaggaggggccggggcctggagggtatgccataggcccaccagaccaccatgtcaagtgcgtggagatgagggaagatgagaagcccctggtgctggagatgctcgaagtgagtcctcaagcaccctgggcccagaaacagagttcctagccgaggggaggagcctaggccctactgtccagcctgttcagcagtgtgaagttctagtagtagtatgagacttcctcagagtggaatgacctcctatataccttcctaggccctcgggagggccctctcagatggtcaaggcctactccaaatacgccgtaacgcatacaacgacatccagtggtacttgcacgttggatggaaagcgctacaccacgtgggtagatagtactcggcagaagggtcgtagtagcgtggtagacggtagcacgccaagggcctagggagcagaagactaatctagggcgagcagggcggcgcagacaggaaggcccgagctccaggag

SEQ ID NO: 480851 - DNA, 103 bp, Homo sapiens
gatacgacttgagctggtacctgaacattcgtgtcgtccgtagttgggcacgagtttagccgggtattgctctccatcacttgaggacacgaatgttcagtgt

SEQ ID NO: 480852 - DNA, 770 bp, Homo sapiens
  misc_feature (65)..(65): n is a, c, g, or t
agcgcgccaccccccgccacacccgcacactaacactaacagtggcggcgggccagcgtaactcncaccctccacacgcccctcactcccccactccctccacaccgccacccccgggcataatcaccccaagtaatgagtcccagaccctgccttgatccaaatttcattctggaaagaaaaatcattctacaatgataggcctaataatagctatactcgctttgcctgggagatgcactgatcagctaaatgtaaatataagaactttcaaaactaaaatgacgctccttaatccttctctctgctttaggactcatgcttttttaggaacttaaagatttggagaatcattcctgactgtcccaccttcccaggagcataaccattcctgtggagctctaaggagagagtgcatggcagcagtattcctaaaaactcatactcagcttcctcatgtgccctactccgaccctttctctatccacattgctctaaatcatatccttccctcaaggtgtacaaggatgatacaaaggtgccaagcggcgcacacaagagcgatgagccctctcacagcggaatgcagcgagaagctttctaacctcataaactgaaggctatcttcagcctctccttcatatatcgtactcgcattaaacctcatataaccccaagaggacaattaacacaaacatcctccaatactggtgagaacagcgagacacacgaatcacctcttccaggaacaaccagtacggcagcctccg

SEQ ID NO: 480853 - DNA, 750 bp, Homo sapiens
gcgttccctgcgccgaagtgagcagtagccaccatgtcaggggggagtcatattacaaaaccgagggcgagtgaaggacaggcagaggaagaacgagaagagaacccgttgaagcacagtgggagactataagctatcccggaagagatcagtttgatattgattaggttgagtgcctccaaggctatgtgtgaatctcagagtgaagatgagtggacaccttttgacatgagcatccagtgtatccaagggtgtgtacatcagtaagatcataagcagtgatcgagatctctggctgtggtgttctatggtaccgagaaagacaaaaaattcagtgaatttcaaagaatatttacgtcttacaggagctggatacatccaggtgcaaaatcgaattctagagcttgaccagttctagggggcagcagggaccaagagaacgttttccaagacatgatgggccacggatctgactacgtcactcagtgaagtgctgtgggtctgtgccaagctctttagtgatgtccaattcacagatgaagtcactaagaggatcatgcttgtacagccaatgagagacaaagccccatgggaatcgacagtgccaaaggccagccgggccaggaccaaaagccggtgatctccggagatacaggcatcttccttgatttgattgcacctgaagaaatgctggggggctttgacaatatccttgttcctacaaggaggatatcaatcagcatagacaga

SEQ ID NO: 480854 - DNA, 975 bp, Homo sapiens
  misc_feature (355)..(355): n is a, c, g, or t
  misc_feature (380)..(380): n is a, c, g, or t
tcctgccactcggggccccgttccccctcccggcggcggggggctgcccccggggggctggcggagctgggccgcgggggccccgtgtggccggccggtgccgggcttcatcgggatgatgcgtgacgcaggtgtctgctggtggctagcgcacgtatcggtggcctatcgcgcgtgcaagctctgtgagcttcttcatttaccttttgcgtgaggcagatccgaacgggtacattcaagtaccaaactgttcgatatgatatacctacccctttatcttcctgtgtcccggaatcggctagcccaggtgaagaggaagatcctggtgctggatctggatgagacacttattcantcccaccatgatggggtcctgaggnccacagtccgggctggtacgcctcctgacttcatcctcaagggggtaatagacacaacattctggtcggttttttggatcactattagaagggcccactgtggatttacttcctgtgaaagtggtgagagccagtggtacgaagctggtggtgtttacacgcaagcactggagatctatgggtctggtgtggcagatataactggacaatagcagaagcattcttaaagaggagatattacacgacacggactggaacttggaggttggggagactacatccaggacctctctggtgggtccaaagatggaactcatcccagacattgtgatcctggataaatccccagggggcttacaggaggcattcagacaatggcattcccatcaaaatctgggttcagtgaacccagcgaaacagaccttctcaaactggtcccaatgctggatggcctcaggttcaccggtgatgttcggtccgtggtgagcgcgtaaacttcaacaacatcggatctggtgacaggtggtcccccttcaactgagttggggtggaggggaaagggacggggagcccttgggatttgcgctgatgcctg

SEQ ID NO: 480855 - DNA, 123 bp, Homo sapiens
caagttagattcacgccgcatgaatcatcatcagtgcaaatggattttggcgtaggtttggactagggtgtagcctgcagaataggggcaaatcagtgaatgacagcctccttatgcatggca

SEQ ID NO: 480856 - DNA, 120 bp, Homo sapiens
ctcgttgtgtacggcccggcgcgagatttacaccggctcgtggcgtggctctttgggcggctcagcgtgtgcctaccctatgagccccgcgatgagccacccaaagagccacaccacgag

SEQ ID NO: 480857 - DNA, 172 bp, Homo sapiens
tcccaacctgatgtagtattgacattttgggtaggataattcatatgttgggggagatctagtgctatgcattatagcatatttatgcagcatcactggccttatacccattagatgccagtagcgccaccccatgattgtgatgatcaacaaaatgtttcaggctattacc

SEQ ID NO: 480858 - DNA, 106 bp, Homo sapiens
ttctctcctactgtttgctgctgttactccttctaggaagaagatgccaagttagaagtgcatatagctctcttgccacaggaggcctaccatgccgccactttgt

SEQ ID NO: 480859 - DNA, 733 bp, Homo sapiens
gagagagagaactagtctcgagtttaggtatatttttctattcaaatttaccaaatttttttttaaaaaccaaatacaagggttaaaaaagtccttacatttccaaccctgcctgggggtgtgggtgggagaattaagaattaagctctcaaaacgggtgccataccttccttctccgtgcaaaggagacacggcagagctcaagagcgcaggccctttgcccttttcgtgccctgtgccatccctccttcaggatagcttcaaattgcgctgcatagagaagataattaatatgagcggccaagagatagatgtgtttgcgagaagtgtggtgaagcgccgagagaaagctgtgcgctatatcttgtagacagtatcaagacgagagagagatcttccagaagactgtaggttgcttgatgtccccccttttgaggaaagagtatacctcggtgaaagagccccatcaacccatctgtgggcgaaaccctcccccgaagggggacgtagggagaacgggggcgcactagcgccgaaggggccccataagacaaggggctcctaacgagacccctactacgatagagggagatataaattgtgttgaaggacaatacgaaagaaacccaccgcgggagaaggctatttatctcttaaaaaggggtggccctctattagtgtgagaaaaacccgatgaggagggtgggccggagaatcagtggggggggaaaaa

SEQ ID NO: 480860 - DNA, 414 bp, Homo sapiens
tttttttgtttattatcccgacccttcgggttaaaatttttgccaacccaacaacttaaggggttcccgtgggttggggccggaaccaactgggcattttccttaccatggcggtggggggggggcaacctatttttattttatgggtccccttccccctggtgcggttaggggggccccttaacctccccctttttttttttttttttggggcccctttggccccccaaatttttttctgccttcaggcccccaggttccccccgtttggccccagggccccccccccttcccttttcccccccacccccccccccaccccaggtgtttaaaaattttccactgcccaggcccccccccccgggggtggcccctttttcaaaaaccattaacccttattgggatggggtggga

SEQ ID NO: 480861 - DNA, 391 bp, Homo sapiens
ccccgcgacccggaggcccagcccggcccctctgcggtttgggaaccactcaggcccctctgtggcgcgggcgggaaaagaccccgcggcctccttggcattctaacccgtgtccggaccctcgagcccgcccggtctcacccaccgggagggcctgggagggaaccgtgtggcccggggccagcagtgtccccatcgggctccgagagagcaaagctgtggccttgaacttctccccgaagctcctgtgccctgagtcggggaagcaggaagttgttgccaccgggaaggaagagagcgcgctcggagctgggcagcggctccaggcaccgcgcccctgcccatcccacgcctccccgggcaccgtgaaccaccccccaacccaactcca

SEQ ID NO: 480862 - DNA, 178 bp, Homo sapiens
tagtgtatgaacaggtctgtctagacatgtgtgttgggctatgttatgcttgaagtgtcggtagggtgactgtgttataagtctggattgaagtcagagctgaagatgcaaattcggaggtcattggaatataggtgcttttttttttaaattatacttttaagttctagggtacatg

SEQ ID NO: 480863 - DNA, 200 bp, Homo sapiens
tcccagctgcattttttcgctgacaagagagtttgcttctttccttaaacctcatgaaccagcctctgctagtttccaacttttcttctacagcttcctcacttctctcagcctcataacttgtttaatggaggagagtaaagccttcctctggataagcttggctaaggaaatattgcagcggtgtgatcttctatcta

SEQ ID NO: 480864 - DNA, 159 bp, Homo sapiens
gttcgcatcgggaagccccgagtggactgttacactgaatagatacacatactatgcttctcgaagataaacttgggcatctcccggaaagtagctttaaggcgaagtctgaggtattctcccatctgtctcactcaggatgaatatcacccattcatc

SEQ ID NO: 480865 - DNA, 153 bp, Homo sapiens
aaaagggggaggaattgggctggtcccaaattttggtggccccccctcccgggaaggggccttggtaaagaaaaaaacattttcaactccttttggatttttccccccaaaaacccttttttccctgttataaaacaggggggttttttttga

SEQ ID NO: 480866 - DNA, 418 bp, Homo sapiens
cgatgtagatcacgagaaagctattccaggggcaccactcgagccacctgtcctaaaatggccttcgatacgggataatgctattcattacctcagaagtattatttatcattcgcaggattttcgtgagccttgttaccactccagcctagcccctagcccccaatgttaagagggcactggtcccctgactaggcatcatcccgcgtaaatcccctataaggtcccactcctaatacacatccggtattaccttcgacaatctaggagctatcaagtcatcctgaagcttcagccataggtctgaatagaataacaacgcgaaagccatgataattcaacgcactgcttattacaattttactgggtctctattttaccctcctacaagcctcagagtacttcgagtctcccttca

SEQ ID NO: 480867 - DNA, 150 bp, Homo sapiens
  misc_feature (104)..(105): n is a, c, g, or t
gaaaacacatccgtagaaggcagcgcggcgccgagagccgcagcgcgctcgcctgcgcccccacccgctgccccgccgtggaatttaacgccccctgccctgannataatcccctcaccccccctccccccacccccccacccccacccc

SEQ ID NO: 480868 - DNA, 187 bp, Homo sapiens
tggtaggatttttagtattttaaaataatacagttccaatcagggggtttgggtcatttaaattcctttactggcaaaccggggggcagggactggtttagtttctctgccttctttttgtcagtgataaccaggggggaaagggatttgctgcatcgaactttaaactttacgttggccttatttt

SEQ ID NO: 480869 - DNA, 239 bp, Homo sapiens
aaccatgtactataaaaaacatcacatatgtcaatatggattcatttgccacgacacaggtctgacaagatactcaaggtttacagagtagttctctttgcaagatagcatttaaatgtatcctattagcttatgtgcattttctattttattctacagttagcatgtatcactttaagattccgccatccttcctatcaattcactgcaatttaggaaagaaagaggtaaacatgtat

SEQ ID NO: 480870 - DNA, 157 bp, Homo sapiens
taaaccaaggggcatcaacccaccaccgacaagctaagaatggtttttacatctttaaatggttgaaaaaggaaaaagaatgtttagtgacacgtgaaaaatacatgaaattcaaacttcagtgtctacaaataaagtgcattagcacacggtcaaa

SEQ ID NO: 480871 - DNA, 3748 bp, Homo sapiens
aaagctcaaaccgacaccctcacgcagatgatgacatcaactcttttttcttccccaagtgtacacaatgtgatggagactgttacgcaggagacagctcctccagatgaaatgaccacatcatttccctccagtgtcaccaacacactcatgatgacatcaaagactataacaatgacaacctccacagactccactcttggaaacacagaagagacatcaacagcaggaactgaaagttctaccccagtgacctcagcagtctcaataacagctggacaggaaggacaatcacgaacaacttcctggaggacctctatccaagacacatcagcttcttctcagaaccactggactcggagcacgcagaccaccagggaatctcaaaccagcaccctaacacacagaaccacttcaactccttctttctctccaagtgtacacaatgtgacagggactgtttctcagaagacatctccttcaggtgaaacagctacctcatccctctgtagtgtcacaaacacatccatgatgacatcagagaagataacagtgacaacctccacaggctccactcttggaaacccaggggagacatcatcagtacctgttactggaagtcttatgccagtcacctcagcagccttagtaacagttgatccagaaggacaatcaccagcaactttctcaaggacttctactcaggacacaacagctttttctaagaaccaccagactcagagcgtggagaccaccagagtatctcaaatcaacaccctcaacaccctcacaccggttacaacatcaactgttttatcctcaccaagtggattcaacccaagtggaacagtttctcaggagacattcccttctggtgaaacaaccatctcatccccttccagtgtcagcaatacattcctggtaacatcaaaggtgttcagaatgccaatctccagagactctactcttggaaacacagaggagacatcactatctgtaagtggaaccatttctgcaatcacttccaaagtttcaaccatatggtggtcagacactctgtcaacagcactctcccccagttctctacctccaaaaatatccacagctttccacacccagcagagtgaaggtgcagagaccacaggacggcctcatgagaggagctcattctctccaggtgtgtctcaagaaatatttactctacatgaaacaacaacatggccttcctcattctccagcaaaggccacacaacttggtcacaaacagaactgccctcaacatcaacaggtgctgccactaggcttgtcacaggaaatccatctacagggacagctggcactattccaagggtcccctctaaggtctcagcaataggggaaccaggagagcccaccacatactcctcccacagcacaactctcccaaaaacaacaggggcaggcgcccagacacaatggacacaagaaacggggaccactggagaggctcttctcagcagcccaagctacagtgtgactcagatgataaaaacggccacatccccatcttcttcacctatgctggatagacacacatcacaacaaattacaacggcaccatcaacaaatcattcaacaatacattccacaagcacctctcctcaggaatcaccagctgtttcccaaaggggtcacactcaagccccgcagaccacacaagaatcacaaaccacgaggtccgtctcccccatgactgacaccaagacagtcaccaccccaggttcttccttcacagccagtgggcactcgccctcagaaattgttcctcaggacgcacccaccataagtgcagcaacaacctttgccccagctcccaccggggatggtcacacaacccaggccccgaccacagcactgcaggcagcacccagcagccatgatgccaccctggggccctcaggaggcacgtcactttccaaaacaggtgcccttactctggccaactctgtagtgtcaacaccagggggcccagaaggacaatggacatcagcctctgccagcacctcacctgacacagcagcagccatgacccatacccaccaggctgagagcacagaggcctctggacaaacacagaccagcgaaccggcctcctcagggtcacgaaccacctcagcgggcacagctaccccttcctcatccggggcgagtggcacaacaccttcaggaagcgaaggaatatccacctcaggagagacgacaaggttttcatcaaacccctccagggacagtcacacaacccagtcaacaaccgaattgctgtccgcctcagccagtcatggtgccatcccagtaagcacaggaatggcgtcttcgatcgtccccggcacctttcatcccaccctctctgaggcctccactgcagggagaccgacaggacagtcaagcccaacttctcccagtgcctctcctcaggagacagccgccatttcccggatggcccagactcagaggacaagaaccagcagagggtctgacactatcagcctggcgtcccaggcaaccgacaccttctcaacagtcccacccacacctccatcgatcacatccactgggcttacatctccacaaacccagacccacactctgtcaccttcagggtctggtaaaaccttcaccacggccctcatcagcaacgccacccctcttcctgtcacctacgcttcctcggcatccacaggtcacaccacccctcttcatgtcaccgatgcttcctcagtatccacaggtcacgccacccctcttcctgtcaccgacacttcctcagcatccacaggtcacgccacccctcttcctgtcaccagcccttcctcagcatccacaggtcacgccacccctcttcctgtcaccgacacttcctcagtatccacaggtgacaccacccctcttcctgtcaccgacgcttcctcagtagcatccacaggtgacaccacccctcttcatgtcaccgacacttcctcagcatccacaggtcacgccacccctcttcctgtcaccagcctttcctcagtatccacaggtgacaccacgcctcttcctgtcactagcccttcctcagcatccacaggtcacgccacccctcttcttgtcaccgacgcttcctcagtatccacaggtcacgccacccctcttcctgtcaccgacgcttcctcagcatccacaggtcacgccacccctcttcatgtcaccgagcttcctcagtatccacaggtgacaccacccctcttcctgtcaccggcccttcctcagcatccacaggtcacgccacccctcttcctgtcaccgacacttcctcagtatccacaggtcacgccacccctcttcctgtcaccagcctttcctcagcatccacaggtgacaccacccctcttcctgtcaccgacacttcctcagcatccacaggtcacgccacccctcttcctgtcaccagcctttcctcagtatccacaggtgacaccacccctcttcctgtcaccgacacttcctcagcatccacagtcttcctgtcaccagcccttcctcagcatccacaggtcacaccacccctcttcctgtcaccgacacttcctcagcatccacaggtcagacaccacccctcttcctgtcaccaatgcttcctcattatccacacgtcacgccacctctcttcatgtcaccagcccttcgtcgacgcggccgcgaatttagtagtagtagtagaccgccgctc

SEQ ID NO: 480872 - DNA, 118 bp, Homo sapiens
tcttgtgtggcaggcctcagcacctgctagatagtaggacaaggctctgtctcctggaagcaacatcgcctctggtgaggaagtcgccatcaagctggagtgtgtgaagacaaagcac

SEQ ID NO: 480873 - DNA, 102 bp, Homo sapiens
  misc_feature (13)..(13): n is a, c, g, or t
gatataacccttngttataaagtactatcaagaacttacactataccaggcattctagtagagtatacaggatgcctcaagctcagcactatggacagttcg

SEQ ID NO: 480874 - DNA, 3648 bp, Homo sapiens
aaagctcaaaccgacaccctcacgcagatgatgacatcaactcttttttcttccccaagtgtacacaatgtgatggagactgttacgcaggagacagctcctccagatgaaatgaccacatcatttccctccagtgtcaccaacacactcatgatgacatcaaagactataacaatgacaacctccacagactccactcttggaaacacagaagagacatcaacagcaggaactgaaagttctaccccagtgacctcagcagtctcaataacagctggacaggaaggacaatcacgaacaacttcctggaggacctctatccaagacacatcagcttcttctcagaaccactggactcggagcacgcagaccaccagggaatctcaaaccagcaccctaacacacagaaccacttcaactccttctttctctccaagtgtacacaatgtgacagggactgtttctcagaagacatctccttcaggtgaaacagctacctcatccctctgtagtgtcacaaacacatccatgatgacatcagagaagataacagtgacaacctccacaggctccactcttggaaacccaggggagacatcatcagtacctgttactggaagtcttatgccagtcacctcagcagccttagtaacagttgatccagaaggacaatcaccagcaactttctcaaggacttctactcaggacacaacagctttttctaagaaccaccagactcagagcgtggagaccaccagagtatctcaaatcaacaccctcaacaccctcacaccggttacaacatcaactgttttatcctcaccaagtggattcaacccaagtggaacagtttctcaggagacattcccttctggtgaaacaaccatctcatccccttccagtgtcagcaatacattcctggtaacatcaaaggtgttcagaatgccaatctccagagactctactcttggaaacacagaggagacatcactatctgtaagtggaaccatttctgcaatcacttccaaagtttcaaccatatggtggtcagacactctgtcaacagcactctcccccagttctctacctccaaaaatatccacagctttccacacccagcagagtgaaggtgcagagaccacaggacggcctcatgagaggagctcattctctccaggtgtgtctcaagaaatatttactctacatgaaacaacaacatggccttcctcattctccagcaaaggccacacaacttggtcacaaacagaactgccctcaacatcaacaggtgctgccactaggcttgtcacaggaaatccatctacagggacagctggcactattccaagggtcccctctaaggtctcagcaataggggaaccaggagagcccaccacatactcctcccacagcacaactctcccaaaaacaacaggggcaggcgcccagacacaatggacacaagaaacggggaccactggagaggctcttctcagcagcccaagctacagtgtgactcagatgataaaaacggccacatccccatcttcttcacctatgctggatagacacacatcacaacaaattacaacggcaccatcaacaaatcattcaacaatacattccacaagcacctctcctcaggaatcaccagctgtttcccaaaggggtcacactcaagccccgcagaccacacaagaatcacaaaccacgaggtccgtctcccccatgactgacaccaagacagtcaccaccccaggttcttccttcacagccagtgggcactcgccctcagaaattgttcctcaggacgcacccaccataagtgcagcaacaacctttgccccagctcccaccggggatggtcacacaacccaggccccgaccacagcactgcaggcagcacccagcagccatgatgccaccctggggccctcaggaggcacgtcactttccaaaacaggtgcccttactctggccaactctgtagtgtcaacaccagggggcccagaaggacaatggacatcagcctctgccagcacctcacctgacacagcagcagccatgacccatacccaccaggctgagagcacagaggcctctggacaaacacagaccagcgaaccggcctcctcagggtcacgaaccacctcagcgggcacagctaccccttcctcatccggggcgagtggcacaacaccttcaggaagcgaaggaatatccacctcaggagagacgacaaggttttcatcaaacccctccagggacagtcacacaacccagtcaacaaccgaattgctgtccgcctcagccagtcatggtgccatcccagtaagcacaggaatggcgtcttcgatcgtccccggcacctttcatcccaccctctctgaggcctccactgcagggagaccgacaggacagtcaagcccaacttctcccagtgcctctcctcaggagacagccgccatttcccggatggcccagactcagaggacaagaaccagcagagggtctgacactatcagcctggcgtcccaggcaaccgacaccttctcaacagtcccacccacacctccatcgatcacatccactgggcttacatctccacaaacccagacccacactctgtcaccttcagggtctggtaaaaccttcaccacggccctcatcagcaacgccacccctcttcctgtcacctacgcttcctcggcatccacaggtcacaccacccctcttcatgtcaccgatgcttcctcagtatccacaggtcacgccacccctcttcctgtcaccgacacttcctcagcatccacaggtcacgccacccctcttcctgtcaccagcccttcctcagcatccacaggtcacgccacccctcttcctgtcaccgacacttcctcagtatccacaggtgacaccacccctcttcctgtcaccgacgcttcctcagtagcatccacaggtgacaccacccctcttcatgtcaccgacacttcctcagcatccacaggtcacgccacccctcttcctgtcaccagcctttcctcagtatccacaggtgacaccacgcctcttcctgtcactagcccttcctcagcatccacaggtcacgccacccctcttcttgtcaccgacgcttcctcagtatccacaggtcacgccacccctcttcctgtcaccgacgcttcctcagcatccacaggtcacgccacccctcttcatgtcaccgagcttcctcagtatccacaggtgacaccacccctcttcctgtcaccggcccttcctcagcatccacaggtcacgccacccctcttcctgtcaccgacacttcctcagtatccacaggtcacgccacccctcttcctgtcaccagcctttcctcagcatccacaggtgacaccacccctcttcctgtcaccgacacttcctcagcatccacaggtcacgccacccctcttcctgtcaccagcctttcctcagtatccacaggtgacaccacccctcttcctgtcaccgacacttcctcagcatccacagccacccctcttcctgtcaccgacacttcctcagcatccacaggtcacgccacccttcttcctgtacggacacttcactcagcacatagttcagcgtctgagcagggatcct

SEQ ID NO: 480875 - DNA, 91 bp, Homo sapiens
ggggcccccccccccccctttttgggtgaaaaaaaaaagcccccccaattttcccccaggggtttttttccattaaaggggtttgggccca

SEQ ID NO: 480876 - DNA, 3320 bp, Homo sapiens
  misc_feature (3259)..(3259): n is a, c, g, or t
  misc_feature (3261)..(3261): n is a, c, g, or t
  misc_feature (3264)..(3265): n is a, c, g, or t
  misc_feature (3267)..(3267): n is a, c, g, or t
  misc_feature (3271)..(3271): n is a, c, g, or t
aaagctcaaaccgacaccctcacgcagatgatgacatcaactcttttttcttccccaagtgtacacaatgtgatggagactgttacgcaggagacagctcctccagatgaaatgaccacatcatttccctccagtgtcaccaacacactcatgatgacatcaaagactataacaatgacaacctccacagactccactcttggaaacacagaagagacatcaacagcaggaactgaaagttctaccccagtgacctcagcagtctcaataacagctggacaggaaggacaatcacgaacaacttcctggaggacctctatccaagacacatcagcttcttctcagaaccactggactcggagcacgcagaccaccagggaatctcaaaccagcaccctaacacacagaaccacttcaactccttctttctctccaagtgtacacaatgtgacagggactgtttctcagaagacatctccttcaggtgaaacagctacctcatccctctgtagtgtcacaaacacatccatgatgacatcagagaagataacagtgacaacctccacaggctccactcttggaaacccaggggagacatcatcagtacctgttactggaagtcttatgccagtcacctcagcagccttagtaacagttgatccagaaggacaatcaccagcaactttctcaaggacttctactcaggacacaacagctttttctaagaaccaccagactcagagcgtggagaccaccagagtatctcaaatcaacaccctcaacaccctcacaccggttacaacatcaactgttttatcctcaccaagtggattcaacccaagtggaacagtttctcaggagacattcccttctggtgaaacaaccatctcatccccttccagtgtcagcaatacattcctggtaacatcaaaggtgttcagaatgccaatctccagagactctactcttggaaacacagaggagacatcactatctgtaagtggaaccatttctgcaatcacttccaaagtttcaaccatatggtggtcagacactctgtcaacagcactctcccccagttctctacctccaaaaatatccacagctttccacacccagcagagtgaaggtgcagagaccacaggacggcctcatgagaggagctcattctctccaggtgtgtctcaagaaatatttactctacatgaaacaacaacatggccttcctcattctccagcaaaggccacacaacttggtcacaaacagaactgccctcaacatcaacaggtgctgccactaggcttgtcacaggaaatccatctacagggacagctggcactattccaagggtcccctctaaggtctcagcaataggggaaccaggagagcccaccacatactcctcccacagcacaactctcccaaaaacaacaggggcaggcgcccagacacaatggacacaagaaacggggaccactggagaggctcttctcagcagcccaagctacagtgtgactcagatgataaaaacggccacatccccatcttcttcacctatgctggatagacacacatcacaacaaattacaacggcaccatcaacaaatcattcaacaatacattccacaagcacctctcctcaggaatcaccagctgtttcccaaaggggtcacactcaagccccgcagaccacacaagaatcacaaaccacgaggtccgtctcccccatgactgacaccaagacagtcaccaccccaggttcttccttcacagccagtgggcactcgccctcagaaattgttcctcaggacgcacccaccataagtgcagcaacaacctttgccccagctcccaccggggatggtcacacaacccaggccccgaccacagcactgcaggcagcacccagcagccatgatgccaccctggggccctcaggaggcacgtcactttccaaaacaggtgcccttactctggccaactctgtagtgtcaacaccagggggcccagaaggacaatggacatcagcctctgccagcacctcacctgacacagcagcagccatgacccatacccaccaggctgagagcacagaggcctctggacaaacacagaccagcgaaccggcctcctcagggtcacgaaccacctcagcgggcacagctaccccttcctcatccggggcgagtggcacaacaccttcaggaagcgaaggaatatccacctcaggagagacgacaaggttttcatcaaacccctccagggacagtcacacaacccagtcaacaaccgaattgctgtccgcctcagccagtcatggtgccatcccagtaagcacaggaatggcgtcttcgatcgtccccggcacctttcatcccaccctctctgaggcctccactgcagggagaccgacaggacagtcaagcccaacttctcccagtgcctctcctcaggagacagccgccatttcccggatggcccagactcagaggacaagaaccagcagagggtctgacactatcagcctggcgtcccaggcaaccgacaccttctcaacagtcccacccacacctccatcgatcacatccactgggcttacatctccacaaacccagacccacactctgtcaccttcagggtctggtaaaaccttcaccacggccctcatcagcaacgccacccctcttcctgtcacctacgcttcctcggcatccacaggtcacaccacccctcttcatgtcaccgatgcttcctcagtatccacaggtcacgccacccctcttcctgtcaccgacacttcctcagcatccacaggtcacgccacccctcttcctgtcaccagcccttcctcagcatccacaggtcacgccacccctcttcctgtcaccgacacttcctcagtatccacaggtgacaccacccctcttcctgtcaccgacgcttcctcagtatccacaggtcacgccacccctcttcctgtcaccagcacttcctcagcatccacaggtcacaccacccctcttcctgtcaccgacacttcctcagcatccacaggtcacgccacccctcttcctgtcaccagcctttcctcagtatccacaggtgacaccacccctcttcctgtcactagcccttcctcagcatccacaggtcacgccacccctcttcctgtcaccgacgcttcctcagcatccacaggtcacgccacccctcttcctgtcaccagcccttcctcagcatccacaggtgacacacccngncgnncntacngtcccttccgtcgcagtagtctggggagtcctctagagtcgcctagatg

SEQ ID NO: 480877 - DNA, 270 bp, Homo sapiens
ggggtgagtgtcgccaggccctgcggtgggctgtatgtgtgttgtctggtattgtgcaggtcgcgggatgatgttctgccagtgccgctgctgtgatgtaggcctggaattgctggcttgcggccttgttttcattggcgcgccacttgcgctttggggcccaatgtggggtttccccccgcggggcgggggcgactttggcacacggggcctttttcccgggtcaccccccgagaggggggtggcgcccgcaccccgttttccgcgcgg

SEQ ID NO: 480878 - DNA, 3669 bp, Homo sapiens
  misc_feature (3606)..(3606): n is a, c, g, or t
  misc_feature (3613)..(3613): n is a, c, g, or t
  misc_feature (3617)..(3618): n is a, c, g, or t
  misc_feature (3621)..(3621): n is a, c, g, or t
  misc_feature (3629)..(3629): n is a, c, g, or t
aaagctcaaaccgacaccctcacgcagatgatgacatcaactcttttttcttccccaagtgtacacaatgtgatggagactgttacgcaggagacagctcctccagatgaaatgaccacatcatttccctccagtgtcaccaacacactcatgatgacatcaaagactataacaatgacaacctccacagactccactcttggaaacacagaagagacatcaacagcaggaactgaaagttctaccccagtgacctcagcagtctcaataacagctggacaggaaggacaatcacgaacaacttcctggaggacctctatccaagacacatcagcttcttctcagaaccactggactcggagcacgcagaccaccagggaatctcaaaccagcaccctaacacacagaaccacttcaactccttctttctctccaagtgtacacaatgtgacagggactgtttctcagaagacatctccttcaggtgaaacagctacctcatccctctgtagtgtcacaaacacatccatgatgacatcagagaagataacagtgacaacctccacaggctccactcttggaaacccaggggagacatcatcagtacctgttactggaagtcttatgccagtcacctcagcagccttagtaacagttgatccagaaggacaatcaccagcaactttctcaaggacttctactcaggacacaacagctttttctaagaaccaccagactcagagcgtggagaccaccagagtatctcaaatcaacaccctcaacaccctcacaccggttacaacatcaactgttttatcctcaccaagtggattcaacccaagtggaacagtttctcaggagacattcccttctggtgaaacaaccatctcatccccttccagtgtcagcaatacattcctggtaacatcaaaggtgttcagaatgccaatctccagagactctactcttggaaacacagaggagacatcactatctgtaagtggaaccatttctgcaatcacttccaaagtttcaaccatatggtggtcagacactctgtcaacagcactctcccccagttctctacctccaaaaatatccacagctttccacacccagcagagtgaaggtgcagagaccacaggacggcctcatgagaggagctcattctctccaggtgtgtctcaagaaatatttactctacatgaaacaacaacatggccttcctcattctccagcaaaggccacacaacttggtcacaaacagaactgccctcaacatcaacaggtgctgccactaggcttgtcacaggaaatccatctacagggacagctggcactattccaagggtcccctctaaggtctcagcaataggggaaccaggagagcccaccacatactcctcccacagcacaactctcccaaaaacaacaggggcaggcgcccagacacaatggacacaagaaacggggaccactggagaggctcttctcagcagcccaagctacagtgtgactcagatgataaaaacggccacatccccatcttcttcacctatgctggatagacacacatcacaacaaattacaacggcaccatcaacaaatcattcaacaatacattccacaagcacctctcctcaggaatcaccagctgtttcccaaaggggtcacactcaagccccgcagaccacacaagaatcacaaaccacgaggtccgtctcccccatgactgacaccaagacagtcaccaccccaggttcttccttcacagccagtgggcactcgccctcagaaattgttcctcaggacgcacccaccataagtgcagcaacaacctttgccccagctcccaccggggatggtcacacaacccaggccccgaccacagcactgcaggcagcacccagcagccatgatgccaccctggggccctcaggaggcacgtcactttccaaaacaggtgcccttactctggccaactctgtagtgtcaacaccagggggcccagaaggacaatggacatcagcctctgccagcacctcacctgacacagcagcagccatgacccatacccaccaggctgagagcacagaggcctctggacaaacacagaccagcgaaccggcctcctcagggtcacgaaccacctcagcgggcacagctaccccttcctcatccggggcgagtggcacaacaccttcaggaagcgaaggaatatccacctcaggagagacgacaaggttttcatcaaacccctccagggacagtcacacaacccagtcaacaaccgaattgctgtccgcctcagccagtcatggtgccatcccagtaagcacaggaatggcgtcttcgatcgtccccggcacctttcatcccaccctctctgaggcctccactgcagggagaccgacaggacagtcaagcccaacttctcccagtgcctctcctcaggagacagccgccatttcccggatggcccagactcagaggacaagaaccagcagagggtctgacactatcagcctggcgtcccaggcaaccgacaccttctcaacagtcccacccacacctccatcgatcacatccactgggcttacatctccacaaacccagacccacactctgtcaccttcagggtctggtaaaaccttcaccacggccctcatcagcaacgccacccctcttcctgtcacctacgcttcctcggcatccacaggtcacaccacccctcttcatgtcaccgatgcttcctcagtatccacaggtcacgccacccctcttcctgtcaccgacacttcctcagcatccacaggtcacgccacccctcttcctgtcaccagcccttcctcagcatccacaggtcacgccacccctcttcctgtcaccgacacttcctcagtatccacaggtgacaccacccctcttcctgtcaccgacgcttcctcagtagcatccacaggtgacaccacccctcttcatgtcaccgacacttcctcagcatccacaggtcacgccacccctcttcctgtcaccagcctttcctcagtatccacaggtgacaccacgcctcttcctgtcactagcccttcctcagcatccacaggtcacgccacccctcttcttgtcaccgacgcttcctcagtatccacaggtcacgccacccctcttcctgtcaccgacgcttcctcagcatccacaggtcacgccacccctcttcatgtcaccgacgcttcctcagcatccacaggtgacaccacctctcttcctgtcaccgacgcttcctcagcatccacaggtgacaccacccctcttcctgtcaccgacacttcctcagcatccacaggtgacaccacccctcttcctgtcaccaacgcttcctcagcatccacaggtcacgccacccctcttcatgtcaccaacgcttcctcagtatccacaggtgacaccacccctcttcctgtcaccggcccttcctcagcatccacaggtcacgccacccctcttcctgtcaccgacacttcctcagtatccacaggtcacgccccacccctcttcctgtcaccgacacttcctcagcatccacaggtcacgccacccctcttnctgtcancagnnctncctcagcntccacagtatcctcgactcccctctgaagtgtacgttatg

SEQ ID NO: 480879 - DNA, 494 bp, Homo sapiens
tcaatcacgtgagatcacattcaaacaacatgttttttccttcagaaaaaaatggggtccctgttccaatgcctacacattttccatccatcttcagaggtgacaaaaaccaaagagaaagaacatcctacacacagtcctgaaggatcgcttctatgtaagataggaatatcttcactaggtatgtatctagagcaattctgatagaagtataccagaataaatgcacagatgatttctcagcaacattattttaacagttccaggaaaaaaggctttccagtttggggtgtttttgttttttgtggtgtttttgttttttgtggggtttttgttttgttttgttttttgttttttttggctatgaaatggccataggagaaagtataaagaaaataagttgtggtcccatggtggaatactatacagcagtgaaaatgaactgtagctacatccctcagcataaataagtctcaaaactataatattaaatg

SEQ ID NO: 480880 - DNA, 828 bp, Homo sapiens
  misc_feature (79)..(79): n is a, c, g, or t
tcatggagtccttctcgggaagcgcgtccagtgcgcttggctactccggggaatttccggccatttatggggcccgggnactcttttagatttatagataaaatagaaatcatagaaaatatagaagaatatatgacgcataacaaagcataatagaacaatagaaagagcaactacatagaccaagaagagaatatggagccgtgagagaattttaagtcctcaacgcctttgggctatcttcccgctttttgctctccttggctccggttcttttttcttgggccggttttccctttccggcgtctcattgcgcccatttgccgttttcgccttttcggggggtgttcccctttgatttgccggagttttaccccctttgtgcctgggaacctctgggttttccccacttaacggttcttgctctccaccctcttttcccccggggtggctactgctaagggccccggtcgatctgctgttcctagcggggtggtaccttgtttgcctggtggatttttatcctttcttttggatccagatgtggcacctcttttgttcagacggcaccttttgcgccctgcgtggtgaattggcttcatgcttttgttccctatcccagaacgccgtctgtggattgaggggtcttcaattcggtactagggccccgttttgggcgggggccttcaccctgtacggggtggatacgcgcttttttgggtgagtgccccttttgggagcccctcccttttcccctggtttggcgctttgggctcctatgggcctttttcggccccttttggggcccccccgctttggggtttggct

SEQ ID NO: 480881 - DNA, 3424 bp, Homo sapiens
  misc_feature (3363)..(3363): n is a, c, g, or t
  misc_feature (3365)..(3365): n is a, c, g, or t
  misc_feature (3368)..(3369): n is a, c, g, or t
  misc_feature (3371)..(3371): n is a, c, g, or t
  misc_feature (3375)..(3375): n is a, c, g, or t
aaagctcaaaccgacaccctcacgcagatgatgacatcaactcttttttcttccccaagtgtacacaatgtgatggagactgttacgcaggagacagctcctccagatgaaatgaccacatcatttccctccagtgtcaccaacacactcatgatgacatcaaagactataacaatgacaacctccacagactccactcttggaaacacagaagagacatcaacagcaggaactgaaagttctaccccagtgacctcagcagtctcaataacagctggacaggaaggacaatcacgaacaacttcctggaggacctctatccaagacacatcagcttcttctcagaaccactggactcggagcacgcagaccaccagggaatctcaaaccagcaccctaacacacagaaccacttcaactccttctttctctccaagtgtacacaatgtgacagggactgtttctcagaagacatctccttcaggtgaaacagctacctcatccctctgtagtgtcacaaacacatccatgatgacatcagagaagataacagtgacaacctccacaggctccactcttggaaacccaggggagacatcatcagtacctgttactggaagtcttatgccagtcacctcagcagccttagtaacagttgatccagaaggacaatcaccagcaactttctcaaggacttctactcaggacacaacagctttttctaagaaccaccagactcagagcgtggagaccaccagagtatctcaaatcaacaccctcaacaccctcacaccggttacaacatcaactgttttatcctcaccaagtggattcaacccaagtggaacagtttctcaggagacattcccttctggtgaaacaaccatctcatccccttccagtgtcagcaatacattcctggtaacatcaaaggtgttcagaatgccaatctccagagactctactcttggaaacacagaggagacatcactatctgtaagtggaaccatttctgcaatcacttccaaagtttcaaccatatggtggtcagacactctgtcaacagcactctcccccagttctctacctccaaaaatatccacagctttccacacccagcagagtgaaggtgcagagaccacaggacggcctcatgagaggagctcattctctccaggtgtgtctcaagaaatatttactctacatgaaacaacaacatggccttcctcattctccagcaaaggccacacaacttggtcacaaacagaactgccctcaacatcaacaggtgctgccactaggcttgtcacaggaaatccatctacagggacagctggcactattccaagggtcccctctaaggtctcagcaataggggaaccaggagagcccaccacatactcctcccacagcacaactctcccaaaaacaacaggggcaggcgcccagacacaatggacacaagaaacggggaccactggagaggctcttctcagcagcccaagctacagtgtgactcagatgataaaaacggccacatccccatcttcttcacctatgctggatagacacacatcacaacaaattacaacggcaccatcaacaaatcattcaacaatacattccacaagcacctctcctcaggaatcaccagctgtttcccaaaggggtcacactcaagccccgcagaccacacaagaatcacaaaccacgaggtccgtctcccccatgactgacaccaagacagtcaccaccccaggttcttccttcacagccagtgggcactcgccctcagaaattgttcctcaggacgcacccaccataagtgcagcaacaacctttgccccagctcccaccggggatggtcacacaacccaggccccgaccacagcactgcaggcagcacccagcagccatgatgccaccctggggccctcaggaggcacgtcactttccaaaacaggtgcccttactctggccaactctgtagtgtcaacaccagggggcccagaaggacaatggacatcagcctctgccagcacctcacctgacacagcagcagccatgacccatacccaccaggctgagagcacagaggcctctggacaaacacagaccagcgaaccggcctcctcagggtcacgaaccacctcagcgggcacagctaccccttcctcatccggggcgagtggcacaacaccttcaggaagcgaaggaatatccacctcaggagagacgacaaggttttcatcaaacccctccagggacagtcacacaacccagtcaacaaccgaattgctgtccgcctcagccagtcatggtgccatcccagtaagcacaggaatggcgtcttcgatcgtccccggcacctttcatcccaccctctctgaggcctccactgcagggagaccgacaggacagtcaagcccaacttctcccagtgcctctcctcaggagacagccgccatttcccggatggcccagactcagaggacaagaaccagcagagggtctgacactatcagcctggcgtcccaggcaaccgacaccttctcaacagtcccacccacacctccatcgatcacatccactgggcttacatctccacaaacccagacccacactctgtcaccttcagggtctggtaaaaccttcaccacggccctcatcagcaacgccacccctcttcctgtcacctacgcttcctcggcatccacaggtcacaccacccctcttcatgtcaccgatgcttcctcagtatccacaggtcacgccacccctcttcctgtcaccgacacttcctcagcatccacaggtcacgccacccctcttcctgtcaccagcccttcctcagcatccacaggtcacgccacccctcttcctgtcaccgacacttcctcagtatccacaggtgacaccacccctcttcctgtcaccgacgcttcctcagtagcatccacaggtgacaccacccctcttcatgtcaccgacacttcctcagcatccacaggtcacgccacccctcttcctgtcaccagcctttcctcagtatccacaggtgacaccacgcctcttcctgtcactagcccttcctcagcatccacaggtcacgccacccctcttcttgtcaccgacgcttcctcagtatccacaggtcacgccacccctcttcctgtcaccgacgcttcctcagcatagtatccacaggtgacaccacccctcttcctgtcactagcccttcctcagcatccacaggtcacgccacccctcttcctgtcaccgacgcttcctcagcatccacaggtcacgccacccctcttcctgtcaccagcccttcctcagcatccacaggtgacacacccngncgnncntacngtcccttccgtcgcagtagtctggggagtcctctagagtcgcctagatg

SEQ ID NO: 480882 - DNA, 161 bp, Homo sapiens
ctctagagatccatgtatcgccacacaccataagagtaggggtgagataatttattgagcatggatagctgtcagtggagggatgatgcttgggtgtttctctcccatgtgctgagtctaggctttattggctcagaacaggggaggcatgctgatttggt

SEQ ID NO: 480883 - DNA, 4755 bp, Homo sapiens
aaagctcaaaccgacaccctcacgcagatgatgacatcaactcttttttcttccccaagtgtacacaatgtgatggagactgttacgcaggagacagctcctccagatgaaatgaccacatcatttccctccagtgtcaccaacacactcatgatgacatcaaagactataacaatgacaacctccacagactccactcttggaaacacagaagagacatcaacagcaggaactgaaagttctaccccagtgacctcagcagtctcaataacagctggacaggaaggacaatcacgaacaacttcctggaggacctctatccaagacacatcagcttcttctcagaaccactggactcggagcacgcagaccaccagggaatctcaaaccagcaccctaacacacagaaccacttcaactccttctttctctccaagtgtacacaatgtgacagggactgtttctcagaagacatctccttcaggtgaaacagctacctcatccctctgtagtgtcacaaacacatccatgatgacatcagagaagataacagtgacaacctccacaggctccactcttggaaacccaggggagacatcatcagtacctgttactggaagtcttatgccagtcacctcagcagccttagtaacagttgatccagaaggacaatcaccagcaactttctcaaggacttctactcaggacacaacagctttttctaagaaccaccagactcagagcgtggagaccaccagagtatctcaaatcaacaccctcaacaccctcacaccggttacaacatcaactgttttatcctcaccaagtggattcaacccaagtggaacagtttctcaggagacattcccttctggtgaaacaaccatctcatccccttccagtgtcagcaatacattcctggtaacatcaaaggtgttcagaatgccaatctccagagactctactcttggaaacacagaggagacatcactatctgtaagtggaaccatttctgcaatcacttccaaagtttcaaccatatggtggtcagacactctgtcaacagcactctcccccagttctctacctccaaaaatatccacagctttccacacccagcagagtgaaggtgcagagaccacaggacggcctcatgagaggagctcattctctccaggtgtgtctcaagaaatatttactctacatgaaacaacaacatggccttcctcattctccagcaaaggccacacaacttggtcacaaacagaactgccctcaacatcaacaggtgctgccactaggcttgtcacaggaaatccatctacagggacagctggcactattccaagggtcccctctaaggtctcagcaataggggaaccaggagagcccaccacatactcctcccacagcacaactctcccaaaaacaacaggggcaggcgcccagacacaatggacacaagaaacggggaccactggagaggctcttctcagcagcccaagctacagtgtgactcagatgataaaaacggccacatccccatcttcttcacctatgctggatagacacacatcacaacaaattacaacggcaccatcaacaaatcattcaacaatacattccacaagcacctctcctcaggaatcaccagctgtttcccaaaggggtcacactcaagccccgcagaccacacaagaatcacaaaccacgaggtccgtctcccccatgactgacaccaagacagtcaccaccccaggttcttccttcacagccagtgggcactcgccctcagaaattgttcctcaggacgcacccaccataagtgcagcaacaacctttgccccagctcccaccggggatggtcacacaacccaggccccgaccacagcactgcaggcagcacccagcagccatgatgccaccctggggccctcaggaggcacgtcactttccaaaacaggtgcccttactctggccaactctgtagtgtcaacaccagggggcccagaaggacaatggacatcagcctctgccagcacctcacctgacacagcagcagccatgacccatacccaccaggctgagagcacagaggcctctggacaaacacagaccagcgaaccggcctcctcagggtcacgaaccacctcagcgggcacagctaccccttcctcatccggggcgagtggcacaacaccttcaggaagcgaaggaatatccacctcaggagagacgacaaggttttcatcaaacccctccagggacagtcacacaacccagtcaacaaccgaattgctgtccgcctcagccagtcatggtgccatcccagtaagcacaggaatggcgtcttcgatcgtccccggcacctttcatcccaccctctctgaggcctccactgcagggagaccgacaggacagtcaagcccaacttctcccagtgcctctcctcaggagacagccgccatttcccggatggcccagactcagaggacaagaaccagcagagggtctgacactatcagcctggcgtcccaggcaaccgacaccttctcaacagtcccacccacacctccatcgatcacatccactgggcttacatctccacaaacccagacccacactctgtcaccttcagggtctggtaaaaccttcaccacggccctcatcagcaacgccacccctcttcctgtcacctacgcttcctcggcatccacaggtcacaccacccctcttcatgtcaccgatgctcagcatccacaggtcacgccacccctcttcctgtcaccagcccttcctcagcatccacaggtgacaccacccctcttcctgtcaccgacacttcctcagtatccacaggtcacgccacccctcttcctgtcaccgacacttcctcagcatccacaggtcacgccacccctcttcctgtcaccagcccttcctcagcatccacaggtcacgccacccctcttcctgtcaccgacacttcctcagtatccacaggtgacaccacccctcttcctgtcaccgacgcttcctcagtagcatccacaggtgacaccacccctcttcatgtcaccgacacttcctcagcatccacaggtcacgccacccctcttcctgtcaccagcctttcctcagtatccacaggtgacaccacgcctcttcctgtcactagcccttcctcagcatccacaggtcacgccacccctcttcttgtcaccgacgcttcctcagtatccacaggtcacgccacccctcttcctgtcaccgacgcttcctcagcatccacaggtcacgccacccctcttcatgtcaccgacgcttcctcagcatccacaggtgacaccacctctcttcctgtcaccgacgcttcctcagcatccacaggtgacaccacccctcttcctgtcaccgacacttcctcagcatccacaggtgacaccacccctcttcctgtcaccaacgcttcctcagcatccacaggtcacgccacccctcttcatgtcaccaacgcttcctcagtatccacaggtgacaccacccctcttcctgtcaccggcccttcctcagcatccacaggtcacgccacccctcttcctgtcaccgacacttcctcagtatccacaggtcacgccacccctcttcctgtcaccagcctttcctcagcatccacaggtgacaccacccctcttcctgtcaccgacacttcctcagcatccacaggtcacgccacccctcttcctgtcaccagcctttcctcagtatccacaggtgacaccacccctcttcctgtcaccgacacttcctcagcatccacaggtcacgccacctctcttcttgtcaccgacgcttcctcagtatccacaggtcacgccacccctcttcatgtcaccgatgcttcctcagtatccacaggtgacaccacccctcttcctgtcaccagcccttcctcagcatccacaggtgacaccacccctcttcctgtcaccgacacttcctcagtatccacaggcgacaccacccctcttcttgtcaccgacacttcctcagtatccacaagccacgccacctctcttcctgtcaccgacacttcctcagtatccacaagccacgccacctctcttcctgtcaccgacccttcctcagcatccacaggtgacaccacccctcttcctgtcaccgacacttcctcagtatccacaagccacgccacctctcttcctgtcaccgacacttcctcagcatccacaagtcacgccacctctcttcctgtcactgacacttcctcagcatccacaggtcacgccacccctcttcctgtcaccgacacttcctcagcatccacaggtcacgccacccctcttcctgtcaccagcacttcctcagcatccacaggtcacaccacccctcttcctgtcaccgacacttcctcagcatccacaggtcacgccacccctcttcctgtcaccagcctttcctcgtcacaccacccctcttcctgtcaccgacgcttcgtcagtatccacaggtgacaccacccgtcttcctgtcaccagcccttcctcagcatccacaggtcacaccacccctcttcctgtcaccgacacttcctcagcatccacaggtcagacaccacccctcttcctgtcaccaatgcttcctcattatccacacgtcacgccacctctcttcatgtcaccagcccttcgtcgacgcggccgcgaatttagtagtagtagtagaccgccgctc

SEQ ID NO: 480884 - DNA, 169 bp, Homo sapiens
ataagatagtatagcctgatatgctactatacatgacagaagactttaaaaaataatcactgcacacaatgtaaagggtggggttatgctgtgatattaattttacctcaataatgtttatcttgactgtacaagaacaaattaacagtttccacggccaaatttgttt

SEQ ID NO: 480885 - DNA, 3107 bp, Homo sapiens
aaagctcaaaccgacaccctcacgcagatgatgacatcaactcttttttcttccccaagtgtacacaatgtgatggagactgttacgcaggagacagctcctccagatgaaatgaccacatcatttccctccagtgtcaccaacacactcatgatgacatcaaagactataacaatgacaacctccacagactccactcttggaaacacagaagagacatcaacagcaggaactgaaagttctaccccagtgacctcagcagtctcaataacagctggacaggaaggacaatcacgaacaacttcctggaggacctctatccaagacacatcagcttcttctcagaaccactggactcggagcacgcagaccaccagggaatctcaaaccagcaccctaacacacagaaccacttcaactccttctttctctccaagtgtacacaatgtgacagggactgtttctcagaagacatctccttcaggtgaaacagctacctcatccctctgtagtgtcacaaacacatccatgatgacatcagagaagataacagtgacaacctccacaggctccactcttggaaacccaggggagacatcatcagtacctgttactggaagtcttatgccagtcacctcagcagccttagtaacagttgatccagaaggacaatcaccagcaactttctcaaggacttctactcaggacacaacagctttttctaagaaccaccagactcagagcgtggagaccaccagagtatctcaaatcaacaccctcaacaccctcacaccggttacaacatcaactgttttatcctcaccaagtggattcaacccaagtggaacagtttctcaggagacattcccttctggtgaaacaaccatctcatccccttccagtgtcagcaatacattcctggtaacatcaaaggtgttcagaatgccaatctccagagactctactcttggaaacacagaggagacatcactatctgtaagtggaaccatttctgcaatcacttccaaagtttcaaccatatggtggtcagacactctgtcaacagcactctcccccagttctctacctccaaaaatatccacagctttccacacccagcagagtgaaggtgcagagaccacaggacggcctcatgagaggagctcattctctccaggtgtgtctcaagaaatatttactctacatgaaacaacaacatggccttcctcattctccagcaaaggccacacaacttggtcacaaacagaactgccctcaacatcaacaggtgctgccactaggcttgtcacaggaaatccatctacagggacagctggcactattccaagggtcccctctaaggtctcagcaataggggaaccaggagagcccaccacatactcctcccacagcacaactctcccaaaaacaacaggggcaggcgcccagacacaatggacacaagaaacggggaccactggagaggctcttctcagcagcccaagctacagtgtgactcagatgataaaaacggccacatccccatcttcttcacctatgctggatagacacacatcacaacaaattacaacggcaccatcaacaaatcattcaacaatacattccacaagcacctctcctcaggaatcaccagctgtttcccaaaggggtcacactcaagccccgcagaccacacaagaatcacaaaccacgaggtccgtctcccccatgactgacaccaagacagtcaccaccccaggttcttccttcacagccagtgggcactcgccctcagaaattgttcctcaggacgcacccaccataagtgcagcaacaacctttgccccagctcccaccggggatggtcacacaacccaggccccgaccacagcactgcaggcagcacccagcagccatgatgccaccctggggccctcaggaggcacgtcactttccaaaacaggtgcccttactctggccaactctgtagtgtcaacaccagggggcccagaaggacaatggacatcagcctctgccagcacctcacctgacacagcagcagccatgacccatacccaccaggctgagagcacagaggcctctggacaaacacagaccagcgaaccggcctcctcagggtcacgaaccacctcagcgggcacagctaccccttcctcatccggggcgagtggcacaacaccttcaggaagcgaaggaatatccacctcaggagagacgacaaggttttcatcaaacccctccagggacagtcacacaacccagtcaacaaccgaattgctgtccgcctcagccagtcatggtgccatcccagtaagcacaggaatggcgtcttcgatcgtccccggcacctttcatcccaccctctctgaggcctccactgcagggagaccgacaggacagtcaagcccaacttctcccagtgcctctcctcaggagacagccgccatttcccggatggcccagactcagaggacaagaaccagcagagggtctgacactatcagcctggcgtcccaggcaaccgacaccttctcaacagtcccacccacacctccatcgatcacatccactgggcttacatctccacaaacccagacccacactctgtcaccttcagggtctggtaaaaccttcaccacggccctcatcagcaacgccacccctcttcctgtcacctacgcttcctcggcatccacaggtcacaccacccctcttcatgtcaccgatgcttcctcagtatccacaggtcacgccacccctcttcctgtcaccgacacttcctcagcatccacaggtcacgccacccctcttcctgtcaccagcccttcctcagcatccacaggtcacgccacccctcttcctgtcaccgacacttcctcagtatccacaggtagtatccacaggtgacaccacccctcttcctgtcactagcccttcctcagcatccacaggtcacgccacccctcttcctgtcaccgacgcttcctcagcatccacaggtcacgccacccctcttcctgtcaccagcccttcctccccttcgtcgacgcggccgcgaatttagtagtagtagtagaccgccgctc

SEQ ID NO: 480886 - DNA, 3050 bp, Homo sapiens
aaagctcaaaccgacaccctcacgcagatgatgacatcaactcttttttcttccccaagtgtacacaatgtgatggagactgttacgcaggagacagctcctccagatgaaatgaccacatcatttccctccagtgtcaccaacacactcatgatgacatcaaagactataacaatgacaacctccacagactccactcttggaaacacagaagagacatcaacagcaggaactgaaagttctaccccagtgacctcagcagtctcaataacagctggacaggaaggacaatcacgaacaacttcctggaggacctctatccaagacacatcagcttcttctcagaaccactggactcggagcacgcagaccaccagggaatctcaaaccagcaccctaacacacagaaccacttcaactccttctttctctccaagtgtacacaatgtgacagggactgtttctcagaagacatctccttcaggtgaaacagctacctcatccctctgtagtgtcacaaacacatccatgatgacatcagagaagataacagtgacaacctccacaggctccactcttggaaacccaggggagacatcatcagtacctgttactggaagtcttatgccagtcacctcagcagccttagtaacagttgatccagaaggacaatcaccagcaactttctcaaggacttctactcaggacacaacagctttttctaagaaccaccagactcagagcgtggagaccaccagagtatctcaaatcaacaccctcaacaccctcacaccggttacaacatcaactgttttatcctcaccaagtggattcaacccaagtggaacagtttctcaggagacattcccttctggtgaaacaaccatctcatccccttccagtgtcagcaatacattcctggtaacatcaaaggtgttcagaatgccaatctccagagactctactcttggaaacacagaggagacatcactatctgtaagtggaaccatttctgcaatcacttccaaagtttcaaccatatggtggtcagacactctgtcaacagcactctcccccagttctctacctccaaaaatatccacagctttccacacccagcagagtgaaggtgcagagaccacaggacggcctcatgagaggagctcattctctccaggtgtgtctcaagaaatatttactctacatgaaacaacaacatggccttcctcattctccagcaaaggccacacaacttggtcacaaacagaactgccctcaacatcaacaggtgctgccactaggcttgtcacaggaaatccatctacagggacagctggcactattccaagggtcccctctaaggtctcagcaataggggaaccaggagagcccaccacatactcctcccacagcacaactctcccaaaaacaacaggggcaggcgcccagacacaatggacacaagaaacggggaccactggagaggctcttctcagcagcccaagctacagtgtgactcagatgataaaaacggccacatccccatcttcttcacctatgctggatagacacacatcacaacaaattacaacggcaccatcaacaaatcattcaacaatacattccacaagcacctctcctcaggaatcaccagctgtttcccaaaggggtcacactcaagccccgcagaccacacaagaatcacaaaccacgaggtccgtctcccccatgactgacaccaagacagtcaccaccccaggttcttccttcacagccagtgggcactcgccctcagaaattgttcctcaggacgcacccaccataagtgcagcaacaacctttgccccagctcccaccggggatggtcacacaacccaggccccgaccacagcactgcaggcagcacccagcagccatgatgccaccctggggccctcaggaggcacgtcactttccaaaacaggtgcccttactctggccaactctgtagtgtcaacaccagggggcccagaaggacaatggacatcagcctctgccagcacctcacctgacacagcagcagccatgacccatacccaccaggctgagagcacagaggcctctggacaaacacagaccagcgaaccggcctcctcagggtcacgaaccacctcagcgggcacagctaccccttcctcatccggggcgagtggcacaacaccttcaggaagcgaaggaatatccacctcaggagagacgacaaggttttcatcaaacccctccagggacagtcacacaacccagtcaacaaccgaattgctgtccgcctcagccagtcatggtgccatcccagtaagcacaggaatggcgtcttcgatcgtccccggcacctttcatcccaccctctctgaggcctccactgcagggagaccgacaggacagtcaagcccaacttctcccagtgcctctcctcaggagacagccgccatttcccggatggcccagactcagaggacaagaaccagcagagggtctgacactatcagcctggcgtcccaggcaaccgacaccttctcaacagtcccacccacacctccatcgatcacatccactgggcttacatctccacaaacccagacccacactctgtcaccttcagggtctggtaaaaccttcaccacggccctcatcagcaacgccacccctcttcctgtcacctacgcttcctcggcatccacaggtcacaccacccctcttcatgtcaccgatgcttcctcagtatccacaggtcacgccacccctcttcctgtcaccgacacttcctcagcatccacaggtcacgccacccctcttcctgtcaccagcccttcctcagcatccacaggtcacgccacccctcttcctgtcaccgacacttcctcagtatccacaggttcttcctgtcaccagcccttcctcagcatccacaggtcacaccacccctcttcctgtcaccgacacttcctcagcatccacaggtcacccttcgtcgacgcggccgcgaatttagtagtagtagtagaccgccgctc

SEQ ID NO: 480887 - DNA, 1090 bp, Homo sapiens
  misc_feature (360)..(360): n is a, c, g, or t
  misc_feature (578)..(578): n is a, c, g, or t
  misc_feature (797)..(797): n is a, c, g, or t
  misc_feature (844)..(844): n is a, c, g, or t
  misc_feature (881)..(882): n is a, c, g, or t
  misc_feature (939)..(939): n is a, c, g, or t
  misc_feature (1027)..(1027): n is a, c, g, or t
agcgggggggtggaggcaccggctggcgggcgggggtacaggcacggggcacggggctcccgctccaggttccttgcaagcacttccgaccgggcaagcccggcgcgagaagtcgagctaacccaagagctcaacaagcgagtcgcgcgacgagggcatgccggacgtgatgcggagcacgccgggccagacgcgggcatcaggagcccgggtctccgccgtctcgggacccggactaggcaggcagggtgggggcgcgtcgatcgttccagctgctactcccccgtggtaggcggtgcaaccagtcatgctgcgaggaagcatcgtaacaagtcgcacactgctacgtcatgcgtctangcgtccccagaggaagatctacgcgctatagctcctggagcgctggtaggagcctgctagcgttgggacagcactaactctaggcatcctgtggcagctgtccctgtagcgaaactattttgcccagtccttaggtcagaagttaatcgacatacgcgtatggtacattgacgtgatgatattgcaacattgcagcgtgcgtccccgtgcgcaggagnaactaggcaaagctatcgaatggcccaggctgagtggatagcgtagaatcgttgtactcggagatagtgacgacttgctcctgtacaccattcctacgaaagaggctaattctaccattctgatacaccagtcgagctcgctaaggatagcgctgtaccttcgaggccgtgggaaacccaccactggaatcttatgggtgggcctacgaaagaagtctntcttcactggtagaccttgacttgcacacttgtcgagacagttggtncttttgccttgtgagactaagtgcaccatgcgttcanncttacgaagattcttcgtaccgtggataagaattatttgggccagatccttttgagntaacccctggcgttgtcactggcgtagacctcgatgcagcacgaactcccttctggtacgagtaatctttggcctgaacatcgtcgtntagccactagacgtggcggaagggacgtaagaaagtacactgtgaatttgaagcgaaaaatga

SEQ ID NO: 480888 - DNA, 985 bp, Homo sapiens
gcagccggtggcggtctgagccgctcggagcgcaaagctgctgagcgggtccggaggctgcgggaggagcagcagcgggagcgcctccgccaggtgtcacgcatcctgaggaaggcggctgcagagcgcagcgcggaggagggccggctcttggccgagagcgaggatctggtgaccgagctgcagggtcgaagtcggcggcgtgagggcctcaagcgccgccaggaggaggtgtgtgatgacccggaggagctgcggaggaaggtccgcgaactggccggagctgtccgaagtgccaggcacttggttgtctacacgggcgctggaatcagcacagcagcttctatcccagattatcggggtcctaatggagtatggacactgcttcagaaaggaaggcctgtgagtgctgccgacctaagcgaagcggagcctaccctcacccacatgagcatcacccgtttgcatgagcaaaagctggtgcaacacgtggtgtctcagaactgtgatgggctccacctgcggagtgggttggcccggaccgccatctcagagctccatgggactatgtatattgaagtctgcacctcctgatccctaacagagagtatgtacgagtgtttgatgtgactgagcgtactgccttcaccgacaccttgacagggccggacctgccacaagtgcgggaccagcttcgggattccattggtgcacttggggagacggcgactttgggcagccttggaactgggaaggcagcgaacgagctgcgtcgcaagcagaacaatcggtgtttaggggcccgcctgaaggtctaacgaaaaatcccgacttggtgagtaaaacctccaagcggctgaccacactttttgtggaactgcttggccgcacagatatgtgcgcgctcacccgggagggcgtgatgtaggcctaaaaagcggcgaacggtacggggagcaccttcgtggaccccggtgagaacgag

SEQ ID NO: 480889 - DNA, 1494 bp, Homo sapiens
  misc_feature (5)..(5): n is a, c, g, or t
  misc_feature (28)..(28): n is a, c, g, or t
  misc_feature (31)..(31): n is a, c, g, or t
  misc_feature (1433)..(1433): n is a, c, g, or t
  misc_feature (1435)..(1435): n is a, c, g, or t
  misc_feature (1438)..(1439): n is a, c, g, or t
  misc_feature (1441)..(1441): n is a, c, g, or t
  misc_feature (1445)..(1445): n is a, c, g, or t
ggtcnactactactactaaattcgcggncgngtcgacccgccctcttcatgtcaccgacacttcctcagcatccacaggtcacgccacccctcttcctgtcaccagcctttcctcagtatccacaggtgacaccacgcctcttcctgtcactagcccttcctcagcatccacaggtcacgccacccctcttcttgtcaccgacgcttcctcagtatccacaggtcacgccacccctcttcctgtcaccgacgcttcctcagcatccacaggtcacgccacccctcttcatgtcaccgagcttcctcagtatccacaggtgacaccacccctcttcctgtcaccggcccttcctcagcatccacaggtcacgccacccctcttcctgtcaccgacacttcctcagtatccacaggtcacgccacccctcttcctgtcaccagcctttcctcagcatccacaggtgacaccacccctcttcctgtcaccgacacttcctcagcatccacaggtcacgccacccctcttcctgtcaccagcctttcctcagtatccacaggtgacaccacccctcttcctgtcaccgacacttcctcagcatccacaggtcacgccacctctcttcttgtcaccgacgcttcctcagtatccacaggtcacgccacccctcttcatgtcaccgatgcttcctcagtatccacaggtgacaccacccctcttcctgtcaccagcccttcctcagcatccacaggtgacaccacccctcttcctgtcaccgacacttcctcagtatccacaggcgacaccacccctcttcttgtcaccgacacttcctcagtatccacaagccacgccacctctcttcctgtcaccgacacttcctcagtatccacaagccacgccacctctcttcctgtcaccgacccttcctcagcatccacaggtgacaccacccctcttcctgtcaccgacacttcctcagtatccacaagccacgccacctctcttcctgtcaccgacacttcctcagcatccacaagtcacgccacctctcttcctgtcactgacacttcctcagcatccacaggtcacgccacccctcttcctgtcaccgacacttcctcagcatccacaggtcacgccacccctcttcctgtcaccagcacttcctcagcatccacaggtcacaccacccctcttcctgtcaccgacacttcctcagcatccacaggtcacgccacccctcttcctgtcaccagcctttcctcagtatccacaggtgacaccacccctcttcctgtcactagcccttcctcagcatccacaggtcacgccacccctcttcctgtcaccgacgcttcctcagcatccacaggtcacgccacccctcttcctgtcaccagcccttcctcagcatccacaggtgacacacccngncgnncntacngtcccttccgtcgcagtagtctggggagtcctctagagtcgcctagatg

SEQ ID NO: 480890 - DNA, 1166 bp, Homo sapiens
  misc_feature (1105)..(1105): n is a, c, g, or t
  misc_feature (1107)..(1107): n is a, c, g, or t
  misc_feature (1110)..(1111): n is a, c, g, or t
  misc_feature (1113)..(1113): n is a, c, g, or t
  misc_feature (1117)..(1117): n is a, c, g, or t
ctcggtacccgtcagacgctgaactatgtgtccacaggtcacgccacccctcttcctgtcaccgacacttcctcagtatccacaggtcacgccacccctcttcctgtcaccagcctttcctcagcatccacaggtgacaccacccctcttcctgtcaccgacacttcctcagcatccacaggtcacgccacccctcttcctgtcaccagcctttcctcagtatccacaggtgacaccacccctcttcctgtcaccgacacttcctcagcatccacaggtcacgccacctctcttcttgtcaccgacgcttcctcagtatccacaggtcacgccacccctcttcatgtcaccgatgcttcctcagtatccacaggtgacaccacccctcttcctgtcaccagcccttcctcagcatccacaggtgacaccacccctcttcctgtcaccgacacttcctcagtatccacaggcgacaccacccctcttcttgtcaccgacacttcctcagtatccacaagccacgccacctctcttcctgtcaccgacacttcctcagtatccacaagccacgccacctctcttcctgtcaccgacccttcctcagcatccacaggtgacaccacccctcttcctgtcaccgacacttcctcagtatccacaagccacgccacctctcttcctgtcaccgacacttcctcagcatccacaagtcacgccacctctcttcctgtcactgacacttcctcagcatccacaggtcacgccacccctcttcctgtcaccgacacttcctcagcatccacaggtcacgccacccctcttcctgtcaccagcacttcctcagcatccacaggtcacaccacccctcttcctgtcaccgacacttcctcagcatccacaggtcacgccacccctcttcctgtcaccagcctttcctcagtatccacaggtgacaccacccctcttcctgtcactagcccttcctcagcatccacaggtcacgccacccctcttcctgtcaccgacgcttcctcagcatccacaggtcacgccacccctcttcctgtcaccagcccttcctcagcatccacaggtgacacacccngncgnncntacngtcccttccgtcgcagtagtctggggagtcctctagagtcgcctagatg

SEQ ID NO: 480891 - DNA, 750 bp, Homo sapiens
  misc_feature (2)..(2): n is a, c, g, or t
  misc_feature (71)..(71): n is a, c, g, or t
  misc_feature (84)..(84): n is a, c, g, or t
  misc_feature (87)..(87): n is a, c, g, or t
  misc_feature (96)..(96): n is a, c, g, or t
  misc_feature (117)..(117): n is a, c, g, or t
  misc_feature (129)..(129): n is a, c, g, or t
  misc_feature (145)..(145): n is a, c, g, or t
  misc_feature (157)..(157): n is a, c, g, or t
  misc_feature (164)..(164): n is a, c, g, or t
  misc_feature (169)..(169): n is a, c, g, or t
  misc_feature (189)..(189): n is a, c, g, or t
  misc_feature (205)..(205): n is a, c, g, or t
  misc_feature (212)..(212): n is a, c, g, or t
  misc_feature (265)..(265): n is a, c, g, or t
  misc_feature (277)..(277): n is a, c, g, or t
  misc_feature (285)..(287): n is a, c, g, or t
  misc_feature (293)..(293): n is a, c, g, or t
  misc_feature (301)..(301): n is a, c, g, or t
  misc_feature (306)..(306): n is a, c, g, or t
  misc_feature (333)..(333): n is a, c, g, or t
  misc_feature (338)..(338): n is a, c, g, or t
  misc_feature (342)..(342): n is a, c, g, or t
  misc_feature (351)..(351): n is a, c, g, or t
  misc_feature (353)..(353): n is a, c, g, or t
  misc_feature (357)..(357): n is a, c, g, or t
  misc_feature (362)..(364): n is a, c, g, or t
  misc_feature (378)..(378): n is a, c, g, or t
  misc_feature (388)..(388): n is a, c, g, or t
  misc_feature (397)..(398): n is a, c, g, or t
  misc_feature (402)..(402): n is a, c, g, or t
  misc_feature (435)..(435): n is a, c, g, or t
  misc_feature (440)..(440): n is a, c, g, or t
  misc_feature (461)..(461): n is a, c, g, or t
  misc_feature (738)..(738): n is a, c, g, or t
gntcctaattcgttataggtgtacagttccgtggcattacctcccttcccattgatgtgctaccctccctnccctctatctccnganctgtttttncccttgagatttttccttttnttgagatttttntttatttacctttttngagataggtgcncccctcnctgtngcccaggcctgcctcccccnccggcttccccggtcncccctcnccgcctcctgagtggttggccctacaggtgaatgccactgtgcctggcttacnctaacatttttnaacttaannntatganatattacngttcnccgggacatccgatacctttttcctcntgccntttnccttccccntntgtngaccnnnttccgccccgaacntaccattggngtattaacnnaccntttgggcttggtattccctcatgcttgtctaanccacnggcctcctaagtccaacctcnccgcgccgtgtcaccctcggctgcctttccctcccacagcgccacccttcgccgtcctaaaagttcaattttacaaacctagaaaagagatttctgacagcatagaaaaccagacattctcccttcactggctaactcctatgggaagaaaaataggtggtaagaacacactttaggctggcgcagtggctcatgcctgtaatcccagcactttgggaggccgaggcgggcggatcacctgaggtcgggagttcgagaccagcctgaccaacatggngaaccctgtctc

SEQ ID NO: 480892 - DNA, 342 bp, Homo sapiens
ctatttggtctttacggcgtagttaaatatgctccttaaaacaaatacttctaggtcgggcatggtggctcacgcctgtaattccggaattttaggaggctgaggaggaaggatagcttgagcccagaagttcaagaccagcctgggcaacacagggggatccaggctgtacagaaaataaataaattagccaagtgtggtggtacacacctatattcccagccacttgggagattgaggtaggggaggatagcttgaacctgggaggtcaagcctgcaataagcagtgattgtgccactgcactccagcctgaatgacagagcaggaccacatcattaaaa

SEQ ID NO: 480893 - DNA, 849 bp, Homo sapiens
gccccctccagtcagccccacccagtcccttgccaggtcctggacccctgctccagtacctgatcctgcccttcttccgagagatgaagtgtggatggggactggcgccccgcttgagagagcccagccctgctgcacccccagattacatggatacccggtcgctgtcccagctcatctttccttcgattctccagaaacgccctcgcatgatatccccgcagggaatcacttcctggggactgtggtaggggctggggccactgcagagcccccgttatacagaccctggctgacctggacacctgagtggagtcgggctgctgccaggccttctccctgctgaccctcgaggcagcctcacagaaccagagcagcgggcgaggcagctgcttcgttcctgcggtcccctctccacagcccctctctgctagggaggcagctacacctcagccctgctcccaggagacaccagcagctgggcagtggacctgagagatggcccgaagggagcagtgtggtgacagtcagcaagaggaaggaacacatctgtggacgagaactatgatgtgggactccagaattccctggggacatgtgatacttgctggagagtttgcacctgggcttggcacagctcccggctcgagaacctgaagctgagtcgagagctaggtgtgaagactccagatgagggtggcctctgaatgctgcccatgtactggcctgaggccgtgtgtgcccttcggaggaatccggcttcgcgcgcgaatgtactagggcggtaccactacgaaagcagtcccaaccgaaggccctttggcatccaaggagcggaaggttgcccca

SEQ ID NO: 480894 - DNA, 533 bp, Homo sapiens
ctccttcgcttattacggttagtgaggctgcgtatgacatgctgggttgagacttcttagacttctaagaagtgttgtatattggctcccactctattctggcttgtagggttactgcagagagatccgctgttagtctgatgggtttccctttgtgggtaacctgacctttctctctggctgcccttaacattttttccttcatttcaaccttgatgaatctgacaattatgtgtcttggggttgttcttcttgaggagtatcttagtggtgttctctgcatttcctgaatttgaatgctggcctgtcttgctaggttggggaagttctcctggattatatcctgaagtgttttccaacttagttccattctcccggtcactttcagggagaatcaaacataggtttggtcttttcacatagtcccctatttcttggaggcttagttcattccttttcattcttttttctctaatctcgtcttcttgctttatttcattaagttaatcttcaatctctgatatctgttcttc

SEQ ID NO: 480895 - DNA, 160 bp, Homo sapiens
gctgagtgatctaaggatcccgcgctagcggcattaagtgaacgcttccttaagcctagtctctgtcctgggtttgcatgctgactgtcctgttcactaacagacagttgtcctgggtaccttgaggctcctgggtgtggggtcagggccagggtgaggc

SEQ ID NO: 480896 - DNA, 227 bp, Homo sapiens
  misc_feature (172)..(172): n is a, c, g, or t
agtagtccaaaaagagacttcagagaagacatggcttccagaaaagagaatgcgaagagcgcaaacagagtgctaagaataagccagttggatgcacttgaaactaaaacaagggcctggagcagctagttttggtccccagtttatttcagtgctttcatgtgatttaaancctgtggctgttaggctctgctttgagccatgaaggtgaaagcgtgcttaatggg

SEQ ID NO: 480897 - DNA, 238 bp, Homo sapiens
tccgtactgccgggatcgccgcagacatcgatcaggtgctgctggtgtttggcctggcagcactgctgggcatttgggtggtcggcgcgctgattgatcagcggctgcgggccttgttggtgatcagttgcgggatgttcgcactctcagcattggcgctggcgttctggattacctcgccggccgtgatctacaccaccgtgacgttatgggggcactattctttacagagcccagg

SEQ ID NO: 480898 - DNA, 254 bp, Homo sapiens
  misc_feature (235)..(236): n is a, c, g, or t
acccttggatccagtctgggcatggcccaaaaaaccttcttggaggggggtgaaactggcggcttgccaaaacccttaaagccctccggggggttttcccagccccctagggtttcaaaaagggccccgcggttcccaaaaagacccccaaattgggagaaatttttttttgggaaaaaaggcgcgacaaatgggggccaaaaagcgggcccccccccccccctttttgttgggnnggggcccccccccttttg

SEQ ID NO: 480899 - DNA, 513 bp, Homo sapiens
tgagaaataatccaaacatacatctgcagtaaaattttcatataaactgtgacatattcacacaatggaatacagtatcacaatacaagtgaatgaacacagtctacaggcatcaacatggataggtctcacaaatttaatttcaatgaaaagaagcaagtggtaaaaatatgcatatatcgtgctgtcttctatgtaaacttcaaaaaatgttttgcgtaaattgcaaacctaagcaatatatttcagtacgtatactatatcagtgacccaataatgttttaaaaggaaagaaagtgatagacacaaaatgttgcagtgtttctctctgtcatagaaggatgaggtagaggaaagcgagtgggggaggagcagagtgggcttcaaagttgttgatgctttatttcttaaataaggtggtaaggacatgaatgcgtgttttggtcattattctttgaagcatgcaaacccctccatcctttttaatgaacaattcatatcttagtaagtagt

SEQ ID NO: 480900 - DNA, 232 bp, Homo sapiens
ttactaaacaaaatcacgacataaccagcgctaccggggaccgcttgtagaagggcagagaagcgatacaaagtactaagtagctgggcgagcagcgtctgatgctgcgtctgagggctataggctcctgagcctccgctagctgcccttgcccaagctcagtcgccctccaggtgcaaagagctaggttgttagaatcgatggagccaggcttggtgatcttggtgagtca

SEQ ID NO: 480901 - DNA, 270 bp, Homo sapiens
aagatgcccacatttctgtttactcacagttgttgtatattattcaatttcaatattgaaagtaaactcaatcacaattagttttcccatttttaccttccactacctacttgtcaagacaaaaaatatagatgtctcttaaaacacaatccaacgaagccgtctttcctcaaaacatgatcttattgacatgatggtaggttgatgcagcggtatgttataatataaatagctctcaacctgcatcattatttatactatagttgagaa

SEQ ID NO: 480902 - DNA, 315 bp, Homo sapiens
  misc_feature (301)..(301): n is a, c, g, or t
aggccaaggcgggcggatcatgaggtcaggaaatcgagaccatcctggctaacacggtgaaacctcgtatctactaaaaatacaaaaaattagccaggcatggtggcgggcgcctgagtcccagctactcgggaggctgaagcaggagaatggcgtgaacctgggagggagagcttgcagtgagccaagatcgcgccactgcactccagcctgagtgacagagcgagactctgtctcaaaaataaataaataaataattagctggattaggtggtacatttctgtagttccagctattcangaggctgaggtgga

SEQ ID NO: 480903 - DNA, 485 bp, Homo sapiens
tctctacctctctcaaacactcataccttctttgctgcatagccacttaaaatttcagactatttttcaaaaccaaataatctgacaagcaaacatttcttggcacttaggagagaaaaagaggttcaggttaaagtgtttgaccactttgttttcttccgtggcataaaaatactttaaaaacctgctgaattattgaaatacttgagataaattctgttatgtctttgtcacttaaatctgttttctgttaagatattcattatgatacagaatgtaataatagcaaaaataaatcacaagaccaaatattttgatgcagtattgaaagattttcttgtatcttgttccatagtcaggaaacatatgtatcaactaacaccttaataccagccttcatgttgttatttgaataaatgcatatactattacttctgtataaatagaaaatttttgaaagaataaattacaaccctttcatgaaa

SEQ ID NO: 480904 - DNA, 526 bp, Homo sapiens
ttcctgctgctcatcccagaactgactctccatgtatttactcttattttgagagaagggggcatttccaccaccagaagggaacttgctgtcttggtagccattgtcccctgacacctggcacatctactctatacagtcaccattcaagtggatgttgaatgagtacacttgtttcacagtttggttgggtaagccccaaagcttggttcccggtaggatcaggctttatgagtgggctgagtttctataaaagtctccctaccagtttccaatcttggtgaaactatgtctgtgggcacaaatgagaaaacttgccattcgtatcaccggttacccagctgtggaccatgtgggccaggtccacagaagagccttatcctactttcactttttatttcctgcagtcatggggacagtggggcaccaccttttcagaaactctaagaaagagtgttcatgaaagtggccagagagttttacaattttgccattaggaatgattaaatatccatgactaataaaa

SEQ ID NO: 480905 - DNA, 827 bp, Homo sapiens
cccgtcatctactctaccatctttgcgggcacactcatcacagcgctaagctcgcagcatgattttgtagcctgagtaggcctagaaataaacatgctagcttgtattccagtgtctaaccgaaaaaaagtaaagccctcgtcccacagcaagctgccatcaagtacttcctcacgcaagcaagccgcagtccactatatccttctaagtagctatcctcttcaagcaattatactctccggacatatgaaccattaatccaagtactactcgaatcaagtactcagtcatctacataatcattaattggcttatagacaactaaggacgtaggcaatagccccctttcacttctgaggtcccagaggttacccaaggcagccctctgacatccggcctgcgttcgttctcacattgaccaaaacacgtagacccctcatcctcaagtcatataccagatctctccctcactaaacggtaagccttctcctcactctctcaatcgttatccagtcatagccaggcagcacgaggatggagttaaagccaaagcccgagctacgcaaagtcttgagcatactcctcaattagccacataggatgaactaatgagcagttctaccgtacaaccctaacataaccatactcagtttaactattatattatcctaactactaccgcattcctactactcaacttaagactccagcgagcactgacctactactatctcgcacctgagacaatgctaacatgactaacagccttaattccatccaagctcctctccctaggaggcctgccccggtaccggctttttgcccaa

SEQ ID NO: 480906 - DNA, 159 bp, Homo sapiens
cattgagcccctgtgatgcactgtgaggcaagccaagtcacatacacagaggaaggccgtgctcagcagcaccagcatctgtccagtgcgtagtagtccctagcatgttgcaccagcacagcggtatgaggtccgatccttaaaagctgcttcattttg

SEQ ID NO: 480907 - DNA, 634 bp, Homo sapiens
gtactttgggaggccgaggtgggtggatcacgagatcaggaggtcgagaccatcctggccaacatggtgaaaccccatttctactaaaaatacaaaaattagccgggcgtggtggtgggcgcctgtaatcccagctactcgggaggctgaggcaggcagaatcacttgaacccgggatgcagaggttgcagtgagccgggattgtgccactgcactccagcctgggcaacaagagcgagactccgtctcaaaaaaaaaaaaaaaaagggaaagcaaaaatcacgttgctgaagagggccgagggcaaaggatagcacaaacccccaagatactggagggacactcatatgagcgtgctgtaccaagctgggaaacaggccgtatctcacagaactataagcagcgcgtaacgtgtgagcaaacgggtctaggaccggggatgcacggggaaacagagaaccattgtgagactctcaggcaacgtgtgggaacaggccgtgagcgaggaccacgaacaaagcaaaggctcaagcgagaactcgagacaccagccgcgggacacaacaaaggggaaacaaccgggggctacaccaacacaccacccaacacacccaaaccaccaaacatcccacgc

SEQ ID NO: 480908 - DNA, 238 bp, Homo sapiens
tctctctgggcattatcatagtcagtcgggtactgcgagtccctgcctcctccatggagagccagcaagtgggatataaaacgaggatcatcgaggtatgctatgtcctgaaggcagaaggaaggtgcagacgggggttaggggggatgtccaggtcggctcctgcattatagctccgtggcaatgacacattcattcctctcctctgatatcaaacacacagactggtacaatgaag

SEQ ID NO: 480909 - DNA, 913 bp, Homo sapiens
  misc_feature (852)..(852): n is a, c, g, or t
  misc_feature (854)..(854): n is a, c, g, or t
  misc_feature (857)..(858): n is a, c, g, or t
  misc_feature (860)..(860): n is a, c, g, or t
  misc_feature (864)..(864): n is a, c, g, or t
agttaaaacaattttttaagagaaaggagataaccagagcatagccagcagaaggactcgcatgaggtttggtgggactgcctagggagaaggaggcagctggctgcgtgacagagcccagtgataggggagggcctgtgaccccttaaggagctgagacgctgtcacagagcaatgggagcgctgagtgatggagctggatttgtgcttttagaaaagctttgttggctgctgttgggagaatggattggaagggggtgagactgcagtcagagactcccataaggtagctgttactgtaatcacaacaacagatgcctacactccttcccaagacttccctctctgatcttagaagcattgtcaaatctgggttcccagcctgccatggcaagctgcttgctacttgggagtgaaaagcccttgtggagctttttcttattcggtgactgctcataaagtgccttcacctcgcttgccttattacttcctcagcatccacaggtcacgccacccctcttcctgtcaccgacacttcctcagcatccacaggtcacgccacccctcttcctgtcaccagcacttcctcagcatccacaggtcacaccacccctcttcctgtcaccgacacttcctcagcatccacaggtcacgccacccctcttcctgtcaccagcctttcctcagtatccacaggtgacaccacccctcttcctgtcactagcccttcctcagcatccacaggtcacgccacccctcttcctgtcaccgacgcttcctcagcatccacaggtcacgccacccctcttcctgtcaccagcccttcctcagcatccacaggtgacacacccngncgnncntacngtcccttccgtcgcagtagtctggggagtcctctagagtcgcctagatg

SEQ ID NO: 480910 - DNA, 1181 bp, Homo sapiens
  misc_feature (1120)..(1120): n is a, c, g, or t
  misc_feature (1122)..(1122): n is a, c, g, or t
  misc_feature (1125)..(1126): n is a, c, g, or t
  misc_feature (1128)..(1128): n is a, c, g, or t
  misc_feature (1132)..(1132): n is a, c, g, or t
acccttgggggggcagctgatgaagttctagctgttctaaagattgaaaagctgcgggacaaggaaaggcgaggggagattgacctgctgctgggtcaaactcctttcacccctcttcctgtcaccagcctttcctcagcatccacaggtgacaccacccctcttcctgtcaccgacacttcctcagcatccacaggtcacgccacccctcttcctgtcaccagcctttcctcagtatccacaggtgacaccacccctcttcctgtcaccgacacttcctcagcatccacaggtcacgccacctctcttcttgtcaccgacgcttcctcagtatccacaggtcacgccacccctcttcatgtcaccgatgcttcctcagtatccacaggtgacaccacccctcttcctgtcaccagcccttcctcagcatccacaggtgacaccacccctcttcctgtcaccgacacttcctcagtatccacaggcgacaccacccctcttcttgtcaccgacacttcctcagtatccacaagccacgccacctctcttcctgtcaccgacacttcctcagtatccacaagccacgccacctctcttcctgtcaccgacccttcctcagcatccacaggtgacaccacccctcttcctgtcaccgacacttcctcagtatccacaagccacgccacctctcttcctgtcaccgacacttcctcagcatccacaagtcacgccacctctcttcctgtcactgacacttcctcagcatccacaggtcacgccacccctcttcctgtcaccgacacttcctcagcatccacaggtcacgccacccctcttcctgtcaccagcacttcctcagcatccacaggtcacaccacccctcttcctgtcaccgacacttcctcagcatccacaggtcacgccacccctcttcctgtcaccagcctttcctcagtatccacaggtgacaccacccctcttcctgtcactagcccttcctcagcatccacaggtcacgccacccctcttcctgtcaccgacgcttcctcagcatccacaggtcacgccacccctcttcctgtcaccagcccttcctcagcatccacaggtgacacacccngncgnncntacngtcccttccgtcgcagtagtctggggagtcctctagagtcgcctagatg

SEQ ID NO: 480911 - DNA, 583 bp, Homo sapiens
ccttcttcgttcttcccagttagaatggagttgtctaggttttcacctggccagcattgagcatttaccaccaggctgcagttttgagaacattcattactctaaccagtttgcttcatccttgggacatggaggctcggcatggagtcacccaactagcagggacagaccccgaggctcctcctttctcccacccaaatggtcatgaatttgctttggcaggtggatgaagactcaggaacttcccagaatactgcctcaaccaatgagccaggcccaggttatggggcactggggctaagcctaccaggtgggtacttggtcagaggaaggaagcattctatgctgggcctttggggaactggcagaaccacatgctgccctaaaggtaggtcaggggtggggaggaaggaaagccagtgtcacttgaggtggtagttcatcatcaaccacaaaatgacaagagttggatggttttctagctgtgtgtgtatatgtatgtgtatagcagcaacaaagaacaaaaatagtagcctcatatttctgtaacaattgttctactttccagatagataactgggag

SEQ ID NO: 480912 - DNA, 1097 bp, Homo sapiens
  misc_feature (1036)..(1036): n is a, c, g, or t
  misc_feature (1038)..(1038): n is a, c, g, or t
  misc_feature (1041)..(1042): n is a, c, g, or t
  misc_feature (1044)..(1044): n is a, c, g, or t
  misc_feature (1048)..(1048): n is a, c, g, or t
tccagaccattggcaaagcagcaagcctgaaggtcctatagacaagatcccccagtgtccacaggtgacaccacccctcttcctgtcaccgacacttcctcagcatccacaggtcacgccacccctcttcctgtcaccagcctttcctcagtatccacaggtgacaccacccctcttcctgtcaccgacacttcctcagcatccacaggtcacgccacctctcttcttgtcaccgacgcttcctcagtatccacaggtcacgccacccctcttcatgtcaccgatgcttcctcagtatccacaggtgacaccacccctcttcctgtcaccagcccttcctcagcatccacaggtgacaccacccctcttcctgtcaccgacacttcctcagtatccacaggcgacaccacccctcttcttgtcaccgacacttcctcagtatccacaagccacgccacctctcttcctgtcaccgacacttcctcagtatccacaagccacgccacctctcttcctgtcaccgacccttcctcagcatccacaggtgacaccacccctcttcctgtcaccgacacttcctcagtatccacaagccacgccacctctcttcctgtcaccgacacttcctcagcatccacaagtcacgccacctctcttcctgtcactgacacttcctcagcatccacaggtcacgccacccctcttcctgtcaccgacacttcctcagcatccacaggtcacgccacccctcttcctgtcaccagcacttcctcagcatccacaggtcacaccacccctcttcctgtcaccgacacttcctcagcatccacaggtcacgccacccctcttcctgtcaccagcctttcctcagtatccacaggtgacaccacccctcttcctgtcactagcccttcctcagcatccacaggtcacgccacccctcttcctgtcaccgacgcttcctcagcatccacaggtcacgccacccctcttcctgtcaccagcccttcctcagcatccacaggtgacacacccngncgnncntacngtcccttccgtcgcagtagtctggggagtcctctagagtcgcctagatg

SEQ ID NO: 480913 - DNA, 779 bp, Homo sapiens
gtaagtcagctacgcgtaatccgtggctagaattactcgtgcctacataatgatattagctagacactggtcctggctttccaacaataatgtatagaatacgaatcagaacgcccatcgatgaatggagtagttgttaggatcgtctatctactgttgtacagtaatagtcaatggaatatgtatttggttgtgcactcaaactatatattctggagcctgtgggatatcaccctccatagataggtgatgtaccgtgacgtgtgacctatcggaattgtgggaaggcaacgtgtacttatctggaatgaatgactatgacgaagataaactgctagactgttcgtatatctaatatccgtaattgtgtgctaccttaagtagttgagtactacagcagaccacagggagacctgagtttctgttaattatgaataatgatttctgttgaaaaggcaaattgtagtcccctatcttggttataatggagccgatggaggataacagggagaaagggcctgaaggcaggtcacttgttgcgtattactacagcctagtaggtgcgcttgactgattcatcgtactgtattatacaatcacaagagcctaaggtctcacttgaagattctgatagttcactctacactggccaagaattataaggtcctgagccagctgttgagatgatgaggttaaggaatgagttttatggtaaagatacttctttaaggatccaacttgaatggataccctaagggcctggtggaggcccgatggtg

SEQ ID NO: 480914 - DNA, 177 bp, Homo sapiens
ccgtccctcgaccgctctctgatgttcattttttcctggtactatgtcatcgtagccatggtaatagctggtatgatgtacaagtacattgagtaccaagggcgagtctgtggataccacctggatcactgctaaaactattgaaactagctagttttgttagagccagtctggtga

SEQ ID NO: 480915 - DNA, 703 bp, Homo sapiens
  misc_feature (5)..(5): n is a, c, g, or t
  misc_feature (28)..(28): n is a, c, g, or t
  misc_feature (31)..(31): n is a, c, g, or t
  misc_feature (642)..(642): n is a, c, g, or t
  misc_feature (644)..(644): n is a, c, g, or t
  misc_feature (647)..(648): n is a, c, g, or t
  misc_feature (650)..(650): n is a, c, g, or t
  misc_feature (654)..(654): n is a, c, g, or t
ggtcnactactactactaaattcgcggncgngtcgacccgctcagcatccacaggtcacgccacccctcttcctgtcaccagcccttcctcagcatccacaggtgacaccacccctcttcctgtcaccgacacttcctcagtatccacaggtcacgccacccctcttcctgtcaccgacacttcctcagcatccacaggtcacgccacccctcttcctgtcaccagcccttcctcagcatccacaggtcacgccacccctcttcctgtcaccgacacttcctcagtatccacaggtgacaccacccctcttcctgtcaccgacgcttcctcagtatccacaggtcacgccacccctcttcctgtcaccagcacttcctcagcatccacaggtcacaccacccctcttcctgtcaccgacacttcctcagcatccacaggtcacgccacccctcttcctgtcaccagcctttcctcagtatccacaggtgacaccacccctcttcctgtcactagcccttcctcagcatccacaggtcacgccacccctcttcctgtcaccgacgcttcctcagcatccacaggtcacgccacccctcttcctgtcaccagcccttcctcagcatccacaggtgacacacccngncgnncntacngtcccttccgtcgcagtagtctggggagtcctctagagtcgcctagatg

SEQ ID NO: 480916 - DNA, 293 bp, Homo sapiens
cattcatgatgagggcacagagcttacccaagtcttgagagcccaagttgaatcaccaaccagagggttgcagcgaggaacaggcaacaggcagaggggaaaggcacggatctgcagtgaaggggactgatatcaagggactgctgaggaccagcagtgtctcctgaaagcatgctgcatcctaaggactcctcaggactggatggagtcggaaatctgtgtgttgagccgatcacatctatatagcaactttaaggaggcgcttgatgtcaggcacaatgtagatggtagcg

SEQ ID NO: 480917 - DNA, 492 bp, Homo sapiens
  misc_feature (5)..(5): n is a, c, g, or t
  misc_feature (28)..(28): n is a, c, g, or t
  misc_feature (31)..(31): n is a, c, g, or t
  misc_feature (431)..(431): n is a, c, g, or t
  misc_feature (433)..(433): n is a, c, g, or t
  misc_feature (436)..(437): n is a, c, g, or t
  misc_feature (439)..(439): n is a, c, g, or t
  misc_feature (443)..(443): n is a, c, g, or t
ggtcnactactactactaaattcgcggncgngtcgacccgccctcttcatgtcaccgacacttcctcagcatccacaggtcacgccacccctcttcctgtcaccagcctttcctcagtatccacaggtgacaccacgcctcttcctgtcactagcccttcctcagcatccacaggtcacgccacccctcttcttgtcaccgacgcttcctcagtatccacaggtcacgccacccctcttcctgtcaccgacgcttcctcagcatagtatccacaggtgacaccacccctcttcctgtcactagcccttcctcagcatccacaggtcacgccacccctcttcctgtcaccgacgcttcctcagcatccacaggtcacgccacccctcttcctgtcaccagcccttcctcagcatccacaggtgacacacccngncgnncntacngtcccttccgtcgcagtagtctggggagtcctctagagtcgcctagatg

SEQ ID NO: 480918 - DNA, 281 bp, Homo sapiens
tgcaaacgtggcaaaaccccatctctacaaaatacaaaaattagctgagcatggtggcaggtgcctgtagtcccagctactccggaggctgaggcaggagaattgcttgaacccaggaggtggaggttgcagtgagttgagattgtcccactgcactccagcctgggtgacagagtgagactgtctcaaaaacaaaacacaacacatgaatgttaaacatttagtgaagtgactggtagctagtgagggttcattaagcgcttatatgacgctgggtaccg

SEQ ID NO: 480919 - DNA, 531 bp, Homo sapiens
agttaaaacaattttttaagagaaaggagataaccagagcatagccagcagaaggactcgcatgaggtttggtgggactgcctagggagaaggaggcagctggctgcgtgacagagcccagtgataggggagggcctgtgaccccttaaggagctgagacgctgtcacagagcaatgggagcgctgagtgatggagctggatttgtgcttttagaaaagctttgttggctgctgttgggagaatggattggaagggggtgagactgcagtcagagactcccataaggtagctgttactgtaatcacaacaacagatgcctacactccttcccaagacttccctctctgatctttctgtcatttcacaactgccaaaatggggaatttacccaaacttgtgattgacttccaaccccaggagggtaaagtaacagagattaccttcaataaacccaggacacagaaacaccagggcagatcctcctgccactcctcaatcagacagcagcagtcagtacagctccttccggt

SEQ ID NO: 480920 - DNA, 112 bp, Homo sapiens
taatagtacatagctacatatcggttctgtatatatctctctgatctatctgtaatatactatacttgacaagaaaagatcagtcatatgtagatgataatcgacatgaagt

SEQ ID NO: 480921 - DNA, 145 bp, Homo sapiens
gattcctggcttttgcaaggctgtggtcggtggtcatcagtactcttgaccaggtacagcgagccttttccctgggtgttgcagctgttgttgtaccgccgccgtcgccgccgtcgccgcctgctcttcggggtcatggtgtcct

SEQ ID NO: 480922 - DNA, 196 bp, Homo sapiens
tttttaagtgttaatagggattttttcagcttattttgggtgcagtttccaatttttaaaaatgttgaggtaatctttccccccttcccaaacctaatttttgtaaatgcattagtgttgaaccaatgctttttcatgtttcaattctttggaaaagcatttttttcagatgtattaaacaaacaaaaacccttca

SEQ ID NO: 480923 - DNA, 242 bp, Homo sapiens
aaaaagagagacagatacgaatcgagccggtacccctagtctgagaatgtttcaatagcatggtcacccttctctccataacagcattcagtcattctctaggtcttggtattcatcacctcaagcatttattcttggtgtcacaaagagtcccattatactcttagttattttagaaagtacaattaaattattatggactatagtcacccggtggtgctatggaaacttctaaaactagg

SEQ ID NO: 480924 - DNA, 169 bp, Homo sapiens
tcatgccttagtcaacaggcaactaattgggggagggattccatgggttgaaaacatggctggggcagcgatgaagttaagatgaatgtcccaagatgtcgcaacgaacatgcacgttccaaggacgtgtattctctgtcagtggactaaagatgagacagcacgctac

SEQ ID NO: 480925 - DNA, 895 bp, Homo sapiens
ccagcacataataaacaactaataaatgtcagtgtttattatcacaattattaaaactacatataactttaatttgcttgtgtaaaagcagtgtgcttgcaggcaattcttcatgcatcagagtaggatgttcaccaatcaaggctgaaatagagttcatttcgtgtaaaatctaaaagcatgattcaatgcatacagcaatccatgaagaagcaaaatagagtttttatggaaaatgtgtgtcctgcggcacaattttagtgaaataaaaagcagactctagtgctgcaccctatccccacatgggagggtaaagtagtagaagctccaattcttaactacttccccgggccgcttaataatggagtagtacaccctaccttgataaaagctattctgaaagcaactgcatttattttacctcctgtgctatttgggagaagagctgaacagtagtttgtcttgctggaatgaactaactttatgaattttaatgtgtgatataatattaacaagctaaacaggattaaagaagatttttgtactaagctaaaatagtacttagtagagtgaggtattcaagatttggtgcccattttacctggggaaaatcagtttcatatttggaaaggtgtcaagtcagtttccttagcaataggtgtgttaggaacaaaaatgtgttcttagaatctaataggttctattgatagatgggtttcgggcacaaggtagaaactcctacattttaaggtgtcggagattttcattggatgtaagttcccctttttttaaaaatcggtcttcctgcggaggggcaaggaagtaagagggcgtggcaacaaaagggggcaagtaatggggaagaggtagactagttcaagggctggtttatacg

SEQ ID NO: 480926 - DNA, 118 bp, Homo sapiens
atgcttacgtctgcggatcttacgggccggtgttgaaccactgtggcacgcgcgctgcagtccttgtggaagtggggcttcaagaccatgccattccggctggcgccatggctgccta

SEQ ID NO: 480927 - DNA, 204 bp, Homo sapiens
acagtcagctgattcgagcctctgggttgcccatcttaatcgaccttctgacttcatgctgttgaggctgtattgaggtcagcacagcttgcggaagctcgggctctcggtcaggctccttgtcactacagcactgacagcactgtcccttacactgacaggtgttaggtcgagttgtcccatggccctccagtgtgtttggac

SEQ ID NO: 480928 - DNA, 111 bp, Homo sapiens
catataactcattagactggaacttgaactgattcacatctcatttttacggaaaaatgagatgtgaatcagattcaagttccagatctaatgagttatatgccactccag

SEQ ID NO: 480929 - DNA, 132 bp, Homo sapiens
  misc_feature (121)..(121): n is a, c, g, or t
cttgtagtgagtaggtgattagtatgactcgcttggtcaggattctgtagctctgagtagtggatagggagctgcacagcgtggtattttgatttagagagaagtgttacaagttgcaggntgattgaatct

SEQ ID NO: 480930 - DNA, 654 bp, Homo sapiens
  misc_feature (45)..(45): n is a, c, g, or t
  misc_feature (222)..(222): n is a, c, g, or t
  misc_feature (238)..(239): n is a, c, g, or t
  misc_feature (245)..(245): n is a, c, g, or t
  misc_feature (248)..(248): n is a, c, g, or t
  misc_feature (251)..(251): n is a, c, g, or t
  misc_feature (253)..(253): n is a, c, g, or t
  misc_feature (255)..(255): n is a, c, g, or t
  misc_feature (261)..(261): n is a, c, g, or t
  misc_feature (266)..(267): n is a, c, g, or t
  misc_feature (269)..(269): n is a, c, g, or t
  misc_feature (271)..(271): n is a, c, g, or t
  misc_feature (276)..(276): n is a, c, g, or t
  misc_feature (278)..(278): n is a, c, g, or t
  misc_feature (294)..(297): n is a, c, g, or t
  misc_feature (299)..(301): n is a, c, g, or t
  misc_feature (304)..(304): n is a, c, g, or t
  misc_feature (312)..(313): n is a, c, g, or t
  misc_feature (320)..(320): n is a, c, g, or t
  misc_feature (329)..(330): n is a, c, g, or t
  misc_feature (337)..(337): n is a, c, g, or t
  misc_feature (347)..(348): n is a, c, g, or t
  misc_feature (356)..(356): n is a, c, g, or t
  misc_feature (361)..(361): n is a, c, g, or t
  misc_feature (367)..(367): n is a, c, g, or t
  misc_feature (371)..(371): n is a, c, g, or t
gctatgtcaagaataagacacaggggaactatatcttcttcaaangcacatggacacagccctttgacctggcaagcaccagggaggagaacttctatgtggacgagacagctgtggtgaaggtgcccatgatgttgcagtcgagcaccatcagttaccttcatgacgcggagctcccctgccagctgggcagatgaactacgtgggcaatgggactgtctncttcatccgtcggacnnggggangangancncngtcatnggtgnncngnggcgngncacgagtaacaggggnnnngnnngcntgaccagnngccaggnggacctgtnnattcaangggcaccatnngtggagtntatgncctcgnagangtgctggaggaaatgggcattggagacttggtcagcgaccaggcaaatttctcacgcatgacccaagacgcccagctgaagtcatcaggggtggtccatgctgggctgcaactcaatgaggagggtgtggacacaggtggctgcactggggtcaccctaaccggacgttcaacctatcatcttgcgtttgaaccaggccttgatgatcatgatcttcgaccacttgcgcgggagcaggctgtgcgtggcggttatgaccccagttgaggagagccgcggccgg

SEQ ID NO: 480931 - DNA, 588 bp, Homo sapiens
  misc_feature (85)..(85): n is a, c, g, or t
actaatttcattgaacacttttcattgcatgttgacaacttttgaatagctgcatgaatataatttatttaaaattgccaaaccnctggtcttgttcaagtttaaactaagataaagcttaccaatcagtaattaaggggaaggatccacttgatttggccagttagaatacttcaaatataagagacatttccacaagatattacttatatcagaattgatacctgaaatttaactattaataaattctctaatttagctcttttgattctgaaatgcagatataaaaaggcaggaagcatctgaagagtttctcattctggagatcaacctgtttctccaacctcatttgtttggaaggaaagtacacagaagcagcaaacctcagcctctgaaggggcccaactcctgactctacatggctcaagggttatttcttagcaaagaatatgtataggttacaaccaacatctatcaaaaataaaaacaaagcaaattcctagtaattggtaaatgcgtggtattttctattgactccttcctctgggccatgattattttgttaataaattgtacttctgaaggaaa

SEQ ID NO: 480932 - DNA, 111 bp, Homo sapiens
  misc_feature (86)..(86): n is a, c, g, or t
  misc_feature (94)..(94): n is a, c, g, or t
tacgccggtaccaaatactgggtatatactgcagaaaaggaatgcagctgttttccacagtgttgtccccaacttctgttgcccanagaatccntccgcccacagatcttc

SEQ ID NO: 480933 - DNA, 636 bp, Homo sapiens
  misc_feature (45)..(45): n is a, c, g, or t
  misc_feature (222)..(222): n is a, c, g, or t
  misc_feature (238)..(239): n is a, c, g, or t
  misc_feature (245)..(245): n is a, c, g, or t
  misc_feature (248)..(248): n is a, c, g, or t
  misc_feature (251)..(251): n is a, c, g, or t
  misc_feature (253)..(253): n is a, c, g, or t
  misc_feature (255)..(255): n is a, c, g, or t
  misc_feature (261)..(261): n is a, c, g, or t
  misc_feature (266)..(267): n is a, c, g, or t
  misc_feature (269)..(269): n is a, c, g, or t
  misc_feature (271)..(271): n is a, c, g, or t
  misc_feature (276)..(276): n is a, c, g, or t
  misc_feature (278)..(278): n is a, c, g, or t
  misc_feature (294)..(297): n is a, c, g, or t
  misc_feature (299)..(301): n is a, c, g, or t
  misc_feature (304)..(304): n is a, c, g, or t
  misc_feature (312)..(313): n is a, c, g, or t
  misc_feature (320)..(320): n is a, c, g, or t
  misc_feature (329)..(330): n is a, c, g, or t
  misc_feature (337)..(337): n is a, c, g, or t
  misc_feature (347)..(348): n is a, c, g, or t
  misc_feature (356)..(356): n is a, c, g, or t
  misc_feature (361)..(361): n is a, c, g, or t
  misc_feature (367)..(367): n is a, c, g, or t
  misc_feature (371)..(371): n is a, c, g, or t
gctatgtcaagaataagacacaggggaactatatcttcttcaaangcacatggacacagccctttgacctggcaagcaccagggaggagaacttctatgtggacgagacagctgtggtgaaggtgcccatgatgttgcagtcgagcaccatcagttaccttcatgacgcggagctcccctgccagctgggcagatgaactacgtgggcaatgggactgtctncttcatccgtcggacnnggggangangancncngtcatnggtgnncngnggcgngncacgagtaacaggggnnnngnnngcntgaccagnngccaggnggacctgtnnattcaangggcaccatnngtggagtntatgncctcgnagangtgctgagggggtgcatgggggcgtggttaaccagccggcggagttctgacgcttgaccagggcgccagcttgagtagtcaagggggtgcataagggtggctggaacgggggggggggtgtgagcaggttggttcggtggggcacctaagcgtgggggggccgtagatgtgggttgcgagcggggaggggggtggtttggccgttacggggggggggtttgggtcgagggttggggagcccgggggagaccggggcgcggggggg

SEQ ID NO: 480934 - DNA, 150 bp, Homo sapiens
cctgagtggatggagagggctgggctagggccatgtggagcaggcaggctcgggagtgcaggaggaccctgatggggcacagcagcacaggagcctggggacctgtgagacagaggaggtcaggacgaaggtggggaccccagtgccacg

SEQ ID NO: 480935 - DNA, 108 bp, Homo sapiens
gagacctactaacagaacgggacttgccccggctccggctcctgctcctgcggttcttgaccggctgtcaggatttggcgattacgggcactgggatcggctactaga

SEQ ID NO: 480936 - DNA, 176 bp, Homo sapiens
ccacaggaagaaatagaaactggctcagagagggggaagaccatcaacagaacaaagaaataaacttacacgccctcctatccccatccagccagggatacgtaccttaccccaacatccccagggaggcagaagtgacgtgcagcaccgagatgtctagctacttcccacttgct

SEQ ID NO: 480937 - DNA, 435 bp, Homo sapiens
ttttacgtacttcaggattcccgctcggctgccgctgcgatgctctcggtactgggccctcttttcttccttggatcctcggcgcctagggcgatcatgcccccgtgtataaacaggccaggtgccccatcttgtggtccagaatcccctcctcgccactcgtgcaatgtacgtcagccccccgaggagagacattcagcaagtaggtctctatcgcctccaaggcttcagtatgtacagtatatttagcctccatatctgtctggcccgacatcaaccaggatttgatcaaatattcataaaaattgtccccgagtcctccaattgagacatggtgttgaacccagttcccactcactgggctgaggaagtaggggtagaggccaaagggcttctcgatcttcctgaggaccttgcggatgttcctgaccctta

SEQ ID NO: 480938 - DNA, 381 bp, Homo sapiens
tctgctagtatctctaagattcccactatggtcgcgtctgcgtgatgaatgtctttttgcgatgcctactggagactttgattcgaatgcccagttgggccgaccagggtgacggacgaggcgggacggacgactaatgtgtcaccagcgagctcctctaggtggatccctctggccacagcgttacaccagccccagagcctggggctactgccgggacgctccactgccgtcctcccatggagtgtcatcatcggtaaacataaacgacagtgactgcactacaagtatagtatgaggcatggcatagaagttcaagtattgttccgcatccttcagtgattgagtacccgtcacaggcttcatcaggctgctcgcaat

SEQ ID NO: 480939 - DNA, 591 bp, Homo sapiens
  misc_feature (162)..(162): n is a, c, g, or t
tgggtttgagcacaggggtacttaattggatgggtacatgacaaggggcggctccctaggccccccccctcttcagggggtctactgggcaactgtgaggaggggaaatccagggtggggggggactgagtgtggcagggactccccagcagtgagggtctnctctcttccttctggtggctcatgtgctgggggcggggggctccagtgggtctatactcctggtgatggccatgtgggccattgaggtccaccacccctgtgtgctgtagccaaattcgtggtcataccaggaaatgagcttgacaaagtgggtctgtggagggcaatggccagccccagcgtcaaaggtgggaggagggggtagtacgctgtagaagtcaagaggaaaccaccgggggctcaggggtagcccaggatgcccttgagggggccctccgagccggtttcaccaccttctggatgtcatcatattgggcaggttttctaaacggaggtcaggtccaccattgacacgtgggcatgtggggacactggaatggccaggccagggagctccccggtcagctcagggatgactctggcccacag

SEQ ID NO: 480940 - DNA, 957 bp, Homo sapiens
ctgggaaccaaggggagggccaatcaccacagtccgcgaaaaaggggccagggtccgggccgcggcgagaaacccgataggaagttctagtcagcacgaggtcccagaaaggaatagggagatgtctgagagggaaaatatcaatggaggggaatgtgaccagacccggagggatgacccagtaacagaaaagacaaacacctcaagggaacaattacagaagagtctggcagaaccgttctatgaaaaagtgcgtcggtcctgccttttgaatgccaggtcattggatgggtctcaagtgatatgccgaaaatgtttcggttaaagttcgctgaatctcagagcttctcttggacactgtcagtctctcaagctagccaaacggaactcggcgggactgactggtcctaggccggtagcacatggctaaggacggagttcaccagtggaggtccgggacagagactggatagaggtcgcaaaaaagcaagccagctgctgttttgctgatagacatctcggaggatgatccgattccttcgtgtatgccacacgaggcactccgggaatcactgtcaggttgttatgcacagaagagacctagattgctgggaccagcaaggccgtgtgatgcctgatggccaagacccagatgcctgttgttttaagttgggcagcagggacatcagctggcgattgtaaataggtttccaggatctaaactaacctttacagccagtattctcagcgtatcgagcagcatgtggtagcaaacaaccatggagatctcgtggcacatagccatatgatgaagactgtggtagataagatgttcctgtgaagtaccaaccaaaagggtgtggcctccagccaaaagaccatagagattcgttacctctatgctaagtttgtgttcgggtaccctcctaggtaggcatcgataactctgagctgtgt

SEQ ID NO: 480941 - DNA, 614 bp, Homo sapiens
  misc_feature (210)..(210): n is a, c, g, or t
  misc_feature (341)..(341): n is a, c, g, or t
  misc_feature (369)..(369): n is a, c, g, or t
  misc_feature (504)..(504): n is a, c, g, or t
  misc_feature (570)..(570): n is a, c, g, or t
cagattcctctccccactgggtcccctggggcctgccacctgtccccacgctgcccttgatttggggttggggggacacagccttctccctacagaggttaggctcatctacattagtgttcataatcgaatacataagaccctacacacaggtacacacagagtttccccacccactggcataggcgctggcccagctcacactccctncttactggaagcgaaggccttcccaatgctcccaacttggaggaagttgtgcaaaatatctgtagcccaaagtagaacgagaaagtcctcaacacacaacagaaaggaaaaagccaagttctgcaagcgangttgtagaactcacattttctgagtggnaagttttcagaaggttagaggacaccgggagggacggcccaggaggccccagagtccgcagagcctcagtccccagccttcacgtcgccgccgggtactgagcacagggatgaaagaggagaggagcccgcccgnccatggccgcccccatccctctcccctagtcctgcgcggcgcggacgggtctctgccgctcttacntgccggacccgcgcgctcttccatgctaggctccccgcggtcgc

SEQ ID NO: 480942 - DNA, 164 bp, Homo sapiens
cccgagcagcacccccagaaccggcaaggcatatcaacccagcgtgtttgtccctgtgagctccggtccggcgggtctcaggggaacaggtgaggcccccccagctcctgagtccagccctaggtctgggcggctccttaggcgggggcctgtgccttgggggg

SEQ ID NO: 480943 - DNA, 842 bp, Homo sapiens
agcggattattgctgtaggtttatgtccacccccttccctcctgtcgctctctctccttctcgtctctctctctctctctctttttgtccgccgctagctggggctgctcgttgagagagacgacggaagagaagagacgaccagagagatcgcatacaatccggatacggttcgttgacaagtgccctaactagctaagaccagcgacagcggatgcacccgttctcagatcttgcaaaggaccaaaaagacaaaacaggaagaaaagagaaccccaaggtccccttccgcggtcagctgtccttgaggccgttacacagcttgcgcctgcttgcaaatataacttgttgttcccgaggagcagcaggatgttcgtgtatgcatgtgctgcaatcaacagaatatgtcacagcatgacgataccggagcagggactattgacgggttcataagcgcattgcggtgacagaaccacagtgtgcaattcgagagatggaataaaataaattgagaggaaaatacatcgggagagacaagtcgagtaaattagggtgttaggaatcagcgaagatgcacgagaaccaatgccgcacaggagattgtgtgaaagtaaaaagcatatacacagttgctgtgaaatgcagaagtcatagagacaggaatccgcccactagaattagataggacgaagggacgagtacatcactcttgtcgttgggaaacgtacgaagcccattcagaagctcttgacacacctcttccattagaatacgacagttgtgtgaagcagctttcagtaggctccctttgactttgccataggatttcgtatttccacata

SEQ ID NO: 480944 - DNA, 150 bp, Homo sapiens
atctgattagatctagaggatcccgcgtgggtccttgcaagacttggccatggacgggactattaaggaggctctgtcggtggtgagctgacgaccagtcgctctttgactcagcgtacggagcggcagcccatctccccgaaggcctga

SEQ ID NO: 480945 - DNA, 664 bp, Homo sapiens
agcatctcagtctccagaagcttgctatcttcccaactgaaactctgtgcctgttaagcacgaactctccatctccctatccgcccagccgcgggcacccctgcatttgaatttttgtctctggtgagtctagactccttttagagcctcgaatgagggaaccatacagtatttgtccttttgtgactggcctatttcacttagcagcaaggtcctcagggttcatccatgtcgtagcttgtgtcagaattttattccttttgaaggctgaatagcattctattgtatgaatggaccacctttgcctatccgctcgtctgcccaatgacacttgggttattgagaactatgccactatgaacatgggtgtgcaaacagagtgactcttttagaacacaggtcagtccgtgacagtcctctgttcaacccgggccttcctgttctctcagtggagaagcccaaagcctttatgatggtccccaggacctgtacaccccaccccatcacgtcctgcagccacactgagctcctgctcttgctcagacacatgggcacactgccgccttatggcacaggcacaggctgctctcctgtcccctctgcctggacacccttccccaggcgtcccatgctgtcctcaccaccctcagtgtttgcccagtga

SEQ ID NO: 480946 - DNA, 284 bp, Homo sapiens
  misc_feature (58)..(58): n is a, c, g, or t
cactacagcagctatcatgcagatgtatgagtgagtgcagatgacaacttcagtgtanccaacgaaagtcagaaacagatcccccattatggttattggtttttactaattggcacgtatttaatgaggaaaggtaattctttcaataaacagtgttacaatgactggatacttgtatgggggaaaaaaagaacctgatccataattcacaacatacatatccattccacggtagatccccaattataaaaatataaagtttatataatcagagccggaatatc

SEQ ID NO: 480947 - DNA, 387 bp, Homo sapiens
ctacggcaggttgtactgttccatgggtgaaggctctaacacggccctgtaaaaactgggtaaggagatgtaagagacatgggccaagtgctaaatggaggaagagggtaatggcaggcctaggaagggcagtagccaggctgcccaggagttacgaaatcacctgggccgggaacctgaaaggcgctgcctgatttcagcagctttttttttttttttttttgggagatgggagtctggctcttggtcgccagggcgggatgtgcgggggaatcatctgtgctcagggaaagctcggcctccggggtccacccaaaaggcaattctcgggcctcagcctctggagtagctgggagattacacccggcgggggggggtgaccggagc

SEQ ID NO: 480948 - DNA, 393 bp, Homo sapiens
cacgagggaaatctttgagttatgtgcacacccgcaggcatattaccagatataaaaacattttggcaagttttatatgttttaactttccatcgctgttctcgaatccctcaggaaggcgagctcaggcagcatccgccgaagcctggggagatttttccagccgaattcatccgaccttcgaagtaatacataaaaagaataaaaaaataaatctctattctttgaaattatataacttgcggttatcctgatctccgcccgagcgtgcgtcgagccccttttgctgcgtctccgaacaaatcgagcatgagccgactggatgatctgacccttcccctgagccgggagaaagccgagctcctccgtcggcttgtggaagggctttccccg

SEQ ID NO: 480949 - DNA, 91 bp, Homo sapiens
tgtgtttatgtacgtgtgtgtgtgtgtgtgtgtgtgtgtgtgtgtgtttatattgtgaatagagggagaggattatatgtgtatagagaag

SEQ ID NO: 480950 - DNA, 577 bp, Homo sapiens
tacgccaggcctggcgttacatctgatgagatgaaagggctggatctggttcttgatctgcataagccggcccagggcccgatccacgatggtggggaagtcgagcagcctcagggtgtggcccgtgggctgcctgtgttaaataccaaccgaccgagtaagttcatgcccattcaccatgcctcatcgtacctcgtgaaatacattcatggcctcgatcgcactgccaggatagatcgccctcatcggcccggccgccgattcgctggtgcgcttctctctaagagtccgagctggcagtgccatagcctaggctgtgcgtgactggcccgtcgttcttacaatcatcactgagcgtagggaaacatgggtggaaggaaaccaaacaataaaaaaaaaaacacccaacccttccccacacaaacaaaaaccaaacacaaacacaaaaaagcgtgaccgactcccccaacgcccccaccagagcaatttcacagggggtagaactagcgacggggagagcaaaagcgaccaggaaaaagaaaaagacgggaagagcgcaccaggccgagcgtaggaa

SEQ ID NO: 480951 - DNA, 359 bp, Homo sapiens
cccaaagtagtcaatgcaaactataacatatgattaccacatatcatgctgaggcataaataaaactatgcataactgttgggctcaaaactgatgttcaagcaccttaattccattgctagataatttgttggttaacttttgcaaagtggagagaatagtaacatcacttcaaaaatgaaaagatgggttgttattttgttgtgtttttaaaaaaggaaaggaataatgcatgggttatttttatatattaagtaaaaaataatataacattttattactaaagaaactaacattttcttactaaaatacatttcatgcccttaagctattggtaatatgcaaagttattgagaatg

SEQ ID NO: 480952 - DNA, 422 bp, Homo sapiens
gaattcgctctctgggaggctgaggtgggtggatcacggtcaggagttcgagaccaggctggccaacatggtgaaaccctgtctctgcaaaaaatacaaaaactagccgggcgtggtggtgcacgcctgtaatcctagctactcaggaggctgaggcaggagaattgctagaacctgggagacggaggttgcagagagctgagatggcaccatcgcactccagcctgggcaacaaagtgagactctgtctcaaaacaaacaaacatacaaacataaaagcactctccgcattcctctctcatgatgctctgtgttgggttcgcgtatttgccttcagattactcaaggaagtactttcaaaacagaaaaagggaaagacagaacctggacaattgcttttacgaccaggctgggccatagca

SEQ ID NO: 480953 - DNA, 278 bp, Homo sapiens
tataataccacatctccctgtctgctattctgtaatataataccacatctccctgtctgttattctgtaatataataccacatctccctgtctgttattctgttgctggggataatgcacattcaccatgttattctgttgctggggataatgcacattcaccatgttattctgttgctggggataatgcacattcaccatgttattctgttgctggggataacgcacattcaccatgttattctgttgctggggataatgcacattcacgtcgacgc

SEQ ID NO: 480954 - DNA, 246 bp, Homo sapiens
  misc_feature (159)..(159): n is a, c, g, or t
  misc_feature (177)..(177): n is a, c, g, or t
  misc_feature (217)..(217): n is a, c, g, or t
ccaatgatggcaaacatgaggatggcaaagaagagaagcagcccaatctgcaggagtggaaccatggccttcatgatggacttgagcaccacctgcaaacctggggccagaacagggcaggtcaggaagcaacgtgggcagggtagggcaaggaatttngtgggggcagggacagancagcaggaacctagcagggacagcaaggtgctaagcagtnagtgctttcaagggcaaaggttagagctg

SEQ ID NO: 480955 - DNA, 111 bp, Homo sapiens
aatataggggggaggatgggactcttcttccaaatggtgcttgtccgggaaccggggtcccggggagctggggcctggtccacatggaccccctccacctccccacatacg

SEQ ID NO: 480956 - DNA, 323 bp, Homo sapiens
atccagttggaccagcgggctacgaatcgcatctacgcaatctgagctgatgcacgtgcagactcagaactgtctcgtcgaggatcttccacttgaaccttctgtcaccacagcagacaggcgtcacttgatagtgtggcacgtgctgtatggcaactgagtgagcccatgcgaaacaggtggagctggggaagccgtctcttctgcatggtttattttccctctatccttttatttactgctcttttgtgagataacgtttcaccacataatgtgtgagccttttttcctggtaactttatattacaaaatccgttctacca

SEQ ID NO: 480957 - DNA, 1336 bp, Homo sapiens
  misc_feature (323)..(323): n is a, c, g, or t
  misc_feature (924)..(924): n is a, c, g, or t
aaagcggtttgtgtgtggttgtgttgtctttagttgtagtgtgtgtgagtggtgtgatgaaaagaaaagaagtaacagagcttacgattaatcaaaaagcgaccatgatatgaccacggcggggtctgtaagctcatcatctgtgtctgcgccgtgctcaaacgatctttgggggggctcttttgtttaggggggcaatactcgccgcggggggggccccgtctcttcggcgcctcgctgctgcgggaagttctttgagtgtggtcgaagatgccctccaatcttgtttggggagatctcttctcccggggaacacatggggnctgccattgtccacacagaaatggtgtgtctctcacaagggatgttgtttgtcgcgggccaacacacttgtggtcggggggcccacgccgaattgttggccccccccgctggtggatcgcggctggggcttacaccgtgtcttccagggtgatttgttccctgggccccatttctcggtctcatatttgctccctcggcgttattggccccctttggaattgggaatttggcccaccccccggggctcaccacttgtggcagtggcacaggtgttggccttgacagctgtataaggatagaacggtttgtgttccccctttttcggtgtaaaaaagcctggaaagattggcccctccaattttctctgagaagttctcgcgtgaatggctcgcccatctggttagaataattgggtgccctcggcacaggcgccccataggagtgtttgaagaagctcttctcacgagctatgaccacccctttgggtcgctcttgctcgtttctgaatatgaggagcacgacacagtttcggtgggtgtcaatccaaagcacagtggacccaagaacaggcttgctggagagctggcacaaggtctaccnccaagtttgccccaggaaagctcacgagaaggctataaatggatatttattcccttaatacctgccacacccacacttcttgaatcacgtggtggaagacgcgttctcacgggactgtgcttggtatcaaaattggccacatgtataggttctatgtgagtaaaaagaactggttataatgagtaaccacaatgcactttgtataaaccctctcacgaaaggagaaaggaggaaatgttttgtggagccacccttggttttcttttttgcgtgtggccgagtttaagattattagatttttgaaatccagatactttttaatgggaaccaccttgaccccaaaaattgtccccagaattgttgagaccccctttaaaaaggtttaatgaggtaaaacaaaaaaaaaaataaa

SEQ ID NO: 480958 - DNA, 416 bp, Homo sapiens
gacgcccggacaagttgtgtatcctgccctccgaacatcagtccggttgggtgatcaacggcagtattcgcctggctcacctgtatttcagcccggaacagtttgcgctcggttgtgtgacgctgttggaccgtgagccccgtgagctgcagttgcaggaacatacttttctggatgacccgcagcaggccctgcgcatttcgccaactgatcagcctggactgggatgaaccgggagagcgcctgctcagcagcagcctggcccatgagttgctcggccatacgttgctcaatcaggtggggatgcgccagggcttgcgattgaaaggcggtttggcggccatcagcacggctgttggtggagtgcatcgacagccgcttggaccagccgttgagcctgggtgagttggccgggt

SEQ ID NO: 480959 - DNA, 323 bp, Homo sapiens
agaagaagagtaggagagggtgatagttgttggcttaacaaagaatagaatagcgagagcgcggccaggggaggtagttaggtcaagtggatatgttctgtaccaaggacacagcaaaggtcctaaggcactgattcacattacccgaagtcaccaaataataaagttgtttccgtggctgacatttcttaaccttgccctcaaacttggcaggagggaggcaagctcgtttaaaaaaaggaaaggggaggaaatccaggcaattggcctaagggttggcttcgagagaaaataggttgacccttcctccgaaaaaaggaagg

SEQ ID NO: 480960 - DNA, 1070 bp, Homo sapiens
  misc_feature (4)..(4): n is a, c, g, or t
  misc_feature (6)..(6): n is a, c, g, or t
  misc_feature (12)..(12): n is a, c, g, or t
  misc_feature (74)..(74): n is a, c, g, or t
  misc_feature (104)..(104): n is a, c, g, or t
agcngngggcgngggctgacactcattcagccggggaaggtgaggcgagtagaggctggtgcggaacttgccgnccccagcagcgccggcgggctaagcccagnggccgggcagacaaaagaggccgcccgcgtaggacaggcacggccggcggcgtgcgacagtcgtcagcagaatggcacgggactgagtggggctagcgcgcatgcatgagcttcatgatggctggtggacacgtggtcatgccatgacagggtggcttccttgggctgccagaaagacccaggtagcccggggcgcccgcaggacgaggcatgaggcggcgccaggcaggatgctagcaagaaggacggcatctccttcgattaccagccgctaccccggagcttgcgcgaggcggctcgtgtccgtgtgggcttgcggttgcaccggaccagtcacgcaggatttacacgcgtggggcagcagtcttcgatggcgccgggatgctcctggtcgtcgaggctgtcacggaacaagctcctggcggttcccattgaggctctggtgtgtcgtcgctgacagtttgagacattaccatttgggcgagatattggccacttgggggaaattggatgggccttggtttggcacggaagtacagctgcttcaatgctctctttgtgccccaagctaccttatgcaaaacggaataccacgaatggtgggaactggaaggacaattttgtcaaacgcgtggattctcactaggttacctccgcgaagtttcgaccgtttcaattggccctttccccttggaaagccccaagaacttgagctgtttgaacgaaaggggacaacggcggttcttacaagccccttggggtttggaaatcgttcgactgtgaacccttgggatttggcgtgcgggcttccgacaaggccaaagttgacccccaaggggaagactatagattttcttggaaacccccgtgagaactcttttttcccatagtactctcttggcgttttaacgggaactaagggtggtaaccgtttgaacctttggaaagagcaagaacaccggggtg

SEQ ID NO: 480961 - DNA, 708 bp, Homo sapiens
  misc_feature (4)..(4): n is a, c, g, or t
  misc_feature (6)..(6): n is a, c, g, or t
  misc_feature (12)..(12): n is a, c, g, or t
  misc_feature (74)..(74): n is a, c, g, or t
  misc_feature (104)..(104): n is a, c, g, or t
agcngngggcgngggctgacactcattcagccggggaaggtgaggcgagtagaggctggtgcggaacttgccgnccccagcagcgccggcgggctaagcccagnggccgggcagacaaaagaggccgcccgcgtaggacaggcacggccggcggtggcggagcgcagcgtatggccggtgcgagggggctgcgctctgttggctctgtgcggggcactggttgcctgcgggtggctcctgggcgccgacgcccaggatgccctgtggtcgcccgcgtgcgggcattgatggcggtctccggcgtgtgatgcggcaagtaggacgtgcattcttcctttcgatgtacctacccgtatactcctcgtagctgcgcgtaggcggctcgtgtccggtgtggtcctgcttgtgcaccgtcatctgcaggatttacacggtgtggtgcgcatccttctgaagggccgggcagctccttggtcatccgtacgtctgtccgtagaacccttgtgtgtccagtgtatcctggtgagcctgaattttaaagtacattgggaatatgcatgggacactgaggctgttggacgagaacgtggtcatctttcttgggccaggtacctatgcaacggtataccagcaaggggaactgagacaacttgtcaatcctgatcctacagtacccgcaattcgcatgcatgcctttccctgaaacgc

SEQ ID NO: 480962 - DNA, 340 bp, Homo sapiens
  misc_feature (169)..(169): n is a, c, g, or t
  misc_feature (198)..(198): n is a, c, g, or t
  misc_feature (245)..(245): n is a, c, g, or t
cagagtgctcgatctcagctgcaacagactgaacagggcggccgaacctgacgagctcccgaggtggataacctgacactggacgggaatccttcctggtcctggaactgccctcccccacgaggctcaatgaactccggcgtggtccagctgtgcacgttcgacctgnggtgggggtgtcgggaacctggtgctgcncaaggggccgggggtttcttaagatcaagacagataatgaatggacncaaactgccttgggttcaggggagtcccgtcagacgttgaggacttttcgaccaattcaacccattgcccacctttattaaaatcttaacaacga

SEQ ID NO: 480963 - DNA, 349 bp, Homo sapiens
  misc_feature (2)..(2): n is a, c, g, or t
angagcatcccaggtgaaggacattctacaaaattccggaccagtcctcctcataactctcaagtccgtgaaaaacaaagaaaggctgagaagctgtcacagacaagaggagtctcaaggagtcctgggcaataaatgtaatacggggtcctggatgggatcccagaacagaaaaaggatgtgaggtataaaaaccagaaattcgaatcaagcatgaactttagctaatagtaacatataactatcagttcactaattgtaacaaatgcaccctactcatgtaagatgttataacaggggagactggggcagggcaggtgggaactctatgctatctttgcagtttttc

SEQ ID NO: 480964 - DNA, 109 bp, Homo sapiens
attaggatgccgcttacccctccgacactcaagctatacatgttccaaagcagattcatgggttgagcccacgcctttcacttcagacttgcattgccgtctgcgctcc

SEQ ID NO: 480965 - DNA, 344 bp, Homo sapiens
  misc_feature (87)..(87): n is a, c, g, or t
cgttaaacacgcaatctttattaaatgcatgatccaggatggatttagatcttgtgaaagcagccacatccatggactgcacatagntcctcaaaagcagtgatctgctcctccagcatatctggtccaactttatcattccttcaaataaaacactgtatttgaaggtttcttaattccggatcccactggaactagtttagatgaaggcccagaactaagccgtctggttgaatggttctgacgcactcctctaatttcgccatatctgtctcatcatcccaaggtttcacatctagtaagatggaagacttggcaacaagtgcaggttttttggctttctt

SEQ ID NO: 480966 - DNA, 1237 bp, Homo sapiens
tccaactttttttaaaccaaatccagtaattttatacaaggccttacaaaggggtcccctaaaaaactgaaccttcatttcgggcagggaaaaaaccagggctctcgaggatcatgactgaagttgggccagtgtcccatcatataagttgtcccaacatcaccagggacacaaagctcagcagtgagggcttcatacccaaatcctccctagcgacgaggtacttcttcaacttcttctccaccacctcttggagaggcctcagggaaaattgagagattggggcgtgtggtgggcccctttcttataactccccagtttccagaagcctccgcaacgtgctatgccgtctcgcgggccgcaagcagggttacaccttcgaaagctgtgccccctcgcgggagcattcgaagcgggtgtccacccattatagcgtggaagccctcgtgggggccctccgagggcgcacaggcgcctggtggctatcaggggccgcgcggagcgtatgtgacgcccccaataggaacgccgttcagacaatagtgtgccaagagcctcgaataacaaagggggtcgccttccctcacatttccctcccccgcccagatttccgcccaagattatcactactcagcaatctcacacggagaatacgggggggaaccacccggggggccatcaagcactatatacagccttctcctctcccccgcggggggaacgcccatgggcggcacaaaaaaagccccggcgccagaaaaattggcaacggcggaaactgtggggtgggcaacagaaggaattacggaccagcactgttgctcacgaaaaccaaagctttcacaggcccacacctcgagtgcttgcccgaaaacaaaggccccccaaagattagaggcccccccaaagataaagaaacaccagaagtgtgttaccccgagcatccccaggggaacagaaacagccaataacaggctcgcggccaggaggcttttcgggaatccccgtcatgggacaccagccggtgtggaaagggaggccccgaattatgcgcaacccctcaaagtgaacacgcgcggctaacccaaggggccccaggcaggtcgtctcgccaaggggagcacattccgagaaaaaccccgaagggctaatgattatcctatacccacgcgcggggtctccaaaagcccaagtagaagaagtcgggcccctgaaacccgtggtacccacattcgcg

SEQ ID NO: 480967 - DNA, 117 bp, Homo sapiens
  misc_feature (94)..(94): n is a, c, g, or t
agtgcactgtaccttcgatagcagttcctgagccaaatgtggtgttgatgatgcaaattgtctctgatgcaatgcggcccattgtgagctcgantaagaaacttgctcagatttgca

SEQ ID NO: 480968 - DNA, 103 bp, Homo sapiens
gacgtagagtgcagtggtggtgtgatcacagctcattagcgtctactccaggctcatgctatcttccgcttagatccgagtagttggactacaggcatgtgct

SEQ ID NO: 480969 - DNA, 174 bp, Homo sapiens
  misc_feature (92)..(92): n is a, c, g, or t
tcgtcggcctgctccggtggtctcctcccattctagaactccactgatgtatactgggctgttttactaagtttcagatctcttactttttnttttattttcttcttctttttcgctcctgtaggaacaccagggctattcctctgctgatattctctcaactttttcttcgct

SEQ ID NO: 480970 - DNA, 1551 bp, Homo sapiens
tgggtgttctcgtggcgtcggtgtcggttctgttgtggtggggcccgtccgtctttgtgggcttgtgtgtctagtctcttggcgggagagatagagacgaagaagaagaacagaaagaaagagactatcacgcgaaggaagaagagagagagcgagaaagagaaagaaacaagaagagtatcaggtacagcatgctgcctgtggtcccggctccgtctggtatcgatgctgatgtcgactgccttgactttcgctgttctcgttggtcggtttcctgacttgctctcgattggttcagtcgttcgtttagttttgtcgatcttctgttggtgtgtaagttattctcgtctgcgttgtgtgtgctgtcgtttggtgtggtgtggtgttggtggtgtgtgtgtggtgtgtgcgttgtggcttggattgctttcgtccgcgcttgtgtttgttgctgtgatgcgtaagtatgtgtgttgtgttttggcttgggttgtgtggtggtgttggctttgtttgtttttgtggttgcgccttcgtgtgttgtgggtctgctgtgttagtttggttgctgcgttcgcgtctggttgttttgtgtctatgtcgcattgctctgtcgtgtcatggtgttgttgtgggtcagtttcggtctctttgctgtgtcgctttttgttcgctttggtcctccggtttgtgttctctgtgttgcgcattagtgttgttaggggactttttctgtaagctgagtgtagtttttctggcggttgaggttgtcgctcgccgatgggcgccgtttgttcgctgcagggtggtctcgtgtttggagaggtgtatcgtcgaggtgaggcgggatagttttgatgggtcccttttggtgtgttcatccatgcatgcgcttcgtgttgtgagtcttagttgactgtcggtatgtcctccttcgcgacgctcctctgcgctggaagttggaggctcagtgcctttgggttgcttgttctgttttctactgctttgcgctataccacgagctaacgcgctcaagtaagtatgcaatgtcttcgtctctcggtcttttagccttgccataggggcttgcagagttggatgataggtatccactagttggtccctggattgtgtgtcttctccgtcgccctggatccaacgtttggtcttgaagttcgtgcacggttaccccagtcagtgtcgtgttgtgtaaatgctgactatccttttgtattatctccatatatgtttgtgctccttgtatgtgtgtcccctctttatctcgactctctcgatacctcgcttttaagaacccttcctcgcccggttatgttcacattgtccatggtacttttaatataactatgatatatatacaacagaatagactaatagatacatactatgagatacttacaataaattgaatcaatacatatagaatacaaatatcgcatgaggagaagtgcaactcaacaatacagaatgaattaactgcatgaagcatatgagaaatacaagaacaaacagacccaacaatgtccacaaaat

SEQ ID NO: 480971 - DNA, 649 bp, Homo sapiens
  misc_feature (33)..(33): n is a, c, g, or t
  misc_feature (292)..(292): n is a, c, g, or t
  misc_feature (611)..(611): n is a, c, g, or t
accgttcatagaggacccccaaggtccttagcntctaatcccctcacatcacctgacaaaggcccacctcttaatgccaacacactggggattagatttaacatacgaatttggagggacacaaacattcagaccacagcaccttctgatttgtgtaacatctgatatgaagtttatttataggtggtcaggagattggcatacatgaaataaggtaaagaatggaagcttttgagatggaaaggcagaaatggaaaggatgagaaaaaggctgactgagtaatgaaggatnatgaaaagccatggccaagtggaattttctactctctgctctcgtcctctctcagtactctctttagactggccttgagacctgtattctggtgagccctgtctggttctgctctgacagtgtgacttcccatgatgcaaagaatccacagagccaagatgtgctcacacataccctgcctttagattacattttttttatgtccatatttacatatatattcacatgattttcttttaaactaaaattgttttttacaaaaactgcagtggtttattttttcctgtgttaattcaccaatttctcagctcttcccatnttagattcctcatggaatgaatcctgttcatctatctt

SEQ ID NO: 480972 - DNA, 805 bp, Homo sapiens
  misc_feature (573)..(573): n is a, c, g, or t
gcctgctgaccggtttgcagagtaccatcttccctgcaatctctgaaggatggacttaaccaccaccatgtcgagcagaagaacaaagagcaagacaagaagcgccctcagcgtgcaacatccaatgtgtttgctatgttgaccagtcacagattcaggagttcagagaggccttcaacactgatgatcagaacagagatggtttcatcgacaaggaagattgcatgatatgcttgcttcatgggggaagaatccaactgatgagtatctagatgccatgatgaatgaggctccaggtgccatcaatttcaccatgtgcctcagcatgtttggtgagaagttaaatggacgagagatcctgagagatgtctatcagaatatggccttgtgctgtgttttgatgtagcgaagacaataggaccatacaggaagatttacttgagagagctgtgataaccagtgggggatcggttcacagatgacggacgtggatgagctgtaccagagaagcagctatggtaacaaggggaatttaagttacatcgagtgcaactgcattctgaatcatggagncatgagacatagcatgatgaacatgaattcaaatgccatgccaaatgtccattgtggcacttagggtaatctgagattacctgttgcatgccttagattaaaggtttggatttgctgtggtttatctcggccataggctatgtgttttatactgaaggaacgggctttataaaagttggcccgaaaggggtgctaatgcgggttttcccaaagggggaagcaatttggcagt

SEQ ID NO: 480973 - DNA, 365 bp, Homo sapiens
  misc_feature (291)..(291): n is a, c, g, or t
ccccctcgaaggacaggcccttatggccggatcctctgtccgacacagctgacttgtgggatgcaggcccggctgctggagcagcggccctccatctcactctgtcctcaggtgccccgggccttgctggagttcccgtcggctgggcgctaaatcagaagagggccctgcatacacctcatttatttaggaaggggagcaccaaccacagagcccaaaggttatagagttaaaaccacccactgccttgtatgtccatcttcttctctcttatgccctatttaattttcnccgatccgcaggataggccaggcccggcgggctcaggcctgtgctccccgccccttgcgaggttgcggcgttct

SEQ ID NO: 480974 - DNA, 382 bp, Homo sapiens
  misc_feature (243)..(243): n is a, c, g, or t
cccccccccccccccccctaaaagtaaattctccaaaagggggagggggggggcccccccccccccccttttttttaaaggtttgggaaatattctcttctaaaaaaaaggccccctcgggattcaaaagttttgaaaatttttttaaaggtggccccgggccccgggtttttatatggggccgggggggttttttattggccccccccccccctgggacccaaaccccctgggaaggggcgntttgttttaccccccctcgaaatttcccttttgggggggggggggggtttttttttcccaggaaactttttttttttcggggttttaaaaaaagggggggacccccggggggccccaaaaaaaaaagttttgggcccca

SEQ ID NO: 480975 - DNA, 1094 bp, Homo sapiens
  misc_feature (475)..(475): n is a, c, g, or t
ggttccgtgtcactatagccaggttcgggtcctgtatccgctgccatcctcctccaggcgcggcctcggatggcctcctgctcctcctggacgctgaggcagagcccacactcgtgtgtgtgcaacggtaggacaccgaggtggtgcattggagacccccatcttgcggctgtggcacgacagacattgagatgtgacctagcagctcgccgcgcgcgtgtcgaggagtcggactgcgttgttccctggttgtccgcagggtgtggcgtgctcggccacgtgcctggagcaccgtacgctgcggggtctcggacgtcctagacggtctcatcgggccttgcctgggggccggtccatgaggtcctcttcgatttaggacagaatgccggggcgtcatcgacagtgcggtctccgggtctgcgatctgatcagtcgaagcagcaggaggctatgaacgtggtgcctctactctgtntccgacgacaaagggcctaaggaatgatcgcgtgttgcgatagggacattcaatgcctatagagatacctctaggcgcgctattgtggaacatgggaccctgggtatatcggggtatggaaggcggagatgaaggccatcctctagtagaggcggctggcaagtgcctcctgcgattaagcaggttcacaccaggccctggaaggcgcaaacagttactccaattgcttaagctgggccacaggtacagagcagagacaaagcacgagaagaagcacgagactgtggcccgggccgaggaacgaggctgtgggcaccgggacgtcccacgaggagacaaccgtccattcagcaggagttacacgccagaccttggtggagaacagaaagctcagcggtgtgtgcaccgacgggatcgcacgagcggtgctatctgctgccggtagaaagggggacgcacgtatccaggaaggacgaggggttgtcaggacggcacggcctcacagaacggacaagctgctcaggggctgcgccacgacgagccgaggggcacggcacatggtcaccaaggaaccacgggggttaaaaaccaaaagggaagacggcgaggagaagatatt

SEQ ID NO: 480976 - DNA, 131 bp, Homo sapiens
tcacaaagtgtcttcggaacataagggatattaaattttaagtgatttttggatgttattgatatctttgtagtagctttttttaaaagactaccaaaatgtatgttgtcctattatttttatgttttatt

SEQ ID NO: 480977 - DNA, 465 bp, Homo sapiens
tctggtaaacagtactatgtaacacatcatgacagtgataatggcaatccactttggaaaacaatttggcagcgttttttataactataaaaaacacatatctaaggtcttagcagtcacaatgcacttaggcacaaaggacatggacaagaatgtccactgtagccctatttgtaattgcataaaaaggaaataaaccacgtgtctgccagtaaggaaatggcaatacaggtcataggcaaatccacactactggaacgctggctccacaaggcacaggtttatgtgtgatttgtccatggctgtagccccaaagcctaaaacagtaactgatacacagctggcactcagacatttactgaatgcatactatggcataccgtgcagtgcttaaaacgaataagggatgtgtagtatatattatatgcgcacatatatgtatgtgtatatatattatatatctat

SEQ ID NO: 480978 - DNA, 105 bp, Homo sapiens
actaccagacaaccttagcaaaccatttacccaaataaagtataggcgatagagattgaaaccgcgcgcacatagatatagtaccgcaaggcaaagatgaaaatt

SEQ ID NO: 480979 - DNA, 624 bp, Homo sapiens
ctgagtggcatggtattagcaaactcatcactagacatcgtactacacgacacgtactacgttgtagcgtcacgttccactatgtcctatcaataggagctgtatttggccatcataggaaggctgtcagttcagctgatttaccgcctgattgctcatggctaacaccgctaggaccgaaagcctaacgcgcagaaaagtccgatgttgcagctattcatgattcatcggtcgctagacaatctcaaacttgtcgttgcccagcgagacactgtgtctcggtggctattcccggagactgtccccgagcgttactcggactaccccgatgcatagcgaccacatgaagacatcctatcatctataggctcagttcatgttcgtctaacagccaggtaatatgacagtaagttgtcagtgatttgagaagccttcgcttcgaagcgaaaagtcctaatagtagaagaaccctccataaggctggagtgactatatggatgcccccaccctacacacattcgaagaacccgtatacatagagatctagactaacaaaggaaggaatcgaaccccgccaaagctggtttcaagccaaccccatggactccatgactttttcgaaaa

SEQ ID NO: 480980 - DNA, 181 bp, Homo sapiens
tgtacataatcagctcggtaccggttcgcatgttccctctgctgggaatgcctttcttttcccagcgtttgcaaaatccttcccagccttcaaatatctgaggcaagcctgggcacagtggctcacacctataatccctggctcacacctataatcccagtatttggggaagcttaggtgg

SEQ ID NO: 480981 - DNA, 125 bp, Homo sapiens
gcacgagtaggaagaaagagaggaaggaaagaaaggaaaaagggaaagaaaggaaggaagaaaggaaggaagggacaagaaagaaacaaaagctgatgttctctctctccagaggcaccagggag

SEQ ID NO: 480982 - DNA, 1027 bp, Homo sapiens
  misc_feature (743)..(743): n is a, c, g, or t
gaactggatcagaaaaggttctgattgcccaagagaaaagtggcaacgaacacagtttatgtgtttgccaaaaaggattctaacatagtgcctagcacaggagagtgtacgatccatgtctatgagaattcttcccgagccacctagtagtatagtgggttatacactgctgtcaagaggaggacagggtgccaagaagagtgctactggtcagggcagttgtggcaactcgtaccatatagtcgagggcaagaagtcccatcagttattgtcgtctcaagaagcgagttcagagtcatgagtgttcccgagcaagacgcactattgttacgagagcatgatgtgatctctcactgaatttctcgaaggacgccacgacgactcatggaaatgggtccaagatctatcatctcgaatgaaagctatgttgtgcactcccttgaatcaagaaatgtgtgaccgcgtatccttgtgcagtcggtatgcaaacgaggaagcaagagcgcatcgcgtgttgagcataactcgatacaaagaattaaaatgatcggacatacggaagttactatcgagaacaagaatgtgctgcagcatgcattgtatggtgtcaacgctgattgcgggtagataggcgaatctggcgtcaatggcatgtgagggatgacagtgggtgacgagcagagggtgcactgtgctaggatatgcattgggcgtaggaagagaaagaaacttacgaattgacnaagagatcacagattggagaatccaagaagatcggtgatctatgattggggacagtatgcttttggcattctttattcgacgagggtaatgctaatagagacactctgggcttcaagaagcaaagttggcgagatactattgcacgagaaaatatgattgggattcgaggggaaaaggatttataacctttgggaggtagggcaaattaaagaacacggattcaatatctggatgagctacaaatactcgttgagctctgtgaaactggggtgagtacaaaaaa

SEQ ID NO: 480983 - DNA, 255 bp, Homo sapiens
  misc_feature (86)..(86): n is a, c, g, or t
  misc_feature (88)..(88): n is a, c, g, or t
  misc_feature (103)..(103): n is a, c, g, or t
  misc_feature (130)..(130): n is a, c, g, or t
  misc_feature (188)..(188): n is a, c, g, or t
  misc_feature (204)..(204): n is a, c, g, or t
gccctccgcccttggaatagttttttggaagccggcctgtttccgccttcagacctagggagaggttttaacctttgttttcagantntggaaaaggtttttnaacgggttggcctgacctcagttcttngcattccctccacatttcaagacaccaacccagggatgcaggacagacacacagacantcagtgagggtcaaanatttttaaataaagtgccaggaacaataaatactgtacaggaagagagtgc

SEQ ID NO: 480984 - DNA, 887 bp, Homo sapiens
gccctggtgtgattccgtcctgcgcggttgtctctggagcagcgtgcttttatctccgtaccgcttctctcctacctaagtgcgtgccgccacccgatgcagattcgagtggacatggtacattgtagccccctgaggccccgagaactatcttatcggttgtgaactataggccgacaaagattatcacgtttaaggtgcctaattgtatgaacttgagcaccagttatctttaagacccggtcagttaagtgggctgtgtgcaaaggctgagctttgcccatgttgacacgcagaggcaatgatttacgaaaggcagtccatttacagtaacactggcaattttgaaaatgtctgtatcagccaatggttacccttgggggctttgataataacagcagcagtggtcttaaggttgactgtgtggttcacggggcagtgcaatattagtggacaggacttagtagctgtggaggaagatgcagagtcagaagatgacgaggaggaggttgtgagactcttaagtatatctgaaagcggtatgcccctggaggtggtagcgaggttccacagaactaagttaaacttggttgctgatgaagaatgatgggatggtgatgaagaggatgtgccttcagatgctgctgatgattggtttggatgaatccagaactgaaaaaagcgcagtggatgaatttttgtgatgtgcgacaaatgtgcagctcaatagatggtggaattggaagtcctaggccggggaagggggagttcgaagggagatctttggagcaaggtttttgtggattaaaaccgggtgaaaaggttccaggggaacatgaaggggggggggccactcggtgtaaaaagacttttttttaatggggtgt

SEQ ID NO: 480985 - DNA, 144 bp, Homo sapiens
ggttcttgcccacaggttagaattgctacatggtttttttttaaaaactgctgatgcctgaaccgagttattattgctaacaaataacagcccgtcagtattcagattcaaagcttctcagaagattttaatgtgtatccagag

SEQ ID NO: 480986 - DNA, 344 bp, Homo sapiens
cagcggtacctgcttatgaagtcgcggtcgtaggtgggactggagggactttaattttgttgttgtttttgagacagaatctctctgtcacccaggctgaagtgcagtggcgcgatctcggctcactgcaacctccgcccccaggttcaagcaattctcctgcctcagcctcccgagtagctgggatcacaggcatgcaccaccatgcccagctaattttgtatttttagtacagagggggtttcaccatgttggccaggctggtcttgaactcctgacctcaggtgatccgcccatctcagcttcccagagtgctaggattacaggcctgagccactgcgcct

SEQ ID NO: 480987 - DNA, 358 bp, Homo sapiens
agaaccggtcaatcattgctggtgtgaatacaaactcgctcagccaccttgaaaaacagtgtgtgaaaaaacttacataactaagagatttcacctctacctaagctgttccatcacctgttgcttgtcctggagtccctgctgggaatgctcccaggctattagagagtgtgcgcgtgagtgccctggtgtgactctagtgatctacgtagctcggcttttttggcacatggatcaacaaaatcggcaaggtctcagggaccttgttaacagcggagtaactattcagattatgagagcatcagagttttatcactggtggaggaattttgtcaactacccacctggggatgaagct

SEQ ID NO: 480988 - DNA, 489 bp, Homo sapiens
  misc_feature (489)..(489): n is a, c, g, or t
ggcaagcgggtctagcaggagaattataagctgcgatatcagaacgacgacttgaatgggcagattttgagcctcagactctacgaagcaaccgtctcgcgcgatgagctaatggaagccctgaaggagcaggaggagatcaactttcggctgaggcagtacatggacaagattatgctcgacatcctggaccacaatccctccatactcgagatcaaacactaaggcacggtgctggctgcagagcagccttaggaccctgggaccaagggcagaccctgtccaaggatgcacgactaagacgagcctcacactcacactgttgtctatcttgtcaccatgcgttacgggtacccgtgtatatgaggggaggctgtgcacactagcgaggggtgagtggacgaggctgtgggcaagaagcacacggttagacgtgcatgcactttgtggtccctttgcatggtgcagaggtacctgaagtgggaggtn

SEQ ID NO: 480989 - DNA, 924 bp, Homo sapiens
  misc_feature (6)..(6): n is a, c, g, or t
ttcggnttggcgtctgatcattttggcgtcgcgacataatcgggggggtcctactgggtcgcgctgctgcgcgggacaaagggatttttctggaggcataaggctataggctgtgcgttagggtgtcgcggttatatctttgtagcgcgtcaagcggtgggttcgattgacgggggcgctatggggggttctctatgagccgagaacgggcggtattctcaaaggggggttcaacacgccgcgcgtgatctgcacgcgtgggtggaacgcggccttctttgtgggtcgtcgcgaaagcacaagagcttttgttggtgtggtgctacatactatcggtccgcggtggctgtttggtagccgtcccgttggtgggtggtctttaggcgggcggggtgaccccgtcccttgccgatgcgccccgtgggttggccacgagaggaggcgggtttttttttctcataggccaacatagggcgccacaacgtgtgtgcgccctgtggtgggaacccgtttgggcgaatgagttttgcgcgcgcgaattatttgccgtccacgggggggcacagtttgtcgccgccgccttagaggcgagcgtagcgatccacggcggaatgtttctttgttggacggggaggaatttggaccccccttctcctgggcttagacgccacgttagacgtgcgctgacgcgcgtgataaacaccgaacacgtgttcttctccggcggcgtctagaaggcgcctattttgttataaaagcttggggcggtgacccataaggtcacaccgccacaaggagcttcagctcgttgtttttcaaagactaggactcccacatgggcggcgcatctctgggtgcgacttctaacgccgcgacctcatctgagtccccgaaaaaaaaaccaattggaaccccaaaataaca

SEQ ID NO: 480990 - DNA, 149 bp, Homo sapiens
ctgtatgatcatggccgtcgggatctcgatgatgcgtttggcgcgcgcggcgacttcgcggtcgtgggtaatcaggatgacgacgtggccctggctcgccagttcatcgagcagtgtcatgacctcggcgccgctgtggctgtcgaggg

SEQ ID NO: 480991 - DNA, 1432 bp, Homo sapiens
  misc_feature (632)..(632): n is a, c, g, or t
  misc_feature (863)..(863): n is a, c, g, or t
  misc_feature (870)..(871): n is a, c, g, or t
  misc_feature (874)..(874): n is a, c, g, or t
  misc_feature (884)..(885): n is a, c, g, or t
  misc_feature (888)..(889): n is a, c, g, or t
  misc_feature (892)..(893): n is a, c, g, or t
  misc_feature (900)..(900): n is a, c, g, or t
  misc_feature (910)..(912): n is a, c, g, or t
  misc_feature (918)..(918): n is a, c, g, or t
  misc_feature (926)..(926): n is a, c, g, or t
  misc_feature (928)..(928): n is a, c, g, or t
  misc_feature (931)..(932): n is a, c, g, or t
  misc_feature (936)..(937): n is a, c, g, or t
  misc_feature (939)..(939): n is a, c, g, or t
  misc_feature (944)..(944): n is a, c, g, or t
  misc_feature (991)..(991): n is a, c, g, or t
gcgggatgcagtagtgatggctgaggtcgtatcttggaaggagccagagcccagtcagatcaaagcacatagtgatacaggctgatgcccaccccgtaatagaattaatgaagagaccccagtgtactttgtctcgagatacagcctgcatggacctgtagagcagaatgggtgagctgcttcctgaagctgtttatcaatgatgtctaattggctcacctgctacagggtctgattgagggtctcaggtggctgaagcccagaggtggtcgttcgaatgtgtgctgggcgttgtctgccagtctggctgaagactgcttatgaagctgcggacgttgctgatgatcaggaagaaccagctacttactgtgtatcttcgttcgaattctgaactcactagttcagaagctcctagagactacagacagatctgatggacaccagaacaaactgaggagttctgtatatgaatctctgatggaacacttgtgagaaacagctgccaaggaatgttaccctgctgtccagaaaaacgaccttggtcatcatggaacgactgcaacaggttcttcagatggagtcacatatccagagcacatccgatagaatccagttcaatgaccttcagtctntactctgtgcaactcttcagaatgttcttcggaaagtgcaacatcaagatgctttgagatctctgatgtggttatggcctccctgttaagggatgttccaaagcacagctgggtctgggggagtacaagaggatgccctgatggcagttagcacactggtggaagtgtgggtggtgaattcctcaagtacatggaggcctttaaacccttcctgggcattggattaaaaanttatgcnnganataccaggtnngtnntgnnagcgtgngggcattagnnnggaganctttgtgngntgnnctgnnantccancatcatacctttctgtgacgaggtgatgcagctgtttctggaaaatnggggaatgagaacgtccacaaggtctgtgaaggcgcagattctgtcagtgtcggtgatattgcctggtatgggaggagagtttaaaaaatacttagaggtgtatgaatactcttcagggaggctccccaagcccaggtgacaacgtcaagactatgacatggtggattatctggaatggaagtaaggaaagctgttggaggctatactggaatcgggtccaggattaaaggggggatcaggcgaacgtcaaccggatgtgatgctggtaaaccagggtagaaattatctgtttaatgacacattggtggagagaggttacacagatggggaaaagctgtgcttgggaaaaagggactttgtaagctggaagtgtctgaataaagagggcaagaccgaatgtaggggggcgcggaaaaataacttcttgcaaaagtgatgaa

SEQ ID NO: 480992 - DNA, 277 bp, Homo sapiens
aatgtttacgaccctcctcagctccaaagtgttaggtttataggcgtgagccatcgcgctggccatcctttgtttttaatagcatattccttatttgaggtgtacctgcttttttctcatgattagatcaggttgtacatccccagtggaatactgtttaagcatgttatgtccttctcaaggtatcatatccagagtgattgatagtaattttgagaatctagtcaaagccacactgtatagtgtattgtttttcctcttgtagctaatagccatt

SEQ ID NO: 480993 - DNA, 590 bp, Homo sapiens
ggtcccacgcgtatacagaccacaaatccatattgaatgtatacagccggtgcagtggttcacacctgtaatcccaacacttagcggagcggaaggcaggtcgatcagttgaggccaggagttcaagaccagcctggccaagcatggtgaacccatgtctctagctaaaaatacaaaaagtagccaggtctgtgggggggcgcctgtaatctcagctacgggggaagctgaggcaggagaatcgcttgaattggggaggtagaggtaccagtgggccaagatggtgccaccgcaccccagtatgggctacagagtgtgagccaccgcgcctgggccgccttatataagtattgaaaaaaatctgtctagattcatacatcctgagatgtgggttcatccattcagtacatttattttaaatattggtaatgtgtacggcatggtgctaagtgtcaattggcgattcataattgggtgaaagaaaccagacataatcctttgcttgggggagctacgtattgtttccatttagtagtatcaacttgcttggccgttcatcctttggggggggggatagaggtatctttccc

SEQ ID NO: 480994 - DNA, 1170 bp, Homo sapiens
  misc_feature (153)..(153): n is a, c, g, or t
atcatgaccctgtgtcacattcgggaactgcttcgctcttgcctagttcccctagcttcatcacctagcaagttgcagcggtctggtccgagtagcaacgaccttctgggaactggcgatccagcgctgcgcgtcagcctatcgcgtctttgntaccgaattctggcaagatggctgctgtcgttggccgacttgttcgtttcctcacactggagaaagggcaggtcatctcatgacattccattggggatgttcattcgatatgcgaccaagcgtgtgagttgtggacatagcactagattaaggtgctaaaacgcttgatgaattgtcccgagatagtgccggcacagggacgaggtaagcaatagactacataggtttggctgaccctctgggcctggcgacacaactgtctgtaggctgtatgtaatggtctcctgacatgaccagttgcccgcacttagtgtggcctccgaatgcacccaggtggcccaatatgcagatcttcgaacctggcaatggtacaatcccagattgtaggcaaattaggacgtcaccacacgaaatttaagttcgtcggatccaatttaaccagtcagcttccagcggatcttggcatcgatgcgtactggtgcactcgactataaggcaacaagcttgcttgaatcgttgtaaccaataatcttattccgagtcagagttagatcactcctggctttgaatggttccctccaagtgttcttaacaaggggcctattgttcatttggagaaccttttcgtgccaaccttcttgacttccgctttggggcacaagttgtgggcacgcgttcttacttggggccccgaagccagggtggttaaccgagggaggcttggcgttgggcccctttcaagtcaaccttttgtagcccccctgggtagttggttcggccggtatggttccaagtaggttggcaccttcctctaaggggccttaggggatggtcctccaaggaacgcatgtggacttgcttacccttttttttcacccattgagcctcccacacttcaccaagagggtttctcaaagggtagaaacgttaaaaaaccaaggagtaatatctcggcgaaaccagttatgcacacacacacagacagcgacagcacaccacaaaccacaaacaagacag

SEQ ID NO: 480995 - DNA, 1580 bp, Homo sapiens
  misc_feature (585)..(585): n is a, c, g, or t
  misc_feature (795)..(795): n is a, c, g, or t
  misc_feature (1256)..(1256): n is a, c, g, or t
ttggtgtggcgggtggccgagtcgtttcgtcatgaatgtctggtctgctcgcgatgataattctgcctgcctgcttgatgagtgttgtgttggcctgccctctacgatatttgttttccgctgctgatttttgtgtgtgtgctggcgcacgagcgagggcgggggggggatggcggtgatatgatattattgtgatggtgagtatacgtttgtctgtcccctacgcctgtgcgttggttggttagtctgcaggcgaggccttgtccaaccagaaaggtgtgggagtaagacacctttgtgccgaccccccttttttaagggggtgtgagtgctagtagtatactgcagccaaaattcgcccgcggggattttttttaaagaggtgtggtaaacccagcgttaattttttaggtagaacctcttcctggatgaatggggaggtcctccacaccacatatgggtgttgttgtggtcaccgcacagataaatataaccctacagggggcttctgttggtctatgaagaaaacatggaaccttggcgcccgccacagaggggtgttacccttattttattcaccgcggnggtcctccctcctaataagggggttaatcacgtggaaaagcgccctcatctacgtggtgatcgcgccgctgaaaaatttttccgggacacccgaatggggggaaccccccttgggcaacgatccgctcaacgagagaaatgtgtgtgaactccccccgtatattgagacgacactccccgggagtttgtcgccacatctctaattatggnaaactccctcgtgtgtgtaaacgcgagagtgcgagagatacacatgggggtggggctcacacagagacagcgagattggtcccacacacatgcaccgtatagggcacaccccgcgagaggtctgtgtcacagagcacacacagagatatgtgtggcgccacacaccgctgtacacatggtgcacatgatacagcgcccacatggcacggtttcttttctctcataaggttcccacgagagggcttatacgtctgtataagtgagacacacacttttctcgccctctcggagtagacacacatgttttgtcgtaaaactcggtgataacctctataccaccacatggagtaggcgtatatctccacgctatattctgcccgtggagatatactcctttctagatgttggccacctccgcgagagagatatagagagcgcatagcacacacccctatacccgncgatatagccctgctcacagagagaacttgtgcacaggcctctggcgcctaaaagtgtttttggaggggtgagcgcgacacctggcgaagaactcacacacaagagaggggagaagctgaacacagaagaatacctacacagaacggagagtgctgtagcacacacctgtgtggcccgacacacaagaaaagcacgagaggactggggctgggtcacgcacaccgaattcccaatttagaggcggatttggtcgtggacgtggtcagaccacctccagtaaaattggagaggattctttttgccaattgaataaacttaccagc

SEQ ID NO: 480996 - DNA, 685 bp, Homo sapiens
ggccatgtgcctcatgcggctccttgctcgccgcagcgctccgccgcgcgctcctccgcgcgcggactccggcagctttatcgccagagtcgctgaactctcgctgtcttttgaatcccctggatcggatcaccggcgtgccccaccatgtcagacgcagccgtaacaccagctccgagatcaccaccaaggacttacaggagatagaaggaagttgtggaagaggccgaatatggaagagacgccctctggataatggcgaatgctagtgagtgaatagatggggcgcaagatgctgacaatgaaggtaaagtaagcaggaggatgaagagtgcgagagtgacgaggtaggtagagaagaagaagtgtgatgtgtgaggccaggtatgctctatgagatcgacgacgcctcgagactagacttactcggtcaagagacggagtcgctgcaagcattcgatggccgaattcttgcacacgctacaggtagcacaggctaacgcctcagacaacgcgagaagcggacgttcacctatgtatctgacaagcatacgggaccacaggagaagcagcattacggcatgatcatacagagggcccggcagatgtcaccaatgtcgcgcgtcgccattttacgctagtcgcgtcaaccgtacctccccggtggtacgcctctcgggctacg

SEQ ID NO: 480997 - DNA, 931 bp, Homo sapiens
ggggacctgtactatgaggggaaggagttcgagacacgactgaaggagaagaagccaggagatctgtctgatgagctaaggatttccttggggatgccagtaggaccaaatgcccacaaggtccctcccccatggctgattgccgatgcagcgatatggaccacccccatcgtatcccaacctgaaaatccctgggcgtgaactcgcccatcccatggagagctgttcctttgggtaccatgctggtggctggggcaaactctccagtggatgagactgggaaaccgctctatggggacgtgtttggaaccaatgctgctgaatttcagacctaaggactgatggaagaagagattgatcggacccctgtggggggaactggaaccatctgatgaagaatcctcagaagaagaggaagaggagagaaagtgatggatagacttggaccagatgagacaggctttatggagctcctgaagagcaggggtcgttattgactcctggaggctggttcatccaaggtgtctgctggaatggatgagccctggaagtcatggagctgaggaagaagaagattgaggaggtgatggagggaagtgagatactcagtcttcactgtgttggcagagaagagagagcactgttggagggggcatgatgggatcaatccaatttatgacctgtcatggttatgagccggaagggcgggtctgagtgaggtgtggaaatgggctggcgctggagagttggagtgatctatggcatgaccagagtttaggagatgtgggggcagggtcactgagagggatccggatgggggagagggcagagcaaacgtattcgcggaggggggggaaataggaattgccccacaacctttggccatggttggtaaaaccccagagaggtgttaagtggattcgcaaaaaag

SEQ ID NO: 480998 - DNA, 123 bp, Homo sapiens
acaccaagtacttctagtctaagttccaaagaatatttaaaagtctttttaaatgttcacagtacatatggagaaaaaagggtggtatagccctagtggtatagggtggtaggtggtatagct

SEQ ID NO: 480999 - DNA, 401 bp, Homo sapiens
cagagcatcttaatctatttggttaaagaggctcccagttcagtattgtaaattgaactccttaatctgacctttgtgttttttgtataagatagtgctattcttggcttcctgtgaattataagacagttttgaaaatctcaggttttctgtttggattgtttgaattggtatttcttaacacatttcttactgataaatcaaaatattcctgggggagcaggaattaaaaatgagggcaaaaatctgcctctaagatttttttaatccctagatttgaattaatatgcttgccttttctcatccatttttccagtttaaatgtcaaatgtgttggaccatttgtgttcatgtgtgggacatttagttgttagcaagttttttttgagacagagtctcgc

SEQ ID NO: 481000 - DNA, 738 bp, Homo sapiens
attgcagtcttgtgtgccggtacggggaccacatccttaatttctgctcagactggtaaagcacaatctaattgtaatctaaaattcgcgaatgtgacagaccattaatagatgctggttaaaggaatcataaacaggtataaaccttcttaagaaaaaaatatatgccttatgttatgagtgaaaacagatcctaatgaatataatgtagacttaaatgctgatatgataaaatattagagatgctaactttctactatctttagtcagagacactgaaagtgactgcttaactacaactattcaatgtgcctataaagatcatgcgaagactggtgcgacgaaagataacctactcaatacacactttgccagaatttgaacattatcatgaaggaactgacagttatgaactgactggctcatccataggtggactacaattgtattaattaatgaggaataatgccaaagaagatggactactcacataactatcttctatgcaaactttttgtggaactacatgtaaagctattaaaattacctacttgcaaactcatgacataggacatgtgatcattctccggattgaacgtacttttgctgatgcatgacagttcttgatcagagatagcctaattgcaaggacttgaacctaagcatcaatctggaggcttgggagctgctaattctggctgggggaatgccggggcctttttttgatatccttccgca

SEQ ID NO: 481001 - DNA, 207 bp, Homo sapiens
tgctctgtaccctgaggaacgcacgggctcagccgcgactcgatgacgcagtgagatgttgagcagctctaagttggatttcttgctgcgtttcctccatgttggaggagtgtctggaattagaagtctgagaagccgaaggagggccggggagtcatgccggaattaattcttcttgtccctttgttgatatatggctgtctttct

SEQ ID NO: 481002 - DNA, 124 bp, Homo sapiens
tagagggctgatgctaactaattaggctgtggtgtggttgtagttgattcaaattatgctgatgagtacggggacagtggacgcctactagcgcgtgtagaactaggatgtatgctgcctgctg

SEQ ID NO: 481003 - DNA, 244 bp, Homo sapiens
ggacgcgatcccagttattatgaactaaatgttgaagacagtaagcagaatcatgtaaaatgtgatttttacttccacttataatacttgtgattggggaggtcgtgcgaaattcaattatgatgaaaaacctatctttttgtaatgttggcatacttggggaatttagtggcaaatacattccccagcaggccttttgttggttgcactaactgcaaggttgctgggaagtagagtccatttg

SEQ ID NO: 481004 - DNA, 440 bp, Homo sapiens
aagtgatctcccgggatgccatgctcttctgtgactgcttactcttgatcacctctgatggctgctccatgtgcaggcagacacccccaaatgtcctctgtatccctacattgtccgccctttgccaccctctgtaatcagggctggtcatttccaccttgtttggttcacaggctccacgtgcatatggtgcatgtggcctggcctataacaggtgcacagtgtacctgtgctgtctacagctaggtgcctatcgtcttccgtaacagtagcgattccggtcagtgttcggcacgtgcaagtaggtgcttagtgagtggtcatcagactgagctgactgcagccgcgtgcaggcctcccaggaactcgcgtatccctgacatctgccctccctgcagccatgaggacgcccccgctcagcccctcgcactgccccgcct

SEQ ID NO: 481005 - DNA, 645 bp, Homo sapiens
gttgtaattgatggaagaatttatgagaaacaaccacaggcacacaaaattttatcaaaatcaaaataaactattttgagttgaaaattcagttgaaaaatcataataatcctaactatactataatgaagtctgactattaagagtacaaagctatagccaaggtaccacatttgtttacagtttaattctaagaatacagtttaaaaaaaagatctaagagaaaatgttcttgagggagacacatgtcaaattaagtctatagcggtaaactaagtagtttattctgcctttcttcttatcctcgttttctttttctgtgggtgtctgaaagcattttgagtatatttactgtaaactgacacttgtagtctccttacatagtgatattggaagcaacaaaaactagatgggaatggctaaggagaaattttggtgaataaaagcagataatacagaaattataattatataaaatgtttgtggtcacatgaaaattttcataaccagttatgaaagtaatgttcagttgtcaataattgagaaataggcataagaagaaaataaagatcaactgtaattacatcatgcagtaaaaatcacttgaaattttaatgttttttattttttttttgggtaagtaaa

SEQ ID NO: 481006 - DNA, 160 bp, Homo sapiens
agaagcagactgaagaacatatctatctcggatgacacaaggaaacccctaaaaggggagtaaaatactcggatagccttattgtggaggatagacccttcgctatacctagattatcgagactgacataactatcggagtatgatgctggaattgaaaa

SEQ ID NO: 481007 - DNA, 376 bp, Homo sapiens
gagacagagtctcactgtgttgcagtgagctgagatcgcgccactgcaccccagcctggcgacagagtgagactccatctcagaaaaaaaaaaaaaaaaaagtccaattaaaggttgtggaaataattctgtgaaggtaatgatggcttagacaaatgggtcagcaaactacagccgatagggcaactctggtctactgccggcttttgaaccgactaaaaatggctttaacttttgttttatcttttaaaaaatacatgacgtttttacctttttaagcggatggaaaaaaaaaatcaaagaaacctatttcatgatatgtgaaaattaaattcaaattttggtgtccataaatagagttgtattgaacacgcca

SEQ ID NO: 481008 - DNA, 141 bp, Homo sapiens
gagtattcggcaggagaaggaaaaccccagactgccgtgcgaagagggcatatcgcacgtgtatgtacacacaggcacctacatgtgcacatgcacaagagatgcacacggctgcaccaacacacatacattcatgtgcac

SEQ ID NO: 481009 - DNA, 149 bp, Homo sapiens
gggaaataaaatttccccccccaacttaaataaattttttttttcagggcaggccccccaaagaaaaaagaaattaacttcccccgggggcggccggcaattttccctttgggttgggggcaaaaaaaagtcctttggaccctttccca

SEQ ID NO: 481010 - DNA, 675 bp, Homo sapiens
ggcgccctcggggctgaaggcggtggtggcgggaacaccaattctgagcggagttattcggagtgtccagcaaggatggggagtggtcatcgtcgcttatcagggatctagcccaaggcatgctgcattcttgtcttcctgtctgtccaaaatgtctaagtatatcctggcgtgcaggagcatcgaaccatgtgttgaatgactatcataacaaagcggtcgtgagaactccatatcccatggtactggcaggtccattgtgatttgctgatgccccgacggcatgatagctcggatctcagggcccttgatcgaatagacttccaggggtaccccggactttcaccatactagaagcaggcccattatcttcttctagcgcgatctacactgctcgccgtagccccgtgttctagttgcaggctaagagcctgctcgtcgttcttggccatagagtgttgggtagacacgacggttcgtagagggaagattcagccgtgttgggcttttccgtacgccgcattaccgcagggcccctatggttgttacctcgccctcgattcgcttccccctaccattgcttcttacaggcacgtctgagcttgccccccttatcgggcgcaagagtgagcggcatgccgggggggttccagatggtcgtgtgggccagccaga

SEQ ID NO: 481011 - DNA, 324 bp, Homo sapiens
  misc_feature (5)..(5): n is a, c, g, or t
ttttntaaaaaaaaaaaatttttaacccggggttcccttttgaaaaatccgggttttagtccttaaaccccctccttaagaataattgacccataaagtttgctttccaaagccgttttccaattataatctcctttccatttataacgttttccgtcccttgttataattttcccttttcatgtaagtttaattatctgcctttttcttttttcctagtttttttaaaactaatgtttttttttaaaattccgttaaatataggataaaataatgcttttaaaaaaatgtttaataaaaaatttaaataactttttttggcca

SEQ ID NO: 481012 - DNA, 1313 bp, Homo sapiens
  misc_feature (559)..(559): n is a, c, g, or t
  misc_feature (1037)..(1037): n is a, c, g, or t
taaagggttatcaaaaccaggtttaaaacataaatatatgcagttagtattggtcaactaaaaatacaaatttaaatttaaacaaagtcatcttacttgcatacaggaaggggggcatgtgccaacaagtgaatcggtcctccctttcgtgaaaattcaggtgtgtgagaattagaactccgtgttcctcggaagaataagcagaagcccagggctcgttcgtgcgtgagaagcacattcgtcttgtgcccctgtggctctcccacgcatgtggaaccaaaagggacctgtggcctgtggaagtgtgaggcctcttgggtgaattttaaatatagctttttccacgccaccagcaagggcaggtgccagcaagttccccgtgggccccttaattatagctctgtgacgtgaccaccgaggggccaaggcccaggcgttcttgtgggtccactctgtggtggtctcgcgagggaacccgtgtgtgtgtgcctcagcaagcggctttcttctccgtagaagggaccctgtgacctttgcgggatttggcaagattccccancttctgtgtgtgatttatgagaacccttttgtgccaccgtgtgggatctccctctgtgggggggccctcctgtgcgaaacaaggcaatttggctccggagaagccagaaaatttcccttccagctgttgacaaggcaagaagggagggcctcatcttcgccaggggctcctttgggtgacaaagagcctccgtgtccagggcccttcgtgtctgtgttctccacgggtgtgtggccggttaactgggagcccagtccaggaattcccggacggtcaatacacacagcgcgggcgccggaccatctctgcgccaggacaacgtgcctcgggatcgagaagcgccgcggaataatccacaagcgcgtgccgagaaagcccccctggagggccacagggcgcggacaccgcgacaaccacgctctgtttgttcccccaaaaatatccggcgagagaccctgttgttcccaacacgaggggngaaactccccgaaaactctgcgggcgacgacactgggtcctcccccaccaagagcgaataactcagtacccccgtcgcgggagactacaccccgcaccggggggaaaacaacaagctacaatcgcgaagcctcgatgacccggcttgttaaacagacggcgacagaacccccagggggcgccgccacaaaaaattgatgcacacaaccaactttgtggaggacgcggcacaaaagcagcatcagccaacccaacacatcagtatactgacgagcac

SEQ ID NO: 481013 - DNA, 149 bp, Homo sapiens
ggggaaacccaaaaaattttttttccccccgcggggttttttgggttggccggggttttttttattttttaaaaacttttggtttccccaatttcccccccgggggggaaaggttttgtttttttttttaaaaagggggggggggccca

SEQ ID NO: 481014 - DNA, 759 bp, Homo sapiens
gaggcaggcagatcacttgaggccaggagttggagaccagcctggccaacatggtgaaaccccatccctactaaaaatacaaaaattagccaggtgtggtggcacactcctgctcgggaggctgaggcaggagaatcgcttgaacctaggaggcagaggttgcagtgagccggagatcgtgccgttgcactccagcctgggcaacaagagtgaaactccatctcaaaaaaaaaaatgcacagctgggtgtggtgtctcacacctctaatcctggcactttgggaggctgaggttggcagatagtttgaacccaggagttcaagaccagcctggacaacgtgataaaaccctgtctctacaaaaaatacaaaaatgggccctttatggtggcgtgcaccagtagtcccagctactcgggaggctgaggtgggaggatcccttgagcccgggaggtagaggctgcagtgagccctgactgcactctgtcataggcagcaaagcaagaccctgtctcaaaaaagaaaaaaaagcactatgtgatacatgcaacaatggatgaatctgaggttaatgctgagtgaaagaagccagtttcaaatgggttgcatactgtatggctccatttatgtgacattcttgaaagacaaaaaattatagtgaatcgagaacagggggttgagtgggagggtgttgacttcagaggaggtagccaagaggctctaagagctaacaggatgggactgctcatatcctaattgg

SEQ ID NO: 481015 - DNA, 410 bp, Homo sapiens
  misc_feature (390)..(390): n is a, c, g, or t
tttccccccccgggggggggggcccaaaaaatttttttttgggggggaggggtttttttccccgcaaaaaaaataatatattggggggggggccccccccccccaaaataaaggaaccccccccccaaaatttaaaaaaaaaaaaaaaggggggcccccccccccccccccctttttttgggggggggtttttttgggcccctcccaaaaaaggggtttcccccccgggggggggggggggttttttttgaggggccccccgcgccaaaaaattttttttttttggtttggggcccccaaaccttggggtttttaaaacccaaaaaaatttcctggcaaaggggggaaggtttccccagggaggcaaaagttcaggccgttaaagcaggncgcctatttgcatgcagcag

SEQ ID NO: 481016 - DNA, 348 bp, Homo sapiens
tcctagttactttctgtgcagtaactagtaaaagactttgaattagaggactccagaccagtcgtctcctgtcttcagctgagttttgatttgaagaaagtaaattagaatttattgcttacaatataaaatgagtagttttatatgaagttcattttcaagaagaaaaaaataggtgatctggcaaatttggttcatgtgctagtagaattgataacacttgtacatgttttacctaccttagccatttctcttacctagctagccactacagatgattggtttgcaacttcggtcaacaagtgaattattgaggtgtttggaaaaagagatcctatagagaaggaa

SEQ ID NO: 481017 - DNA, 305 bp, Homo sapiens
  misc_feature (143)..(143): n is a, c, g, or t
cttagtgaagcccctcgaaaacggcccaggcgctgggggcgacgaataggggtgaaattttccaccgcaaccactgacctccagttaccctacttggcgccgtcgtaagccttcccgaggaacacaacaaaaaaccctattcngccatctcacattatgtcttaaacacggccggcctggcccacaatgaggaaggatatttgaactaatccaccgaagacgacgcaatattgactaactataaaattcgactgaccgcagagtccttccgacccttagcccagcggctagtcgggctttacccc

SEQ ID NO: 481018 - DNA, 206 bp, Homo sapiens
  misc_feature (44)..(44): n is a, c, g, or t
ccttacagagttagaatcaaggaataaaaaacaaatattatganctgctggctgggcacagtggctcacgcctgtaatcccagcactttgggaggttgaggcaggcagatcacttaaggtcaggagttcgagaccagcctggccgccatggagaaacccagtctctaccaaaaattcaaaaattagccgggcgtggtggcaggcgc

SEQ ID NO: 481019 - DNA, 519 bp, Homo sapiens
gcggtacctcccatatagacatcattctagaacaggtaactaatctatggtgacagaaagtagatcactggtgtaaaaaaaaaaaaaaacgcagatcatgggttctctaggcacaagggctagggggtaagacagggccggattcacaaaagagccggaacaaccttccagagatgatgaatatgtccactatcttatttataagctcccaaacctaggggtgacagttggccagtaatacacttttgtcaaaatgggccataataatatactgcaagatggtgcagttaatgggtatggtaaataatcctccaaggttatttaacaaaattatccttaaaggctacaagctcggcaactcggatcatggatttaagggccaatttatgattcacaccacaaatctctataaccctggcaaacatctgggctagggattttaaaaaaatatataccttaaccgggtggatccctgggtgggccagaccgatgtcaaataagggaggggaccctcaagag

SEQ ID NO: 481020 - DNA, 160 bp, Homo sapiens
gccctggttatcctcctgtctgtgacattcccacctcggtactaaaaatgtcgccaccttcattggcaacagcacggcatccaggagctgttcaagcgcatctccgagcagttcacggccatgttccgcgcgcaagcgccttcctgcaagtggtacacgg

SEQ ID NO: 481021 - DNA, 939 bp, Homo sapiens
gcgctcgaaccaccacaaaggagccagtcgcagccgtgccccccggacctccaaccggggactgccggggagcggctcgaagcccgaggccgcacgggagacgcggaggtgcgccgggccgagcgggcggataggccacgctcacttccgaagtgccccaggctcggccagtgccacctcctgcgggggaggcctggcgtgcagggaggcgggtcagcggcctggcgggaggataggcgtccgcagcgtgcgtcccgaagtggggctcgcggccgggcggggaacccgacagtcggccatctgctgccccgcgggacgggccccggtcggctcgcggcctttggggaggttctgccttggggacacaggggacagggcgcaggcggcaccgagctccgaaggcttcaaccttctcttcgcagcttcggccctgagagcggctcggcaattcttggtaggagctttcattcaaaacgtggggcgccggctcggaccggggattaggctcatgtttggccccgaaggcccctggccctgcggccctgcgcgggcatttgggggccggcgctttgtggggcgcacggaaccctgaagcggcggtcctgacgtccgtgggggtccgaccccccggctgggggggcctagtggtccttggcgcccctgaagttagggccggtcccaaagcgcgatgtactggggcggggcgagcgcggcgtccccgggatctgcggaggtgtcgggccccttactttcgcaggccgttggggctcctccggagccgtggcagctttgccgtgaggagtttattcggggctcgcctggaccccggccgggactaggcctgggctgctgtggaggcgctcgagccggggagtttccccacgcctaacgcgagagcgggggagccgtggagcctctttgtgtgtccctttagaggct

SEQ ID NO: 481022 - DNA, 1067 bp, Homo sapiens
ggggctgtgtgggcaccggtgcggaagctgccttggaagaggtgggggcgtgcgacgggagtgggctggcgagcccccgggagcctgtggcgttaggcccgggctgtggcggtggccccgtgctggctggggggtctcctgtggcacccgcccaccaaccatggagccctgccgacccggaggtcgagtctcagatgactgaatctgggcaccgagacgcccctggtgtacctcgcagtggactgactgccggaggggcgagctaaaccggctccgacgcctcatcacgccgggaatccagacgccatacctggtggctgccttggacggagggtctgagagcggacgcggtcattggctcaaccatccggggaatttgaccaagacaagacactctacgagtggaccctgaaggagctcttcatgctaaatgcctcgaaccctggccgttgcgccaaagggagcgtcgtattcgaggcgaggggttctaacaaagggcggcaattcggcattacaacacaacaccaaacaggaagagttgcgtgggcccaattcgagagaattcattcaggaagccattggcagtgaaggcccagaaagtgcattagaaagactccaggagggtaacgaatttacaatgagaaggggaaggaaattaagagattaggttacccataccaagatgaggtatgaagaaaaagagaagcggaattaaacaaattaataggaagttaagactattataggagtgatcgaataaagcattaaggaaggaaggaaaccagaaatgattaatgggagatcaaatcaaatctgtgaaatacttaaccccatgtgggggcacaggacgggggccattaaaggacacgcttggcaactcttgctcttatagagcccgggggatacacccctttgctacgggcagaacgaagtccgcattgggccccagaggaaatctcctgagcggggcaaagaaccttccagcaactggggccacctggggagattaaaccgtggcaccacatcgcgagaaacgcaagaataaatcaaaccctgaaggaagaatc

SEQ ID NO: 481023 - DNA, 137 bp, Homo sapiens
tgtactggtgcagcaagtgcaatttatacagaaacgagtagcgaagctgaggcaggccctcagccgcattaccagtgatgtaagacagaacgggccttgaagagaatgccgcgtgcatttctcctgacttgagggca

SEQ ID NO: 481024 - DNA, 177 bp, Homo sapiens
ggagcaagaggtggagacagatgtttcacatcgattaaactaatttaattctctccctttaattttatagacactttaaaaaaatttgcacacgttttttcactagttcatatctaaatctaacttttcataaaactttacggtttttccttcactacttaatatgcagaatactgc

SEQ ID NO: 481025 - DNA, 203 bp, Homo sapiens
ggcacgaggtggttctggcacggtgggcacgggggtccgagcaggaagaggcaggccgaccctagcagacacaggcccctcacgcttctgtcccgagcctcctccaggcccctggtactccagctgcagcccctttgatgtctaggggactcggcagggctgctcctgcctcgcagggccggaagcctcgatgccggcactga

SEQ ID NO: 481026 - DNA, 934 bp, Homo sapiens
taaggagtgataaaaactttgtaaacccccaaaaaaagggccaaggggtggtgttgacaggccaaggtgggggtgtggttggggcatgatgcgaggggacaattgggcaggatgaaccagttgctatcaggcaggagtaggaaaaagaagataagcaggcgaagatgtagtgagggggctgccctgtgttaagggggtggtgaactcccctccagaccgcattgcctttgcgtggtgccctcggtcgtggtggttataaacacctcgggtgtccacctactcggaaaagctgtggcctgccgtgaagtcaggcgattcagaagaaacaaccgagaagggcggggggccctcctttttagtagagctggaatcctccattataggtgcgcaaaatattggagaacgttatgtgtgctcaggagaatgtttggggtggtgactccatgtctcccaccaggactggatgtgaaaaaaaaggagattgtaacgaaggagcaactccttcgggaggggaagagacgcagaattgacgaacctcctccaagatcgagcaaccagctatgggtgtgaaggaagtgatcgagccccgaacgaaatataaaggtccgagggagggcggtggccatcaaagggggccctcgggctcgggaacctgggcggcgacaagtcaaacttgtcggtcgagaaaacctcccatcgagagaggcaaacagagtatgccttaagtacacaaagaacacaccacaaggagggggtcccaaaagaacacgggacagcataaaaagatgagacagtagaccacccagccggtaagaagcacggaaaagagggggaaggaccagaggagaccactattagaatatgtaggcccaccccccaagatgaaccatagggaggcatcgggacacccaagaagaataggaggcggcacacg

SEQ ID NO: 481027 - DNA, 137 bp, Homo sapiens
atcacaggttggcctcgtacaccagggcccagtggtccacgatgttgaaggggatttccgggtcgtagcaggtgcgcagctgctgccagaccagtttctcgacgtcctcgtcgctggcgttctcgggaaggctcagc

SEQ ID NO: 481028 - DNA, 767 bp, Homo sapiens
  misc_feature (301)..(301): n is a, c, g, or t
agcttttggggcccataaccccattggggttttcccattggggcctccattatatgaaaaagttccaagattttccaggggcggaaacccattgccctctggtggaattctttacattcataaaattggctacaaggtacagcctcggaactgggtccggtttgcatgcccggcacaaattaagtagcccagctcatccagggaggccgggcttatcaaacacgagatgactaaacgggcatttgcataacaatggaaaaggaagaacaggtcttgaagggccagcattgccagctgctgntgagtcacagatttcattataaatagcctccctaaggaaaatacactgaatgctatttttactaaccattctatttttatagaaatagctgagagtttctaaaccaactctctgctgccttacaagtattaaatattttacttctctccataaagagtagctcaaaatatgcaattaatttaatactctctgatgatggtctcatctgcagcaatacgtatatcatctattagaacttactcaatgcaaaactgacgagaacaaaattcgtaaccaccagcacttaagtactcctgattctcaacatcgtctctaatgacccccagccacccaacagctggcccacctactcaaaatcttgtccccactgtctacaaaatcgttacctgtcgtcttcccctgcacgtgtatatactcagctgctgtacactaatggcactacatgcatttacaatatttgttcaac

SEQ ID NO: 481029 - DNA, 1333 bp, Homo sapiens
ggctatctttaacaacgtgccttaggggaaccctgtaccctcctaacaagtgtatctcgattaataacctgccagtcccagcatcacacatcatcatcgaagtcttccccagattataaagaggtcacactagtcgtgctgggctcgaggattctgtgcactccaggaccagggcgcaccaccctctcagcacccagactgtgacgcgggctgtgtggccacgagagaagctaggacacagcggcaagtgggacctagctagcagcgccattaatactatgaacggacctagatgctacctagagcgaggtacaactaagactataagacacatagtagactagcgaacacagacaagaccacatagagggtaccactactagcaagccagaccccaatgcgccatgcctcccacatgctcccaacaactgactgaacaacctaatcaataacatacagaatgggacacgcgcaccacagacatcggacgccccaaaatctaacgcacggaacatgactgagacctcgataaacacatgcactgacaactgcgagaaacaatcaccacataggacaatcaacctataccaccaaggagacaccacccagttacaagagcactcacacacacaggaacaaacatggaccaaacaacgcatgatacagccaaggctatcaatcaaccatgccgcacagcggcaaaacagggcgccccatgccacaagaccccactcgcctactaacacacacaattagccaaatggctaaagaagcggaacccgaggagaacgtaggtaatacccacataggcaacaatgagaaagcacatcgaacctggggccacaaactggcccaacaatccccacatataacagagccacaaagaaacaacagcaacaggacacccaggaggcaccccccaagagggaactaggacaccacggcatcgcgggacacaccggagccacctggacccacacaatgagaacataggagaaccccaccgagagcagcaccacggaaccgacacacacgccgacccagcggacaaagcgccagcaccacgaggccccggcgaaaccaagcgcgcctaacagacaacgactgaagacgaaggagaataagccaacagacacaacaagacgccacacaacccacaaacgagcacccagatacacaagcaccaacaaaaaagccaacaaacaaccacccaccacgacaagacaacagcgaaccaccacaaccacaacaagacacacctacaaacacccaagcaaaccaggaacgccacaacacgcacacacaccagcacagaccacacacaactacaact

SEQ ID NO: 481030 - DNA, 284 bp, Homo sapiens
gtctctacataaaatgttctaaaaattaggtcgggtgctgtggctcatgcctgtagtcccagcactctgggaagcccaagtgggaggatcacttgagccccggagttcaagaccagccaggacaacatggcaagacctcgtctctgctaaaaataaaaatttggctgggcacagtgggtcatgcctgtagtcccagcactttgggaggccgaggtgggaggatcacttgagctcagggttcgagaccagtctgaacctcatctctcttctgaaaaaaattgttt

SEQ ID NO: 481031 - DNA, 190 bp, Homo sapiens
ggcggtccctcgcgcctgtagccggtcgtcgcggcctcgggggtctgctgttcgaccttcctccgaccccggacggttcgccgtcgggtctggtgcccccctctgtgtgtcgcagttccgggcagcagtggtcctcatgtgttcctcaggccgcttgtagtggtgcagggggggctctctcgcgtcgcac

SEQ ID NO: 481032 - DNA, 151 bp, Homo sapiens
tgtctcaaggtctcctgcctcagcctcctgagtattgggactacaggtgtgcactacctggccggctgatttttaaatttttctgtagagacaggatctctctttgttgctcaggctggtttcaaacacctggctccaggagatattcccg

SEQ ID NO: 481033 - DNA, 254 bp, Homo sapiens
aggtggcatacggaagcataagcagtgaatggaaagtcgaaggtaaatctgtaatatctttctgttaggggcagcaggaagaaaaaaccttcaggatttgctgctggtggaatagacagaatgaattatgacagctacttggctcagactggtaaatcccccgcaggagtgaatcttttatcattagcatatgatctagaagcaaaagcaaacagtttgcccccaggaaatttgaggaactccctgaaaagaga

SEQ ID NO: 481034 - DNA, 481 bp, Homo sapiens
tctcggtaccaaagagtgttatctaagacgtagtgacccagaagcctagcctggggacctaggtcccacctacacacccagcgtcccacccatggtagagcaccccagttccttgttccttcctgctccttgtgtcctggtcttctcagtccaaaaagctctaccctcggtacaacaggctctgtccccacatctacagaccctgccccatctgcacacctagactcagttcataagtccacagactctggcccttcagaactgccaggccccactcacaccactacaggctctacctatagtgccattaccactacccacagtgctccaagccccctcactcacactactacaggctccacccacaagcccataatctctacccttactactacaggccctaccctcaatatcataggcccagtccagactaccacaagccccacccacactatgccaagccctacccataccacagcaa

SEQ ID NO: 481035 - DNA, 357 bp, Homo sapiens
gaatccccagatgcccaccgaagttactgtgctcgcctaatggcagctcgagtaaaatctgcaactatctcgtcctgactctccaggctgcaaatcccagcatccaggcgtgacttgtaaaaaccctacggatgatgggagtgctggggcccctgtctattgaccccaacatgttgaatgcacaaaagcaacaggtccagtttatgctaaaggaatttgaagcacgcaggcaacagcatgagcaactgaatgaggcagctcagggcatcctaacaggccctggaggtgtctctctgtccaccagccaagtacagaaagaactccagagcatcaatcagaaatgggttgagctgactg

SEQ ID NO: 481036 - DNA, 915 bp, Homo sapiens
taaagggaagccagtcattgaccatttaaaaagtctcctggctaagtatggaaatcatggacagtaagagaaagccaaaaagcaatgcagagaaaggtgtccaagctgtcttcagccttccccagctaaagagcaggaggagggcctgggctacttgggttccccatcggcctccagcactgctccctcctcccactgcgactctgggatctccaggtgctgccaaggagtttgccttgattacagagaggggggagcctcccaaatttcgggcaactttgggaaggtccctttccgtgttttggaaagccatggggcccaaggaacccgggcaactggcggctcgggagaggcccgggtggggcctgggcctccccccggttcggaacctccaaggtggccttttttcggtttttcagaaggaagaaactagggaagtaaggggcgagagtttggcctggaaagctctgctgctggcttctcctgccaggaagtgaacaaatggcgggggtgtgggagacaaagggccaggagagcccgcgttcagtatgggttgagggtcacagacctccctcccatctgggtgcctgagttttgactccaatcagtgataccagaccacattgacagggaggatcaaattcctgacttacatttgcactgggcttcttgtttaggctgaatcctaaaataacattagtcaaaaaattccaacaagtagccaggactgcagagaccactccagtgcagacgggagaaggacttggtgattttcaaacgcagggtgggttttccaacccaaggcctctgagaaaccatttctttggtatcctctgcgcttcccaagtcctcttgggcgggggcaagcccaactgtgcgggtgttccgaagttcctcttgaccccgggggggtct

SEQ ID NO: 481037 - DNA, 390 bp, Homo sapiens
aattggaaataaattttaaaattcctttaaaccaaaaaaggaattaggccactgggaaacctttcaaactttcaattttttatatggtaataaataaggttaaatatatttaccgttttaagttttagtcacgggggtaattaattcatagattttttttcactctgtcgcccaggctggaatgcagtgatgcaatcatagctcagtgcagcctcgattttctgggctcaagtgatccttcgtccacagtctttggcatggctaagactacaggtgtgcaccaccacacccagcctatttatttttattttttatttttagtagagacaaggtctctctgtgttgccaaggctggtctcaagctccttagctcgcgggcgggcgcggttc

SEQ ID NO: 481038 - DNA, 754 bp, Homo sapiens
  misc_feature (420)..(420): n is a, c, g, or t
agcggagggatttacccgagcgtgtgcggcagcggctgggcttggcaaggcgcgatccaagagggatatataggcagcccagagctccagagaaaaagagagacgacgagagaaccgacagacgagagacggcttaagcgtttacacgaattaaagtatatatcttttaatgaagaactgttgagatattatcatgttgtcgcttagaggtgaccgtgcgcagggctgctaacgtgcgagggatggcggaagcaagaagtagctaaactgggccccgtgaaacgtagatgtgagcgactctggatgaaagatgcacatgaagtttagatgcagcattgaagctctaagcgagttggtacagaaggatttctcagagggacatgtaccacatggctgaggacgagcttataactcttcagnagcgacactattcgaagcaacgtcgttctactcgtggaaagtctccttatcgcgtgtactggagatcgtcctgccaagttatgcccagtcatgaccttccgaaggcttcgacaagaatggggacggcaccattgacttccgagagttcatctgagctctgtaccatcaccgtccaggggcgagcttctgatgcacgaagctgtaactggagccttcaatatgtatgacctggatggtgatgtgcatgatgacccgagtggagatgctggagatcatcgaggatatctacaaaatggtaggaactgtgatcatgatgaacatgaatgaggatggc

SEQ ID NO: 481039 - DNA, 234 bp, Homo sapiens
ccgggatatcgccactgcactccagcctgggtgacagagcgagactccatctcaaaaaaaaaaaaaaaggattttttggcgggaaaaatagagggggggttggagggacccagcattgaaagggccagaaaaagaaagagctgaaaagggaaaaggcccaagagttaaaacagtgggatacaggaaaaaaaacaggggttcaattacagacccagcccagggttaaaggccctc

SEQ ID NO: 481040 - DNA, 1270 bp, Homo sapiens
cacccccgctgggggggccccccacacagcagatgactcgctcctttttgttgggcctgatgaaggatgcctctgccttcttcctctcacgtgttggttcacatgcgcgctggcgctgatgtgtgtcgcgcacgcgctgctgtgctgcgccagccgggggatatttcttctcgatggcgcgccccccctctcttctgggcggtgagcatagtggatgagcgggtcccccctccgctttttccccacacgctcagcggccctcctctttgtgtgtgggtcgtcggcccccccccgcttcgctgcgtgttgtttttcgaactctcatggtgtgccccctccgaaggagagatttgcccacgagacgagtgtctgaagagaatcccccccgcggctgtgtgagagaagatgtgcgccgcgcgacgctgtggtgagagatatcgcccgcgcgcgcgcgtttcttcactagagagaggtttttttttgccccccgcgcgccccgcgagatcttcccgcgcgcgagatttttctccgcacaaggcgcctcgcgtatgacacacgctctctctcccgcgcgcttacccacacgttggtggacatcttttctcctccgcgcgagagacactccgcgctgtccggcgcgtgagactctcttctcgctcgtgataccgccgcggtcgctccccccgcgcgcgtctcgcctcacacatctcctctcatcagagagcgcccccaccccccctccgggtgtgtcccacaaaacgcacccgtgtgtctctggagagacacacacagagtgtttcaccacacacacccgcggggcgcgggctctctctctcgagaggggcgccacctctcgcgcgcgcgcgcccgcgcgcccctctctccccgccctcttctctctccgcgcttcgcgctctccaccctctcgcgcaggctcttttcatccccacccccccccgcggggtataaccccccgcgcctctcgcgcgggcctattccccgcgaccccctctctttttggccccacccccccggttcccccccccccccccccccccggcgcggggccccttccctcctctctccccccccccccggcccccccccgcccccccccccctcgggcccctcctccgcgctttccccctcggggcccccccccccccctccccccccccccccccccgcccccccccgacccctgggtttgggcctccccccccccccccggttcctccccccctttgtaaattaaattttttccccctta

SEQ ID NO: 481041 - DNA, 1589 bp, Homo sapiens
ggatccctccttctcccggcgccatcaagcggaagaacattcctcacgaatattgtatccaaggcccaacagtttgttacaccaagatgatgaatgctgacatggatgcagttgatgctgaaaatcaagtggaactggaggacaaaacaagacttatgaatcaagtgttggcacactccaaccacacacttgcaagcatctcgtctgcacaagcagtcaggatgccagtctcaaggcacagcacacacatctgcacagctcacaccatccagcacaagacccaagtacttaggaaccaatcatatcagcaacatcatcatgttcacgccttactagatgctctattctcacacaccaacatgcaacacaaaacagcaaaacagacaaagtcaagggcattgcaccacccattcgtgttataatggacatgcgcatgctgaatccatcaagaaatcttctataaaaaaacatgtggggattacgaacatacacacacaacagctataacgatgatcagccctcttggatgggaacttaccagttggcaaactcattatagacttgcacaccgcacttcaccttgcttcacagaaatggttaagcaacaacaaaacactaaacacaccaaatacacacgtgacgacattgcccacactacacggctttccgcatcggctaacttcaactcgggtttcaaggtccctcaattgaacaacaacacgattggcaccacaactggtacttaggataacaacccaacctttcacatggactctctcggaacattggccatcattcattctccactaggaagcaaccttaaacagaagaacagcacctcggtcatgaccgttcggcacacataaggcacagagataaaaacgagacacaagggaacatttctaagacagtaaacttaaggaacattacagaacaaaggaaatagttaacaaagcacacaacaccagcaccagccagaagcaaaggcaggaaaaacgcgaggaaccacacaaagtaccgaggaacacacaagacaggcccgacaggacgagaacaaagaaacagccacggaagcaagcacaagaaaagacataggagtgcaacacgacacacacagacacgaaggaagcctccacacacaatacacacaatatctacacgcaaatcgccgcgccacagggacaaacacacacacatgggacggacccacgatggacaacaaaggccaacaacaaacagaaccaaaaaacaaccgacgcggacagacgaaaccggcaatagaatgagaggaagaacagtagacagaaacagcaagaacagctactcctgagactcggcccatggctgatagtgaggtacacaaaatccaggaaagcggtgacatcacataccctgcgcacacatagaacatcacaacaacatcaatacacacagaacctcgcgagcacagggcgcacacaaccaagatgcgcacgagcagcaacgaaagacacgagctggcaggagaatagaacacagcgaacacactgacgccaccacactagaacatgcagcagacaaatgacgaaccgaagcgtctcaccgcgcag

SEQ ID NO: 481042 - DNA, 159 bp, Homo sapiens
gctatactgggtgtacgtcatccagcgtatggtaaatgcatccggttgaatgcagtggattccatccagacatgattgaatgcagttgattccatggagcgtggccattgcatcccgattaaatgcagtggattttatgcagcatggcccaaagcatcc

SEQ ID NO: 481043 - DNA, 353 bp, Homo sapiens
ccggtgtatcctttgtctctactaaaatacaaaaattagcctggcatggttgcatgggcctgtaatcccagctactcgggaggctgagacacgagaatcgcttgaacctgggaggcggaggttgcagtgagcggagatcacgccattgcacactccagcctgggcgacaagagcaggactccatctaaaaaaaaaaaaagaaccaagcttgtccaaaagtactagctaataagttgtttgaacagaatttttaaagcttggcctctttctattataccacgtttgtgattctctcactcacattatagtgtcaaaggacaacagggaaaccacccgggaattccctctagagt

SEQ ID NO: 481044 - DNA, 305 bp, Homo sapiens
cggccggaattccgggaatatcgctgaaaagcaaattattctttcgaagatttcatttaaatctctgtactatgccattttgtttcagtttgtaaatgtgtcacatttaatagttcaaataggacaaagcacggccctatgactatgttttcaaaaaattaatatataaataaattcataggggtttttcatttacttttcgaaaagaaatttctttaacaggattgcacctatcaacttttcttgtacgaataaaaaagaatctttcatcaaactgataataatcgagatgacaaagaaatgag

SEQ ID NO: 481045 - DNA, 112 bp, Homo sapiens
cctttcttaatcgattctttatatcgagcaaacttgactcttcgaacaggatctcgataagtctcgttggaatgtcttttgctggttcttcctgaggctccaacactgggac

SEQ ID NO: 481046 - DNA, 271 bp, Homo sapiens
ggtcaaagctgatgagcatgtcatttgaccaaagggagattgatgggagacaacctttttattgtcatagaaccgggggaacttatgacattttaagtaacactagataatcaaacccgctctgttgggcaatatgacaaccgttggcagtttttggagactagctctgatgtacaacaccccgaggagctgctaccattgttgctacctcaagagggctccctttgggactggaccgggtgacttttagaggatcatagtaaaatatgca

SEQ ID NO: 481047 - DNA, 225 bp, Homo sapiens
atatgatctgtaggaaggggaagagaatcttgctggagggatgtctttgagagaggtaaagaggaacagactcacgtggttcagcggtcagtcctcagggcactagtggacaattcatccatactagaatgctgagcctgttgggtacaggatgccagcaggtaggtgaatgagccttccttctggtctgactcgcgagacggtcggcgtcccgaaactgagaca

SEQ ID NO: 481048 - DNA, 284 bp, Homo sapiens
acagtacaaaaaagtgatggttttaaacaagtgggaaaaagtgggaatgaaaacaggtacttgtgggatactgaatggatcctatcaaacaatacagggtcacgagcgcgcacacacacacagcacacacacacacacacacagcgcgcgctctgaggctgacacacagcacacacacacacagcgcgctctgaggcagacacacacatacacatacacacacacacacacacagcgtcgctctctctgagggcggccatattgctatctgctctctatttgag

SEQ ID NO: 481049 - DNA, 384 bp, Homo sapiens
  misc_feature (35)..(35): n is a, c, g, or t
  misc_feature (44)..(44): n is a, c, g, or t
  misc_feature (47)..(47): n is a, c, g, or t
  misc_feature (50)..(51): n is a, c, g, or t
  misc_feature (60)..(60): n is a, c, g, or t
  misc_feature (118)..(118): n is a, c, g, or t
  misc_feature (147)..(147): n is a, c, g, or t
  misc_feature (170)..(170): n is a, c, g, or t
  misc_feature (255)..(255): n is a, c, g, or t
ggcggtgggcagcgacgaccggatggttcatgctngaccccttnatnggnnacagccatntgcttgaagtccgccagaagtcgtcgggcagcgcctgatcctgcaggtgggaagcccnttgctgtcccaccagtcgccggcctcaangtagtgctggcgcatgtagccgnccagctcatgcagatccttgggcatgacttcgtccggatcgggcgccggcaaaggcatgcgcaccttccacaggtggccgccctngatcagtgcgaagcactgccccttgggcaggccgacgacgtgtgcgggttcgatcagcggaacgctggtgctgctgacgcggtcttgtgtgttcgacgtgaatgcggtggttcccgtcgggtccgagct

SEQ ID NO: 481050 - DNA, 736 bp, Homo sapiens
agctggtacggtctggaatttaaggatgcgagcccgcgggttgcgcgcgtgctgacattgatggcgtgctcctttcgtgagcgcagccgaacctctgacccggactccgttacccctgcccggcgtcgccccggaggacggctggaggcagaaacagacagaagcgttaacagcagcagctggcggcggctgctccgggcgtcgtctccgcgggagcttggaagtgcgccctggacgcacagagtcctgatcagcatctcccatgctgcagatccacagggtccgcgaacccagcgcggcggcatcacgctgcacaagaacctccttgatgtcctaagttggcttcggaatggcgcggcacagcctttaccttgagcgagcgctatcgccggagctcatacccgtgcgcctagagaagcagacaagtcaatacagtcagcctagccgtcccctctattcaatccgaggcatcctagtcacccttagacgtacctgcataggctgccgtgggcctatgccgtgccatgttcagcggggcgctgaactttacagggctgcctgtattcctacgctttgggacgtgggtgatattgttgcaacagcggaaaatgacgaccgccaagatcgggcccagcacaaggtgccaaacaagagttgcatcacacgtcaccacacagatgcttcctaacctagatttgacatctttgaaagaagtcatgctgcatccagtagccaa

SEQ ID NO: 481051 - DNA, 430 bp, Homo sapiens
agcggggaacaatcacttagggttgttttttggttttggaaacaagttctttggcccctcacagcagcttggacctcccaggctaaggtgatcctcctacctcagcctccagaagaaatgagttggtcggggctggcgtaaaaattttatgcattaatatcttggacatttaaatggcgtaatatggggatatggatatgtgcaattaaataagagcacggttatgaaggtgaaagtctaaatttcagataaaaatatcggcggggagcaggctttaaaaaacaatactaggtatgaactttgggtggggctttttaaacatattatccctttaaaggaaactacccaattagagggaataattaaggagagtagtcagaattcaaatactttcacaactctaccctttatcacaagattttgggttccc

SEQ ID NO: 481052 - DNA, 170 bp, Homo sapiens
ccgaggattccctggctgtacatagttcgatcagaacaggctttggtcgatggacctgcacttcacagtaggagacaggccatcgctttcaagtgcatgcagctcactgatttcatcctctagtttccgcacagtgcccaccagaagtatgtccgacaagcctggcagaa

SEQ ID NO: 481053 - DNA, 750 bp, Homo sapiens
  misc_feature (269)..(269): n is a, c, g, or t
  misc_feature (409)..(409): n is a, c, g, or t
  misc_feature (626)..(626): n is a, c, g, or t
  misc_feature (641)..(641): n is a, c, g, or t
  misc_feature (654)..(654): n is a, c, g, or t
  misc_feature (702)..(702): n is a, c, g, or t
  misc_feature (707)..(707): n is a, c, g, or t
tcccacagctttctttaacatctcttgtggctcctcgcgtgggtctctcctatcaccaccgtagtgtgtaggtctccagggtgtgttctccaccgctcttacggctcatttacccacccgtgtggtgtgttacgaagttgggactctgtgtctgctctattatacgccgcgagtatatccctgttctgatgagcctccgcgagcctctccgctatttatagacgatgtgaggcgccttagcattgagaggttgctaaacagcgccctcnagaacattgtcatgttgtgagacaaaacactcttcgcgattgctatttaacatgggttctcatctcccgtttgccaggagccccttcctttatccaccaatttatgtatgtcgcagggcgcgccatatcgcctactagangctctttcctctgttgtaatacgcgtctgcgcgcaccgctcatagagggttctcgcgcatttagagtctcttcgagtctagaggcgcgcccgagttttcgaccgacgtccttagaaagtagtacaacactacatagtccgcgcttccctccaacaatatctcgtggcaccccccgagtgtgttcctctattgtgtcttcaacgtgccggcagtgccntggcgcagatgggtnttctccgaaggtnttctcctattttgcgcagcgtagtcgcgcagcgctgcatcacatcatngatcncgccctcgggtgaggagttgatagcgcaagagtcagacatgtc

SEQ ID NO: 481054 - DNA, 404 bp, Homo sapiens
aatccaggacctatcaagtttcatatcttcattgaaatggtgacaaatggtgtatcagtgtgaaaaccagaaaggctaattgtttgtatacctcacagggcagtgtgtgatcatccaggagggacatgtgaaggaggttaagatttaaatgttggaaacaccaacattctaattattcttgagtttcaacaccagtcattcaagtaacagttgtaaggaattttcttttggaattttccttttcctttaggttctcccctttctttcaggatggtggggagcaagaatccctaggaatattgtaaaaatatttcaccaagaactgctaattagcagaggtcttttcttgtatcccttttgataattcccacaaatgaacttaagattcagaagcaaaaaaaaaa

SEQ ID NO: 481055 - DNA, 427 bp, Homo sapiens
cggggggaggtataaaggcagatttaaagtgccgaggcacatactttctgaaagccaacattgctgaaggttgtcagtgggagtccttttacaaataggtgggaaactagagactcaggagagaacttgggagttttgttgctgttcttcctctgtggcgcactcagccagcaaaaactggcaccaagcggagggcactcaaaatgcctttcaaaaggatcccttgcttcctttctccctcctccctggcaaaattatctttaaaaaaagacgaatgttattattgattaacagattgattgatttaatgtattaaaacattagtttgggacacacatttcagggagaatcttatcttgtgaggagcgaagcttttgaaatggtaaaatattcatttcctggacctgatctttagaaaaacaaagga

SEQ ID NO: 481056 - DNA, 109 bp, Homo sapiens
tacacgggcatatgggagtgcgagcctgtggcctcatccgcggggaccacaaagagtttcaccgtggatgtcagagtgggtatggttgtcagctgcagcggccagccta

SEQ ID NO: 481057 - DNA, 867 bp, Homo sapiens
gggtaacagagtgagactgtctcaaaaaaaaaaaaaaaagtagtaagtgggacatgctaaatggttaacagctcaattccccgggggtttaaccataagctatagtcctttggattattccactcataactgaaccctttaaaaaaacgggtggtttcattatacaatttattgtaacacattttaacggggtaaagctacacttaatttacatatgtaagggtatttaaagatcccaaattgattaacattggcaatcctaatgagtgggttttggagacaagtggctcccgcgaagtatgccccaaaatggtctggtacacaccccagagaattaagcaatctggtcaaaatgacgtatctggggcatcggaagtacatgggaagtgtgtttatcacccttacactgttggcctgcgcccaaggttcactaagctcaaccccagaaattctcattagcaccgtgctttcccaggtcttcaggaccgagtgtcgtgggtgacccacgggtgctatccccagtgttatttccacagtgactggaactccattgacacactcgttctccttaacgggattcagctttacacagatcttttcacatctgtggcccccgaaaatcttattcacaaccgtcaatccctggttgggctaaggggtcgatcactccatctacttacacttcgccattgggccctgatttggctacaggcactgggactgctggttcaactaacatttccttgtcgcccattggccttcctgctggacctgtaaaccccgggtttgacggggcggttccatcaatgtggattcctccaccatttgtggcacactctgcgcttgcccattcggacagtctaggtg

SEQ ID NO: 481058 - DNA, 310 bp, Homo sapiens
tccgttctatatagaacccagaattcatcattttacttttattagacactccacatcttaacttcagatttgttttttttttttgaaatggagtctcactgtcgcccaggctgaagtgaagtgttgctatctcgggtcactgccacctccacctcctgggttcaagcaattctcctgcctcagcctcccaagtagctggaactacaggcacccaccgccacgccgtggctgattttggtatttttagtagagacaggccttcaccatattggccaggctgatctttttttttttttttttttttttttat

SEQ ID NO: 481059 - DNA, 143 bp, Homo sapiens
tcagccacggcggcggcggcggtagcgtcggcagcggtggcgacgactccgccgcatcctcggcgcccgacacccgggccggcccggcggcggcggcggcggcgcgtctccacgagtccgtcttgctgctgctgctgcggccg

SEQ ID NO: 481060 - DNA, 501 bp, Homo sapiens
  misc_feature (56)..(56): n is a, c, g, or t
  misc_feature (321)..(321): n is a, c, g, or t
  misc_feature (480)..(480): n is a, c, g, or t
gtaaaactgtgtcttggccgggcgcagtggctcatgcctataatcccagcactttnggaggccgaggcaggcggatcacaaggtcaggagttcaagaccagtctggccaatatggtgaaacctgtctctactaaaaatacaaaaattagctgggtgtggtggtgggcgcctgtggtcccagctactcgggaggctgaggcgggagtatgacttggacctgggaggcggaggttgcagtgagctggagtgcagtgacggatcatagctcactgctgccttgagctcctgagctgaaggaatcctcccgcctcagcctgcgangtagctgggactgcaggcatgtgccactgcatccagctaattgttaagattttttgtagcgatgaggtctcactatgttgcccagactggtcttgatctcctggcctcaagcaagtcttcccgctttgatctctgaaagtgctgggaattacagatgtnagccaccatgcccagctaaat

SEQ ID NO: 481061 - DNA, 125 bp, Homo sapiens
taaacggaagataaacatggctactggtctagaggtaaaaggacatctttggaagagaaagtagaggaagaggggaaggtagccagggttccagatatgggggacggtggggggcgatgatggga

SEQ ID NO: 481062 - DNA, 120 bp, Homo sapiens
gagcttatcacgcgcactgattgcatcaacgctgcacatacattcaccaacatcccccagctgcaccccctctccctagactgcagcagccttcccctcgcaggccccaaaagacctccc

SEQ ID NO: 481063 - DNA, 670 bp, Homo sapiens
ggagagagagaactaagtctcgagctattgtatatttctctttgggtaaaaacttttaataaaaaaaaaattttttaaaaagtaccagtgctctgaggctcagggtgtaggatcgggggcacacctggtcccgggaggccccttgtgcacggttggtgcgcccagggccaaaggttgctcgctctgtgggggacgcccggccggggaacaggcggcctgtgtcacggcccggggctcccggggggcctccggcggcagggacaatggcaaggccgctaaccatcttgaggaagaccatcccggccaggacggtgtacccagcaccaggaagaggacctttgagcaaacggtcactcttctcctcaagctccttggccaggatctccaggaaggtgatgaagaggaaggtgccgcccgccagtgcccctgaacgtcagcacggacgccacgtgtgcccggtagcgccctgggcgctctatatttgcccaggcccaaggcctgatgcccagggggaatcatggggcttacggtgaccgcagaggtttggccgcgtcccgcaggggtcatgtcacactccgggccatgcttgatcgcccagggcccacggccaccagtgtcttcgtggacggccacccccaaataaagggttcaccactttctcccattcgtc

SEQ ID NO: 481064 - DNA, 361 bp, Homo sapiens
tataccttcccaaatcatataaaattggcacatccctatctcccttcgctggctctcttttcggactcagcctgactgcacccaggtgaaataaacatgccatgttgctcacacaaagcctgatatggcggtctcttcacacggacgcgcatgaaataaataaagaaaatgacagaaaaacaggacaggcacagagggtcacgcactgtaatcccagacactagggtttacgagacagatggatcacttgaggtcaggagtctgagaccggacatggaccagcatggtgaacacccgtctctactacaaatataaaactaagctgggcgtgatggcatgtgccataaacccagataaaagg

SEQ ID NO: 481065 - DNA, 714 bp, Homo sapiens
atgtcggtggttagtcagctggggatttgtgtagggactgctgataggaagatgtcttcagagaaatgctacaattgggtccgccctgtcccccaacttcaaagccacagctgttatgccagatggtcagttgaaatgatatcagcctgtctgactacaaaggaaaatatgtgtgttctatctttctaccctacttgactgtcacctttgtgtgctcccagcggtagaatcatggcttgtcagtggatagggcgagaagtaatgtacagaacatctacaagcgtgccaagtgatgggtgtcatgtctagtgggacttctacaccttctcgtcatactagacatggagtcatagtactacctaagtaaactacacggaggaggtgggacccatgaacattccttcggtgatcagacccgaagcgcaccatggctcaggagtatatggggtcttaccaggctgatgaaggcatctcgttcagggcctcttaatcattgatgatgaggcgtattcttcggcagatcactgtagatgacgctccctgtgggacgtctgtggatgggacttagagactagttcaggccttccagttcacggacaaacatgtggaagtgtgccagtgctggaagctggcagtgatacgtcaagctgatgtcaaaagagcgggaatattctcaagtcgaagtggcggctgggtgtaagtgcaggtgcggtg

SEQ ID NO: 481066 - DNA, 150 bp, Homo sapiens
aagaaccgagcgccaagcaaaatggacccacctcctggaatgaccttaaatgagaagagtgtccaaaatccaattacccagtggatggtggacatggaaggtccaccaggtcccatatatgaaggggaaaaatttcaacttctatttaaa

SEQ ID NO: 481067 - DNA, 188 bp, Homo sapiens
  misc_feature (101)..(101): n is a, c, g, or t
gtgggcatgttcactttcagatgccaaagatgtcatatatacccccacaagtgtggtacagcagcagcaaattttgggaccgatctgctatgtaacgttgncgccaagggttcattttatactggagtcacagaaatgctgagatgtaccaccttctggaacaatggaatgtcgggacgttcacggca

SEQ ID NO: 481068 - DNA, 358 bp, Homo sapiens
aattggttggtcttcaagtatatgtatgtcatagagcaaatacacttactgtcttcctcctgcactgtcactatcattcattccccgtaaaatgcaccttgcttgctcggcttttgcagtactggaagttgaactaaggaccacgcataccaggcaaatgctctaccattgagctataatccctacctcaacagtgtcttttaattggacattaagctgtggatggataaacaaatgcactatttatccacacaacatagtagattcagccactaaaactctcacataacaggcaaacacacctaccaacaaagcaatgccacaacagtttaacaggggtagaaaggcgggtcgacac

SEQ ID NO: 481069 - DNA, 136 bp, Homo sapiens
  misc_feature (100)..(100): n is a, c, g, or t
cgactctaaggatccccacattgcggacactcaagcagtgcttcgagctataagtaatgtaacatttctggcagataattggtgagcttgtctaaagganctgggatcgatagaaaggaatgtcaggtaaaataag

SEQ ID NO: 481070 - DNA, 147 bp, Homo sapiens
tggcagactagcatttgagtttcataaatgccactagcggaccaatgtagcgcacccattatgatgacatcatggtcgctgtagttcagacttacggttacaaacaccttacaaagatagcagcaccattgagagcccagagaggcg

SEQ ID NO: 481071 - DNA, 170 bp, Homo sapiens
aaggagcttacctgttatcccacccaacaggacattttaccccagcctgggacaagagcaaactccatctaaaagtaaaaataaaaaatgccatttaatagccagagagtgtaaactggtgagctcttgcttgcgggagataaggagggagcagggcattcgcagtggac

SEQ ID NO: 481072 - DNA, 134 bp, Homo sapiens
  misc_feature (15)..(15): n is a, c, g, or t
  misc_feature (22)..(22): n is a, c, g, or t
  misc_feature (60)..(60): n is a, c, g, or t
cctgactcctcaggntacttcntgtctcttcactgcactactccccccattttatgccanggtagcatcaagtatctctcccgtgtggcacttcacatggcaagatttggtatttacttatgtattttttgtag

SEQ ID NO: 481073 - DNA, 987 bp, Homo sapiens
  misc_feature (197)..(197): n is a, c, g, or t
  misc_feature (364)..(364): n is a, c, g, or t
tcgagtctttgttttgtttgttaaccctttccttatgagccatgccgggtgtggggtcgacagggagggtaataaggactggggggtggattggtagatatggggctggttaatggtcagttcagggtttctaatctgagcgcaggcttatgcaggagtgagaagtggttttaagtggttagcattagtacctaacnattagtttcgttcatagataggggtgaatagagtgggtccaattgggggtggtggaggagatcagtatactagttgtgggggagtttatgtaggtaggtggggtgttgagcggtgaacgtctttcttaactgggggggcgtgcgtgttaagggccctagcatagtgngggtggtcaagagtgttgtatataacctcgtctcgtagcgagaggggtattgtatagcgcatagtgtggtccaagagagtcgggtgttccctcgttggggagcataacagtcttgaaaactttctacagagggggactgttaggaggggcttcgtggggggccaagagtgttagaagcgttgcaccctaaggaatgccatatcggggaacgaaccaagctatacaccaggggctcggaagagtgtctaggtgcggccctcgacactataaaagactctcccccagcgaattgatagcgcgaagataaaacgggggggttgcgccattgcaagacatgggtcaccttaagggtgcagcccgccgtacttgggtagacagggggtcccaaagcgtggaggggccccccctatggaagaaggacacttgactacaggaaaaatcccatagattggcacaaggggcgaagcggggacaagcccgttggccaaaaacaagcgcagcgagaaaacgaacacaacgtgcacccttggaggacaaaacccatggggccagggacaaaacaaacagccaaaaccaagtggggaacggcaagggaacaagagccgcacataaacgcaaccaca

SEQ ID NO: 481074 - DNA, 224 bp, Homo sapiens
ctgatctagaggatctggtgagaagctggagcaaagaaggactttctgaatacatggtggagtttctggaagaagaaggcggagaggctggagactatttctcttgggaaatggatgaggaagggaaccggatgggattacccctttctggatggacaactatcgtgcccccgttgggaagggactgccttatcttcagttcttcgacctagccactggaggtg

SEQ ID NO: 481075 - DNA, 323 bp, Homo sapiens
  misc_feature (4)..(4): n is a, c, g, or t
ccantgttgggcacactggtctcaaactcccaacctcaggtgattcacccgcctggcctcccaaagagctgggaccacaggcgtgagccaccgtgcccggccatgcttatgtttttaacaatacacttctgaactatcaaaaagaatataaatcaaaatcacatgatcatctcaatagacgcagaaaaagcatttgacaaaatccagcatccctttgaaagtaaaactctcagcttggccgggcacatggtggctcatgcctgtaatcccagcactttgggaggctaagtcaggcagatcacctgaggtcaggagttcaagac

SEQ ID NO: 481076 - DNA, 855 bp, Homo sapiens
  misc_feature (756)..(756): n is a, c, g, or t
agcaggctgtcggccggaattttttggatggctccctcgtgagctgtgcctgtgccatgctgccgccgggatgccgtgggccgtgggccggcggtgggcgtgggccgcgctgctcctggctgtcgcagcggtgctgacccaggtcgtctggctctggctgggtacgcagagcttcgtcttccatgcgcgaagatgataggcgcagttggcgcggcagtacgcttgggcgtgtgaccacttagctgtgccttctctcgtctgatctgtggagctgcggcggctgcacccaggccacgtgctgcccgacgaggagctgcgtgggtgtcgtgaatgcgggtggctggatgggcgccatgtgccttctgcacgcctcgctgtccgagtatgtgcttgctcttcggcaccgccttgggctcccgcggccactcgggtcgctactgtgctgaagatctcggataccatcatctctggcaccttccaccatgtggagagagggcaccatcaaaagtgaggtcttctacccaggcgacgacggtacgtaccacgtggcctggtgaggcaaccagctgtggagtgggggccaaacacaatggactcgtggagtacgggcggggcgtcagtcccatccaccctggctttcgctgctgggcctgatcattgtcttcagcgacccaggacttccgtcaccctcttctatactcttcgctccgtatgctcggggcctccggcttgagcgtcacatcgtacctctttggncaggacccttgacagccaggcctgaaggaagactgcggatgacaggagcgggagggccgccatatcattgctggagccctgttaccgaccgggcttcac

SEQ ID NO: 481077 - DNA, 1325 bp, Homo sapiens
  misc_feature (214)..(214): n is a, c, g, or t
  misc_feature (252)..(252): n is a, c, g, or t
  misc_feature (258)..(258): n is a, c, g, or t
  misc_feature (683)..(683): n is a, c, g, or t
  misc_feature (826)..(826): n is a, c, g, or t
gcggaggcgcaccgtggagctgctctgggcgcggccggtgtgtggggcttggtcgagtggcactccaactagccaacgagacatcctgcttgcgatgctgtggcgtaccattagcaagggtcctcactgctggacaccctggatggtgggctgacgcccggatgacagcactggagtgggatgctgggcaacagcggtactgttgcatgcactnctgacaatgtggcttacaacgtactcggacggtgcagnccatgntgtgcatgcagacacatcggtgtgcatacgggactgcaacgtaatgggctgagcgtgttgtatatgaaggccccgtgatctggccacgcatgtgtctgacacgtgacgggccaacctgcacaagaagatgctgcacgacgttgacacccgggggtgggatggttaacccggggggagaaacccagttgagatgccgggttctcttcaaagggaacagggtgggtcgtcgcatgtggtggatagcagcgacaggactaggaatttgctccatcgtgggcgatcccagcgaagggagcgcctcttgcgcatttggacctcccatgaattactgatagggaagaggaagagatatggatagtggggggccggtcctcgtgagagcacgtcccctggtattaacactccccatattcgataggtgcacntggacgtggaacgagtctcgcacacctaattgggcgatctataaacaaagtggggcgattgtgggcacaacagggggagctgaagtgtggtaacaacacccaattcccggaggttgagcctataaccgacaagaaaaattccnaaagaaccagacgcgtaaggtaacgcacaaacgggacacctctttaaagcaacgatttggagaaaggcgcgtataaaccactttttccagagattatgggcgacacaggtttgtcccactagaaggtaccacctctccagacagttctcaccacctagggcacaccgcgaacaacatattggggcaccccttaacgaggggcggcgagataccagagttgggcacacaccaaatatggacccaagcccgcaggaggcccatggggacgaacctggtttgagcatcagaaaggacaaccatttgcacaagggaacgctggctttgtgtttataccccccgcgaagtgtttttccgattaatccaaaaatagcggcctagtgggactttggaaacctttcagtttccaaaaaggggggggccgccgtatggaaagttccctgtacaggacgaccgcaaatttcattctcgagattgtgaagctcacgggtattgacgccca

SEQ ID NO: 481078 - DNA, 300 bp, Homo sapiens
cggccgccacaagtttctcgcattgttctctgccacaatctgtgcagtttgaatttaagttgtcggtcatgaaggaaaagccatagtttttccaagtacctgacagagtatactttcatctagaacgtccccttagaggatcgagcttcgaggagcaccggggcctgacgagaacaaagattgtgaggttgtgatgatgatcggcttgtcctcgagcctggtattgactacctgtgttactaccacatgcagcagaatatcctgggactgctcacattcttggcacaaattctattatgc

SEQ ID NO: 481079 - DNA, 201 bp, Homo sapiens
aggatccaagtgagtcgtgctggtgctgctgcggatgctgttgctgcgtctgctgctgctaaagttccagcaaaaaagatcaccgccgcgagataagaggctccagcccagaaggttcctgcccagaaagccacaggccagagaagcagcgcattgctctaaatagctcacgtaagggtcaaagaagctccagcaccagaa

SEQ ID NO: 481080 - DNA, 354 bp, Homo sapiens
  misc_feature (348)..(348): n is a, c, g, or t
gcctgcaggcgagggcacagcagctgcgcagggaggagcggactggggagcagaggctggaaggagatccgcaaaaagggggaggagtttcccctggaccgtggcacacgttaagaaaaagagggtttaaagaagggcatatgggtaatttcccacccccccgagaggggacggggggggttctcagggggggttggggggcagcagacacacaagcccttgggggaaatatgacgagaaacagatcaagcactgtggtgagtggctcttgtggtttatgggcaaacaaggtcgaggcaccccttttccctccggcccctccaaccacttccccaatatctccaacanggcatt

SEQ ID NO: 481081 - DNA, 349 bp, Homo sapiens
tgagatcatgccactgcactccagcctgggtgacaagagcaagactccatctaaaaaacaaacaaagaaaaaaattatccaggcttggtggtgcatgcctgtaataccagctactcaggaggctgaggcacgagaatcacttgaacctgggaggcagaagttacagtgagccgagatcatgccactgcactccagcctgggacacagagtaagactctgtctcaaaaaagacccaaaaaaaactggggagaaccaggggtctgcttcatagggtctttctagtatgtagatacaagcccttgcactcgcactcgtactcttctagcagctgacagggtaagctccagac

SEQ ID NO: 481082 - DNA, 447 bp, Homo sapiens
gatcgtatcagctcatggtgtattcttgagtatcactaagttatctgcgagaccaggacactacagtaatgaagaggccgcaggtggagggctgaccagctgctacatccgccctaggtagcttgcttcatctgtaaagatgggtggggcaggatttcccaccgtcatggggtcctggcaagtcctgcagtatcccacgagtggcaccagcgctgcttctgggtgcagacgcagtttgtgccccctagaggtaccactgtatcctctttccctagctatcaggatattgcgtctcttcctccggttgtttgccgttttcacgctcatacgaagtaatatgctgttccccatatttgggcgtctctcatggagctcaaggaatgtacttggctcgagtagaacatgtccattgctggcaaaaatggcaacaactatggattccatggt

SEQ ID NO: 481083 - DNA, 443 bp, Homo sapiens
ccagcataagctgtgaatatgtattatcagatatatacattgctatacctataatccatacagatatgcctgttctaaataacatacatattaacaatatctatcaagaaaaccctcaagacagcttctagttaaaacctttgttgctgcactctcagactatatttataaaaatctgctaaggccaaatccatacttgcagaataattcatcacattttatttttaactgaaaagtaacctttgacgcatttcagcagcatacattgacaatctatggtatatatgtatggatgtatattattgtatgtgtatatatgtatgtgacgaggacaggactgaatgttcacacactcatgttgcgtactcaactaaattgaagaatggttctgacgtcggatgcttgctggaagatctactgactgtagtcatcaccagcacttg

SEQ ID NO: 481084 - DNA, 868 bp, Homo sapiens
ggtgtgtcaagaccaacaggatttactaaggttgcctcacccactgggggcccccatgggccttttcttttggtgtctcaccgtgcccccagcggtgtgtcacgtgtccaacggccgcgaaatggttgtaccaatgagtcagacaccttgtgagaatgtgcgagatgattagctgggacgcgcgatcagcccgccatttgaccagggatccataggattgcaaggggactcggtgttcggcagacacggctcctgcgaaattcttcattcgatgctggatgttgatgattggccatagcagctgttaggcttactccataagcgtgatatccccgcaactagtgaataggaacgctgcccctatggtataagggtcaccaagccttgcaccctgtccccagtcagaagaggatctggctgctctgtttgaagcttaaatgaagactgtattaattgtcattttaactgaaagaattaccgctggccattgtagtgctgagagcaagagctgatctagctagggctttgtgcttttcatctttgcgcataacttacctgttaccagtataggtgggatatacaattgatctgtgcagggaattcccgaaagctcagagtccagttcgttccagaaaacaggctggacaaatgaccactatgtcagaccccgaggctcgacttcaggggtgcagtgttccgtgtcccaaaccccatcacagaatagctctgcctctgtttcatgtagcaaatgagcaaacactacagtatctatcaaaagtgtaaatgtatatttcatatgcctagtaattcacttcatgtgctaaaaagtttatctgatagaaacactataaaccgtagagtacagaag

SEQ ID NO: 481085 - DNA, 1275 bp, Homo sapiens
  misc_feature (985)..(985): n is a, c, g, or t
ttgtatagtatgatgatattgtttttagtgggaaggaagatgatggtgtgtataaagtaattgctgtgtgttttgtaaataaaaaagatgttgttggttgtacaaaaaatggttgttgttttctaagaatattgtgttgttgttttttttgtactaatttagatggaaaacatattgttggggggatttatttattacgaataatatatgtggtgggggacaaagagggggttactctctattttgggatgggtctctcatttgcccgattttgtttaatagctccctttgtttagtccgttgggcatatcacactgagtccacagatgtgtggggctgcacaggaagagccacacacagatgtgtctccctataaggttttttggtggggaggattttttactgtttttggtgtcatcacaaaacacaatagtttgtgggccatgtatagagagaggttgtggcgcgaccactactaggtccgcctcatcgataagtgtctcctaaacacactgtggggcgacccatttataatgtaggtgtgggtaaacacacttgttatatgtctttggcgcgaaaacacggggccgcaccactaccacacacccctttctataacccagggagccatcctcagttcgcaaagatagatattggccattttgtttgtctactcaaaaagtatctccaaaatttatggtgtgtctgagtctctgttgtggggaattctgtggacacaatttggtccgcccacattctttccgctcaagagaacacttataggatggtcacaatgtcgcgctgttgtgttgagaaaagtgagattttttttggaatgtgtgtgcgcattgcgccatcccacacaccgggccacaaaatatcccactctggggaaatgtggcagcatctctctctgtccaacgagcacacacgggcaccacgtggacaccaacacacgtctctcgcctggaaaatataaaatctntgtgagtcacactacacacacaccacggtctggaaccactttttgagacatatataggtggaaacactgtggcacatatgttcacacacacaacacacaacgttggcgcaaacaactacgttctcacactctcacactttagaattctgggggggtcaaaaaagaccaacacacacaacagggagagtaatttccaccacagacacacacacacacccagattgtctccacacacaccggacacactttgtttggaatttaaagtttgtgaaagataaatgtggttttta

SEQ ID NO: 481086 - DNA, 795 bp, Homo sapiens
  misc_feature (485)..(485): n is a, c, g, or t
  misc_feature (605)..(605): n is a, c, g, or t
cgggtggggtggttcaggcctgtaattacagcgcctcgtttttcaaaatcctaagcagtacagccgtgtgctcactttgatccacagtagaatagcccatcctacacgacgccgtttaatccattctctgtaactcaaaaagatgactgacagggagaccaacttgccgacgtaattaaaaatggttattggggggagtgacccgcttaatagtcccgaacgccgcttcgtggagcgacgcaagacttttatcttagttggagccagtttatgaccagaatacccactaacaccatgcaaaggaacctgttcttcatatgaaacataactacagtagatacgtctatatcgtaaggtgccgcgacttgaaacaggtctttcataaaagtaccagtgtatggcaattcgaacaaaaacaactttgatccttgcaaatgaaaggggagtcctgcttaactcccctacatatgacccattgccgagancacgcaaaatgctctcatcctacaaattgcaatactgcctcctaaaaatacacggtttattgacacgcaagcctttccaaaagagccccctcatcttctaccggtgactctctccacccngggcatttctaaaacaaccgttcctaggttatttttaataggtagtggatccccaaccactacccatcacgacaagtgaaacacgttcctaacccaaagctatgattctaaaagtgacttactttgcttttctcaacactgtcacaagcctatttattctaggtggagcttcacggcttggggcctgaat

SEQ ID NO: 481087 - DNA, 677 bp, Homo sapiens
  misc_feature (43)..(43): n is a, c, g, or t
  misc_feature (72)..(72): n is a, c, g, or t
  misc_feature (97)..(97): n is a, c, g, or t
  misc_feature (146)..(146): n is a, c, g, or t
  misc_feature (168)..(168): n is a, c, g, or t
  misc_feature (177)..(177): n is a, c, g, or t
  misc_feature (181)..(181): n is a, c, g, or t
  misc_feature (184)..(184): n is a, c, g, or t
  misc_feature (289)..(289): n is a, c, g, or t
  misc_feature (293)..(294): n is a, c, g, or t
  misc_feature (302)..(302): n is a, c, g, or t
  misc_feature (367)..(367): n is a, c, g, or t
  misc_feature (409)..(409): n is a, c, g, or t
  misc_feature (426)..(426): n is a, c, g, or t
  misc_feature (428)..(428): n is a, c, g, or t
  misc_feature (431)..(431): n is a, c, g, or t
  misc_feature (437)..(437): n is a, c, g, or t
  misc_feature (442)..(442): n is a, c, g, or t
  misc_feature (643)..(643): n is a, c, g, or t
atcagctagatgtgctcactgtttgctccgttttttttttgcnagggccgggtgactgggagtgcagttgtnaggcattttaataaactggacagcnatttgtttctgcacgacaaggcatctttacacaggagcgatcgggaganaacaggaaacagccaagcactntgcactgcnacangcnaccttaacagctaaccagcattactcaactgctacacaactgcgcctagtgcacaaaaatacataagagaagagattagaattgtgtttgttaaacattcctttnaaannatcaagtnttttcacctgagaagtctttatacaaatttgggttcagattaccatttaggtctgaaggttattnagatatttgggtttgaccatcttttgttggtttttgattttntggtttgtgggcgttgngngtnattctnttgtnagctttaggctgtgtgtaatggctgcacacgttttccttaaaagtcaggaggccacaaattaggttaccaatctgtttaatttcaaacaaaaaaagtcagcactatataacaaaatgaaattttacctcaaatatccaaatccaataatgaaatctgaagtcgttcacctcactaaattacaagaaatttgaattacagcnacaaaatggcacataacatgcagtttgccaactg

SEQ ID NO: 481088 - DNA, 131 bp, Homo sapiens
aggacccccgcagtctgctcccatcagtcttctcccatcaaccagcgtcatgttgacacgtcgtgggactgctgtttttgataaccaacaagaggtcaatgtataaaatcccctgatgggacgcaggatgg

SEQ ID NO: 481089 - DNA, 335 bp, Homo sapiens
  misc_feature (281)..(281): n is a, c, g, or t
  misc_feature (289)..(289): n is a, c, g, or t
  misc_feature (325)..(325): n is a, c, g, or t
gcacgaggctggtttaatttggcactgtgcagggaatgcttgtaacatatgcagattttgtaaactaaggtagttaaagtggaactgctatatttctctgttgtccctctaagagctgagcaggacatctgtagacacagagaggagcaccccattgccaccaattactagcggaagcagtaaggtatagggatagatcccacagaagagctttggatggttttctggaagttttgtttcagaaaatactctttcatttagctttcatgataggcagtttntcttgtgnggtgtgtgtgtgtgtgtgtgtgtgttttcttttagnagaaacttga

SEQ ID NO: 481090 - DNA, 469 bp, Homo sapiens
tggggcccataaattttccggttggtcagggaaatgtaaaaggggaatattaatactttccagttaagtcctgctaacgtgctcagagaattatttcaaaaaacaattaaaaagagtggactgggacgcagtttaccctgttgggtgaatctagaccacggtggatgtgccacatgtgaaaacaacaaacaaccaccaaaacaaaaacgggcggcccgcccgcctctaaagcaactcctcccgagaggggcgcaccacatgtcacgcacctaccccaaacctttcttgtgcgacaccaagcggcggccccccaataacgacggacgacgctgctctctataatacaacaccaacgacgcgagtcaggagcgccagcctcatcactaacaccacgccgtcgctgcacggcgtacgaaccaacgcggcgctaccccatcgatcgcgcaacctatcggagcgacaagaaaac

SEQ ID NO: 481091 - DNA, 575 bp, Homo sapiens
gtggacattttaagaaagtgtaggcttgtcgcaaaggagtatttagatgaaaataacccagaagaatcaattggtgatcttcaattcaatttgaatatctcagaaatagaaaataatatagtatcacttcttgaacgctcagacaggaaagttgtcatattaatggataagctagatgaggcgtatgaaccggataatataggaattggaatcattgcaggtctagcatatgcatctattgaattaaatcaaaaagcaaaatgcattcgtccaataatttttttaagggataatatatttaggtcgctatcaaaggaagatcctgattactcgagaaatatagagggtcaagtcataaggttgcattgggactgggcacaactcctaatgctgtcagctaaaagaatgaaagtagcatttaagctagatattgagaaagatcaacgagtttgggatagatgcacagcggatgatccttaaaagggagggaatggttttaagcgatgtttgcaatttaccctttaccggcccagggatttactatcattgttgaatgaagcttggcacgagggcgg

SEQ ID NO: 481092 - DNA, 1196 bp, Homo sapiens
  misc_feature (245)..(245): n is a, c, g, or t
cagttattgatgtcgatggatgatcattagaaaagagttgctgcgttcgcaaagatggtgtcgcgacgagatttgcatggcctctgcataaactgcacgagaagccaaggcagtcgctaggccattgggtgcagagatgctttgcgcgcctaagggaatgagctcctggtgctctacaggctcgcggtgccgcagcggtcccacgagtgcattccatggagagtatggagggcttggtcgatganactgctaggatcgtgacggatagacgtcggacgaggtgccggtcattcggacacgtgaagaacgaaagataggaaggaggttgggaacagcgtgatgaccgattgtgtagtagaaacggcaatccgatggatgcgctatgtgggtgcaatctagatggtgcgtacggtggggtaaagccctctcgaaaggcactccgtaaccgtgtccagagatctcggtcattatcgccttgtaggctaccaatctatggtggcactgacaatgcacaaggcaagtgcggtgatccttagtcaatgaaacttttggctagtcaaccgtcctataccgaagggaaatttgcgggtatgaaacacacaccgtatcatagcacatagaccaccttgggcagagaattcgatggaagattcggcgatatcaaatgcgatgggaatgagattgagacgagtagcttccaagtcgagggattagaattgaaaggctaccattcggcgaaggtttaaatttccggtgggctcgagtattgcttcgaacattgcctactgaaatgcttgcgcctaggcgcttcgccgtctgtgcgggcccaaataagaccgaaaaggggtgcgctaaggctgtggcatttaggaatgtaattcccgaagtgcttgaccccgggggaagggcactccttaggaagggctcgggggaacatactttgagtatctggggagccgggggtgaaggaacgtgcttatgaagctagggcatggtgtaacgttgtggatagggcacacgtggttgaaggggctaggggactggaaggaaattcattgtgataagattgttacgaaggaggtttgacccgatagggtgggacagatttgcgtagggataaaagagggttatgagaataggttatgggaacaaggcaagggaaaggataggcccaggattagaagagagcaattcgg

SEQ ID NO: 481093 - DNA, 485 bp, Homo sapiens
tgtcagcgatctggaatgtgtggtgtatgttctgtaatgaaggaatgacagtcgacagtgatgattcagatgccattattttaatggcttcattgctctggtaccatgatagaaggtaagattttttatattaacttactaacaaacaaagttatcaaatggtaactttggcacaactaatctactaataacaaccttaggatagtgaatgactaaaaggtcattagtctaacctactaacaaacaagtaagacagtaaatagcaagaagtaaaaaggaaaaattttactttctaacaagtaaacacatgaagattgaagataaaagaaaaaaaaaaaaacccctaatgtggcattaatttatgggaatttggccaaactttttcccatttttttattaaaggaagaaaaaacggtcatataacaccaacaaaatttccggggataccgaggttcaaattccgaaaatcagtggtcattggttgg

SEQ ID NO: 481094 - DNA, 1496 bp, Homo sapiens
ggggagagaacaaaacagaaactcttggaagcaggaaaggtgcatgactcaaagagggaaattcctgtgccataaaaggattgctggtgtataaaatgctctatatatgccaattaccaatttcctttcatgttcagcatttctactccttccaagaagagcagcaaagctgaagtagcagcaacagcaccagcagcaacagcaaaaaacaaacatgagtgtgaagggcatggctatagccttggctgtgatattgtgtgctacagttgttcaaggcttccccatgttcaaaagaggacgctgtctttgcataggccctggggtaaaagcagtgaaagtggcagatattgagaaagcctccataatgtacccaagtaacaactgtgacaaaatagaagtgattattaccctgaaagaaaataaaggacaacgatgcctaaatcccaaatcgaagcaagcaaggcttataatcaaaaaagttgaaagaaagaatttttaaaaatatcaaaacatatgaagtcctggaaaagggcatctgaaaaacctagaacaagtttaactgtgactactgaaatgacaagaattctacagtaggaaactgagacttttctatggttttgtgactttcaacttttgtacagttatgtgaaggatgaaaggtgggtgaaaggaccaaaaacagaaatacagtcttcctgaatgaatgacaatcagaattccactgcccaaaggagtccaacaattaaatggatttctaggaaaagctaccttaagaaaggctggttaccatcggagtttacaaagtgctttcacgttcttacttgttgtattatacattcatgcatttctaggctagagaaccttctagatttgatgcttacaactattctgttgtgactatgagaacatttctgtctctagaagttatctgtctgtattgatctttatgctatattactatctgtggttacagtggagacattgacattattactggagtcaagcccttataagtcaaaagcatctatgtgtcgtaaagcattcctcaaacattttttcatgcaaatacacacttctttccccaaatatcatgtagcacatcaatatgtagggaaacattcttatgcatcatttggtttgttttataaccaattcattaaatgtaattcataaaatgtactatgaaaaaaattatacgctatgggatactggcaacagtgcacatatttcataaccaaattagcagcaccggtcttaatttgatgtttttcaacttttattcattgagatgttttgaagcaattaggatatgtgtgtttactgtactttttgttttgatccgtttgtataaatgatagcaatatcttggacacatttgaaatacaaaatgtttttgtctaccaaagaaaaatgttgaaaaataagcaaatgtatacctagcaatcacttttactttttgtaattctgtctcttagaaaaatacataatctaatcaa

SEQ ID NO: 481095 - DNA, 112 bp, Homo sapiens
gaaattgaaggatcatcatagagaaactgaactatccccaagaaaagatcattagacactgatacatggaggttctcaggtaaatatataagcctggatgccaccttgaatt

SEQ ID NO: 481096 - DNA, 478 bp, Homo sapiens
agaaggcacaagggtagggttctgtgcagcccgatgaggacgctgctgaccatcttgactgtgggatccctggctgctcgcgccgctgaggacccctcggatctgctccagcacgtgaaattccagtccagcaacttggaaaaaaatcttgacgtgggacagcgggccggagggcaaccccagacacggtctacagcatcgagtataagaggtacggagagagggactgggtggcaaagaagggctgtcagcggatcacccggaagtcctgcaacctgacggtggagacgggcaacctcacggagctctactatgccagggtcaccgctgtcagtgcgggaggccggtcagccaccaagatgactgacaggttcagcccttctgcagcacactaccctcaagccacctgatgtgacctgtatctccaaagtgagatcgattcagatgatggttcatcctacccccacgcccatccgtg

SEQ ID NO: 481097 - DNA, 1614 bp, Homo sapiens
ggggagagaacaaaacagaaactcttggaagcaggaaaggtgcatgactcaaagagggaaattcctgtgccataaaaggattgctggtgtataaaatgctctatatatgccaattaccaatttcctttcatgttcagcatttctactccttccaagaagagcagcaaagctgaagtagcagcaacagcaccagcagcaacagcaaaaaacaaacatgagtgtgaagggcatggctatagccttggctgtgatattgtgtgctacagttgttcaaggcttccccatgttcaaaagaggacgctgtctttgcataggccctggggtaaaagcagtgaaagtggcagatattgagaaagcctccataatgtacccaagtaacaactgtgacaaaatagaagtgattattaccctgaaagaaaataaaggacaacgatgcctaaatcccaaatcgaagcaagcaaggcttataatcaaaaaagttgaaagaaagaatttttaaaaatatcaaaacatatgaagtcctggaaaagggcatctgaaaaacctagaacaagtttaactgtgactactgaaatgacaagaattctacagtaggaaactgagacttttctatggttttgtgactttcaacttttgtacagttatgtgaaggatgaaaggtgggtgaaaggaccaaaaacagaaatacagtcttcctgaatgaatgacaatcagaattccactgcccaaaggagtccaacaattaaatggatttctaggaaaagctaccttaagaaaggctggttaccatcggagtttacaaagtgctttcacgttcttacttgttgtattatacattcatgcatttctaggctagagaaccttctagatttgatgcttacaactattctgttgtgactatgagaacatttctgtctctagaagttatctgtctgtattgatctttatgctatattactatctgtggttacagtggagacattgacattattactggagtcaagcccttataagtcaaaagcatctatgtgtcgtaaagcattcctcaaacattttttcatgcaaatacacacttctttccccaaatatcatgtagcacatcaatatgtagggaaacattcttatgcatcatttggtttgttttataaccaattcattaaatgtaattcataaaatgtactatgaaaaaaattatacgctatgggatactggcaacagtgcacatatttcataaccaaattagcagcaccggtcttaatttgatgtttttcaacttttattcattgagatgttttgaagcaattaggatatgtgtgtttactgtactttttgttttgatccgtttgtataaatgatagcaatatcttggacacatttgaaatacaaaatgtttttgtctaccaaagaaaaatgttgaaaaataagcaaatgtatacctagcaatcacttttactttttgtaattctgtctcttagaaaaatacataatctaatcaatttctttgttcatgcctatatactgtaaaatttaggtatactcaagactagtttaaagaatcaaagtcatttttttctctaataaactaccacaacctttcttttttaaaaaaaaaaa

SEQ ID NO: 481098 - DNA, 187 bp, Homo sapiens
actcactgtgtcccctcattcactctctgcgtgtcccctcactgccttctgatgtcccctcaccaccttctgatgtcccctccttcctctctggtgtcccctcaccgccttctgatgtcccctcaccaccttctgatgtctcctcattcctctctggtgtcccctcaccgccttctgatgtccccat

SEQ ID NO: 481099 - DNA, 1487 bp, Homo sapiens
gaattcggccaaagaggcctacttccaagaagagcagcaaagctgaagtagcagcaacagcaccagcagcaacagcaaaaaacaaacatgagtgtgaagggcatggctatagccttggctgtgatattgtgtgctacagttgttcaaggcttccccatgttcaaaagaggacgctgtctttgcataggccctggggtaaaagcagtgaaagtggcagatattgagaaagcctccataatgtacccaagtaacaactgtgacaaaatagaagtgattattaccctgaaagaaaataaaggacaacgatgcctaaatcccaaatcgaagcaagcaaggcttataatcaaaaaagttgaaagaaagaatttttaaaaatatcaaaacatatgaagtcctggaaaagggcatctgaaaaacctagaacaagtttaactgtgactactgaaatgacaagaattctacagtaggaaactgagacttttctatggttttgtgactttcaacttttgtacagttatgtgaaggatgaaaggtgggtgaaaggaccaaaaacagaaatacagtcttcctgaatgaatgacaatcagaattccactgcccaaaggagtccaacaattaaatggatttctaggaaaagctaccttaagaaaggctggttaccatcggagtttacaaagtgctttcacgttcttacttgttgtattatacattcatgcatttctaggctagagaaccttctagatttgatgcttacaactattctgttgtgactatgagaacatttctgtctctagaagttatctgtctgtattgatctttatgctatattactatctgtggttacagtggagacattgacattattactggagtcaagcccttataagtcaaaagcatctatgtgtcgtaaagcattcctcaaacattttttcatgcaaatacacacttctttccccaaatatcatgtagcacatcaatatgtagggaaacattcttatgcatcatttggtttgttttataaccaattcattaaatgtaattcataaaatgtactatgaaaaaaattatacgctatgggatactggcaacagtgcacatatttcataaccaaattagcagcaccggtcttaatttgatgtttttcaacttttattcattgagatgttttgaagcaattaggatatgtgtgtttactgtactttttgttttgatccgtttgtataaatgatagcaatatcttggacacatttgaaatacaaaatgtttttgtctaccaaagaaaaatgttgaaaaataagcaaatgtatacctagcaatcacttttactttttgtaattctgtctcttagaaaaatacataatctaatcaatttctttgttcatgcctatatactgtaaaatttaggtatactcaagactagtttaaagaatcaaagtcatttttttctctaataaactaccacaacctttcttttttaaaaaaaaaaa

SEQ ID NO: 481100 - DNA, 153 bp, Homo sapiens
cgaggtgcctctgaggatccagaaggactggagactgaaagtgctatgtacggtaaatggctttatgtactatgtgctgttaaagatgggtaggtttgttggtatcctagtgggtgaggggtgctttcagtctcagtccgttctggaccggcc

SEQ ID NO: 481101 - DNA, 128 bp, Homo sapiens
agtttcagcgtgtccacatcacagctccctccaggagctgcaagggcttcttaggagttcctggtctgaaccctctcccagtccgcatcttccaccctaaaactagagtgatcttccgaaaacttcac

SEQ ID NO: 481102 - DNA, 1779 bp, Homo sapiens
aagacatcaagacttaaacgaaggaaaggattcacaagaggagaggaaagtgcattttcatgctagaaaaaccatattatacaaatataaaaaatagggatctctcaggctcaccagatgagaggatgctgtgaaagaaggtaatcttcctcatgtgatgtcagagagtatagagccagaacaagtcacaatcctgaagacacgtctgaccccacacatctacaaagccagcagaaatcaggcagactaacttctacaataaggcagaaagtttgaaatttggaacacacggaaaggacttgcatttctactccttccaagaagagcagcaaagctgaagtagcagcaacagcaccagcagcaacagcaaaaaacaaacatgagtgtgaagggcatggctatagccttggctgtgatattgtgtgctacagttgttcaaggcttccccatgttcaaaagaggacgctgtctttgcataggccctggggtaaaagcagtgaaagtggcagatattgagaaagcctccataatgtacccaagtaacaactgtgacaaaatagaagtgattattaccctgaaagaaaataaaggacaacgatgcctaaatcccaaatcgaagcaagcaaggcttataatcaaaaaagttgaaagaaagaatttttaaaaatatcaaaacatatgaagtcctggaaaagggcatctgaaaaacctagaacaagtttaactgtgactactgaaatgacaagaattctacagtaggaaactgagacttttctatggttttgtgactttcaacttttgtacagttatgtgaaggatgaaaggtgggtgaaaggaccaaaaacagaaatacagtcttcctgaatgaatgacaatcagaattccactgcccaaaggagtccaacaattaaatggatttctaggaaaagctaccttaagaaaggctggttaccatcggagtttacaaagtgctttcacgttcttacttgttgtattatacattcatgcatttctaggctagagaaccttctagatttgatgcttacaactattctgttgtgactatgagaacatttctgtctctagaagttatctgtctgtattgatctttatgctatattactatctgtggttacagtggagacattgacattattactggagtcaagcccttataagtcaaaagcatctatgtgtcgtaaagcattcctcaaacattttttcatgcaaatacacacttctttccccaaatatcatgtagcacatcaatatgtagggaaacattcttatgcatcatttggtttgttttataaccaattcattaaatgtaattcataaaatgtactatgaaaaaaattatacgctatgggatactggcaacagtgcacatatttcataaccaaattagcagcaccggtcttaatttgatgtttttcaacttttattcattgagatgttttgaagcaattaggatatgtgtgtttactgtactttttgttttgatccgtttgtataaatgatagcaatatcttggacacatttgaaatacaaaatgtttttgtctaccaaagaaaaatgttgaaaaataagcaaatgtatacctagcaatcacttttactttttgtaattctgtctcttagaaaaatacataatctaatcaatttctttgttcatgcctatatactgtaaaatttaggtatactcaagactagtttaaagaatcaaagtcatttttttctctaataaactaccacaacctttcttttttaaaaaaaaaaa

SEQ ID NO: 481103 - DNA, 127 bp, Homo sapiens
accttttacacaggaaaccggtattaccttgtgaatgggaaaaaccctgggggcctttttaacacaaaaacccgtaacccctcgtatcggaaaaaccacatggacacttttaaacgaaaacaacgtt

SEQ ID NO: 481104 - DNA, 541 bp, Homo sapiens
  misc_feature (291)..(291): n is a, c, g, or t
  misc_feature (314)..(314): n is a, c, g, or t
  misc_feature (425)..(425): n is a, c, g, or t
  misc_feature (457)..(457): n is a, c, g, or t
  misc_feature (487)..(487): n is a, c, g, or t
  misc_feature (516)..(516): n is a, c, g, or t
ggggagagaacaaaacagaaactcttggaagcaggaaaggtgcatgactcaaagagggaaattcctgtgccataaaaggattgctggtgtataaaatgctctatatatgccaattaccaatttcctttcatgttcagcatttctactccttccaagaagagcagcaaagctgaagtagcagcaacagcaccagcagcaacagcaaaaaacaaacatgagtgtgaagggcatggctatagccttggctgtgatattgtgtgctacagttgttcaaggtatgcagtaattttnatttctcaacctataagttcctnttctaatgtttcaaatgtcttttcttccacttttatcctaaaagacatgataaagttttatttaatctcacagattagaagttactacagctttagcacagaaatggtggncatgtttaagatactagagatgattattgaanctagaaattatggacttcatggaatttttnggatttggctagaattatctggcaaaagncttttaggcaaccagttttaaatgt

SEQ ID NO: 481105 - DNA, 200 bp, Homo sapiens
  misc_feature (65)..(65): n is a, c, g, or t
  misc_feature (159)..(159): n is a, c, g, or t
aggtagggagagaaaagatctaaaagaaggaggaacaaagggcggacgcagtgactcatgcttgntatcccatgcactttgggagtgcaaggcgggcggatcacctgaggtcaggagttcaaaaccagcctgaccaacatggagaaaccctgtgtctanctaaaaatacaaatattagcctgggcgttggtgggtacact

SEQ ID NO: 481106 - DNA, 185 bp, Homo sapiens
aaaggccatataccactccaaatagtctagtggtttcactggtaggcattaatcatttcaaggcaaacaagattggaacagaacatatgggctttacgataccatcaattaatcaactatgatgtagcaataaatactttacttaatctctaccaatcaacatagggggtcccgagctcgaatcc

SEQ ID NO: 481107 - DNA, 337 bp, Homo sapiens
caggccaacgatatcacccagcattctgtgatgactctagcggtcgcctgacatagggaacagagctcacatcaacattcacggttaccagtgcctcagcaatgtccaggagtgtcattccatctgcccccaggattcagaagagagaaagctcatcccttgtcagcatgatctctggcacgtactcccaatgtgagagcaacttttgtaagtacactcagcactcctacaagttccctcctgacgaccttcccagcaacatattcattttcatcttccatgtctgccagcagtgctgggaccactcacacagagagtatctcctcacctccggccc

SEQ ID NO: 481108 - DNA, 265 bp, Homo sapiens
atggaaaaaaaattttggtagtgggggcccatgggtttttggaagctgctttacaaagcctgttccaaaaaaaagggtccatgacaatgagcatccagtggaaaacacgccagttttaaagcaagagggagttttgttttgtccccagggtggagggcaggggggtgatttaggctccctgcaagttttgcctcccaggttgaagtgattttcctgtgaaagggaattatttttgatgagtcattaaagtaaatccattcccaga

SEQ ID NO: 481109 - DNA, 574 bp, Homo sapiens
cacgcgtcgcccacgcgtccgtcgccatctccttctcggcatcatggccgtcgctcagaccccttgatgatgcccaagatcgtcaagaagagaatcaggaagtacatccggcaccattgcagaccgatatgtcaaaaggaagcgtacctggcggatagccagaggcattgacaacagggttcggaagacgattcaaagggccagactcttgagtgctccaagcattggttatggaaagcaacaaaaaagaacgcacgcgctagtgcttgccgcagtgtgcttgcgggaacgttccgtggtccgacgaaggtcagatggagctggaaggtgctgctgatgtgcaagcgcatcttacctgtgccgagatcgcctcacaaggtctcgctccaaagaaccggcaagccaatcgtggaaagagctgcccaacgtggccatccaccagtcaccaagggcccgaagtgccagggctagcagctaggtgagagaatgcatggagtaggcagcttcaatgtggcacagttacatgtataacataagatgtaacaaaactgccaaccgaaaagacaagacaacg

SEQ ID NO: 481110 - DNA, 376 bp, Homo sapiens
ccctctcagtcctcttaacagttgccataggttaaaggcggcactaaaatccgtatggtcctatgaacgataagtagatattagaagaactgattaatgtcctgggtctgagtttatatatcacagtgagaatactatgatggcccatgtaacgaacaatgctacagggatgacatcattatgaagcacagtagtctagtatgaagctaagaggagagctgggttgtacgggtatgtggcacagtgtcagttcgggataataacttcttggtctaggcacatgactattgttgtaggggaagagactgatcataaaggtggaatgcgacaatagatattacataatgggagtatgagttctacatagtaagggtta

SEQ ID NO: 481111 - DNA, 827 bp, Homo sapiens
ggtacattaccattgtttgtgacacgcgtcacaagtacaaacacaagcacaagccatttttgactccacaaactctgtgaacatcagaagactttccagacaagaacagtcactgtcaaactcagctgccactctcccccaaactatgacacatgtggtcactggcaggtggtcagtaagcacatggatgtaaccacaaccctccaccaggattggcaagtttgaggcaaggttcattccatttggcactttgaagaagagtttggaagagtcaagggtcactttggacactatcaacagtgttgcacttcaatcatgatggcaagagctacagcagcaggcggcagaagatggttacagtcacagtatccattacttcgacccacagtacttcgaatttgagtttgaggcttaagaagactggatctcactgcacgggcatggtggctcatgcactgtaatcaccacacactttttttttaaggcaggcggatcacactgaggtcaggagtttaagaccagcactgacacaacataggagaaacaatcagtctcatacataaaatatacaaaaaattagcaaggcatggtggcacacgcacatatagtcaccagctactcaggaggctgaggcagagaatcacttaaccaagagcaacgttgcagtagctaatacgtcataatcatcatagcaacaacacccgtgggctgggggtttgcggtgtcgtggctgtgctggtttgcggggtggttggggggggtgtgggtcgtgggcggttgtggtggtgctggtgggcggtgtgtgggcatggtgggggggttggtgg

SEQ ID NO: 481112 - DNA, 201 bp, Homo sapiens
taggagtacctgaggaatataccctttctgcctgttcagctaacactttttccctattctttaagcctcaaccatctctataagtcaatctttgacaagagctttagaaaattgcaaagggaagaatattcctactgtataccaggtattgtacttagagctttacatttactgttttatttaattcttttttttttttaa

SEQ ID NO: 481113 - DNA, 396 bp, Homo sapiens
  misc_feature (55)..(55): n is a, c, g, or t
cccggaggcattggcttcccgggcccacgaggaacttttgggcttttttttcccncagattggggcccccgggtccctccagcggccaaaaagtttggagtggtgggggggtttcttcccccccccctttcgagagctccccccctcctccaaaaccggacggctctccagaccttccctcccagccgggggttcgggccttgggaccccccggctggcccggcggcggggaagggaggcgggggcgcctccggcggcgaaattcaaaggttacccttggacccccttccgtttgcgaaccctaacaaaggactcaacccccccccaggggagggttaggcggccgggggcattaacttaccttttagtacagcaattaaataacctgggggtcca

SEQ ID NO: 481114 - DNA, 211 bp, Homo sapiens
tgggacacggaggcgcacagcaatgccggctgatttttctatttttatgtagagacgatgttacaccgtgtgagccagtatggtctcgatctcgtgagcttgtgatcatgcctgcctcggcctcccagagtgctgcgattacaggcatgagccaccttgcccagcctctttcattcctttttatgtgatcgctcccttccccgtgttccca

SEQ ID NO: 481115 - DNA, 432 bp, Homo sapiens
caggttcggcactaggatatatatatatagtgtgtgtgtgtgagtgtgtgtgagtgtgtgtgtgtgagtgagtcatagctagatcgactcatattcatacccgccgcttctcttctcttccgccttcctccacctctcttctctcctctttttctctctctccctctcttactccccttccttccttgccttttctttcctcttcttctccgtccttctttctcttccttttttcctctctcctcctctcttccttctctttcccattctgctttcctttctcttctcctcccttctttccctctcccactcctgtttctcccctctttcctctccctttccttcctccttttctcccttcctcttttccctctctttctatcctttttctctcctctctttcttcctcttttttttcccttccttcccccc

SEQ ID NO: 481116 - DNA, 413 bp, Homo sapiens
  misc_feature (73)..(73): n is a, c, g, or t
ctgcacctgtaatccccagcactttgggagtccaagcgtgaaaccacccatgcccagccatatttattttatntatttttttatggtgacagaatttcaccaatgttgcctgtactggactcaaacatttggcttcaagagatcttcctgccttggcctccccaaatgttgggaggctgaggcaggcagatcacctgaggtcaggagttccagaccagcctggccaacatggtgaaacccagtctctactgaaaatacaaaaaattagctgggtgtggtggtgggggcttataatcccagctacttgggaggctaaggcaggagaattgcttgaacccaggaggcggagtttgcagtgagccaagattgtgccactgcactccagcctgggcaatggagtgagactccatctc

SEQ ID NO: 481117 - DNA, 993 bp, Homo sapiens
ctccccccttctgttgccctgtctcaaccgttcctctgaatgactggtagcaagaaaatctggggtcaccaattgcaaagcaatgcctggcctctgcgtggatatgccctagtgcaaaagttggtatgcttcaaggcatccttggacagcaaacgtttcggatgtcccacctccgagaccaagcatttgattcagaataactatcccttgcaaaagggtatccactaacccaatctccctccttcgaatcaccagggctccaagaccaaactcatgggctgtagcgtgcgagcctctaggtcccatcatgcttagaaggtgggctacctttttgaccatgacactgtggagtgacaatcgggatctgaaatgatacagtcttgggggaaaacggtagaaactaccactatttgttcgaaggctcggagtaatctaggtggattattcgggcgtattccactctgttgaagttccttgttcgaaacaatctaatagcagtatggcgatcttccccgcttttacttactagaccttcctagtccatctccccaagtctccaattcttgactacttgtggggtgatcaatgcagagttgcattcatatgcactcgtgatgcgtactatatccctctccactcttgactgaatatcaagacgtagaatagcttatgttgcgttggtatatctacttcatgatagttcggtctcacctcttcatggcctgggtgtgataaaggatcgttggagctccagaccaacatagccaacctcattgttccaatactgcattttgcctcggtgtggggaagggattgggtcttgtcccccgacacagctttctgtggctgactgtaatactgtacaactgtttctgaccattaaatgctgttgtactctgtgtggcctctactgtggtttacctggggaggaagcagcagtaggatataaatacatcagttccgtcataaacaggcaatctaagccactcataa

SEQ ID NO: 481118 - DNA, 256 bp, Homo sapiens
cggtactcgatcactggatctaaatgactagcatacggagagctgaggctgtcatgttatttattaaattacttttacagccttaagttcgctcgggagcccactctgtgtgcctctttttcttcaacttcagcaatggccggaccaaggtacacatcctatttttattacacacgtttgagcccacagatctctgccgggcccatgggcttgtggcaagatcaagcagaccttcaggtaggatacagtagggaga

SEQ ID NO: 481119 - DNA, 157 bp, Homo sapiens
ccccgacggtgaagaagagcaccccactccccgcccgtgggtcagaagagcaccctcacgcggggcccgcaggaagaagagcacccccacgcacggcccgagcatcccgctggcttccgggccacctctcctcacccatcttagaggcatggccggg

SEQ ID NO: 481120 - DNA, 127 bp, Homo sapiens
atccagattattatgaacagtacgggagcagagtggtataggactttcaggaacttaactatatctggcaataaggaatgaatcaactgacctatggagccagcaaggtattattaactaaaatatg

SEQ ID NO: 481121 - DNA, 271 bp, Homo sapiens
ttttttggggcccccccccccgtttttggggtttttttttgggggccccccaaagccaaagggggggggggccaaaacccccccaaaatccccccccggggggttctttcccgggcccttttttgcccggggtttttttccaaattcccttttcccccccccccctgggccaaaagggggggggggggccccccggggtttttttttttttttccccccggttggggggggtttttggggggggaaaaatgtcccccttttttttttttta

SEQ ID NO: 481122 - DNA, 522 bp, Homo sapiens
actgacgtactgctgtctgtcacaggagaacagtacggacgacccataagtggacaaaaagaggtacatggtatggcccagccaagtcagaacaactactggaaggccatggaaggcatcttcatgaagcccagtgagttgctgagggcagaggtccatcatgcagagctgtgactctaaatactctgagccactgtcgccacacagtgtttgtagacatctgctgctgctttactgcgggatccctgctccaggtcctctgagcgtgctgccttgggacctgcagcccttcacacttgaattggttgctctcccaggcttagtcagttctctcgggaaaggactcactcgtctgtgaaggtggagatagctttcttcatgctggtaaaagaagttgaggagcttgcctgtcttagctgggaagtgtaactccgcaggaactgggcatcatggattcttaatttgtgatttctcctgttttgtctttctccaaaataatgaataaataaataaataaaaaga

SEQ ID NO: 481123 - DNA, 321 bp, Homo sapiens
ctgtgcagaggaaaataggccagcccctccttgttccttagctccagatggcttgttaaaagggtgtgggacctcacatgcccatgtgtcctaggccatctgagtgtgacaagagaaatcactttgtttttgttttattttgttttttagagaccatctgcagtgtcagcactgacctgggcactagcagagcattagccagataacccaaagtcccaagactgcagtgcaccttgagctttggagcaggcattgttctttccttatctatcttctgctactgtttaaaaatgttaaaaaaagataatcatgaataagcta

SEQ ID NO: 481124 - DNA, 150 bp, Homo sapiens
tctatgctgtgtcgtgagtcatggatgctggttcctacaggccctccccgggatcgccaccaggcctagactatcttggcctctcagctcctgctgttccgtaagctgtcatgtcctttatctcctgtggctatgaactggttatataac

SEQ ID NO: 481125 - DNA, 275 bp, Homo sapiens
  misc_feature (87)..(87): n is a, c, g, or t
  misc_feature (216)..(216): n is a, c, g, or t
cctacttttattattaacccattttcagagttgagaacactcaaataacctactcaaagtcacgcaaattaggaagcagcacagttnggactggtcctcagtaaagtctcctgtaaagactgttattttaagcacttctatctgtgtggaaaggctgttaattctgtatcctccacacgatgtggctaatgcttagaactggcaaggaacccccanactactgagtcccttaattttggccgagaaaggcagggttccaaaagtagcattgaaga

SEQ ID NO: 481126 - DNA, 296 bp, Homo sapiens
tggcctgagagcagatctctggtgtgagcagtacacttgtggtgtccgaatcttggagccgcaggatgtcgctccggtgcggagtctgtcctctatccgtttggactgcgtctgctgcgcgtttgcctctgcgtacctgtcgcctctgaagctggagccacttgggtcttatctacttgggcaggcctgtctggctcctttctctacacaggaggaattggattcaagtacgtggctctgggagacctcatcatcctcatcacttttggcccgctggctgtgatgttcgcctacgc

SEQ ID NO: 481127 - DNA, 679 bp, Homo sapiens
tctggtctccaaaaaaagtgggggatgactttggccaaggcaagggggggctggggaagggcctgaggattacagtgaaatcggaccattcaaaacagacgggcccagatatggggggggggccttctggcctcggcccgggaatcatcaaagccctcagggacacccaccaagagacagaaagaaacagaaaaactattcaaacgacggggggaatatcactttggatgagtatggtgcaactatggctcgacagatgcggcaccgatccttagccagagaactctcgggacaccattaaaagagatcctgggggactggcccagtcagggggctggtaatgtgagatgggccgccatcctcatgacatcatcgatgactatcaacagtgggtggctggtgggattggcccagccagttaagcacaagggaaaacttttcaataaagggatcatggacaaggggaaaaaaaaaaaaaacaaaaaaaacaaacaaaaaaaaaaaaaccccgggggggacatatatgtgggggaggggagaaaaaggagggaacagataggcggccgatggcaatagagggtcactggccccagtgtatgtggcacagggggatactcgagaggacccaaagagagagcaataaacgaaaaaccggggtcccgggtagatcacgcaagag

SEQ ID NO: 481128 - DNA, 146 bp, Homo sapiens
agacccttaacaccgcaatctacattcatttctgattttatgctggtagcaatcccatgcaatggaatactattattattattaattttttttgagatggagtctcgctgtgtcatccaggctggagtgcagtggcaaaaccctga

SEQ ID NO: 481129 - DNA, 674 bp, Homo sapiens
  misc_feature (40)..(40): n is a, c, g, or t
  misc_feature (131)..(131): n is a, c, g, or t
  misc_feature (239)..(239): n is a, c, g, or t
  misc_feature (359)..(359): n is a, c, g, or t
tcggccagggggttgtttggccccaacaccgggcttctcnaattgtttcatcccccccctatcccaatgggcggaggcgggtcgggggggtcttttaacccagctcgttagttaccgtccattgctggagnacccctccccccgtttttttccccattaaaaacccggggccgtcacgcctccgggtttatgccttgggcgcggggggggtaaccattttcccccaggaaccacttttnccctttggccctttttggggcccctattaaaccagtttgtcccaaaaaaccgggtggggcccggccgggatttcccggatttttttcacccccccggccccgggcgcgtgggttttcccnctggctttccggggggaaaaatttttccaaggcctttattttttgggggggggaatagggcccaaaactcttaaaaggtttctttccccccttttaaagcctttttaaagtgtgaggggaacccttttttttttgggggggcccccttggccccggttttttgttcccaagggggggcccctgttcccccggattaaaaaaaccccatggccgttaacctttcccctaacttaaaagccccgttggttgttcccccccaaaaaatggggttagccgaattttggattttttccccaattaaaatttttctgggtt

SEQ ID NO: 481130 - DNA, 194 bp, Homo sapiens
tttttttttttggggccccccccccttctgtttaccggggggggcccttttggggttaaaaatgtcctttaggggtcttttttttttcccctgggggggggggggggggggcccggcggctccccttttttccccccggggtttttttttttttccccgggtttgttttggggttttacccgctttttttttta

SEQ ID NO: 481131 - DNA, 157 bp, Homo sapiens
acgagttcatgtaatcgtcgaggccagtctttaccagcatacgttatttacgtcgccctcggccgtcggccccaactggagggtaccaccccaccagagcccccgattagtacgcgcatcgttatctgcctgactggctaacctgtaccgttgcatc

SEQ ID NO: 481132 - DNA, 140 bp, Homo sapiens
  misc_feature (140)..(140): n is a, c, g, or t
ctcaaaaaaaaaaaaaaaatttacttgcatctcttatctactgaaaagctggttaacctaaatctaatagatggtgtaaaatagtccagtaggagtttattaaatggttccaggccttggccattatccttcaaccacan

SEQ ID NO: 481133 - DNA, 989 bp, Homo sapiens
  misc_feature (451)..(452): n is a, c, g, or t
gagtgacgcgaggtctgggaagaccaggagtcagactgtaggacgactcggtcccacgtgtccccggaactcgccggtcgtagcctccggttcccggggccggggggaccttttagcggcacccaacacacagcctaactttccaaggcggaggccatttgttttgtctaaccgggacaatgcggcttgaacggggggaaagaaacaacacgccccaagggatgagcaggtgcatcggggtgggttacccggaaagaagccagttttggttcgattacaggagcgggacctggttgtgtgtgccacacattggaaaaaaggcctcgtacccttggcctggcagttgtgacaacctcattggccttattgtccaccacggggggcaccaacgactttcttggactaccgtggcaactcctcataaagatttggcgacgacacgcgccttgtnnttttttcacccaaggtgaggctttgaaacattgccctccgtggacagacacgcaacatttgaactggttggcacacccacattgggttttgggatacccacaatattcaccaatttgtgtgtgcaacaagggggggaccgctttttgggccaccaaaaatttttttgtggattggggatatttataacgccaataatataaccaccagagaaggtatgtgtggggaggagaggaaaatatttgaataaaaacacaaacacgaaaacgaaggagcaacacacgcgaggcaaagatagattgtatatatagagccagcgaggcaggagagggaaagaacaacgaaaacaaaagaaagagtgcgaagcagaccaacccacaaacaacgacggactagacgagagtagtttgattcacacttcacgaagtttggtcacggggtgaggacaaacacacaccacagcagaaaagacaaagaaagagaagagacggaagaaagacagaaacgaaaagaggaggtcagaagacgagaggaagaga

SEQ ID NO: 481134 - DNA, 192 bp, Homo sapiens
ttttttgtaaccttcccttgaagacagaattttggtgttggtgcttgtaagcattttcattaataatatgagaaatgatacctggagagagagattatagcaatgtattgcttcttttgaggaggagcatcatcttttgtttaatttgttattatgtcaagatgctctagtttcattgtaccaatacccaaa

SEQ ID NO: 481135 - DNA, 1239 bp, Homo sapiens
ggaagttacttccgaatgtatgtggagtagcgagtggtgtgtcaggggctaaagaggaggactaacgcatagagcagagctatgggaacccggggacaacatgggagtagttcatctccgatgagtaggtccagttcactacgaagaaccactccggcgcgacagtcattgaagccaccgaccccctggtggttgctctgtagacggggcggcggatcctgtgagagaggctggatctcgtgacaccctacctattgtcctcgtccctacctacgcagttctcctggcattccccctctgcccttcggacatatgtgctccctccttcagcacattggctgcctcctacttgctttcatccctacgagtatcgcgaggcagcgcgtccgtgccccgctgtcccggggggcgtcccgtactctggtatgtctcatggctgctgagtagaggcacagaatacagactgcaggcacaagacgtgggtcaatcccagtatcccgaagagggaaccaggagcgcaaggcgaaagaagggcccagcccgaagatgctgggcacgagcttgccggtgtctgatggggacaaggctccggcttccactaaaacgtgctcagtgcgaacgcgtgaagaggctcctcgcggcgcaggaggcccgggaggggccaggggaatcctggcgggtgggggaaccctgcagagtgcgctcaggcgagcagtcaccgcgagcggtgggacaataaagacagagataagggagggccttctaaaaccggaaaaatctgacacaggaaaaatgcacgtgcccgaaaaactgcgggtcagtaaaaccgcgaggaacgtacaagggccccctgctccgatagcacattccaaagaacaaacacagaagaataaaatagcaaaaaaacgataaaaagcaagacaaaaaaacagaaaaagaaaaaacaaaaaaggacaaggcacacaaacaaaacagacagagaagaaaggacgcaagcagaagagaggagggagggagaaagagagagagaagaaaggacggaaggaagcgggagagaaaggaaagcgaaaaaaaggaaagagaaagcaggaaaagaggaagaaaaagcgaaagggaaggggaagagagcagcgaacgagaaaagggaacagaagaggaaggagagagacggaaacgagagagcaaaagaggaggaagaaggggagaaaggagagggagaaaagagaaggaggaacaaaa

SEQ ID NO: 481136 - DNA, 1147 bp, Homo sapiens
gagggatcggaagccggttggggtgtgagacggttttctcgctcatagggagacttcttcaagcaagtcactactgtcaacagaccacaggtgtttcccttccttcatatgaggaagatcagggatcaaatatcatgcgaagaagctaaagaggcaccattcgtacccgttggaatagcgggttactgcagcaatgtgtggcatatggattatataaacttgaagagcaggggaaatagtaaaatgtccattcatctgatccacatgcgtgtggcagcccaagggcttggttgtaggagcaattgactgtgggctatgggctattccactgtactcgggaattctgggcaaaacctacagccttagaagaagacgactgctgtcttgagcttgttgggaggagcttgctatagttaagatgtcttattattaaagttacctatacttgttggcacctaaactaaattgtatgggtaacactggtacatggcattggatattggcttcctttcttgcaggcttgatttgctggtgaccgaattatagtgatagcttataataggtcatcagggagtcagttaacttaaccatgtacctaaagtcaagggagggggtggaacagtccacctcctaacaataacagaactgacgtaggccaaagacacacaaaggccaacctaaggaaaacacgggtgaacgacacagtcacacaaaggggggtggcgaaagagccacatgtgccacaaaatacactggtcagcagaagcgtgcgaggcacgatgcacaactgctcacacaggggtgaacaacaaggatacaaccagaatagacacatatggtgaagaactcacatatcatcgggtcatatacacgaaggcaataacatactacaattgtaaaacagagaatcatacgaagacataaggaagtagaaggtgtgtgtgttgtggctggctgtatttttaggagagaaggcagagtaagtgaagaaagagaatgagtgatatgaacgtgaggagagagttaagagagagatgtaggaaaaggaagatagagacgtagagcagaagaagtaaaagtaagtgacatgaaatgcaaaaagaagaaggagggacggccgacatgaaggagaagaagagtaaggagg

SEQ ID NO: 481137 - DNA, 133 bp, Homo sapiens
  misc_feature (89)..(89): n is a, c, g, or t
taccgcattctcccatcagtcatcataagcaataatgccatcctcagcctcttctctgtgcctttattggggctagtggttttaggatnggaaaaagtggcttctttttctaccgtgcccagaaaacggtgat

SEQ ID NO: 481138 - DNA, 141 bp, Homo sapiens
ctttaggggggggggttcccctcgtgtggttctatttttttaaaaaccgacctttttaaaaatggtcccgtttggggcttttccgattttttaggaaaatgctttgtattggatattaccatgatcccccccttagaatat

SEQ ID NO: 481139 - DNA, 527 bp, Homo sapiens
catactgtcaactaaaaattctatatctggcaaaactgcccttcaaaaatgagggagatgttaagaaattcccataccaacaaaagctgagggagttctttaacactatacctttcccacaaaaattgttaaagggagtttttcaagctgaaatgaaagcacactagacagtatctcaaatccacataaggaaaaacagagcaccagtaaagaaatctgtataggaaaacataaaacacagcataaatgtatgtttttctatgcaactccttcattctaccatctgctttaaatgacagttgcataaagcagtaattataaatctttgttaaaggatatacaatgtgtaaacgtgtactttatagtcagcaatagaacaaacaggtgagaggaaatagagttatgtaggagcaaaggttctgtatagagctgaaattaagttggcactagttctaaatagattgttttaagatgataattgtaatcctctcagcaatcacaagaaaataactaaaataacatatagt

SEQ ID NO: 481140 - DNA, 174 bp, Homo sapiens
  misc_feature (78)..(78): n is a, c, g, or t
ctgtctgttagaaaaaaattttaaaaggtgaatgagatcatgtcaatgcctctgttcagagccttccagttgctttcnatctcactcagagggaaagccaaagtccttaccttgtccctgcaaagcctggtttaacccggcccatcctattctctttatttaccactgcttgca

SEQ ID NO: 481141 - DNA, 506 bp, Homo sapiens
agcgggactggagaggagtgagtggcgggctgggcggcggcggccgtagccgcgggtgcctccccgcctcaccgcttcgcaggcagcaccgcctcccgggccgcggacgaccaggacgggtcctcatgcgcagattcccagggccacggaaccgagcacacagatgcaccctggcatgcgttcatgatcgcacgcacgcgccatcaggactcatgacgacgatgatccccccatgagcagccgaaggcagcagctgcagccgccgtcgacagccaccgagcgaaccatgtggatgaccaccagtcgagaaccatgacggccgagggcagcggcggcaggagggagccatgtccgcacatccatcccgggctggcgtgcgccagaggatccgccaaaagtgctgaacagaggagatgttaatctctgatgagacctaggaccagagtgtaatcacctccttattatgagagaaattggacttgactagacaagatatctgtcaaaag

SEQ ID NO: 481142 - DNA, 950 bp, Homo sapiens
ggaccttaattgaggacgagtggttctatgttggtcacaaagagcagttgcaccctctctgcccttgcttcatgtggctggagcccaggcaaggagagcaggagccagcgtgagactgaggccccctggtgcctatcaaggaccagagtgaaggggactacatctacccagcccttcacctttaaagtatgagtggtttaacaaggaaaatcaatgaaaccaggcaaacagcaacaatatgctgtaatggaaaataggggacaagactgttgtcacttattcagacattgtatcccattccttttggactctgacaatattttggggctgtagctcctatccaagcgccatggtagtccctccccgagtctcacccagtagaatgcagcctcccatccctggccccttccctctcagtgacggtgactccctggtgagccttctcgtaggaacccagagggggctgaggactgtgtgcctggtctgagagggccaggagtggtgctcctcaggattgcagcactgagatggaacctggcctcaggttaaagaacagagtgccacaacagggcaggaactcagcaccctcgacataaggaatacaacagtgggggcacatcatgtgaggcatcagacccacatctgtaagccagcaggccgggctgtgtacttcaagaccaatgctgccctagacactgactcggggatcagctatgcaagtgggctctccccaccttgaatgtactctggattggcaggtgtgctggatatactggctagacaccatctggacctgtagccgagactgactgaaatttgccgcatctgctaaaggataagtaaaacttcaggagatcagaggcaactgcagaggaaggaaggatcatgccgaacgaaagagagcatcaaacagggacatcgaaggacaaacaaagaacgagaacctgact

SEQ ID NO: 481143 - DNA, 914 bp, Homo sapiens
gagaagcaaaggagtagtgcatttgttaagaagaagacgcctgaatcttttagtggacctgctttcagcaaacttgttttttagcaatggaagagttaatagttgaacttcgtctctttcttgaactcctggaccatgaatatctaacctcaactgtcagggagaaaaaggcagtgataaccaacattctgctaagaatacagtcatccaaaggttttgatgtgaaggaccatgctcagaagcaggagaccgctaacagcctgccagcccctcctcagatgcccctgccggagatccctcagccctggctgcctcctgacagtgggcctccaccattgccaacatcctccctcccagaaggttattatgaggaagctgtgccactgagccccggaaaagctccggaatacatcacatcaaattatgattccgatgcgatgagcagctcttatgagtcgtatgatgaagaggaggaggatgggaaggggaagaaaacccggcaccagtggccctccgaggaggcctccatggacctggtcaaggacgccaaaatctgcgccttcctgctgcggaagaagcggttcggccagtggaccaagttgctctgcgtcatcaaagacaccaaactgctgtgctataaaagttccaaggaccagcagcctcagatggaactgccactccaaggctgtaacattacgtacatcccgaaagacagcaaaaacgaagaagcacgagctgaagattactcagcagggcacggacccgcttgttctcgccgtccagagcaaggaacaggccgagcagtggcctgaaggtgatcaaagaagcctacagtggatgtagtggccccgtggatccagagtgtcctcctccagcaagctcaccggtgcacaaggccagcaactggaggaaga

SEQ ID NO: 481144 - DNA, 905 bp, Homo sapiens
gagcggggctccgctgtggggcgggacggcgggcggcgggcggggccgtgtgcgcctgcgtggtgtctgtccctggcctgcagccccatcgcctggctgcatgctccgctgacgcctgatgccggatctcgagcgtgggtacactggcgctgatggcggcgcgcggcgtgcccctgcccctggggctccatttgttaatgtgctggctgcgtgctctgtcggcttgttcacgctagctgcatccatgtcggcgcgatggcgcctgcgtgcgaggagcgagcgctgcgaggtggcggcctgagcctcctgacagtgggcctccaccattgccaacatcctccctcccagaaggttattatgaggaagctgtgccactgagccccggaaaagctccggaatacatcacatcaaattatgattccgatgcgatgagcagctcttatgagtcgtatgatgaagaggaggaggatgggaaggggaagaaaacccggcaccagtggccctccgaggaggcctccatggacctggtcaaggacgccaaaatctgcgccttcctgctgcggaagaagcggttcggccagtggaccaagttgctctgcgtcatcaaagacaccaaactgctgtgctataaaagttccaaggaccagcagcctcagatggaactgccactccaaggctgtaacattacgtacatcccgaaagacagcaaaaacgaagaagcacgagctgaagattactcagcagggcacggacccgcttgttctcgccgtccagagcaaggaacaggccgagcagtggcctgaaggtgatcaaagaagcctacagtggatgtagtggccccgtggatccagagtgtcctcctccagcaagctcaccggtgcacaaggccagcaactggaggaaga

SEQ ID NO: 481145 - DNA, 779 bp, Homo sapiens
tggtgtccaccaagcctgaggagagctggcagtgtgtacagctctgcccaggacagcgagggcagagatgtatctgcacagtggtcagccccacagcagaccatgtgttcacggggatgcccgcacaaaacagctgaggcagctactgtgagaaggtgcagaacatgttcaatccatagaggtcttggaagtgcggaccagagagacttgcagtacagtggagaacgatggagaaccaaatgaaaggacctggaggtccaaagttcaaacaggtggaggagaggtcataaggcaacactggacaggccagatattaccgggactaaccttacaaaggagtctactacaaatgctgcacgcggactgaacgaagccagatccaagtccacatgtaaccagtgaaacgacgagccaggagagccttagtgcaacacatgcattattacacgtaattatataccacatacatatagccaacaatacatcaacctcaaagagcaacacctcttggcaatttcacaaacgggaacgggatacactatccgctattttgcacaattccacaacactgtaaaggcactcgacactttttccaattgcacaactaacttaattggaaaacacccctctctggatccacacattagcacatttattatctttcgaacacggaagaccaaccacaacaacacaacaaacaaaaaccacaaaaatatataatcaacaaagataccaaacaatagaactcatacactctacacacacaacacaacgatcaa

SEQ ID NO: 481146 - DNA, 123 bp, Homo sapiens
aatataggaatgctggcatagagcagcactaaatgacaccacttaaaaaaaggacaacgatcagacagatctggaatgtggaagcgttatagaagataactgacctcatttcttcaaaatatc

SEQ ID NO: 481147 - DNA, 895 bp, Homo sapiens
tcagatcccaccaagcagcactatgccattacgcccatgaaacgcccaatggaggaggagacccattctatacgaacacctatctgattggttcggtcaccctgaagttaatattcttatcctaccaggcttcggaataatctcccatatgtaacgttactactccggaaaaaaaagaaccattgtggatacataggtatggtctgagctatgatatcaatgggttcctagggttaatcgtgtgagcacaccatatattaacaagtaggaatagacgtagacacacgagcatatttcacctccgtaccataatcatcgctatcccccaccggcgtcaaagtatttaagctgactcgccacactccacggaaagcaactatgaaatgatctgctgcagtgctctgaagccctaggatcatctttcttttcaccgtaagtggctgaagtggcatggtattagccaacctcatcactagacaatcggatacaccgacacgtactacgttgtagctcacttccactatgtcctatcaataggagctgtattgccatcaatagggaggcctcattcacctggattccccctatttctcaggggtaacacgtagaccaaaagctagccaaaatcatttagtatcatattattggggtagtttaatttttccagaagattttgggcaatcgaatgccggagtactcggataccgatgttagcgaatggaaatcatattgaggcataatcttaaggagaattgaaattcaggtgaaagctggtcaggaaaggattgaagactcaaggggtatggcgccgtgatgagaaaaaaaaatggggcagaaaggggaaggagatagagaggtaagggaataacaacgaagaaagaagaaagaagtgggg

SEQ ID NO: 481148 - DNA, 243 bp, Homo sapiens
ctgatgaggtggtgtctcccaaaactgcctgcttcagggacctgagctgaatgctgcacattgcctcctgaggaaatggatgccttggcgaagctcctccacctacccctcccagatgctgctacatcctgcccctctaggccagagctgaagcaatgccaggcatcctgggaaaacagtgcattaaccatccagagcagtcacacccctctgtacctgagctgaagcagtaccttgtctcct

SEQ ID NO: 481149 - DNA, 456 bp, Homo sapiens
  misc_feature (114)..(114): n is a, c, g, or t
gagctcaccccgcacggaccgggccatcctggaagcatgagcaatacatccgggagcgcgtaccccgacgcggtgaacatctgcaatatctcgtcacaccctcctcatcccggntccatacttttacccttgttaaaacaggatgcacttaccctgcgtggccaagtacttccagtcgaatgctgaaccgcgctgcccccactgcaacgactactggccccacgagatcccaaaagtcctcgatcctgagaaggagagggagtctggtgtcttgaaatcgaacaagaagtccctgcggtccaggcagcattagccatcgtgccctgcagaggggctggctgccttgagtggcctgatcgccacagcccttcttggaagaaaggcgtccgtgtttcaggttccacgcgagtcacctctttcgtcttaatgttcaccgtccacagctttggaataaac

SEQ ID NO: 481150 - DNA, 1128 bp, Homo sapiens
agctttcttttgtggcctctgtgtgtggcacatcctcgttttgtttcgctgtgtgtgggctgctaccctcttccccgtcacatcggtggtttatggctagatgatctttgctcctcccggggttttcttagtgatggtatgctagtccccgcttgtgtgtctcccccggggtgtggcccctccactagccccttcttggctcaatgtcccggtttttcatcttttgtggtacaatttcttataggacatttcgtgctcaagtgtaatgtggccaatagtgggcccacattcggggggggcacaaagacgaaggttccctgtgccaccaagggttgccccccttcgaattgtgttgctaagtctcaatcccgtgccccctggggtcttgttcgtagtccacacaagtggtaagccggttatatcatttttttgtgggggccctgggggcgctccaaagttctaaacctcgggttggcacccccagattgcacaccttcacctattgtgtaattgtctgggccagcatacccctttttcctgtggtgtgtggccacggcacacaccacgcagccgccccatgcacctaaaggccctgtcttttgaaggaccgttcacatcgcgaggcgtgggcccctgtggatatgtggatccacgggaattggggaatgggccacacggtttaacccacactgggaacacaaaggagccacaggtttaaaatttggtatattgtgtaataagttgttccaaatgcacttttgggggtttttaaatctttgggaacacggaatgccctcccccttccccttttgggtcaccacgtttcttggtggagctgtccccccgggggcctccccctcacgatgagtcctttgccccggtatgcaccttgagcccttttgaacgctttacctcttccgctgttgccccacggcccttcctgagcttccctgtgggggtggcacactaccctgggccccttcaacgcctcctggccacagaacgcttccgctgccgctgcatccaccggggtttttttacacaacacattccacgttagtatttttactattataaaataatatgggaccttccctcccaatttttccaataaaagttgcttttcca

SEQ ID NO: 481151 - DNA, 477 bp, Homo sapiens
  misc_feature (9)..(9): n is a, c, g, or t
  misc_feature (140)..(140): n is a, c, g, or t
  misc_feature (181)..(181): n is a, c, g, or t
  misc_feature (193)..(193): n is a, c, g, or t
  misc_feature (219)..(219): n is a, c, g, or t
  misc_feature (256)..(256): n is a, c, g, or t
  misc_feature (267)..(267): n is a, c, g, or t
  misc_feature (289)..(289): n is a, c, g, or t
  misc_feature (298)..(299): n is a, c, g, or t
  misc_feature (302)..(302): n is a, c, g, or t
  misc_feature (330)..(330): n is a, c, g, or t
  misc_feature (334)..(334): n is a, c, g, or t
  misc_feature (363)..(363): n is a, c, g, or t
  misc_feature (386)..(386): n is a, c, g, or t
  misc_feature (392)..(392): n is a, c, g, or t
  misc_feature (398)..(398): n is a, c, g, or t
  misc_feature (411)..(411): n is a, c, g, or t
  misc_feature (414)..(414): n is a, c, g, or t
  misc_feature (437)..(437): n is a, c, g, or t
gggagcggngattattccaacaatgaaaattgcattaaaaagccaacagggagtgtggagaccgaaatgacatgtagagaaactaaatacccctttccttgggtttacctatatttatcttttaggcaagagagaaagtngtgataaatttactttatcaaaaagacaagaattataaccngtgccaaatgtnttacaatgggtgaaaggaatcattcnatgagagcaagagaggtggaagagaagatcaaagaantatgatgatgnctgagggagtgaagaagaaganaataatagnnggntcacagaaccacaattataccataaatnaccngaaggagtggagggaggggtactgtaatnctccttaataaaatctgaggtanttaaanactctnccaacatggaaantcncttctaccttcctcaaaggaaanagcagaggatgagaaggctgttgtggaagaacatacctcc

SEQ ID NO: 481152 - DNA, 210 bp, Homo sapiens
taccgtctcttgaaacaaatcctgtaaaatactcttctatatttcttcttcctgtgatttttcatctttctctggtattgtacccttccaaagttcagattcctgaagcactttcttcctcatcagagtttctaagcttgagaatcttcagatttctttgaagattaatttcctttatcttttttcttggaggcctcttctaagacacgg

SEQ ID NO: 481153 - DNA, 232 bp, Homo sapiens
tggggtgggacagagctggctctatcaccaagctcaaggacacctcctccaaggtcatccagtctgtcgcgtgagtgagtgtgaggctccagacgccctggagctgcctgcagctcgttccaggctgcagccctgtgaccttgattcctggcttgcggtggaaccatgctggtcatcacggccccacatggggcccctgacggcatgtgctggatcctctactgacgtcgac

SEQ ID NO: 481154 - DNA, 210 bp, Homo sapiens
ctgggctgcggacccacgagattgcccgtgtccgtaagcctgggtgatcttaaacctttcttagatggcttcactgctccagccgtcagggagtccacagcaggtcgcgtgcctcctctccaggtcaagagtcatagtctgtcctttgtacatattaaccaaattgtttaaaaaagccttcctcctcacaagccagcgtctcctgctcag

SEQ ID NO: 481155 - DNA, 281 bp, Homo sapiens
actgagagacgtgttgatgttgccaggtggagtgagtagcgcatgtcggctcactgcaatctttgctcctggttcaagaaattctcctgccccagcctcccgagcagctgggactacaggtgcctaccaccatgcccagctaatttttgtactctcagtaagatgaggcttcaccatgctggccaggctgctctcaaactcctgacctcaagtgatctgcctgtctcggcctcccaaagtgctaagataacaggcatgacccattgcaacacggtctctca

SEQ ID NO: 481156 - DNA, 102 bp, Homo sapiens
agcccttaaaagggctaggaatttctttttcagggaggtgggctcttaaaacacgagtctgccgagggtccgggccgaaaaaaaaaacctcttccttcttta

SEQ ID NO: 481157 - DNA, 785 bp, Homo sapiens
  misc_feature (29)..(29): n is a, c, g, or t
  misc_feature (117)..(117): n is a, c, g, or t
  misc_feature (119)..(119): n is a, c, g, or t
  misc_feature (174)..(174): n is a, c, g, or t
  misc_feature (184)..(184): n is a, c, g, or t
  misc_feature (186)..(186): n is a, c, g, or t
  misc_feature (190)..(190): n is a, c, g, or t
  misc_feature (196)..(196): n is a, c, g, or t
  misc_feature (198)..(198): n is a, c, g, or t
  misc_feature (205)..(206): n is a, c, g, or t
  misc_feature (210)..(210): n is a, c, g, or t
  misc_feature (219)..(219): n is a, c, g, or t
  misc_feature (226)..(226): n is a, c, g, or t
  misc_feature (233)..(233): n is a, c, g, or t
  misc_feature (239)..(240): n is a, c, g, or t
  misc_feature (242)..(242): n is a, c, g, or t
  misc_feature (244)..(244): n is a, c, g, or t
  misc_feature (250)..(250): n is a, c, g, or t
  misc_feature (254)..(254): n is a, c, g, or t
  misc_feature (258)..(258): n is a, c, g, or t
  misc_feature (262)..(262): n is a, c, g, or t
  misc_feature (267)..(267): n is a, c, g, or t
  misc_feature (270)..(270): n is a, c, g, or t
  misc_feature (275)..(276): n is a, c, g, or t
  misc_feature (279)..(280): n is a, c, g, or t
tggaagcatacatgtacaactcctgttanggctggagtcttggggttcaggaggaggttagaagttacaggcatctcttcaggcttgcttggtacttggcacacacaggatggtgtntnaaagagtgggctgcaccccccacacgccatttacatcagcttcataaacactttncttcctcccngnaacntaaccntntttcccnnttangaagttganaggcttnatgaaanaagttnncntngcacanccgngcanaaanctttntgnctttnnaannttttaggacgtcagctgtcagatacgaaacggtagactatcagcgtaacgaatctggcacttcacggaaatagtcacaaaactgtcataggttcgtcaatctctatcaacagtctcgcttctagctcaccacactccccagtcaattaagaacatacgaacttgaggtcaaacagttctgttacaaacgcttcataatccgtcccgaagcatactgcgtggacgcattctgagaaactttgctctctcgtgtgtacgacattcctaatttgggagtccttcgagctgaacttactatccttttagaacgttgagacagcaggtaagcaaaggacctagttcatgtacaacatggacatcatgatggctattgtaaaaaatatcgttctacagcttctccccctgaggcttggggagctgtgtcagacgctgccctttctctgctcatggacggtcttgtacggatctgtgcttggaggctgagcattaagtgtgagccagtgacc

SEQ ID NO: 481158 - DNA, 100 bp, Homo sapiens
  misc_feature (92)..(92): n is a, c, g, or t
ccgttcacacatgcacagcgctcacaacatgcacaggtccattcaggacgggctggcggagtgtgtgtggcaataaagcctgaaggcaccgngggagcat

SEQ ID NO: 481159 - DNA, 932 bp, Homo sapiens
caagtgtccccttagatctagaactgctccttgagtggccattagatcgagtcagtttgatctgcatcacttacgttatcggcgaattgtctttgtatggaaacaggaaaattccatttctaagattgatttggtgtacggtttcgctcacaacgaataggtcgggaagttgctagtgcaggtctgtggttctggatggcttgtgtgctaggtcgcaacattgcggcttggtgaaatgcctctctcctatcagcctctattattgtatttgtgtataacctaaggcagaggaaggtccttcagaaggacctcgcgtgttatggagcaaattccgtgcaatacgactgctagtaggtcatttttgcaagcgtccaagccatttatcacttttgttgtcttacgatgtgtacgtgtatgtgtagttttacttgtgaaagatggccactctttaagcagtattcattttactgccagctttactttacataggcaagcaaggattttcttgagtcataaacgtactttcgtaatgaaagtacttcctctcttgccagggctgttgtagtgcagcttggtaactaattaccttgatggcagctgtacgagtctgagtcccagtctgtagactaacttttttggaacacactggacacttttatggcttgaaggtgtggatatgggggggttacctaatccgggggtaggggacagtccttgagaactttacaggtgtccatgaagtgctggccaaatgttgatttgtatattgatgcaacgagtacgagatccccgacactgtagtaagggactgcgcgtggaagacgtaggtgaaggacttgcttaagcggatcaacgggggacaaaccggtaatcccgctgcacgaaccgtttataggctccaaaaaaaatgcccgcataaagggcaaaaaaca

SEQ ID NO: 481160 - DNA, 420 bp, Homo sapiens
  misc_feature (29)..(29): n is a, c, g, or t
  misc_feature (117)..(117): n is a, c, g, or t
  misc_feature (119)..(119): n is a, c, g, or t
  misc_feature (174)..(174): n is a, c, g, or t
  misc_feature (184)..(184): n is a, c, g, or t
  misc_feature (186)..(186): n is a, c, g, or t
  misc_feature (190)..(190): n is a, c, g, or t
  misc_feature (196)..(196): n is a, c, g, or t
  misc_feature (198)..(198): n is a, c, g, or t
  misc_feature (205)..(206): n is a, c, g, or t
  misc_feature (210)..(210): n is a, c, g, or t
  misc_feature (219)..(219): n is a, c, g, or t
  misc_feature (226)..(226): n is a, c, g, or t
  misc_feature (233)..(233): n is a, c, g, or t
  misc_feature (239)..(240): n is a, c, g, or t
  misc_feature (242)..(242): n is a, c, g, or t
  misc_feature (244)..(244): n is a, c, g, or t
  misc_feature (250)..(250): n is a, c, g, or t
  misc_feature (254)..(254): n is a, c, g, or t
  misc_feature (258)..(258): n is a, c, g, or t
  misc_feature (262)..(262): n is a, c, g, or t
  misc_feature (267)..(267): n is a, c, g, or t
  misc_feature (270)..(270): n is a, c, g, or t
  misc_feature (275)..(276): n is a, c, g, or t
  misc_feature (279)..(280): n is a, c, g, or t
tggaagcatacatgtacaactcctgttanggctggagtcttggggttcaggaggaggttagaagttacaggcatctcttcaggcttgcttggtacttggcacacacaggatggtgtntnaaagagtgggctgcaccccccacacgccatttacatcagcttcataaacactttncttcctcccngnaacntaaccntntttcccnnttangaagttganaggcttnatgaaanaagttnncntngcacanccgngcanaaanctttntgnctttnnaannttttagggcccccccgccgccaaaccaaaggaaaaatccgggaagaatctggacttaggaaaaagtcacaaaactgtcataggttgtaattttatcaacattcgcttctagtaaaattaaagtcaattaagaaatagaaa

SEQ ID NO: 481161 - DNA, 106 bp, Homo sapiens
ttgcattggcaaggccaaggggcacaactccataggtagttttttctatttcgcctcgtctcttcaactccaccttacacaactccttggcccttgccatatgcaa

SEQ ID NO: 481162 - DNA, 140 bp, Homo sapiens
agtgagtagattctctctgtaatacagtgtgagggactgctgtgcaaccaagcaatccaactgtgctaggtcatttcacttttctgaaaaactcacatcaggctgcatcctcttctgtcctggcaccaggctttgtttac

SEQ ID NO: 481163 - DNA, 160 bp, Homo sapiens
ccggtcattcgctacacacacacacacacagacacacccacacacaaattgctaatctttattttgcttttcaaatgtaagtaagaatttctgtaatggtactgactttgcttgctttgaagtagctcttttttttttttttttttttttttttgggaaa

SEQ ID NO: 481164 - DNA, 282 bp, Homo sapiens
acacgcctcccaggtcctcctgggaggctttttcttgcagggcgcgccgaaacctcggagggtgcggggatgacgcgtatccaagcttttctcgcctgtgtttccgtttcggttaatgagcgcatgcgccgccgcgccggacgcgcggatcccgctgagaggagcggtcgggcagaacgtgcggctgttcgacacccgcaccgcctatggccagttcctggcgggccaggcggcgttgcgggacggcaagtcgaaggaggcggccagcctcttcgaggcggc

SEQ ID NO: 481165 - DNA, 410 bp, Homo sapiens
cctgtttttttgtgtttcgttgtgttgtgttgtgttgtgtatgagacagggtctcactgtgctgcccaggccgaagtccagtggcacaatctcggctcactgtagcattcacctcccaggttcaagcaattctcctgtctcagcctcccgcgtagctgggattacaggcatgtgccaccacacgcggctaattatttgttgttgttgtatttttagtagagacaggattccaccatgctggcccagctggtctcgaactcctgacctcaagtgatccacccgccttggcctcccaaagtgctggaattacaggcgtgagccaccacacccagccattttactgttcttaatacagactctggtttccaaatccattccaaggggccactacagtgtagagtgtggagagg

SEQ ID NO: 481166 - DNA, 336 bp, Homo sapiens
  misc_feature (14)..(14): n is a, c, g, or t
  misc_feature (26)..(26): n is a, c, g, or t
  misc_feature (48)..(50): n is a, c, g, or t
  misc_feature (53)..(53): n is a, c, g, or t
  misc_feature (57)..(58): n is a, c, g, or t
  misc_feature (65)..(65): n is a, c, g, or t
  misc_feature (138)..(139): n is a, c, g, or t
  misc_feature (148)..(148): n is a, c, g, or t
  misc_feature (158)..(158): n is a, c, g, or t
  misc_feature (186)..(186): n is a, c, g, or t
  misc_feature (188)..(188): n is a, c, g, or t
cacgaggctctccncgacgacgtggnccagaccgtgctcaccgatcannncgncganntcgacgntcttctcgcccaggcacagaaggacgcccaggagaagctcgacggctgagaagacggatgccgcggggcaggnnagatcgtcngtcccgcggnatccaccatcggtccctgagcttgtcgnanggccgcccgacaatcccgacgagtcgacaagctcagcgaccggtgatcgaccatgaccaccacgctccagcagcggcccgccccgccggacacgcctccgccggcggtacccgctcgccgcagggcgcgtcgttccccgctcacctgg

SEQ ID NO: 481167 - DNA, 652 bp, Homo sapiens
tttgcagaaatatggtaagtggatcataaataggagggagaggatctttctggttaggagaataattcatgtgttgaggcaaagagcatgagaagaccttaaatgaacccaagttcccttccagatggaaaatacagaactctaggaagatttgcttgccttgcatggaggtggagacgggagttagggaggaaggaggagataggtgggaggactaatggagaaagtccttgaagctcaaactggggctggatctgccgtgacagacaaaaaggagcgaattacgcttcttttttttttttttttttggaaaccatggttcctcactcctggtttgcctaggtctgggagttgtagtgggcgtggtcccggctcattggcggcctctgcctcccggggttcaaccggtttttggtggcctcagccttcctgagtgggtctgggactgcaggctgtgagccaccaggccgggttcattttggtattgggtaggggggagggagttccaccgtgctgggccaggcgggtctcttaacacctggacctcgggtgatcttgcgccggttgggctcccaaaagtctgggccccggtgtgagccatggcccggcgaaatcttgaacctccttgcgactcctcctatgaaggtgcccc

SEQ ID NO: 481168 - DNA, 710 bp, Homo sapiens
gatcgagtctttggacgcagacatgccggctgtgctgaaaattaaccactggactcgggggtagtaggctgtgtgccaataactcctcatcgactaggactaagatatatatgtacatcaataaattcttgatgtactggatgaatttcgtgacagtggtgtgtatagaaagtatacgaagaactatgattacaagtgtagaagacgtgggttagggctctaaatgggaatcagatgttagtcatttaaatgaccaatcgtctaaggcagtgggtaatcagaagtaggtgattctctcagtgctgaaacatgaactaaatctggacatgtgtgttgagggattggaatctgatgggagacctgtcaggggaagaggctccctggccgggtcagtggcaagactggtcagagtataaattattaaggtgactttggtgtgttcatgggaaactgatgtaattaaatattctgttatattaagagcgtgttcttatgactgacatttgtaaatcaagaaaagtgatatagaaaatatgtaggagactgttaacaatggtgattatggtaatatggtcatgtgaatcaatgttgatttataaagtactcacaccagtgtttcaagatgatatttctgtgaacagagaggccatgggaagatttggaaattttaacgaaaattcctacgatttaatgggagacataatcaaaaa

SEQ ID NO: 481169 - DNA, 188 bp, Homo sapiens
ccccaatcccgactgagcccatactgtttcccacaagggctcaccacatagtcagtatcccgtgcttccagtgtgtgttcagattctcctcttactgtttttcttagactgtatttgttctataagcaaattgcccattttgtgattttttaaaacgtgctggggaaaaattaaattcaccaccaaat

SEQ ID NO: 481170 - DNA, 973 bp, Homo sapiens
  misc_feature (243)..(243): n is a, c, g, or t
  misc_feature (313)..(313): n is a, c, g, or t
  misc_feature (686)..(686): n is a, c, g, or t
  misc_feature (722)..(722): n is a, c, g, or t
agtgcaacaaaaatgggggcctccttaaatacacaccagcagtcaagtggaggaaaacttgaacaataatgagtcgcttcttgggtctctataatcaataaacctgtctgcagatatctatctatataagctatatatataatataattacatatatatgcacatgtatatatagtgtgtacatatatgtgtgtatatatatacttaaatgtaatatttaacaaataaaagtgtgatctcgtntagaagaaaatgtatcatattacaaactgctcttccatatttatgtaccatattatacctttttattatngttataattattatgggtatttctaattaatatgatgttgaaacctgtttggcaccttctggaagctaccaaaaaaatgacactccattgaagtgcttaaaagctgttctcataagaattctactggcctattgtaaaaaagaaaaaaaaaaaggaaaaagaagaaagacacaaagaaaataatctaaacaccaaaaactaaacacaattccaatcctttttctggtacctcacgcgcataaatttggtggctcctattttttttcctggttaatgtgttttaatgggatctaagttaaatctttgggcaatatttacaaaatgtaaatagtaaactttaatctattaaagaagtgtcatctttttcaaattntatatttacacaatggtccatctaattaatttttgnctatacaggttttaaatactcagacatatttggctgtccaggatatttttatccgtggtctcatggattggttttcccatactgtgtctcggatctcaattacaggttgggatctcacaaataataatggtcagagacagaactatttggccactgtggaattactatacttaaagttctatattatgaacgtttttaatagctggtacgctcgaagaaagcagaaaagagaaaagcaaaaaaaaaaacag

SEQ ID NO: 481171 - DNA, 698 bp, Homo sapiens
ggagatctagtcctcgtgttaatgcatgtgttgaatgatctttgatagttgatgaaattatgcaccagttcctcacaagttggttcatgatgctatggcttggagaatcccgtgagtatgagatgtgcctatataggagtcaatagagcgcaagcgaagagggttggtggaggagacgggcgtggtagttgagatggcgtgctggctgtggacctctcaagataaacatactagccagcaaagctctgctatatcagcgagacacattcctacaagacagcaggacaggaacgcgctgccacactgcgagatggcaaatggcgctggagacctgcggcgaaggatagaacaaaatggaagcaaaggagcgaccacacagaaaacatacacagcgcggcgaggagcagaggctcacgcagggcgagccgaaccctctcatgaagcatagcgaggtgcgccgacactgctggaagcaaggagagcaagaaccacacacaccaaaggccgacgaaccgaagagtgcatcccaacacgcgaagccaacacaaaaacgaaagacacgacaagagacgaagagacggacaacactataataccaaagccaccgcaccaaataagaggggcacacgagaaaaagcacacaacaagcacagagcgaagatagaacacaaggtagcacgagcgagcagtagacaacc

SEQ ID NO: 481172 - DNA, 1753 bp, Homo sapiens
gaaaccgagtccgagcctttacgtaccgaggacacagacttagccaagacgcgattatactcgcaaatgagagtgataggcagataggaagatgtactagccgtggccgcaagtacgtatatagggtaccgccacgggtgcagacaggatggagacagagagtgtataagccaaggcagtaagtactagctaggagctaagccccgtagtagcgcttctgccatagactggaagttgaccgtagagaagtaacgtctcgcgaacggagtacgccaagagggcgtaacgaacgcgcgccgaacaagcgacgacgcagcctacgctacagtacacacgctcagaagagtagcagcgccgcgctcatagtggtagccagaagtaggggggaccgagttcatagcgtagagcgcgacagaaccatgacgctgagcgcttgggtggatgcagctaggtatgtcacacaggatcaagaaatctgtaaggtatcgaacttgtggaatagtgttgcgccaacggagtaagccctcgtgaaattacccactgtgtgaaatattaaaccttgttaagtcccaaagaggcacggaaagcacgcgggctttgaggcaacacgcgtacggggacaaaaaggaggccctgtggtgggcacgacggacgctaaacaggacagttcacaggcaagccccaagtaacggtacgggacgcgtagaagaagacaggtccacacacgaaaggtgtacaggaaccaacgcgcatagcgaacggcttcacaagagaaaccccccaagcggtaacctcggtgagcacacaggacacatgcccagacagagacgcggatctcaggtgaacagccggtgcacaaagcataccgcggtcacaagcaagcgcgcacaaaaacaggggggaacccaacagatcacgtaattcaggcacaccataagtcaggacaaagaaaaccttaaggaaggtacacgatcacatacgaggcgtacaacacattgtcgccaacagcaagtatcgtatccgatcccggagacatataggggccccgtgtaatcgtgcagcgcaactattaaaccacaagcgacacgtatgaaaaccgtggaaaccaacagtatcaacaccgacagccgccaacaagtaaatgcctacacaccaacgccaaacatccctacaagccaaagggctcgaggattacataggaacccaatgccagaatgaggaactaagacgcagaaagggcacaagagcgcactgtctgtccacttacaagcgagaaaggggagtaaacacaaggaaaagggatcagaaagggaacatctcgggcagaagaatctctgtacccacggccgggtgtacacaccagatagacaatatgaccgactctccaagccaatcgggccagcaattcacgagggggtaccacgctcgggcaccagcgggacaacagcgtgatacagaccagagaaaaccaaaccgggcagaaggtggtcaaaaacactgtccatacaatagggcaccgctagaagtcccacaaaggtaacacggcgactacacaagaacgagataaagaatatgcgacacacggacggagacaaacaaagaaagacagcaaacacagtaagacagaacaaacaaggcgtaaaacacacagaagaacgggcgaacacgacagcagcacggaacaacaaacacaaacaacacagacgacaatgaacaacagaacgcgacgacgacagacaatgcagcgagcgaa

SEQ ID NO: 481173 - DNA, 302 bp, Homo sapiens
acagcaagagaagattatagagaaagtgggtgtgacttagccatgacgccatgtgtgagcaatagtatggcaatgcagcccactgtgtacgcatccaatggccatgtggctgcccggtaccccttcatccctatgccactggacatacaatcctgccggagctgcacaagaatgccatgagagccacaatggagagtcaactaagacgctccctacaatgtcccagatgtggtcattcaaccatcgccaacaaatgctgtcgatcttgatcatacaggatctcagaccgtgatgaaggaatc

SEQ ID NO: 481174 - DNA, 559 bp, Homo sapiens
ggaaagtttcgactgttctagaagcctctgttgtatttgcacagtggtgatttgctctagagactgagagccatttaggcgatgggggatagattactgtccgcgggaaattacccacttttttgaaacctaaagtgactgccatgggcactctgtgtcttgacagggattgctgaatattgagtcttggatgggatgcatagagtgcggcagcgtctacaggatccacctatatgggtgatactactagaagtatgcctctatacatctgtcaatacactgacacaggtattgtgtagcatgagctactgagccgcaagttatcactgatgcagaaactttagtacagatattctgcggcaacgtgttagtgtccattgaacccaataatcgttccacttgagttagaacaaggttgaaattcacgtcttgactgtccgaccacacaagtaggtcacgtctagaacagatttaatataacttggggccgacatgccattccgtgacctacacttgggttactgaagtgtgaacaacaggaatactgtctgtgttctgg

SEQ ID NO: 481175 - DNA, 151 bp, Homo sapiens
ctttggcacggcgttcttttatgcccggcgggcaaaacctgtcgttaaaccctagatgttggtcgagtttataagggagggttctatgtttgaatgcgaaattccatgccaaaattaatggaaacctttcctcggggaaggcattgggcgg

SEQ ID NO: 481176 - DNA, 394 bp, Homo sapiens
  misc_feature (394)..(394): n is a, c, g, or t
cgcagcatacacactgtagagagaccctatgaatgtgacgaatgtggaaaagccttctctcagagaacataacttatatgtgcatgtgaggattcatatcacgtgataaaccttaccaatgcaatgtgttgtggaaaagccttctctctagagctcatctctcactgtgcatgtgagaagccatacacggggagaagccctatgggtgtaatgagatgtgggaaagctttctctcaggtctcaacccttgcgtctgcatttgagaatacacacaggtaagaagccttatcagtgcaatgaatgtgggaaagctttcagccacaagtcacaccacattagacaccagttcatactcacttcatcatgccccagaaataatccttttggcgcaccn

SEQ ID NO: 481177 - DNA, 340 bp, Homo sapiens
ggcacctataggagagaggaggtgctgcaagactctctgtgagaaaaatgaagagggtcctgggactactgcttgctgtggcatttggacatgctttagagagaggccgggattatggagtaaagtctgcaaggaattctcccatctgggaaaggaggacttcacatctctgtgactaggcctgtgcacgggcttcttgaccgaagcctgctgtgccgaaggggctgaccctgactggtatgacaccaggaccttagcactgtctgccaagtgctgtgaaagtgattctccattccccgtgtcacccaggcactgttgagtgctgtaccggggcctggcg

SEQ ID NO: 481178 - DNA, 607 bp, Homo sapiens
gcggtagatacaccacaaagatctccttggcacatgatagtcaaactgtcagaagtaaagacaaaaagaattctaaacacagcaagagaaaagcatctgttcacatctaaaggaatcctgatcagactaacagcagatttctcagcagaaaccttgcaagccaggagagaatgagatgatatattcaaagtgctgaagggaaaaaacaaacctgccagttaaggatactgtacctagtgaagttatctttcataaataaaggagaagtgaagactttcccagacagggaaaaacagataattcataaccactaaacaaccagaaaacaaataacaaagtggcaggcataagtccttacttaccaataataacactgaatgtaaatggactaaactctctgatgaaaagacataaagtggctgaatggatgaaaaaacaagacctggtgatctgttgcatacaagaaacttacttataaagacacaaataggggtgcggtggctcatgcctgtaatcccagtacttgggaggctagggcaggagaattgcttgaaccctgggggctgacgctacagtaaggcatgatcgcaccatgtcctctagactg

SEQ ID NO: 481179 - DNA, 508 bp, Homo sapiens
catgctcacccagcacagcgtgccctgagctcggagcgttgagactagtccctgggcacgatatatactttacataaattattatataaatacacagcgaaatagaaactctcaactctgaggggtaggggaagaaacgtgagggactcagcaggaagccagagctgtagaggtccattcaggccaagttgacctcctccttgacccctttggcttctggcttctcctccttggtttgctcctcttcggtgagttcttccttctcctcggggtctttctctttttcatcctctgtttggactctcttggcttttttgcagttggaagagtacttgcggcccccctctccctcctcttcagaatcggagaactcttcctcacaggcaattcgttggtcagaggagcagatcgagatgcgcttgtcagggtcgtcttcgtcctcatcgccactctcctcaggtatggcgtcctcaggaatcgcctgcatttgacacgggggtgcggagtg

SEQ ID NO: 481180 - DNA, 274 bp, Homo sapiens
gggggctcccggaatcccaaaaaaaaaaccatacccaatttaggtgggttccagcccccaatggggggcttttttacattacaggcgggagttttgttccccttttaaaaaaaacccaaagcctctgtcccccttttgtttcctatgatcatcctttaaaaacccaaaaaaggccccttcctgccttttaaataggggtggaaaataggactttaaattatgaaagggtttgctttgtgtttgggatttaacaagtaaaattaaaagttttcca

SEQ ID NO: 481181 - DNA, 565 bp, Homo sapiens
  misc_feature (520)..(520): n is a, c, g, or t
atctagaggatccctgtggacacgggtctcatagatttactgagaaacaaacatctgcatcctcccactggtgtgtctggttggctatgactggcgttcttacaataaattccccagcatgggatttctggaatccaaatgaagaaacgtctccatgggtctggcttccacttttgccttttggcttttccaaaaaggtttttcccatgtacgtgatgctggggctgtaacagtctgtccatttcaccacaattgtgccagcaacatatgttatctttttaggtgggggggctgacctagcaggtataaaagggtacgggggggggggttgaaattttaccttttatgtaaattttaaaaaattattttgaatggcagtaaaatgcacataaaattggccatcttggccatttctaagtgcccagttctgggatataaagtacatccacagggaggtgcattctaaaagacgactttcggcggggggtggtggctcaggcctgtaatcccagtactttgngagggcgaggcgggcggatcacaaggccaggagatcgagaccatc

SEQ ID NO: 481182 - DNA, 264 bp, Homo sapiens
gattttgtcagggtttttttacgggtaggggtgaatagggggccccccttcaaaactggacaaaaaaaacggctgttttccctttccatttaaacatttttagccccttcatttctatttattgaacagggcaaatttgtcttgttatttgggaggccaggacatttaaaaaacacccctatcggttatttttttttcagtcggagtttgacggaaaaattgtttaagcttttgggggaatcttttaaaaaacgggtttttcca

SEQ ID NO: 481183 - DNA, 644 bp, Homo sapiens
  misc_feature (48)..(48): n is a, c, g, or t
  misc_feature (63)..(63): n is a, c, g, or t
  misc_feature (109)..(109): n is a, c, g, or t
  misc_feature (111)..(111): n is a, c, g, or t
  misc_feature (128)..(128): n is a, c, g, or t
  misc_feature (155)..(155): n is a, c, g, or t
  misc_feature (162)..(162): n is a, c, g, or t
  misc_feature (170)..(171): n is a, c, g, or t
  misc_feature (190)..(190): n is a, c, g, or t
  misc_feature (204)..(204): n is a, c, g, or t
  misc_feature (218)..(218): n is a, c, g, or t
  misc_feature (624)..(624): n is a, c, g, or t
cccaagaaccaggcccgtctccactcataaacgccacctacatgtgangtcagcactgaaaangtaacaggaaagttcatgaacaaaaacaaaatctcaaaatttaaantnttacgtgtagcagattnatattggaaattttatatacacaggtngtgattnttcccttnnttgtttccgggttatttanggggcactgcagangtccctgtggccanagctgcggggcctcagtacacggagctgttccggatgccacagcacagcaccatgctcaggatcatctcgaagatcatgatcacagcgaccacgatggcagcaatgccgatgaggtacagcttcccggagaagaggtcatcgatcttctggtggcagtcctccttgaagaggttgctgatgatgttgctgcccgagggacacaaattgttcttgagcactgaggtggtcaaagcagtcagtgtgctggagccacagcagtcaagcgtctcgtggaaggtcttcaccacagccttggcgttgttggcgtcatcatccaccacggcctgctgtagggcctggtcatagaactgcttcacatccttggcgatctggtccttgttgacaaagcccagatgccggcggcanctcacaggcaacaggatgac

SEQ ID NO: 481184 - DNA, 132 bp, Homo sapiens
tttttttttccccccaaaaaagggaaatcccgaaaaaaggggggttttaaaaagccccccgggggatttaattttttacccaatgaaaatggggaaaaaacctgttttccccccccaaaaaaggggggtttt

SEQ ID NO: 481185 - DNA, 362 bp, Homo sapiens
ccgcgaaaccgcagcgtcatacacaaaatcccggaaatcctgcgtcccatcctgcgaacagatccctccattcgcacaaaaactgttgaccagcacactgtcggccccacacggtagaccgagttcgcaggccgcaagccgccatgccagttcactgagctgctccccggccaccagcccatcaagtgcgcggtcccccgccgcgcgcgcgcccatgcccggcgcgatcgccatgaaggcttccggatcacgcgaagtgcgcacccgctcgaccaggtcacggcggtactcggggctgtcctgcagcggctcgccttcggcgaacaaggatgcttccgcggccaggttgccctgcgcggccg

SEQ ID NO: 481186 - DNA, 101 bp, Homo sapiens
aacattaacatctattaactatttatattatccgtaactactacgctgcattcctactactcaagttaaactccgagcaccacaaccctactactatctcg

SEQ ID NO: 481187 - DNA, 160 bp, Homo sapiens
ctgatcttgaattcctgggcccaagtgatccactgcctctgccttccaaagtgctgtgattacaggtgtgagctactgctcgtggcctcatctgggcattcttaacccatagggaaaatgtctaactcaatagctcctcccttacatgacagggtgtgtg

SEQ ID NO: 481188 - DNA, 1593 bp, Homo sapiens
  misc_feature (1)..(1): n is a, c, g, or t
  misc_feature (10)..(10): n is a, c, g, or t
  misc_feature (19)..(19): n is a, c, g, or t
  misc_feature (1035)..(1035): n is a, c, g, or t
ngctcctctncccgccccnccccttgcattgtatacctgaagaagaaacagacagcaggtgagaggacgtcggtccctgtcagttcgtcactcaaccaggcatggtatgttcgtgtgtcggtagcgggatgtctctgtcgagctgttcgtggatcatctatctatgatctctatattgtgttgctggaagtagtactcgtcccgagggggtttgttaatatcggcgctgttcttctttgttatcgcgcgtagtgtgcgcggcccatatattcgcttgtgtggctcccccactcactattcgtcgattttttctctccaaagaattttttttgtacctgctgtcgtaagtttttctactccttataagtggtagtataaacaaattggtgagaacaagttattatgtttctctcaccagggggcaccctttgggcgccatcattaccccgtggtgaaagattttatctctccctcttgggaagaatccctttatatatcacaacgtggggtttcacaacaaaagtgggggcaacactctttagaagagctatttggccacacaccactgtggggggatggagaaataacccttagttgggccctttgggaaaaaatgtttgggctttttccctcgacgaggaagaagatatattggtgtgaagaccattgggccacaaactaccacccaaagagaagtttcgggtgtttttcccaacacagggagcccacctacagatagaggaggggtggcgctatagatgacagacatatttttgcttctctcaccacggaggagttatccacgaagtgtgccacattatttgttccctttgaatggtctctctctcgagtaggttttataaagggcccctcgagtgggcgctgcacaaatacacaaaatgtttggcccacgctgtatggtatatacacacacctcggaggctgtatataccatctggcgctcacgctcacgagctgtgaataagtctcttcacgcccctctctctccgagaggttttatctctgtttgtgctnataagggcacgcgaatctcacccacgcgtgaaatataatgaggggagaaaaatgtaaaatttataggctcccacgctgttgtgtggaacacacaccaaaaccatacacttgggggggttatacccgcgataattgggaaaaactctcccaggtttcacagagatgaaaggggagagtgtggaggattaatccctccttaatatggaccccacggggcctccggttagtttttttataaggagaataataataacaaagccccacacactcccacattgtttatattatattaccacacaataagggtgttttgttaactggtttatatggtaaataatggaggaaaggaaaactaatatattggctgagattttttttgagtttttaagcacgagaagccctttttttttttggttcacgttgtaaaaaaagagagggagaaaacacatgagataaaagtaaactgggttgtatttttctgctttcttgtgacaccgtcctttgtgacatataattggtttttttgttgtttttaaaaaaaagcccttttataaccca

SEQ ID NO: 481189 - DNA, 355 bp, Homo sapiens
ctagcaggatcccccagcaagaatggcatatcaggacataaatccatgcaacatttaaaacatatatatatgtcaaatgctatataggactagggatttttctttacatcattatgaatataacgagtacacattttaagattctgcaaagttagcaatatgaagatgcttgtccttctgtacatatactactaacacacatacaaaaatacaatataatttatctttacaaaaattacagcctatctatagaaaagaaggatgtttatgatgaagattgcaacacatatttttagtacatatatcttacacattgaaatgctacatcttataccctgatatgccattcttgctg

SEQ ID NO: 481190 - DNA, 162 bp, Homo sapiens
agttcagacggcttccattttccttatctgcttcctagtcccgtatgccctgggcctaacactcacaacaaaactaactaatactaacatctcatacgctcaggaaatggaaaccgtctgaactatcctgcccgccatcatcctagtactcatcgacctccc

SEQ ID NO: 481191 - DNA, 228 bp, Homo sapiens
tataaaatagcgatgcctctcccttgcagcccgtgtatagtttcgtcatatgtttcacttttagcgagatagctaagttaggtctaactgaggcgttgattatctgtgttacttcagataatgcaaatgtgtggcttaaatattagttgtattaaagcaaatgccaagaaccagcaaagaggaaatgctagaatggaaaaggtctctcataacaatatagaaaatagt

SEQ ID NO: 481192 - DNA, 649 bp, Homo sapiens
  misc_feature (474)..(474): n is a, c, g, or t
tgggtgactttagaggatcccgtcgacggtaccaacagctttctccatctaccgtgtagtcagcactcagacacatttacccaaagtatctaacaggcacactataaaagatttagctttcagtcagacaaatagctttcagtcaaaacggttagactgaggtggtaaaaggttaaccaaagggggaaagggagtttcccaataacatgtacgtttgctggccctagcagtctcagaggcctgtcagcctgcaggtcccgttccaagcacagggcatgccaagagcagcccactgagagcagaggaagagggctcaaacatttgggacccagacaatatatttaggaggtatggctccaatagggagggaggaggaaaaccacgttccgggcatctccctgtctatccaaatacacttgcataatgtgcacttggaggaaccaagcagatgggcttcagcacagacttcactgncacaacagaccagggagaataagttagacagaaacaggcagcattcccaaagagagaaggtgacgcagaaaagttccagatgagactatgtacactgggtaacacaggaaagactaacttagctgtgtcaagacgagaggattcaaggcaaagtgtatgacagattaagagtaga

SEQ ID NO: 481193 - DNA, 891 bp, Homo sapiens
  misc_feature (10)..(10): n is a, c, g, or t
  misc_feature (103)..(103): n is a, c, g, or t
  misc_feature (107)..(107): n is a, c, g, or t
  misc_feature (109)..(109): n is a, c, g, or t
  misc_feature (120)..(120): n is a, c, g, or t
  misc_feature (136)..(136): n is a, c, g, or t
  misc_feature (179)..(179): n is a, c, g, or t
  misc_feature (185)..(185): n is a, c, g, or t
  misc_feature (188)..(188): n is a, c, g, or t
  misc_feature (194)..(194): n is a, c, g, or t
  misc_feature (199)..(200): n is a, c, g, or t
  misc_feature (207)..(207): n is a, c, g, or t
  misc_feature (209)..(209): n is a, c, g, or t
  misc_feature (213)..(215): n is a, c, g, or t
  misc_feature (225)..(228): n is a, c, g, or t
  misc_feature (232)..(233): n is a, c, g, or t
  misc_feature (241)..(241): n is a, c, g, or t
  misc_feature (243)..(243): n is a, c, g, or t
  misc_feature (249)..(253): n is a, c, g, or t
  misc_feature (258)..(258): n is a, c, g, or t
  misc_feature (260)..(265): n is a, c, g, or t
  misc_feature (268)..(270): n is a, c, g, or t
  misc_feature (274)..(275): n is a, c, g, or t
  misc_feature (286)..(286): n is a, c, g, or t
  misc_feature (295)..(296): n is a, c, g, or t
  misc_feature (298)..(298): n is a, c, g, or t
  misc_feature (305)..(306): n is a, c, g, or t
  misc_feature (312)..(312): n is a, c, g, or t
  misc_feature (316)..(316): n is a, c, g, or t
  misc_feature (318)..(318): n is a, c, g, or t
  misc_feature (324)..(324): n is a, c, g, or t
  misc_feature (333)..(333): n is a, c, g, or t
  misc_feature (371)..(371): n is a, c, g, or t
  misc_feature (401)..(401): n is a, c, g, or t
  misc_feature (407)..(407): n is a, c, g, or t
  misc_feature (411)..(411): n is a, c, g, or t
  misc_feature (416)..(416): n is a, c, g, or t
  misc_feature (456)..(456): n is a, c, g, or t
  misc_feature (471)..(472): n is a, c, g, or t
  misc_feature (475)..(475): n is a, c, g, or t
  misc_feature (488)..(489): n is a, c, g, or t
  misc_feature (597)..(597): n is a, c, g, or t
  misc_feature (734)..(734): n is a, c, g, or t
  misc_feature (873)..(873): n is a, c, g, or t
tgtataaaanccgtgcccttgttcactgccaacacaacatctgggtggacatgaactcattacaacaaattcttatgtggatgttgtaagaagtcactcaatntctntngatttaataantcacttcacaccacanaaaatatttaataaatccaaaaaaaggaaagaagaatataacnacagangancttctntctcnnttctctnanactnnntcccccatannnnaccnnccccacantnctcttnnnnngattntnnnnnnttnnntttnntaatttttttnatccttttnntnttcaaannttctanaaanantcctcnctgttttcngtttttaaacagtcaaatctccatctcccccagaaggnaacagtctggtgcagatccataaaaacgtnggaggnaggngcgcnggggagaggcctgtccctcttggaaggggccccacccccncatccgcagaagagnnggnaccaaacagggcnncggggggtctcgtcctgcaacgggtgcgctttcaatgccaaatccagtcacacggcagttccttaaacacaggtacatttctgagtaccaggccagctctaagagganacaaaccatgagttgagagaaaaggactatgacggccatctggtcactttccacgtgatccatcatacttccaggtatcgggagctgctggacttggagtggaaaggctcagaccacatccgccggagatcgccctntaaataggacatcgtgaggagtggcaataaagtaataggcacaaatagagaggggcgggctgggcggcgcggtgtatgcgagacgccacagtagcagtgagcaggcatacacagtatcgatgagggtgcagtgaagtangagacctctgcatgcgcc

SEQ ID NO: 481194 - DNA, 290 bp, Homo sapiens
ctcagtggaccatcttccctctctcacgatgtactctctatgggagttctcttccacagactagacaatcctttccatagagtaccaagtgtaatgccttacagttctttatgaacccctggatttagaggctgaattagagacattctgtctggggacaagtagaccacttccacagcttcgatgttgaactcatggggttctgggtggccaggggcatagtccacgtatcaacacacgacattttaaacggcaactccctgctggcgtgacgacgacgggaacggact

SEQ ID NO: 481195 - DNA, 322 bp, Homo sapiens
  misc_feature (322)..(322): n is a, c, g, or t
atcttcatactgttgagtatatatcatatactattctgatttaaaggtcccgagatgtaacaattctattctttaaaaagggtgactgacactgcagactccaagggtacaaagggaaagtattgtaacatttgtctctaactcttaggcactaatctcctaaaaccagttcacttgataagggaaaagacttgagattcactccattataacttagttagcaaatgtcattgatcattacagatatggcagaataactggaaaactgggattttttccactaaattgccaaaaattaaccaaacaaataaccttcggaacn

SEQ ID NO: 481196 - DNA, 142 bp, Homo sapiens
aatacaacaattagctgggtatggtggtgcgtgcctgtagtccaggctactcaggaggctgaggtgggagggtcacttgtggccaggagttcgagaccagtctgggtgacatagtgggacccctctctaaaaataaaatgaa

SEQ ID NO: 481197 - DNA, 659 bp, Homo sapiens
cggtacgcggtattgagtggcatgtgatgatgagcatttttcatgtgtttttggctgcataaatgtctaccatttgacccagccatcccattactgggtatatacccaaatgactataaatcatgctgctataaagacacatgcacacgtatgtttattgaggcattattcacaatagcaaagacttggaaccaacccaaatgtccaacaatgatagactggattaagaaaatgtggcacatatacaccatggaatactatgcagccataagaaatgatgagttcatgtcctttgtagggacatggatgaaattggaaaccatcattctcagtaaactatcgcaagaacaaaaaaccaaacaccgcatattctcacttataggtgggaattgaacaatgagatcacatggccactcaataccggtattgagtggccatgtgaatattctgggacttttaccattttaaagggttacataaattataaagtgaggtatttttcatgctatttactgctggggtctgagtaggaacatgaccagtatttcttcagttgggagtcaaaaacctcaggtataccaggtgaaggaggaaaattgaattcagaagagaaatgtgttcctggtgaaaaggggacttcttgtacgggatgttatgat

SEQ ID NO: 481198 - DNA, 410 bp, Homo sapiens
ccgcagtctggggcttggctcattagaaagcaggcggtttcgctcaagttggctgtgagactgctctgcatcagccacggagaggagttgggaacactagagatggagaggaaaaagaggaggagaaagagaaaaagggaaagtgaaatcaccagcgactgggtgacatggtgcatcctggaggatggagaataggatgagtgttcggagtctgccctttgtgactgtcatgttccccgcccatgaagctgcccagttgaacgctgtgtgctcgtctgtggaatagtgccgggctcagccttcgtcgtgttgggtttgaattctccttgtgtacctcggtgtgcggagcttacccctgcactcccagggtgaccgctgcgctaatcacagcctgcttgcccctgctgcgg

SEQ ID NO: 481199 - DNA, 153 bp, Homo sapiens
ccaacggaactttggatatagtataattcaggccccaccctatattgatactgatcagctctggagcagaggcagtgagtttgcaatgtgatgcactagccaacattgagaataagtgaactagatccctatgcaaccgtctagctaggtaga

SEQ ID NO: 481200 - DNA, 352 bp, Homo sapiens
tcatccgaaaccctattgttaagctgtgggatacaagaagttgtaaggctcctctctatgatctggctgtagagggtttgatgagggtttgatgagggtttgatgacccgcatcggcgtaacacaaatggccgaggctctaatcgccactggatgacagttcagtggcaggtcagcaggtcagaggcacttggcgtcaagtgaatgtcctgtgaccgcaccgaaagaaagggaattatggaaccaataaactccgcacatccgcctcctcttcagttctgctatgatgtaggctgctaaggactgcacgacattctcagccaaccaagcattacgccgatgcgggatcctct

SEQ ID NO: 481201 - DNA, 153 bp, Homo sapiens
gtgaagatcctggtgtcgccatgggccgccgcccggccagttgttaccgacattgtatgaacaagccgtacccaaagtctcgcttctgccgaggtgtccctattgcaacgattacgaattttgacctgggcggaaagggcaaaagtggtagag

SEQ ID NO: 481202 - DNA, 446 bp, Homo sapiens
tctccggatcttgtctagtgcgatatgagtaatcatatacgggttgttctccccacattattctataaatggacaccgatgggtagtgaagcaactggtttgctgtccaactttcagaggctgctgtggggggggtctagtttctgcattcttgtcaaagaacttgtaggttggattttcgtagccgttcctgttgcatcttgggacagggtggcgctccctctgggggtgacagcggcgttcaactccaccaaaccatgatgaatggatgtgtactgttttcttctttcagcatcaccaaggtgatgacgatcactgtcgctatgacaacaccgcccaccatgagtccaatgattgcacctttgtttgaacccacatcttctgcaaagaacaccaatttttgatgatgaacttcatatcctgagtcatgtcggaattctgcatcc

SEQ ID NO: 481203 - DNA, 827 bp, Homo sapiens
agcgcgaaacatggcggggcaggacgctggctgcgggcgtggcggcgacgactactcagaaggacgagggcgacagcagcgtgtccaggccggtgtgtggaggtgttcgggaagctgaaggacctagactgccccttcctcgagggtctgtatatcacaggagtccaggatagacaattcaggaactgctgtggcaggcccctcagagtaccgcttggtactatcctagagtggatgtgtacccgggtctggacccctacactgacaggacgaggttgcagcctcactgaaaggtggtcccaatcgagaggtgaagatccaagaaaatgagcagaaagctgggccacgaggctgatgactgtgtgcagctcgagagtgacccgaggagctcctcaagggtcgtgttgcctgggcccagaagcagctacagcattacactggagcagttgctcgataccattccggaggcctgaccattggggtgctccagttgctcgatgcctgtaagtggaggcgacttgcgaggacaagctaagggtagaagaacgagggcttgtctgggggagcgcttctgctagcccccatcgtgggagtatgcttcctgaatcatgagtgcgaacggtggacccgtggacatgcatcccctcctcaacaagcagagtgatgactggcagtggggcagtgtctctgccaagtccgaggagaggagaaggtgggggagatgccaagcaggtgcaggagagtgttgcagagttggcaggcgcttagaacgggtattgcagagcatgagcatgggtgctgtggcgcagcgaatagaccgtagacaa

SEQ ID NO: 481204 - DNA, 399 bp, Homo sapiens
cggcatgcggctattggcgatgcgggcgagcgacacctcgatgggcacctgaaaataaaacgcaccgtcggggcgcaccgaaaagccataaagatttctcacccactccctgtccacacccctggccacgtcgcgggcaaacgccgtaaagcaataacggtcggcgagcaccacaagaccggctttgagggcggggatgatgatgttttcgagccgatcggcaaagtcagtggcatgcagcaggctaaaagtattgggaatgagcgagttggagcgcttggcctgcttgatagtcttgctgatcaggcgggagctattccactcggtaaagatcacgctctggccgcgcgagatgagccagttgcgcaatagatcgagctgggtcgatttgcctgggcc

SEQ ID NO: 481205 - DNA, 384 bp, Homo sapiens
  misc_feature (148)..(150): n is a, c, g, or t
aggtaggggccgttattacaggttgagtatccttaatccagaaatcctaaatcctccaaaatttaaaactttttgagccctgacaggatggtcaaaggaaatgctaattggagcattttgaattttagattttcggatttgagaggcnnnatcattaagtataatgcaaatatcccaaaacctgaaaaaaaaatccgaaatccagaatacttccaagtcccaagcatttcggatgaagggtactcaacctgtttcccattttgcagataagacaactaaggaacaaaaagatcccggagggggaggcggaggttgcagtgagccaagatcgtgccattgcactctagcctgggcaacaagagtgaaactctgtctcaaaaaaaa

SEQ ID NO: 481206 - DNA, 249 bp, Homo sapiens
ttacagatgcttagaggcaggacactggcatagacgcagtaatggtctcaagctgaggggtggaactgtagctgggcagggcccgggcctccgaggtgcccagtgtccactgacccaaggacaagatggccagtggagaaaggtgcagattacgatgtccgtcccggtaccagccgaatgatgctcgctggaacgaaagccgccctattcccttcagcgcttcgactccatcgacaccaccttgccctg

SEQ ID NO: 481207 - DNA, 145 bp, Homo sapiens
ggcgtcttgtaagtcgaaccatcatgacttttgcctccgtagctcctcgatcagctcacgcatcgtctcgcgagctatgaataatgcacgacgtcgcggatcaatgcaatcgtccaggacctgacacgtaggtccctggttcgag

SEQ ID NO: 481208 - DNA, 225 bp, Homo sapiens
  misc_feature (63)..(63): n is a, c, g, or t
  misc_feature (79)..(79): n is a, c, g, or t
  misc_feature (111)..(111): n is a, c, g, or t
  misc_feature (117)..(117): n is a, c, g, or t
  misc_feature (151)..(151): n is a, c, g, or t
  misc_feature (184)..(184): n is a, c, g, or t
  misc_feature (190)..(190): n is a, c, g, or t
gtactgtattatgaggtgtacggtgatgtaaaatattagacagatataaaagtatctatatantatctataactgttantgctgaggtatagtctgtgaattatgtgtttngtattnttattcattgtgtaatttagtggtggtgaagtcncactcaatccttaaagagtggcagtaccctttntcaatntaacatggtctgcatcaatctgtttgcctctaaca

SEQ ID NO: 481209 - DNA, 895 bp, Homo sapiens
ggtcctggtccgggcaccctcgcctggctttcgtcgtccgcccgcgctggctgctcactctgccgctcacactgctgcctccatcgttcaatgcctcgctttcccctttcctcatccgctccccgtcgtacctcacgattgcgccaggcctctgtcgcgtgctttctcgtggcgcgtcccgtgcattgtctcccgctgcactcctcaagtggtcctctttcctcctcggtcccatccacgtagtcgctggcctacggtcgtcctggtctctcgtttgtcggctcatggcgtcgtcctattacacgtttgcgcacgcaattcttgccccgggcaccgggtctctcgtgcacactcacgaggtatctctccggagccagccccctgtgggccatgtccccctgccaattccgccctgttccttcccgcttgtcgttctgctgcccccccggtagtgttccccctctttgtaccgcgatcagggcctcgacacgtgggctggcctgtatttcccactgccttgtgggttctcgcctgcccagcgttcgcggtttgccgtctgtgatagctgatggggagctctgtgcgctagggcatatacagacggatccgctgggactgcgtctgctgacgggaagcatgtgcccggacctgctgctatccccgtcgctcctccattaggaagcaagttaatcctacgttgtgttttttttggtaaattttctttctaggtagagtagctctttgtacatataagaatacttgaaaaagttaattgtatgatgtatgagaagacagagtctcctagtatttgtatcttgttgtatgactgcaagtgaggttcgcaccagtaagccacttattacgtccgagggggggatcacatctttttataatt

SEQ ID NO: 481210 - DNA, 132 bp, Homo sapiens
cttagagatccgtctagcctccctctggaataccagagactttgcacaggggcttgtgtcactccaggcacaggaccaccttcccaaggtgcagcggcagttgccagggcctcctcagtgctgtcttctcca

SEQ ID NO: 481211 - DNA, 1299 bp, Homo sapiens
aagaagcccaagttacaaaatgctactcctacaaactttacaacaaagactatacatctgcctgcagcaactcaaagaggatggaacacttccaacaaacaactagagaaacttaacactaaaggatttgctgtcactagagtgcatcactacaatgctggggttaaacaagagctgctcttctgtggacttaaacgacctattgcgtctcagatacccagtttactaacttgatgcacaccatttcaaatcatacttaacgtgaagctgacctgctgctgatttactagatacacagactgctaactgtacgattagcagcagttcaagcttcttcaatacctggcccccaaatatacgagctgaacaaatatctccatttattcgctttggtaagtgcccatctctctagtgccatgcactcaccattactgacaggaattcaggacggactctcttcaacaagcttcaggcacacttctgctggaaacagctacccagcctctaatccactggccgacagccagcactatctgctctcaacacattccgtcagaactacattctctcatcacgcacactgtcctacataggcactgactacactagacgacaagatccccacgtccctgcgactacctaatactgtcacacaatcctcaactcgagagcacttcactatcctcagccgcactgggacgcgcctggacaaggtcttcccgctgaagcactcaagaaaacaatcccccgttccaggcgcctctgcgcccggacttgagactcccaagtaaaggctacgcaacgcaggcatcagtgacatcgcactctcaccgaaccagaaaccgcaaacataccaacatgaccacctaagacatcctcccaatctcctaagtccaacctcgtgaccccggcactaccatttcccacaccgcacacccacgctccacaatctcaatccacgggctctcacttcacaacacagtgccgggcatcactcccatcctacacgagttcacatcaccctcatcataccccaggcctacgggcccactatcggctacagcacaccacggcaaccacaccacaacagcaactgaccaccgcacccactcatcatcccataccgggaaccaactctgccatcactccattcaattcccacacataccacaatccccttcgctccacacctcctaagaccaccgtcaactctccacactgaaccttcacgaccactacagacacctcgaccggaagcaacactgctcacacgacagcgctacgccctccggacctcac

SEQ ID NO: 481212 - DNA, 203 bp, Homo sapiens
catgggtcgcatgcaatgcctcccggggaaggggccttgtcccaggtcggctttaccctatcgacgcagcgtccccacttggttgaagttgacatcttgacgacgtgaagggagcagatttacaaacttggccaagaagggccttacttccttcacagatccgggtgtaatcctcgagagattcacatggtgttgcacaagtt

SEQ ID NO: 481213 - DNA, 120 bp, Homo sapiens
tgaagttgtttaatcacatgtatcttatctgaagaaaaagactgatgtagtagatgtctgtcattaaaggtgatcctttggtgaaaaaaataaaaacaaataaaacgtgatttgcggccg

SEQ ID NO: 481214 - DNA, 403 bp, Homo sapiens
  misc_feature (208)..(208): n is a, c, g, or t
ggttgggggggggggttgggttgtggcccccgggccccccctcccccctggtcccttgaaattggggcatttcacttttgagaacgaaatttcgcttcagtccttttgccgaagggggtgagggcattggggccggaccctttgggcccggcccctcccagggcccccgctccgtgggaaaaaacagctcccccctttccttgaaaantggacggtttttaaaaaaagattaaacttcgcgggaaatgagtagccaggaagttcaggggggggggccgggcccttcccgggccgggggggtgggacccccccaggtcccccagctgccgttgaaaaaaagcaaaaatttgttgggccaaaaatcccaaacattttctttaaaaaaagttcccttttttggtca

SEQ ID NO: 481215 - DNA, 263 bp, Homo sapiens
cgaacccgagctgcatcgagcacgtcgctcgccggcaaggctcgttcaaggctgtctcaatgcgcctgcgtcgcaggtcctcgtcgatcagcttgtctcggttcagtgcaagcgggcgacgaactgtagtgagtccaggtgaacgacgttgacctgatccaccgaccagtcagggcggatgcatgacgcaaaagccttgcacaaacgccaggatgtggtggctgtgcttgccatcgtgcgcacccgccaggtacaccggcccg

SEQ ID NO: 481216 - DNA, 875 bp, Homo sapiens
  misc_feature (203)..(203): n is a, c, g, or t
ggcctgtagccaggaggtggaggaggaggcggctcgggagagcgacagcgagctggtggatcgccgagcgcgagtgagggcgagccgatgccggccagcgcgccagcaagatatccgaccttcctctctaccgcggaagcagggaagccacggggccggggggcgccccgggacaggggccgggcccaaaggaccgcggtccncctacgaggggttaaggcgcccggcggagggcgttaggcaggagcagacgaaccacgactcaaaagaggcgccgacaggcacacaagcctgagcagaagccgccatgaaggaagaagacggagtgagcccggtgaacctaagacgctgagtagctaccctaggaatcaagtttgtcgccacgttatgacgcgaggtaaactccttagttgggggaccaggggaacaattatataccatacagacacagtagtgaaagcgagcacagctataacacctgacggagcctcacatctaacttgcatatacaagacacaagcagcaaccctatactattacaactagcaaggagcagagccggctaaacaaataagccagatgagcagcaaggaggacggaagaaactcatccagcagacacccgccagcaactacggatgcatcacaccaagcaaaaccgagacgaaggagcgagacaccacaagaagcacacaacacacgacaggcacgacccgcgactgcacgcataatagccgtaggacggtgcgaactagaccaatagtcacacgccgacaacgcacgagggtgcacgattgagcaggggcgatggtacagatacgacagccgggttatagtgtaacggagtcagctcaaggcgctgaaagtctcatacac

SEQ ID NO: 481217 - DNA, 428 bp, Homo sapiens
agccgtacgtggagtacggatagatgactttttctctgctctgatgtagttgatcttgtctctaacttgcatgattcgtgcttcgtattgccgttgcgcttctgtttggtctctgtctgtctctgtgtctctctctgtctctctctctcactctatctgtgtctttggaggctaggctaagagtgccccatgtaacctccttcccccctctctgtggggtgtctctctgtctctttgtttaccccgttattctgcttcatacagaggtcgctgcccaagtcattcaagaggaagatctccgttgtctgtaaggtccaggcccaagatcgctgataaaagtcaggaataccataaaaaccagcattcattgagaaccagaatttcattctcaatggcattcttgggtcataccgtaatccccaaccgga

SEQ ID NO: 481218 - DNA, 476 bp, Homo sapiens
  misc_feature (11)..(11): n is a, c, g, or t
  misc_feature (112)..(112): n is a, c, g, or t
  misc_feature (116)..(116): n is a, c, g, or t
  misc_feature (132)..(132): n is a, c, g, or t
  misc_feature (139)..(139): n is a, c, g, or t
  misc_feature (144)..(144): n is a, c, g, or t
  misc_feature (146)..(146): n is a, c, g, or t
  misc_feature (149)..(149): n is a, c, g, or t
  misc_feature (192)..(193): n is a, c, g, or t
  misc_feature (254)..(254): n is a, c, g, or t
  misc_feature (275)..(275): n is a, c, g, or t
  misc_feature (294)..(294): n is a, c, g, or t
  misc_feature (309)..(309): n is a, c, g, or t
  misc_feature (336)..(336): n is a, c, g, or t
  misc_feature (341)..(343): n is a, c, g, or t
  misc_feature (355)..(355): n is a, c, g, or t
  misc_feature (405)..(405): n is a, c, g, or t
  misc_feature (420)..(420): n is a, c, g, or t
  misc_feature (439)..(439): n is a, c, g, or t
  misc_feature (456)..(456): n is a, c, g, or t
acgaaaaaaanaagtatcagaatgagcatcagaaaaatagcaactcatcttacacataataactagaaaatattattctgtctgatcatttaagtgttacaaatcctgagantgtnataccttgcacaaatncggcccnccctnancantccatctcgcttggccagcctcctttaaaaaatgctctgaggnncaaatcacctatgtcttaaacatgagtctctgacattatactaagagtttaaacaaatatntcaaacaatttcaggccagtngctcttaaaacagctttcngtcaggttctaggtnacactgttccacaatttcccgtgggtnggggnnntccattgcagcngccactcgctctttgtcatttgtctgcttgttggtgtcttcttctgttgngtgggttccttcagnaatgttgatttccaacttntgtttaaatggtaaacntcgctggagttttactctta

SEQ ID NO: 481219 - DNA, 474 bp, Homo sapiens
cgtcttaatgtataataataaaacgtcaatcacatttaagcacgaacactaacaactcggctcatttctcatctttatgccgtttctcctcactgccttcttccatatacaaaataaattcttctctgtcatcccccattagatcgatatagtctccacggtctggacagagcactcgattcactaacaccgctttcgctttagcatagaatgtgctacatacatgtctagcatctggaatcttcacatcactctggtgaaacactgtactcgtttctgaaagcatagcattgtaggtaatggtcttataagtgtctgttgtcggctcatggcacaatcgaatgagatagcgttttgtaataaagtgaagcagcactggggtgatcagcgtccagctccacatgaatgaatagaatatgactcgaataggcagaggcacactttcagaaatagcattattttgtgtaaaaagtc

SEQ ID NO: 481220 - DNA, 598 bp, Homo sapiens
cagataggcaagaagtgcagaaaaagattgtgtggaggaaaaccgtgtgcctgcgagtcctgtgttaaattcaaaaccaaagtggaggggctgctgcaggcccttaccaggaaactggaaactgtgagtaaacggctggccatcctggaaaacacagttgtttaaggctgcctgtcacccctgtggcctctccaagggtcctgcacaagtcccccggagctttacccttttaatgaaggaaaccaaccccggggtgggaaggggtgtgtctgggtgtgcctatttaaagcgtgtaaaggcgtttgggaactcgtgtgtgtatgtgtgcgtgtgtgtaaccgcgcaaaagtgtgtggtgtgtgtgtgtgcaccgtgcccctaagggtgggcattaatctttccaaaatgtgagtgttaaagttataaaccaggggggagtgttaaaggggctgggtttgcctttttaaaatcaaaagcttaaaaaattcccctcttttttaggtaacccctttttggctctgagggctgggaaattctttactgatttctctattttccggggagaaacaattaaatgtggttttacgttagccgtgga

SEQ ID NO: 481221 - DNA, 457 bp, Homo sapiens
  misc_feature (24)..(24): n is a, c, g, or t
  misc_feature (31)..(31): n is a, c, g, or t
  misc_feature (77)..(77): n is a, c, g, or t
  misc_feature (87)..(87): n is a, c, g, or t
  misc_feature (102)..(102): n is a, c, g, or t
  misc_feature (139)..(139): n is a, c, g, or t
  misc_feature (238)..(238): n is a, c, g, or t
aatacatcaaccatttaaggccangctaatngtaccaggttggggaaccccatggtaacttctcactcccaatgggngtttgggagnttccccattccttgngaacattctcccaaaggggcctttcttttcaattctnttcccccctgccttctgggacctactcccccattccgggaccaatgctgatttactatctctacagattagttttgtcttgctagcatttcatataaanggaatcatatgatatgtgtcttttcatgtctgggtctttcactttgcacatctgtgagattcgaccaataccatcgagagtattagtaatgcattcctgcttattgctgatgactattccatttcacaaatataccataattattcattcacctgttgaacattttggtttttcccattttgggatattatgaataaacttgctatgaacttccgaaaa

SEQ ID NO: 481222 - DNA, 800 bp, Homo sapiens
cccacggcgtccggaagcagctctgggggaataatgggcaaactatgcttgtgatgaactacactgaaatctaccagagttaatgttatacttcgtgtagcatccatattgtctatcttcactctcatattatcccagtgacaagtgtatatgatagagaactttgcattctatacaatacactatgagcttcactaaaatatccatggcattatgtttattcctcgtagaactataagttacatcagttaacactggtacatatgacgatggcttatgttaagaaatacccagtgcgtcaggttttgaaagatcaggcaaaaaaaacaacagtataggacaaccttgaagaattgtactacttttgtcagcagggcacattctgtgctgtaatatctggcaaacttatggatcagacttgatctggtcgttctgtgaaaatctgacgcactctgaatagggtgtctggaatatggactacctttgcttgccatgtctaaggtcttctgagacgtaaatatgtgaggtgtgcgggttgtgctggggtaaacagcttccttccctttctgtgtagcaagcccttgactactgtctggtttaaaatccacgtaggctttcaaggggtccggagctattcaatctccttggtgttttcaaatatatgttagattgcgcattacgcaccaggaattagcatttctgtaaaccccttaatctagccttgtgaggcattcgcttattaccgtgtgctcacttccctccaatggaccggagagacggtctgctgacactgaagggct

SEQ ID NO: 481223 - DNA, 135 bp, Homo sapiens
tcagctgatgttaccacactaacatctgttacttgggcagcctgctgtcagtgtgtgtcactgacctctggactggcctgcacagagcagccctattatcacagatcacccttcgtgcacagatcacccttcgtg

SEQ ID NO: 481224 - DNA, 138 bp, Homo sapiens
ttcaaatcagtcaattttacttcatgcatttcatgtgtttaaattggtatcatggcatgtccatggcagcaaagtttactgagttttcaagatgtttcacagttatctggcagtggccataattggtttggacagtga

SEQ ID NO: 481225 - DNA, 795 bp, Homo sapiens
ctagccagtcaagctgacccccgcagagagccaacaacaggggacctgcgcacggcacagttctttatgcctgtcttgcgcctctcaccagccgggaggcacccaatatcgagctctcacaggccggaactcacccagcaggtgcttcagaagccaagaacatgaggccgccttgtgacaccccgccacggcgcgataacactcaccgggctgctgtcttccgctggtcggaagtgccaagaaggaggtcgatgagcagaagcttaacgggcagaacaaggacagcagctactttgtgggaaggatcccccacaatggtcaagacaaccgtctgtgacatcccacctcgtggcctcaagatggcagtcaccatcagtggcaatagcacagccatccaggagctcttcaagcagcatcatcggagacagatcactgccaagttccgccggaaggccttcctaccaatggtacacaggcgagggcatggacgagatggagcttcaccgaggctgagagcaacatggacgacctcgtctgctgagtatcagcagtaccaggatgcccccgcagaagaggaggaggatttcggtgaggaggccgaagaggaggcctaaaggcagagcccccatcacctcaggcttctcagttcccctagccgtccttactcaactgcccctttcctctccctcagaatttgtgtttctgcctctatcttgttttttggttttttttttgggggggggtctagacagtgcctggcacatagtaggcgctccaataatacttgtttgttga

SEQ ID NO: 481226 - DNA, 1026 bp, Homo sapiens
  misc_feature (781)..(781): n is a, c, g, or t
  misc_feature (952)..(952): n is a, c, g, or t
tggaaacggatttatcatctcccggtggtccaggatggatgtgcaagggggcaatactcggctcaccaaaacctccgcctcccaaggttacaagacaattctccggtcttaagcctccccgagatagcttgggtagactaacaggtgcccttgaaccaccactgcccgggtataaatttgtggtatttattagtaagaagacgggggttctacttccatgtgttaagagtgctgtgtctctgaaactccttaggacctccatgtgtagactccggccctgtcatcaggccatcccaaatggtgcttggtgaaataatacacggctgtgagtcaaccggtgtcgccttggtgctcttagaagggtgtaatccatactctcatataatgtatatcaaagaaagggtgtcagcctcaaacatttatcaccagagatgtggcgcctttagaccgcgcaacttggttccatacttatttagatcgcatgaggcttatgggttcggtgtgcgaaacaatatatttatgtgtggcgacccgtggtgtatcttctcccaccgggggcacaacacaaacagtgtatatgttgagaccagtttcattagaaaatagaattggcctcctgggtgatcatcctcgaaaggccttttatctgggatgtgagcagcggcacaaaaatacgacgagcgagacaaaattggtgcgctataaaggaaaccctctctaaaaaagccatcgcgcggtgagtatctcttggactgttgtgtaacacacccatagtaacgtngggtcattacaaattttcaaaatggttccaccatatgatttgacattgtgtccaacaaaatggcacgcaaagctatcaaaggcacgatctttgggtggatagggatcacaaccctgtggggtcatcggagattactcttatcacatcgaggaaattaacaacgtccctttnaggagagttcaactatccaaatcaaaaatttatcgagtgcacaatctaaaagtaagataacacctggggtggtg

SEQ ID NO: 481227 - DNA, 797 bp, Homo sapiens
  misc_feature (3)..(3): n is a, c, g, or t
  misc_feature (66)..(67): n is a, c, g, or t
  misc_feature (72)..(72): n is a, c, g, or t
  misc_feature (74)..(74): n is a, c, g, or t
  misc_feature (210)..(211): n is a, c, g, or t
  misc_feature (273)..(273): n is a, c, g, or t
  misc_feature (308)..(308): n is a, c, g, or t
  misc_feature (310)..(310): n is a, c, g, or t
  misc_feature (324)..(324): n is a, c, g, or t
  misc_feature (332)..(332): n is a, c, g, or t
  misc_feature (337)..(338): n is a, c, g, or t
  misc_feature (343)..(343): n is a, c, g, or t
  misc_feature (370)..(370): n is a, c, g, or t
  misc_feature (426)..(426): n is a, c, g, or t
  misc_feature (429)..(429): n is a, c, g, or t
  misc_feature (440)..(440): n is a, c, g, or t
  misc_feature (443)..(443): n is a, c, g, or t
  misc_feature (540)..(540): n is a, c, g, or t
  misc_feature (565)..(565): n is a, c, g, or t
  misc_feature (635)..(635): n is a, c, g, or t
  misc_feature (650)..(650): n is a, c, g, or t
  misc_feature (654)..(654): n is a, c, g, or t
  misc_feature (661)..(661): n is a, c, g, or t
  misc_feature (667)..(667): n is a, c, g, or t
  misc_feature (683)..(683): n is a, c, g, or t
  misc_feature (693)..(693): n is a, c, g, or t
  misc_feature (698)..(698): n is a, c, g, or t
  misc_feature (706)..(707): n is a, c, g, or t
  misc_feature (712)..(713): n is a, c, g, or t
  misc_feature (723)..(723): n is a, c, g, or t
  misc_feature (751)..(751): n is a, c, g, or t
ganaggggttttcaggagttggagattatagaatattaggtaggaatgttggtatcctccactatnnatggntnccctaggtcacaaatgggagactggcagctacgccaatatcaaaacccagtggaatgacacttctatggagtttacttttcttcgctgctatcttccctcatccgcacggaaatgtctgtcaccatgtaaagcccnntagcaggcagctttggctccagtcttcccccttgggtaggaaacggagtgaagggaatgtcnctcctgggtttccatgctttcttcttccgctccgngngggggttcttcggnattccccncctcnncctcnccttccttcttctctggtggcttctcntaagccttttctgaaggccgttactatgcactccatcccaggtagatatttcagangcnagatctagganagnggaaaaggtgatttagacgagtagcccagcataaaagtctttacttacaatgtggaaatattaaaggcatttaagtagtgttacagcgttctctgtnccagattacaatacaaaacccctgncccacagtggtccctcacagctggcatcaccctcctggccaaggatcttcctaaagcccccatgtgagangattcggacgagagnccgngctgtanagcagnccatgtcctggagganagcaaagtgngagtnagcaaggnnaatcnnaggaccttantttgagtaatacccttctgaaaacaganattaagacagctttttaaatctcaggaccaaagtctttctgaatcc

SEQ ID NO: 481228 - DNA, 163 bp, Homo sapiens
  misc_feature (105)..(105): n is a, c, g, or t
tatcctaatactagcacccactcttatcagtggtggagaacggtctcagaactgttgtttccattggcatttaagtttagtagtaaaagatggttaatgataacnatgcatcgtaaacacttcagaaggaaaggagaatgttttgtggaccactttggttttc

SEQ ID NO: 481229 - DNA, 435 bp, Homo sapiens
  misc_feature (294)..(294): n is a, c, g, or t
  misc_feature (321)..(321): n is a, c, g, or t
  misc_feature (344)..(344): n is a, c, g, or t
  misc_feature (376)..(376): n is a, c, g, or t
  misc_feature (380)..(381): n is a, c, g, or t
  misc_feature (384)..(384): n is a, c, g, or t
  misc_feature (386)..(386): n is a, c, g, or t
  misc_feature (405)..(405): n is a, c, g, or t
  misc_feature (408)..(408): n is a, c, g, or t
  misc_feature (412)..(412): n is a, c, g, or t
  misc_feature (416)..(416): n is a, c, g, or t
caacagaaggagaggaggagaattaaaccggcaaaggcctcaggaaaaaagctcttcagaattcaggggcaaaaggaaagaaaaaccaaagtctccctttttaagggggctgagggcccattccagtgagcctttggactggagggactgtccctggatttcggaaggtaaacagtttcaaacacccaggtttgaatgcctgtgaatgacccgtcagtgggaaaaagctcaaaaaatgtctctcctccaactgtgcctgcaggaggaggaacaaaaaagcctgggctgctgggnctgggttcattttcatgacttggggcngtcgaaatttaaagtgatgtaanctggggttatgtggattttcttactttcctcngccnnccncngtttaattattttgtcccncanaaanatcnttaaaatatttttttgtta

SEQ ID NO: 481230 - DNA, 246 bp, Homo sapiens
actacttctgtggctgcttctgtggctcgtgggttaaaattttattaatactgggattatgctaataggtttatttcgaatccgattcagatgagtagtcagtgtgagctgattattactagtatggttccggatattactgttatgataagggtagtgtagatacatgagatttattcagtatgggcaagggtatgaacccaacatttactggggtcatgggcccgcatcagcttagcttcagct

SEQ ID NO: 481231 - DNA, 550 bp, Homo sapiens
cggagtacgagaaaggtcttgagatgaagaacataatcacctagtgggtagtagtttacacaggctgatctacatgatcacccacatcagaatcctctggggtccttgtcacaaatgttaagttaggattttgccccagactcatcaaatgactttctaattgtaaagaataggcattttaaatattatttcctgtaatttcaagcatcctaacatgtgatttctcagataactgtattttgaaaaagttcccaccactggttaagaacaagtgcccaggcagggcacggtggctcatgcctgtaatcccaggactttgggagtgcgaggtgtgtggatcaagagctcaggagtttgagaccagcctgtacaacatggtgaaaacccgttctttattaaaaaatacaaaaattacccggggtgtggtaggcgtgtgcctgtaatcccagctacctcaggagaaggaggctaaggcaggagaattgcttgaacctgagaggtacaggttgagtgagcagagatggcgccactgcactccagcgtgctgata

SEQ ID NO: 481232 - DNA, 184 bp, Homo sapiens
tgcggtgagtggtgacttgtctttcccatctgatgtgctctgtactcagccactgcccccagcatacttcttcatggccatttcagaacccctgctcagagccatgtttctctggaagttgagggcagcaggagagcctggatcaatctccccgatccagacctactctgccctcaacttcctg

SEQ ID NO: 481233 - DNA, 1121 bp, Homo sapiens
tgggctcctaaagggggtaaagggggtgcaatggggtaatatacgggccctatttcaaaaattttaagggaaatttaatttcttaggacgatgtgggcattgaaacgtggtggtttgtgcctccacagatttctcaaagcatttgaccgttagttaataccccgcggttcgttgttagccggttgaaaggtggtttgtggttttaaacgtctccgggaactttgtctctcgtgttttaaagcccttatgtgtgtgggcgcacagtctctcagtaagtgtgcaagaacgttctctcgtgtgacgtgttacattatattatattaccaaatgtggcggcgcttctacaacgcgcggaaagttactataccctcgcattgtgggtacacgcgtctcagagagaagtctccgaagtgtttccgccgtgggttctcatcaggaaacacatacagtgggggcgggacacagtttttcttgtcttcagcgaccagtctgtcggcacaagacaaacttccaagaccttcaacagcccgcgtatccgcaccgcagacgtgtggtgataccctccgcaagcagggcttaacccaagatttacacccccacatgctgagtgtagcgcccctccacattctctagacaacttacagacctaggtagcgactaacaacgcagcggcgaagtgacgacaatcggttgacagcaccctctaccctgcacgtggcatatagttcgtattcaaaatcgtgacaattcgccgtacataaagaggaggacacctcgtgtcacaccgtgcacgtcaaatacgctctaacgctgaggccccacatcaagcgggcactgataacgctgtcgcgccgagcgagctcacaggtcgtcacatatagcactccaaccacgacacactgaggcgtcttcgccgatacacttatccccaccgcttggcctgacaatccttctgtatgaacaaaacatctcgtactactaggctataaatctactcacgacctaagaagagtattggtgtcgtcctacgaataacatctacttgtattagatgaggaacccacaaagggagcacaccattagccgaggcgcaccatcatggtgcaaccatcccactaaca

SEQ ID NO: 481234 - DNA, 138 bp, Homo sapiens
gaatattgcggagatttgatccctttttgaaccttgtgatagatgaatgtgtggagatggcgatagtggacaacagaacaatattggaatggtggtaatacgagaaaatagtatcatcatgttagaagccttggaata

SEQ ID NO: 481235 - DNA, 267 bp, Homo sapiens
tggatccccgtgatcttatcgcccaacacagaaacattccaagcctgtgataaactctctttctcctaaaaccaataaaaactcttagtccataggagcaagcactcctaaccaaaaaaaaaaaaaaaattgtccagaagcccctctcaggtttattctccaaaataaacttgtctttgactgtggagccacttttcatgtttcttttctctttctttacttctaacatttggggctgaaacctgggatgggtgttggggataacat

SEQ ID NO: 481236 - DNA, 257 bp, Homo sapiens
  misc_feature (101)..(101): n is a, c, g, or t
gatgcgaggtgactctaaggatcccggctcccactggtagcgtaggtgagttcttcatcaaatacagatttcttcccctgctattgcttctagggcagganctctcactggctcctcctcgggcatgctcgggcccgctgggtctgcgattcctcttcgctagccgttcagcaaacatctgcgcctagaggatatcaaactgagacctttcctctgctgtcatctccccctttttttgtggcaaccaagtagggagg

SEQ ID NO: 481237 - DNA, 359 bp, Homo sapiens
aacatacaggcttctaggtctagccaggccatctagtttagtcgagacagctgtgtaacaaacgtagccttgaggcctggcacggtggctcatgcctgtaatcccagcacttttgaggctgaggcgggcggattacctgaagtcagaagttagagaccagcctgtccaacgtggtgaaaccccgtctgtactaaaaatacaaaaattagccgggcatggtggcgggcatctgtaatccctgctactcgggaggctgaggcaggagaatcacttgaacccgggaggtggagtttgcagtgagccaagattatgccactgcactccagcctgggtgacagagcaagactccgtctcaaaaa

SEQ ID NO: 481238 - DNA, 458 bp, Homo sapiens
cagagcacgcttcgctcagatctcaggcgtcgcttcatttacaagcataaacatttgtcaatacttatggcgtggtttgaggtacagtttggagtaatattatacataacgaagaaagggttcatttttagcttatctaatggaaatttgtggatatagctcagaagctactgtttattgagcatttactgaacagacttaatgctagttgctgtttacagcattttcttagcttcacagcaatatgtaagtaccttaataatgaggacagtgaggctcaaatatgttaagttacttgcctgggctatgtggctagcatgtaacagccccaatttgaatccaaatctgtctggtgccaaagcctgtgtgtttctactgcatcatgttgctccccaataaactggtaacctgagtttaatgttacagagaataagacttttctaagacaaagatttatg

SEQ ID NO: 481239 - DNA, 423 bp, Homo sapiens
ataaagtggcgcttggtatatatgtggtcaaaacgaattagttcataagtggctcccagcttggctgatggcgtccccactgacatacaaaggtaggctggtaaggaactgggacattctgggtagacctttgggagctccaccaggctggcaggctctggtaaagggcatttgaagcacatgtctgggtccaagttgtccataatgcccaacaggatatcagactctgaatctgaagagtcaataccgccagaatccatcggaagatgttctggaggggtgacaactggtcctgcacctgttgcagaggtgcacgtagtctgagtgttgcgcactcagcagacccgaccgctggcctcacttcattccccttggcttccgcctcctgttcagcatccagggcatccatccccaagctctgtc

SEQ ID NO: 481240 - DNA, 925 bp, Homo sapiens
  misc_feature (18)..(18): n is a, c, g, or t
  misc_feature (306)..(306): n is a, c, g, or t
  misc_feature (377)..(377): n is a, c, g, or t
  misc_feature (388)..(388): n is a, c, g, or t
  misc_feature (412)..(412): n is a, c, g, or t
  misc_feature (426)..(426): n is a, c, g, or t
  misc_feature (429)..(429): n is a, c, g, or t
  misc_feature (451)..(452): n is a, c, g, or t
  misc_feature (468)..(469): n is a, c, g, or t
  misc_feature (508)..(509): n is a, c, g, or t
  misc_feature (538)..(538): n is a, c, g, or t
  misc_feature (541)..(541): n is a, c, g, or t
  misc_feature (573)..(573): n is a, c, g, or t
  misc_feature (581)..(581): n is a, c, g, or t
  misc_feature (589)..(589): n is a, c, g, or t
  misc_feature (607)..(607): n is a, c, g, or t
  misc_feature (742)..(742): n is a, c, g, or t
  misc_feature (753)..(753): n is a, c, g, or t
  misc_feature (759)..(759): n is a, c, g, or t
  misc_feature (793)..(793): n is a, c, g, or t
  misc_feature (803)..(803): n is a, c, g, or t
  misc_feature (849)..(849): n is a, c, g, or t
  misc_feature (854)..(854): n is a, c, g, or t
  misc_feature (860)..(860): n is a, c, g, or t
  misc_feature (920)..(920): n is a, c, g, or t
ataaaaacattgattgtnacagctttacatgtttcattccatacacagtgaaaaaggcaaagtattactaggaaggaaatgagtagttgggtttgtcaaagatttattgatcacataaaagcaatgaataggggatgacatatatctaactcatgattaccaaacttttagagacaactaggttaaatatttcatgttttggctaagggaaaagcattcctgttctcgttaaagaggttcaaagtcaacactgatattgtacaactcccagtgcttttctcttggtctggacatttgctatggctngctttcctttttgctagttaatcccttcctatgattgggttttgtttcccggtgggggctaggggggcggngtccttttttnccccctggctacccccgggccctnccttggtggtgggngcnaggctttcccttttgtgttagnnggatggggtgtgtttnngtgggttggctatgtttcctggggggtggggcctattgnncccccccctctgtttgggcggttttgtgnggnggtgtgtctgtgccttggctcactctggcttncttttggnctggcgtncctttggcactcgctcgnataaatagacaagcaaactgtgagactaagctgctccatctgagttgcccatcttgacttacaattcatactatttcttagttcttgactgagcacaaacagaccttaccgtatagcacttctgtgatgcatganaatagaatctngagctnagttactgcgcttcactgatgagccaatcttctnttctgccaanatcatagttacaaatgtgaaattcattcaagaaattcacatttttnacaantgcttntactttttcatgttttcttgctagatatgttcttggttttgtggcccgcttaaatatgtnctttg

SEQ ID NO: 481241 - DNA, 315 bp, Homo sapiens
  misc_feature (210)..(210): n is a, c, g, or t
cctggttcaaagggatcctgattccactgtgcgagtctggcacttgtaccctccggaaggcatcattgtgggtagcatcatcaccaagtgctccatccctgtgttggcactccagtcgggccatgctgaaaattgctgagatggaatacagcggtgcaacagcatctttctgcgactgctgctggatagagtatgcactgcttaccgggngctggatgcctagtttccagtgcctggggttcggacagggagggtgaactcctgctgtgtacagtgcttctgactttggtcagggctaaggccacttggaaaaca

SEQ ID NO: 481242 - DNA, 702 bp, Homo sapiens
  misc_feature (441)..(441): n is a, c, g, or t
gccgtcgcgtttgcacctcgctgctccagcctctggggtcgcgataccaaccttccagcctgcgacctgcggagaaaaacaattacttattgttcttgccccatacagtaccttgaggcgagcaaaagcaagttaaattgttctaacacattgagggaacaattcgtgtcgacaggctccagggctgggtctaggatgtggtctacacctcgaggactcgcagtgctcgacacggtctcatagggagaagtagtggatttccagctgactgcaagtcataggcactcgtgacaccacatcgcgggctaccttatcgcaacgcggtgagcgaagcgagccttggcacgtcagtggaagctcgggcaagtaacctcttggtagatagcatgacagaatgtaagctcatcgagagtggccaagatagtggtctgccttcgatgnccaatccgtggttaggactctacgaaacctgtggaccagtgggacctcatgtatacgactcgaggttaccttattggaccagaatctctctaggactcatgagcaacctttttggtacttttatggtcgagatcgttgaggggcgagggtaaagcaagcattggggcccaagagggcctacgtacgaccaggaaggggcggcctgaagcttggttcgacttcgttgtccttggggacttgttgaggtacgggaaagggaag

SEQ ID NO: 481243 - DNA, 350 bp, Homo sapiens
tacagtgagatggacacccacaatgtcacaatgatagactggattaagaaaatgtggcacatatacaccatggagatactatgcagccataaaaaatgatgacttcatgtcctttgtagggacatggatgaaattggaaatcatcattctcagtaaactatcacaagaacaaaaaaccaaacaccgcatattctcactcgtaggtgggaattgaacaatgagaacacatggacacaggaaggggaacatcacactctggggactgtcatggggtgaggggagggtcgtgtgcactctcaatggcattgagagtgcacacgggaactttgcagattatctaatctttttat

SEQ ID NO: 481244 - DNA, 333 bp, Homo sapiens
aggagctcggtaccctgtctcgcccctctctgaggccagatgcagtggcttacaccgcaatcccagcactctgggagacaaggtaggcggttcacctgaagtcaggagttcaagaccagcctggccaacatggtgaaacccgtctctactaaaaatacaaaaaattagccgggcatggtggctcccacttgtagtcccagctacttgagaggctgaggcaggagaatctcttgaacccaggaggtagaggttgcagtgaactgagactgcgccactgcactccagcctgggtgacagagcaagactccatctcaaaaaaaaatgcatgaaaaa

SEQ ID NO: 481245 - DNA, 579 bp, Homo sapiens
  misc_feature (68)..(68): n is a, c, g, or t
cgctactgcactcaggatgcttttttcccagatcaaggaggtagatatgggcttggctgctgattttnggaaacactgccagagactgcccaaggtcatcgggaaccagagcctggtcaacgagctgaccttctctgcccgcaagatgatggctgacgaggccctggacagtgggctggtcagccgcgtgttccaagataaggacgccatgctgaatgcagcctttgcctggcggctgatatttccagcaagagccctgtggctgtgcaggggtcaaaaatcaatctcatctactcccgagaccattctgtggacgagagccttgactacatggccacctggaacatgagcatgctgcagacccaggacatcatcaaatcagtccaggcagccatggagaagagggacacaaaaagcatcaccttctccaagctctgaatgtcttccggaccctgagagaggaggactccacggagccaggcctcctcccatggggtgtcccagtgtataactttatgacttagttcttcatttcctggggccttatcttcactgtgaacaataaagtttgaacacaga

SEQ ID NO: 481246 - DNA, 197 bp, Homo sapiens
atccccgcttcacaactattgagacatacaaatgggaaggcttctaaacgagctataatgtataaataactgtaactctaaatgaatatcttgcacgtttgtcgaaatttctgcatttggttggaatcagtttcagaaggcttcatgaagttaaatcttaatcagtgctttagggacgagacgatactcttttgcta

SEQ ID NO: 481247 - DNA, 97 bp, Homo sapiens
gtcgacaataaaggagtggttctgcaggtggtgaccacagacaacttctcagttcctatgcttcctggctgatgtttgggtcacttttgaatgctgg

SEQ ID NO: 481248 - DNA, 237 bp, Homo sapiens
ccagaggcatcaaggaggaccacagcacgaggaagaagcctaacgcaacaaggtccacgtgatgcgaaaagggatcgtctctcttccatgataaacgaagattgacacacatcacagcagaggtgctgcaaactcagacagaaagctcagctcccccgcaggaggtagcacgcatcggcgaagcccatctggtggctctaagccagtcagactcgccacacctgagctttctcatct

SEQ ID NO: 481249 - DNA, 530 bp, Homo sapiens
  misc_feature (281)..(281): n is a, c, g, or t
  misc_feature (287)..(287): n is a, c, g, or t
  misc_feature (516)..(516): n is a, c, g, or t
atatatgtgtcccaggatccgaaagatcagcttttactcggaccaacatatgctactccaaaagttttagaaaaggcagggttaaccatgaattatatcgatgcttttgaatttcatgaagccttctcaggccagattttagctaactttaaagccatggattctgattggtttgcacaaaactacatgggtaggaaaaccaaggttggatcacctcctctggagaagtttaatatctggggcggatcactgtctctggggcacccttttggagccactgnttgtcnggctggtcatggcagctgccaacaagactgaggaaggatggaaggccagtatgctttagtggctgcctgtgcacttggaggacagggtcatgctatgattgtggaagcttaccccaaatgactgctctagaaaggaggcgaccgactgatctccttcagcacttgcactgggcaatgccatttccaatgcactacccaagtgatacctgcagttcctagctcttcttangaaacaacatttgt

SEQ ID NO: 481250 - DNA, 377 bp, Homo sapiens
  misc_feature (29)..(29): n is a, c, g, or t
aacagtccaattatattcttggccaattntgtccaaacggacaagaaaaaagccaagtcaacgacaccattatcttggcaagatcagaatgggtttactattggggcagaagcgagaaaactttggttattggaaaaaaaaagaaaaagaaagccagaaaaaaagatactatggggtcaagtgtaacttcatggaaatgccacgtctggtcttcaatgaaaaagctgggttaaaggcttaccgaaaacttttgaccggatttaattaatggtgccagaaccctttttaatggctgccctcattggtcagctaagtatttttcttatttccaaccccgggttccttttaaccatcggatccttcaggatccctgtggt

SEQ ID NO: 481251 - DNA, 490 bp, Homo sapiens
taaagctgtgactggatttcataacaactttatgaggttactttattgactccttttttcttggtgacctccctggtgttattttagctctctgaagctctcttttatgctcctccaaccagcaaactaaggctttatttatatcgctaactctcatttctatgactttgtcatgttcaaggccaagtggttaaagaataaagaaaaatataaccagtgggagttcatccaattttatgttaatttcatataaattgtttcagtgcaagaaaacctacctatgggttctttatagagcaatcagtggttaagagcactgactgcacttctaaaggacatggttcactccagcaccctcatgtcagctaacaaccatctgtaactccagtcccgttggatctgaagccctcttctggactctataggcacaaggcatgcccagggtacataaatttgcattcaggtaaaaaatccatacatatcatttttt

SEQ ID NO: 481252 - DNA, 414 bp, Homo sapiens
  misc_feature (37)..(37): n is a, c, g, or t
tgtgtctggggcttgttcatttcttactttacttagncggcttcaagtctttcttagaagcaaggtggatatacattgaacatgactttgggcatgtcacttagcccttaacctgcatgtcctcttctctaaaatagaggtaacgtcacgcctgagtactcatctgctaaggttgtgcaaaatcaatgaaatactaccacgtaaaaggagttttcttcgtaagtgtatacacctactatgtacccacaattttttaaaagtagtcctttacttgaaagttattaaatagttgtgtgagagaatctttcttttttttgacacagggtcttattccattgcccaggctggagtacagtggcacaatcacagctcactgcagccttgatctcctgggctcaaggacatcctgtgtca

SEQ ID NO: 481253 - DNA, 137 bp, Homo sapiens
  misc_feature (9)..(9): n is a, c, g, or t
  misc_feature (62)..(62): n is a, c, g, or t
  misc_feature (106)..(106): n is a, c, g, or t
  misc_feature (108)..(108): n is a, c, g, or t
gcgttagtntcaaagctttaccaggagcagcctgggttcagccagtcagtgactgctgggtntgaatctgcacttatccccaccacctggggacccccttgttgtntncaggactccccctgtgtcagtgctctgct

SEQ ID NO: 481254 - DNA, 151 bp, Homo sapiens
tcatcgagctcggccccgggttgaatactattgccgtctactctttttttttcttgctttctttctttctccatttctctttgtttttctaccatgggctctaaattaggttctctgggttcaattttctcctctaatttttcccttccct

SEQ ID NO: 481255 - DNA, 642 bp, Homo sapiens
ggccccgcggtggcagcaggagcagctggtgcccatcctggagaagttttgcttcactccccacacggaggaggggtgcctgtctgagcgcgctgccctgcaggaggagctgcaactgtgcaaggcggctggtgcatggcactgcagaccaagggtgacccagcatgtgggctgaagactggtggtgcccggactggatggggcccagagtcccccgtggacccctcacagcatggaactgccccggcctgttgtcggctgcctgcaaggcttcagctcaacgggaacctgcatgctggagctggcgcaggtgctggcccaggagaggcccaacgctgccatgatggaccctctgctcagcggcctcctggactccccggcactcaaggcctgcctggacactgccgtggacgaaacatgcccagcctgaagatgaaggttggtggaggtgctggctggcactggtcacctgtattcccgacatcccagtgcctgctcagccccatcccctgctgcagctgagctacacggcaccgactgcaccccaggccctggaggctgcccaggccgagctgcagcagcacgacgttgtccaggccaagtgggatccgcagaccctgcccagcgccttgggaggcgact

SEQ ID NO: 481256 - DNA, 112 bp, Homo sapiens
atccccctaatgctgctcacatattttaactttgctattcagtgactcagagcttccacacattgatatctgaatggggtgcactgacaaagacacctgttgtggaaggtaa

SEQ ID NO: 481257 - DNA, 258 bp, Homo sapiens
aatagtcagagataatggtagtgctggttgcattacaatgtgaatatacttatgccactcaactatattcaaaatggttaaggtgcgtgcttatagtcccagctactttggagagtgttcaggagaccgtggggaagtctagaaaagagaagggagaggtaagcggtagacaagcgattcagatcgggaagttccgtggatctgaaaacagaataggggggtcccgagcggaaaataaagccctgaggcatgacaaga

SEQ ID NO: 481258 - DNA, 534 bp, Homo sapiens
  misc_feature (331)..(331): n is a, c, g, or t
tgtgctgaggtcgatctaaggatcccccatgtgggcatcactgcactctacgggcgacagagtgagactccgtctcaaaaaaaaaaaggaactcaggttgaggcccagccggcggtggtttaatgagcttttcaggggatacggatgcgggatcaaattggagaagcacgggtctaggtcttagatcctctggcttcagttccgtcatgggatctcaggaatgttcagctgccctctcagggcaacttcttacttcactggaccttccaagacctctcgttcggtcaaaccccaatttgggatcaacccaggcttgcttccctcaggtgtnccaaagcgggtcagagtagtctacaccactatcggcttcaacttctagtaacgtctaagcctccagcagttgtgcttatgaaacggcttcacggaagttctccaccaccaagtagtcagcgggcatcggaattcggcttgtgtcaaagggaactcaacatcttcctcttcaggacatcccctattttaatcctcccagtgatg

SEQ ID NO: 481259 - DNA, 502 bp, Homo sapiens
  misc_feature (23)..(23): n is a, c, g, or t
  misc_feature (141)..(141): n is a, c, g, or t
  misc_feature (143)..(143): n is a, c, g, or t
  misc_feature (362)..(362): n is a, c, g, or t
  misc_feature (365)..(365): n is a, c, g, or t
  misc_feature (368)..(368): n is a, c, g, or t
  misc_feature (371)..(371): n is a, c, g, or t
  misc_feature (376)..(376): n is a, c, g, or t
ggacgcgtgggctgaacttccancttccatccaccccagctttaccagacaccatggagaaggtccttgttcttctgcttgtgtccctccttgcagtggcctatgcagctcccggaccccggggtcttattatcaacctgnangacggtgagatctgtttgaacagtatgcagtgtaagagcagatgctgccaacatgacaccatcctgggcattgcccgttgcacacacaaggccatggagaacagcgagtgctccccaaagaccctctatgggatctactaccggtgtccctgtgagcggggcctgacctgtgagggggacaggagcatcatcggcgccatcaccaacaccaactatggnatntgnctngactncaggcgctccaagcagtgagatcacgcagttagctgggttataccttcttctctttctccctctgtcccatctgagccagccagctgttggcaattaaaacccacttgcaaccttaaaaaaaaaaa

SEQ ID NO: 481260 - DNA, 851 bp, Homo sapiens
  misc_feature (33)..(33): n is a, c, g, or t
  misc_feature (48)..(48): n is a, c, g, or t
  misc_feature (227)..(227): n is a, c, g, or t
  misc_feature (233)..(233): n is a, c, g, or t
  misc_feature (264)..(264): n is a, c, g, or t
  misc_feature (392)..(392): n is a, c, g, or t
  misc_feature (480)..(480): n is a, c, g, or t
  misc_feature (515)..(515): n is a, c, g, or t
  misc_feature (546)..(546): n is a, c, g, or t
  misc_feature (645)..(645): n is a, c, g, or t
  misc_feature (652)..(652): n is a, c, g, or t
tttttaaattttgttatagagacaagagtctcncttatgttgctcagnctggtctcgaccccctggcctcaagtgatcctcccacctcagcctcccaaagtgctgggattacagatgggtgtcaccgcacctggcctctgaggaggatttcattataaacctgccctgaagggagggaatccaattttacgagagggtgtagcctggtgaggcctggatgacctccngaggcnggggcttgtgcctgggctgaggcctaagggncaatgggcagacatgaagttgccccaggcagagggtacagtgtgggcaaagtcaggaagtggcagggcttggatcactccaggaagagagaggagtcatgtgtcacaggagctcgagacccagagagngaggcagggaggcagggaccaagcttgggcacagcaggaaggcaggacagggcatggtggggccaatggaatcattacccaagacggngattttcagggaaacagcttagataaggccaggcntacagtagctcccacctgtaatcccagcatntggggaggctgaggtaggactgctgagcctgggagctcgagaccagcctaggcaacatagtgagaccccatatccataaaaaatttaaaaaaggagttngtgttcntgtagtagcagacttgggaggttgaggtggcagtatcacttgagcccgggagttcaagcctaaagtgagctgattgagccattgcactccagcctgagcaacagagagatacgctgtctcaaaggaaatacaaattaaaaaaccaggcgggtatgctggcgtgtgcctgtagtctcagctacttgggacactgaagtgg

SEQ ID NO: 481261 - DNA, 875 bp, Homo sapiens
gatcgcttgagggcaggagttcgtgaccagtcctggtcaacatgatgaatgccttgtctctactagaagtgcagaaatgggctgggtgtggtggcatgtcgcctgtgtgtcccggctactcgggaggtctgaggcagcaggaatcacttgaaacctggagggcagaggtttgcagtgggccaggatcgttgcagtctgcactccggcctggtgcgaatagagcaaaacttatgtctcaaatagataagactcttttcaagttttctaccctctgatcaagacaaatttggggatatccagtgccatctccaaggactttcaggggatcatagatgcttttctgtgcctatctgctttgagcatgtgaaaaaggtgatagtctgcttctctctggtacttgtctgccaaccatctgatagtaagattacgccaaggcccttgagccctctgtccttctctggttatgtgactgtcccatggttcctaggaagacagagtatgttctccgagctaaagtcgtctcctctctataacgcagtttactagtgtcttttcagtagcagtgagccaaaatagtagaggaggggagagaggcacctggaactctgcgggcctgcatgcggaaaacgtgagccagaagacgaatcatggtataacgatattgtattaacaggagagcctctaagttccacgatcgtgaagtcccactgttgcagtggccaccaggacggtaaaaacggtgggtccagattgctgtcatctgaaaggcctcagcgagatgaaagctatcagtaatcaggctgaaggcttgtgggtctggtgccaccaccacgttagcaccaggccctctctggtccagaggctcatctctctgg

SEQ ID NO: 481262 - DNA, 117 bp, Homo sapiens
atactggcatttgggaactgtatggatactccaaactgacttctttcaaaaaaacaaaaacaaaaaatttttttagctttgacaaacacacaaaagtggtaataaagagagccctcc

SEQ ID NO: 481263 - DNA, 352 bp, Homo sapiens
gtgttgaatgtggaaaggaatcaactgacacatctcccacgctctattgggaactgcttcagctccagaccctcagtgtgaaagaggcccacatgtggctgatggcaagtaggggtgtcctgagttgctcagccgagaagcagtggcagagcctcccagccccacatcccatggcatcaggaggcagcagaagctttggggcactgagtttgccaccggggtccctgcagacaacaggctgaaggaacttcccgacaccctgggagagctgcgaagcctgcgtaccctcgacatcagtgaaaacgaagttcggagactgccgcagatgctggctcacgtgcggaccctggag

SEQ ID NO: 481264 - DNA, 263 bp, Homo sapiens
gagcctgttcccttattggtgagttggaggttagtgcaagattttatccaagtggaggtttatccatctgtgtagccacgggcatgtctccaggcacaacgccacgtgctagttcccttactggttcctgcagcctgatttccccccaccccaggctgctttctattttacgtggggataaggctctgaccttgggccgggggctctccaggggctcttcccttgctgtctacctaaggcaagctaactcctttcgtcccccg

SEQ ID NO: 481265 - DNA, 206 bp, Homo sapiens
gtgttgaatgtggaaaggaatcaactgacacatctcccacgctctattgggaactgcttcagctccagaccctcagtgtgaaagacaacaggctgaaggaacttcccgacaccctgggagagctgcgaagcctgcgtaccctcgacatcagtgaaaacgaagttcggagactgccgcagatgctggctcacgtgcggaccctggag

SEQ ID NO: 481266 - DNA, 240 bp, Homo sapiens
ctgctggtcgactctacgacggactccccctagggactgtcttctcagctgtggcattcaaatggcttttctgcgcttgtgtgtgtgccttatgcatgaaggagaaaggccacagtggttgtggcagagaggcaggtgctgtggtcccttccagggaagtggcaacatcatttcttttcctacccatcccatctctgaccagacaagctgccttggcgccagtctactcgcagaagacat

SEQ ID NO: 481267 - DNA, 1615 bp, Homo sapiens
  misc_feature (887)..(887): n is a, c, g, or t
agcgggtcggggagagagtgtacctatggcgaagacctagcgattacctgttgcgagctgatggtgactcggcggactcggggtgtcgggtgaacgacctgtgtcctgtgccgcgttctaccgtagggacgccattcaagcatccgagcattattatctccaccgcgatagggaatggactttacatagtgtatggacctattacgtacgcttcagaatagcgctagaagagaagttaagacctgcagtagtatgggtgaccatcgatgcacggctcatagtacacgggtttccggaccgaatgcacgaagcgggcactcacttgcgaagggagtgcgagtaggtgcatctactgcttgggtccgactgagcatcagaccatagcggaggaaaagtcactttccgaactaatccagtcgcagagagagcgtggaatttcgaggaaagaaatcatgaggcgaaagcagacggccattctggcatgaaccgtcagggtgagaattgactcacctccgtgggaaaccacaggttgttgaattgtttgagatggcatccgccagaggacttaacgttttccagagggtaaacggggcagcacaaagtcgtgggggccctacgacttcattggtagagtcccccgtgtccatgtggacgagccagcttgcgaaaagagtccaattattctactcgtggagatgaatgggattgtattactacttgctacgggcaaggcaggattattcaagaaggcatagatactgtggtctagaaatggtttggtaccgggaaaccaagtccccccgagggggcattgcgaagcgcaagggacgtcgcagaaatccacggggcggggatccgaggccatgaaatggagggaagcgcacgtntgtttttccccgagtgtggtcgtgtctgtgtccttggtggaaaggcaaccatcgggggttgtagacttcctgggaggcccttcgggttccaaggcccagaggttggggctgtgggtgcccttgggtccttggaggtggaggcccctggtagattccaggccgggggggccttcccccaaccatcgaaaagggcccagggggcaggtcccgggggacccacggggggccgacaggggccagcgcagacaactggcaagtggacacacatccgggtcactattaacgacttaccaggcgtgtagacaccttctgcaacacccttgggggagatgcgcgcgaacggtcacacaagtatggcaatcatccccgggtaacaaacatgggggaaaggagcggcccacaccacaagggggacactattacaaaaagacaaaggagaaaagggggtggaagcgacgaccaaagccaggcgtggggcagcgccccaggacataagagtgggcctcctagggacaacacgagtccaaccgagtggtggataaacacccctccacaccgacgaggggctccaacaacaacagggtctgctacaacactccagccactgcaatgagcaacacagaggagacgaatacgacgacaaggaagcgacaatccacccgtgctctaggcgcaacgaaaacaccacagcatatgagtggaacgaaacagaaaaggaggaagcatac

SEQ ID NO: 481268 - DNA, 189 bp, Homo sapiens
attgttcgcaactcaagctcgaagttacgcgcagatcacgccggaggaaaatcatccccgacgtggacatcaacaaggacagccggggagacacgcttgctggatcgcgatcagcaccaagcaggtgaagacccaggtactgttcgagaacggcggcccggtgttaatcggcggcgtcttcgagcaggt

SEQ ID NO: 481269 - DNA, 836 bp, Homo sapiens
  misc_feature (251)..(251): n is a, c, g, or t
ctcttgtgccccgtcgtatgtagtggtgtcccacacagagggtgcctcgttattacccccttcgtggtgcacacgacaccaccacagatgatgggtaggggccaacatcacatttgtgctgagagggcgctgcaccagcggcgtgctcctcgtatgcgggtcgtttttttgtcgggtgatgcgaccacaccaccaccccacatgggctcaccagtagtccacccccaacatttcttgcgggtacgagtttntgcgccaccacaacacttcggggacacagagagccccaccacgtgtttgttgtggtgtgtgagtatgttcgcctagacacacttttctcccacgcgggagagagataacaccctctgtgtcacagagatactctgttcacactaacacgagcgtgaattatacctacgtagactccacgcaccccccttcttcacacacgcgtgatacgtgatagcgtctctctgtggtgggtggtgtcactctgtgctctctgtggtctgttcactctcgagaggcgccacgcggtctggtgaggcgcgctctctgtgaggacactgtgtctccctctggtgtgtctctcccgtgtgcacagctgcgccacctcgtagtattccaccacgtgccccgaggtttcttcgctcggttttgggcacattataacctccctttcctactgggtgttagagctaccaccttagcacacacaaggaaaatgccccttcgtgtgaccactaagattgagatttatacccaccataccacacatagcccccagaacatcattttgcactcaagaagagttttggaccaaaaaaataaaaaaa

SEQ ID NO: 481270 - DNA, 168 bp, Homo sapiens
gccaacttcatagattccggtgttccttgtatagtccaacagcctacttagtgtacctaatggatattcgtctggaggagcagtagaagaaaagcacatatgatattgcccaagcagccagcctgtcgtggattgatccctgaagttcgacgactacaacattcatct

SEQ ID NO: 481271 - DNA, 1652 bp, Homo sapiens
  misc_feature (979)..(979): n is a, c, g, or t
tttatgataatggttgttgcgggctcgtatctgtgtggtggtgtggtcgttgctactcccctcttcttggctttgtcgttgtgatggtgtgtctgctcgctgactgtaagtgcgatcctgctccccccgctcggctgcgtgtgtggcgtggactgttgttgtagcttgacgacgcccagcggctcgcgtctctccctcctccttgggatgatgagcaaattattggggggggtgttttttttttttgtagaagaaattctctattctttgtgtccgcctgctggttcgtcttccccgtccgcgggggtattgtttgtggtttttatgtatcgcgccgcctccgcgccggccttcctcttttggttggtgtgtttatagtagagaggcgccgcctccgttgtgtggtgatatatatgttttccgccccgccggtttcgtgccctcgtccggtagagattagtgtttcgcccgcccccgtgtggaggttgttgtgagaggacacccacaccaccttttgtaggtgaggggcgggggccacacgaatttgttgttctgtcccccccccttgtgcggtgtagagggcaccatgtgatgatttataatagggcgtctctggtgtgtggtgtaaacagcaggatgttggattgagtattgcgccccctctcggtcgcggcggaatatttgttgttgataggagagcgagctgagggctgttgtggaagagatgactagaacaacgagtggtctgtggtgtgtcgtaggatatgagggtgtgcgtgatgatttgtgtgtccgccgcccgcccgcgttttacacacacttatgaggagaagaagaaagaaaaagagaggtgtgtcctcccgcacaattagcgcgccgctgtgtcctacagagacaccctcgcggcggggttttatatatataccacacgcgtcatctttgtagagatatgtgtgtttaagcgctctatgtgtatagngctgtgcccgcagcacattgtggtgacgacacatcatatagtggggcggcacacccctcgctctatatttttttacaaccagcgcgggagagatatatttctctgagagacccacacactgtgtgtgtgacgactatatgttttgtgttgtgtgtactacatagtagtgtgtgtggagagaaatatatagcctccctccctcgccactcttgtgataagagatagtatgtgttttgtgagagacagacagaggcacacactgtggagtagtgtgtgagagatatatatattttttcggcacgaggcgcacacaaagagatatatatttgtatagagagagagtgtgtgtgttgtttagtatcttttcacacgagagagtgtcaataataacacacgtgtagaggcacgcacacactttgtgaggtgtgggtcgttatatataacacacctctctagagagaagaaaaataataaaattgttaatttctttatgccacaccttgtgttaaaaagttaaaatatacttgtgtttgtaaagccctgtgttctcacacacaatatcgccctaaggtataagggagaagagaggagagagagagaataaccacaccccacctgtgaaaagagatgggtttccaccttttttgtatatgtaaaaagtaccccgtgggga

SEQ ID NO: 481272 - DNA, 121 bp, Homo sapiens
  misc_feature (106)..(106): n is a, c, g, or t
ctcaaggctttatacttcctacaaacaggtctcccttctggaatcacatctctggttattgaaactctaaaaatacgagagaattagccgggcacggtggctcatngctgtaatcccagca

SEQ ID NO: 481273 - DNA, 313 bp, Homo sapiens
  misc_feature (104)..(104): n is a, c, g, or t
  misc_feature (177)..(177): n is a, c, g, or t
  misc_feature (191)..(191): n is a, c, g, or t
  misc_feature (209)..(209): n is a, c, g, or t
  misc_feature (216)..(216): n is a, c, g, or t
  misc_feature (244)..(244): n is a, c, g, or t
  misc_feature (287)..(287): n is a, c, g, or t
  misc_feature (289)..(289): n is a, c, g, or t
  misc_feature (302)..(302): n is a, c, g, or t
gagagagagagagagagagagagagagagagagagagagagagagcagggccggggcagcccctctctgcccagggaaggcaccgtcctcaaagacaaggcttngccgggcagtggcttccctgagcggaggggtggcttgagcaggacacttcttgcccttactcaaaaacgaaanaaccgttttccagnaggcgtcggggggaacgnctgacgnagacacaatcgttatgttctcaattgtnttcctcctcttactttctctcctgcctggtttggacaagccantngcattcgcccttnaggtcctcgca

SEQ ID NO: 481274 - DNA, 254 bp, Homo sapiens
aacgatgtcctcactaaaaatacaacaattagtggggcatggtggtgtgcacctgtaattccagctacttgggagacagaggttacagtgagctgagattgcgccactgcactccagcctgggtgaagactgtctccaaaaaaacaatgttatgggctaaaagaagtcatactgcgggattgtccgtggaggggatgggaatcaagcaccagcagttatattgggattgcctgcctccagtcagctgtggagag

SEQ ID NO: 481275 - DNA, 309 bp, Homo sapiens
acgtgcctgtagtcccagctacttgggaggctgaggcaggagaatcacttgaacccgggaggcagaggttgtaatgagctgagatcacgccactgcactccagcctaggcgacaagagcaaaactctgtctcaaaaaaaaaaaccccaaaaaaccaaaataaataaaataaaaaataaaaataaaaaaattggctgggcgcggtgctcacgcaataatcacagcacttagggagaatgaggagggccaataacctgaaaacaggagtttgagaccagcaatgataaaagtggtacaaactccagaaaca

SEQ ID NO: 481276 - DNA, 319 bp, Homo sapiens
atctgagactaccgactcaaaagttaacttctctcactgctacaaatgatagcatcgagaatggtaattgcagctagtcatgagtcggctcacgcctgtaatggccgcactttgacaggctgcggcaggtggattacctgaggtcaggagttcgagaccagcctgaccaacatggaaaaaccccgtctctactaaaaatacaaaattagccaggcgtggtggcgcatccctgtaatcccagctactcaggaggctgaagcaggagaatcacttgaacccgggaggcagaggtcgtggtgagccaagattgtgccattgt

SEQ ID NO: 481277 - DNA, 322 bp, Homo sapiens
ggtaactgcgtgcagtgtcttgccttgctttctcttcttactgcaccacagcttggtttcatgttacaaaaagaaaagctggaggctcccaccccgccacatccaaatttcatttccccctgtagtgtagcccatttccaccccaccaaaaagttgccacaggttttctttgaatagaatatttattgggaagctctattttaatagtttttatttaagaaagtctactatgggaagagttcttctgtttgagaagaaaaaaacaagttaaaaactgaatgtactgatttagaaaatatatataaattttttttgttaaata

SEQ ID NO: 481278 - DNA, 411 bp, Homo sapiens
atagcgggaccaatcacttgaaatcaggagtacaagactagcctggccatctctactaataaagacaaaaattagccaggcgtggtggtagtacatctagtaaccccagctactacagaaggccaaagcacgagaatagctcgaacccgggaggcggaggtatgcagtgatactatgtgcctcagcctcccaagcagatagggattacaagtgcgcgccatcaagcaggtagcttatgtatatttagtagagatgaggttactccatgttggccaggccggtactcgaactacctggcctcaagtgatctgcccaaccttggacacccaaaatgctgggataacatttgtggggccacaatgcccagtgctaactattaaactattacttataacttatgtgcactggagt

SEQ ID NO: 481279 - DNA, 245 bp, Homo sapiens
ctggtctgcggcgagtcgatgcttgagttgtgttgatacgtgaaacgcaggtttgctgtcctgttctttcctcccacgactcttccttttgcctgactatcatgatctcggaatcctctctgcgtttgaaatgcagagaggatcagcaagcaggagtatgacgttccttggtcaacgcgagaacctcttggtttcctttcagcgtatgcgaacaagagtggtgatagcgcctactctctgcgtat

SEQ ID NO: 481280 - DNA, 105 bp, Homo sapiens
ccgatgcttagaaagcggctcggggggggcatcatatagtcactccaggtttatggagggttcttctactattaggacttttcgcttcgacgccgctgttacctg

SEQ ID NO: 481281 - DNA, 685 bp, Homo sapiens
  misc_feature (483)..(483): n is a, c, g, or t
  misc_feature (685)..(685): n is a, c, g, or t
ggagaaatcaaattcggcaggtcaggctggtgcgacttcggcaccgagggttagtcacgctcggagccatgccgtcaagggccgctgcagtctgtgcaggtcttcggacgcagaagacagcgacagctgtggcgcactgaacgcggaatggtctcataagtaacggcggcccttgagatattgagccgcgcacgctaccagtacaagctgctgagccagttctgcttctcggcaagagcgaattgctgtgtaacatccgtgttcgtgtaagggtggtggtcacgtgccagattatgctatcgtcagtccatctccaaagccctgtggcctattaccagaaatatgtggataggcttccaagaaggagatcaaagacatctcatccagtatgaccggaccctgctggtagctgaccctcgtcgctgcgagtccaaaaagttggaggcctggtgcccgcgctcgctaccagaaatcctaccgatnagcccatcgtgactcaaaactcccttgtatataacagtttttgagggatttaagtttcaaacacaaaacccaaaaaaaaaaaaaaaaaaaaaaaaacgcggcgttttttgttgggggggcgggaagggcaggttttttcgacccttttgtaaaagggaaaaggcggccccattggggtttttttaaacgtatatatataaan

SEQ ID NO: 481282 - DNA, 114 bp, Homo sapiens
ccgatgacctctagggatcccaactgtaccacttatggcctgccgtccttacacaacttcttcctcctcttcatcatcactgaactatcagtttctcagaatagtccacttctt

SEQ ID NO: 481283 - DNA, 134 bp, Homo sapiens
ctctagcacgatcccatcgtgcaagccctgggtccagacaagctggtgttgggttactgcaggtaattcccgaatgagtctcagtgggttttggtttttgcatttggtgtgagcagatcagtgaggtgccatga

SEQ ID NO: 481284 - DNA, 144 bp, Homo sapiens
tgctcctacccttatagactaacaacaacaaacccattagcttagcatgggtggcatgcgcctattagtcccagctatttgggagtgctgatgtgggagaatcacctgagcctgggtgattgaggctaggagtgaatgatgact

SEQ ID NO: 481285 - DNA, 242 bp, Homo sapiens
  misc_feature (47)..(48): n is a, c, g, or t
  misc_feature (95)..(95): n is a, c, g, or t
cttgggagtccggggttggaggtgctgggcaatggaacttcaaattnnatgtcgcccagcagtgaggggagtcgggaggtgaggcctgtagcaanccaatttggtggagtccagcgataccaggtgagaagtggttcaccagagggcaagggtgggggcctcggcagatctgtcctcttggcccctctgtcctcaaatgtccaaaatgttggaggacctctgttcatatccacgcctgggcc

SEQ ID NO: 481286 - DNA, 199 bp, Homo sapiens
tcgagctcgcccactgtgtgctcagtgtattccttacgaccctgttgtgtgaaacataacattggcatgtcgaggagtcagaactcggattcccagcctcactcgcctctgtgtgtgttgaccacgtctctgctgtgaataggcatttcatgcagtgtgtcttgttatggagcacacagtgtgggtgatgggggatccg

SEQ ID NO: 481287 - DNA, 476 bp, Homo sapiens
cgaataacgaagcgcatcatttctgatcaagtccggcaatttatctgtcgttgtgtatccttgctgaattccccactcgagaactagggcagcaaagatattcaaaagctcaaagcccctttcaatgaaagaccagagatatttgcaggatgcggaggtgccttcgcctgagcttaaatcccagcaactaacccttgacaagtcatgaacgatatcatttctcatatctagataagtattaagtttttcggacagatcaggatctaacttcgcccgccggcggacttggtcaagaaagtaccctaaaggtttctttcgctctgactgattcaagctatgaagcttttcaagagtcaagggaccctctttttgcagaacatatgtcgtgcagaagcgcatcatactctcgacagactgagcatggatgagcgcacggccaaggaggtgataaggatcttcgtccggaaagtctctct

SEQ ID NO: 481288 - DNA, 98 bp, Homo sapiens
gcccgtgtggcctcggtggacatgggtcctcagcagctgcccgatggtcagagtcttccaatacctcccgtcatcctggccgaactggggagcgatcc

SEQ ID NO: 481289 - DNA, 406 bp, Homo sapiens
gtggtggctcgcgcctgtggtcccagcactttgggaggccaaggtgggaggatgacaaggtcgggagttcaggaccagcctggccaacatgctgaaacctcacctctactaagaatacaaaaattagctgggcatggtggcacatgcctgtaatcccagctacttgggaggctgaggcgggagaattgcttgaacctgggaggtagaggttgcaatgagctgagatcgtggcactgcactccaggttgggtgacagagtgagactccgtctcaaaacagaaaagaaagtaaataaaaaaaaaattgtttttaagtgtggactcttgaagtcagtcccaactcggccatttactagctgtgtgaccttgggcaaatttctcaatctctctgaagcacagttgggtca

SEQ ID NO: 481290 - DNA, 521 bp, Homo sapiens
  misc_feature (1)..(1): n is a, c, g, or t
nctccgacgtgtcagcataaatcagtaattcattcctttttattactaatagtccactgaatgtatagaccacattttgtttatccatttgtctgactgatggacgtttgtatttgtttcacctggtagttgtcatgtaatagttctgctacaaactgttgtgtacaaatatcatttgaatacctgttttcagttcttttgcattatctacctaggagtggaattgctagctcatagggtaattctatgtttaacttcttgaggaaccaccaagcaattttctatagccagtggctgcaccattttacattcccaccagcaattccagtttttccacatctttgccagcgccttttttgttgttgttaaatgataaccattctagtgggtgagaagtttacctcactgtggttttgactggcacttccataatgattagtgttgttaaccatcttttcatatgcttgttgaccatttgtatatcttatttggagaaatttgtgttcacgtcctttgcctgt

SEQ ID NO: 481291 - DNA, 810 bp, Homo sapiens
  misc_feature (4)..(6): n is a, c, g, or t
  misc_feature (8)..(10): n is a, c, g, or t
  misc_feature (12)..(14): n is a, c, g, or t
  misc_feature (17)..(17): n is a, c, g, or t
  misc_feature (691)..(691): n is a, c, g, or t
  misc_feature (699)..(699): n is a, c, g, or t
  misc_feature (715)..(715): n is a, c, g, or t
  misc_feature (717)..(718): n is a, c, g, or t
  misc_feature (725)..(726): n is a, c, g, or t
  misc_feature (729)..(729): n is a, c, g, or t
  misc_feature (738)..(738): n is a, c, g, or t
gctnnntnnngnnngcnggccttcctcgcgtcacagccgggatgaagccgatcctactgcagggccatgagcggtccattacgcagattaagtataaccgcgaaggagacctcctctttactgtggccaaggaccctatcgtcaatgtatggtactctgtgaatggtgagaggctgggcacctacatgggccataccggagctgtgtggtgtgtggacgctgactgggacaccaagcatgtcctcactggctcagctgacaacagctgtcgtctctgggactgtgaaacaggaaagcagctggcccttctcaagaccaattcggctgtccggacctgcggttttgactttgggggcaacatcatcatgttctccacggacaagcagatgggctaccagtgctttgtgagcttttttgacctgcgggatccgagccagattgacaacaatgagccctacatgaagatcccttgcaatgactcttaaaatcaccagtgctgtttggggaccccctgggggagtgcatcatcgctggccatgagagtggagagctcaaccagtatagtgccaagtctggagaggtgttggtgaatgttaaggagcactcccggcagatcaacgacatccagttatccagggacatgaccatgttcgtgaccgcgtccacaggacacacaagccaagcttttgantccacaantcttgaacatcagaanannttccggnnagnaagtccgtnaatcagtggccctccccatatgacctttggccccggcggggttcgaaaccttgtttccccacccccacgttg

SEQ ID NO: 481292 - DNA, 670 bp, Homo sapiens
  misc_feature (605)..(605): n is a, c, g, or t
  misc_feature (617)..(617): n is a, c, g, or t
  misc_feature (657)..(657): n is a, c, g, or t
  misc_feature (667)..(667): n is a, c, g, or t
gatggttattatttctggagatacttgcattaaacattcctttttatgacatttgatgcaagtgtacaactttaaaaacagagttttcgtatttttgaaaaagtagtggttgaaatgtacttaaattattatgtagtttaaataggactctttactccatgtgtttaagaataaaatcttttagttagcagaaggtgataacttaaatcaggatttctcagtcttagcactgttgacattttgggccaaattgtactttgttgggtgtattggcctatacattgtaggatggttggcacattcctggcctcttcctactatttaatagatgccagtagtaccctgcagttatgacaagcagatatgtccagatattgctgaatgtctccaggagaggggacaaattcctccttggttgagaattactgttataaatagatcggtttaaataatagtagaagtgtccactgaatttcatttatttttgcattaacagtcttttgaaaagactagtatgtctcaagctcgaggtttatttaatggcaagtgctttaacttggttctgacacttgtggtccaatatagagtgcccatagaccaagagnctttaatctganccccaaagaattcattcagatttagccttccagccccctnatataagacncag

SEQ ID NO: 481293 - DNA, 280 bp, Homo sapiens
  misc_feature (4)..(6): n is a, c, g, or t
  misc_feature (8)..(10): n is a, c, g, or t
  misc_feature (12)..(14): n is a, c, g, or t
  misc_feature (17)..(17): n is a, c, g, or t
gctnnntnnngnnngcnggccttcctcgcgtcacagccgggatgaagccgatcctactgcagggccatgagcggtccattacgcagattaagtataaccgcgaaggagacctcctctttactaaaaatacaaaaattagccaggcatggtggcacacgcctatagtcccagctactcaggaggctgaggcaggagaatcacttgaacccaggaggcagaggttgcagtgagctgagatcacgtcattgcactccaccctgagcaacaagagcaaaactcc

SEQ ID NO: 481294 - DNA, 234 bp, Homo sapiens
atgagcgagcggatgcgtgcagtgctcagtgaccatgggctgaggctatggtgacgcaggtcaggtgcacggactcgaagggctgggaggaaaccttgtggctggagcccaccgtcctgacttggggaagattttaagtggtggacacctaatcaagaatcgatcgacactgccccgtttatgtcgcagcgtgattatatgtctgtaactgatgaaaatgaaatacattggctt

SEQ ID NO: 481295 - DNA, 385 bp, Homo sapiens
gggtgctcagtaaagctaaaatatcagcctgtattgtacaaaactccaggtgacacaaaataaactacgagagtggttttaacatatctgaacacacaatagctaatcacccagaaacgtgggattagataccccattatgcttagccctatacctcaacagttaaatcaacaaaactggtcgccagaacactacgagtcatacgcttataactcatatggacctggcggtgcttcatatccctctagaggagccagttctgtaatcgataaagccccgatcaacctcaccacctcttgctcagtctatataccgccatcttcagcaaaccctgatgaaggctacaaagtaagcgcaagtacccgagtacccatctctgcttgac

SEQ ID NO: 481296 - DNA, 250 bp, Homo sapiens
cggggaagtacaaactaaatctgttttggatagaatgttggtgatagaaatgaatagagaaagaactgtattatgaaatagagaagacaggcaaattaaaggatacagtatactaactgccaaggaaggcagccctagaaagaaaatgtcaaggctgggtgtggtggctcactcctgtaatcccagcattttgggaggccaaggcaggtacatcacctgagatcaggagttcgagaccaggctggccaac

SEQ ID NO: 481297 - DNA, 133 bp, Homo sapiens
ctgttccggggagagggtgagagtcgtaaggggcaatagcaatagagattacactgtgctgactaaaacactctgttctactgagacgtcgaataccgtaccttcgtggtacctaagttttaattggtatgta

SEQ ID NO: 481298 - DNA, 304 bp, Homo sapiens
  misc_feature (266)..(266): n is a, c, g, or t
  misc_feature (293)..(293): n is a, c, g, or t
tagcagggtagacaggtgaagtaactggatgtgtatcagccatgccctttccccatgcccccggcactccccattcccacattcttttattttcacgtacttactataggccttgtaggggctcttgtgaacacagacaaagagccaaggtgctgtggctagatgccatgtaattcccaaatgcatttgaggaggcatagggcatattgagaccataccaagggtaacaaagacaaagacccgtgtctcgtataaaaaaataaaanattacccggagtatggtgggtgtgcanaaaaaaaaaaa

SEQ ID NO: 481299 - DNA, 203 bp, Homo sapiens
  misc_feature (39)..(40): n is a, c, g, or t
  misc_feature (69)..(69): n is a, c, g, or t
  misc_feature (92)..(92): n is a, c, g, or t
  misc_feature (99)..(99): n is a, c, g, or t
  misc_feature (113)..(113): n is a, c, g, or t
  misc_feature (116)..(116): n is a, c, g, or t
  misc_feature (140)..(140): n is a, c, g, or t
  misc_feature (153)..(153): n is a, c, g, or t
  misc_feature (159)..(159): n is a, c, g, or t
  misc_feature (163)..(163): n is a, c, g, or t
agatgaaattcccgggcgtctaaacaaaacccactttcnnccgctacacgaccgggggtatactacggncaatgctctgaaatctgtggagnaaaccanagtttcatgcccancgncctagaattaattcccctaaaaanctttgaaataggncccgtntttnccctatagcaccccctctaccccctctagagccaattgat

SEQ ID NO: 481300 - DNA, 389 bp, Homo sapiens
gacaggtctcaaggattgatatccagatatataaagaactctcaaagctcaacagtaagaaaataagtattccaactaaataatgggcaaaatatttgatacagagttttttatcacagcaagatatattaaaggcgaaataagcacattaaagatgctgcaaactattaatcattaggaaaataaaaagtttaacattataataccagtatatgcccactaaagtgactaatattagtagatcagctataccatgtgctgtctaggatattgagcgatcagtaccctcagacattgttgttgcaaatataaaatggtacaaccattttggagtatcatttgacagtttttttttttttctttttttgaaatggattcccgctgggtac

SEQ ID NO: 481301 - DNA, 102 bp, Homo sapiens
cccttccccacagtgaggtgaactttctgccacttgtccctcatcacaccctcagcttttcacatcagaacccttacctcactttagttttcattgcgccat

SEQ ID NO: 481302 - DNA, 178 bp, Homo sapiens
  misc_feature (42)..(42): n is a, c, g, or t
  misc_feature (49)..(49): n is a, c, g, or t
  misc_feature (143)..(143): n is a, c, g, or t
  misc_feature (172)..(172): n is a, c, g, or t
gtagccaagtagactggaatcctgtgctgaacccgaatcttncaacagnctacaatctgtgaccaccacaagatgtgccctgatggcagctgaaggttgattcagatgggcacttttcttccccttcctgcctagtttccttntgttcttgagtcacgcagaattccttctntggtcg

SEQ ID NO: 481303 - DNA, 953 bp, Homo sapiens
  misc_feature (953)..(953): n is a, c, g, or t
ggcgggcgcggtggcgcgtgcctgtgatcccagctactttggagggtgaggcgggaaaatcgcttgaacctgggaggcggaattgcggtgagccgggattgcgccactgactccagtccgggaaacagtgcgagactgtggtctcaaatacagaaaaccagagacaaaaagatttctgccgtgagcccgccgtgcctggtgtacatcatttccaatatcttactagttattctgtggggctaaggttgccacaattttatcagaccccttttaaatgtcattcaaattttttcccaatatttagactgtgtttgcagtaagaattcataagatatgcatgctagtactcctgtccttttttcaaaaggacaacttattagatattcttggttcctcatatctttggccaacatgggtatgtggcattcttcttggtttaccagtcaggctaaggaagctcaggaagaaacaatatctcattttttatgtacttttctctgattcttaattatgttgaccatgtttccatttctttgtgaaatgcctatttatgttcatcttcatcttaacttgtcaacgagtacttgtataagtatataaaccgttgagtatatatttttctgtgctgctcacaggttgggatataggttataataggcggtcaaatttacccaatgtttaattcctctatcatgtgcacttgaatggggcttagaaaggcggtcactacggggccgagtttggttgcacatctggcatgcgggcattaacatcccgggcagtgggcagtccattggggttttgggacagtaatcttaaccactcaggttttaggggttacacgcaggtgtttggagtcaactgagggccaaaaaaatgtgggtgcagtgcaaaaatagtgactgtatttggtcttctctcttttttttgtcgtatcttaggcttgtgcctcn

SEQ ID NO: 481304 - DNA, 434 bp, Homo sapiens
agagagagagagagagagagagagagagagagagagagagagagagagagagagagagagagagagagagagagagagacacagagagtgagagaatgtctcctgttctctcgtctcatctgtctccttcttcctccttcctcgccttccctgcttcatatattgcccgctcgtcgtctgctctctcgttcatccactctctcccactctctccttctttgttttcccctcttcatttccctgcggctctttcttttgtctcctcttctcttgctattgtctccctccatttgcctgcttcctctcattttcatctctgcccctgctcctcacttcctctccctctccctgccttcctccttgactcttctccccctctctccctcacttcttactctcttccttcctgttctctcttctcccttcgccttctc

SEQ ID NO: 481305 - DNA, 717 bp, Homo sapiens
agcgggcccacgtggtctcgggctcctgacccgtgctgctcacgagttcaagactcctgcggcggcgccttttccagttccaggtgtgcagaattgtcctctccccatgcgcggcgggtctgcatttggtcgctggctccgagatcgtcgcggggccgcctgaagcccaatacggtaccgggggccgcatgccgtagacggcgcaccctccgtcctctccccaatcagcaggtccgagatgccgatatgcatccggctacgggaaagtggatctgtgcatttcgggtcgacccgtcggaagatcatcgatgactcctgttagatagtcgaatggattccacaagcccgactagctttcgctgaatgacattcaattctcctatacgtcgaagaaaatgttaaagagtatctgcagcacacattaggagcaagaagaggagctgccatgctagagatgtcgatatctttgtgacggaaacagtgctgtagagagtgactgcccaaccctgtggactgggtgcgtagtttctctattcacctgcaatggcatcttgtggcacatggaggtgagttgatctggtaatcgagattgattccgaaggatcgtcgtgtaggataatagtgtgctgggctagaatggtccctggaattcgaatagagcacttggcagctcaacacagctagcagtggccagcatgtggcagggaggcattccag

SEQ ID NO: 481306 - DNA, 267 bp, Homo sapiens
taaccagaaatatcttgcattgcaattattaccctagacctcgggcaagaatgaattcttgccacagctgcccaactattgaactttcatatttctcaatatgaaggaaatggatgcaaattaaacaaaagcccatagagtgctcagagcacagtcacaaaatcaatgagacagcatggaaataaagtctgaactgcaaactttaggaggatcgcttgagcctgggaattccagaccagcctgggcaaatggtgaaacccaatcctt

SEQ ID NO: 481307 - DNA, 722 bp, Homo sapiens
ccctatacaggggccctctcaggcctcctaatgacctctcgggctaggcatgtggagtttcacttccagatccataagcgctcctcatactaggcctactaaccagcacactaaccatataccaagtgatggcgcgatgtaacacgagaaagcgaccataccgaaggccaccacacaccacctgtgcaacaaaggccttcgatatgggataatcctatttattaccgtcagaagtgtttctcttcgcaggatttttctgagccttttagcactccagcctagcccctaccccccaactaggagggcactggcccccaacaggcatcaccccggtaagatccccgtagaaagtcccagcgtccgtaaatcagcatccgatattagctcgcatcaggagtagtcaatgcaccgtgagctcatgcatagtctagagtagaaaacaacgcgaaatccaaataattcaagcagctgcttattaccaagtagtccacccgtggagtctctatgtacacccgtcctacaagcctcagagtacattcgaggtctcccttcagccatgttccgagggcatctacggcctcaagcatgtttatcgtaggccacaggactgtccacggagcttcacgtcaatcataggctcagagctttgcctccacgatctgcttacaatccgtcaagctaatatttcaccgttaaccatccaaagcatcacttggcttcga

SEQ ID NO: 481308 - DNA, 364 bp, Homo sapiens
tttattgaagattcttgaagaacgctgagagcggtgtgctgtttctggtgactcatgcgccggggcgactgttggcgacgatccggtcgcggtgccgtcggctgagttttccgatctggacgccagatcgcctgacgacgctggtgcggaaccgtaccggtgtggatctggaagacgccgaacatgctgccgcaatggcggggggatcgcccggcgctgccctggctctggcggccggaactacgttcgagatggatcaactggcgcgtcagtgggtcgagggcgacatcgaccgggccgaggccctgtccatcgccgacaagttccgtggcgctgaagggcaggaacggttcgagaccctgat

SEQ ID NO: 481309 - DNA, 459 bp, Homo sapiens
  misc_feature (4)..(4): n is a, c, g, or t
  misc_feature (67)..(67): n is a, c, g, or t
  misc_feature (75)..(75): n is a, c, g, or t
  misc_feature (378)..(378): n is a, c, g, or t
  misc_feature (383)..(383): n is a, c, g, or t
  misc_feature (386)..(386): n is a, c, g, or t
cccnaacactccactggaaacaacactgaaagtggtttaggtccccaagggcctgttaggccagagnctcccccnaatcccatctgccagaggtgtttccaggtggaaggaagtggagaacagcccttcctcctgcctcccacactgtcctccagcaagggtttcctgtatcctgtgcattgaggattaaattattcacatggtcagagaagcccatcaccactgatagttattgtaggtatggaaaactaacgactaagaagggagaaaaatataccaagcagttggcttggctgaacacaagtaaagactcttacagtcactggtgtgaactgcttattatcaatgtctgattgtgtatatttgtatattacacanttgtngtnattaaatgtgtcagattaactttgttataaaatttatgacaacattaaattttattcacatgaaaaaaaaaaa

SEQ ID NO: 481310 - DNA, 114 bp, Homo sapiens
tctaggccctgtggtagggctgtacctcgcattatgatgctgttgtgacctgcttcctccggagtactttcagctggcttaaattcagtgggtacttgtggtgcgctcgtgcct

SEQ ID NO: 481311 - DNA, 116 bp, Homo sapiens
agtgtgggactgtagtgcagtataccacagcacagctcacagtgcagctagcacacagaacaggagaactacagagcacaaaaggtctacaggatgcacagtacacctattgccta

SEQ ID NO: 481312 - DNA, 145 bp, Homo sapiens
ttcactttctacacagcttagaaaaattaactttgtgaatgaacttaagatgtctgtactctatatgtgatgctgtgcagtattgtattttatatggaaagatgtcaacatatagccactaaccaagtaaaataagaaacgtgat

SEQ ID NO: 481313 - DNA, 392 bp, Homo sapiens
  misc_feature (8)..(8): n is a, c, g, or t
  misc_feature (91)..(91): n is a, c, g, or t
  misc_feature (95)..(95): n is a, c, g, or t
  misc_feature (314)..(314): n is a, c, g, or t
  misc_feature (362)..(362): n is a, c, g, or t
  misc_feature (385)..(385): n is a, c, g, or t
gcctgcgnaacctgcgcggctactacaaccagagcgaggccgggtctcacaccctccagtggatgtatggctgcgacctggggcccgacgngccntcctccgcgggtatgaccagtccgcctacgacggcaaggattacatcgccctgaacgaggacctgcgctcctggactgccgcggacacggcgggtctagatcacccagcgcaagtgggaggcggcccgtgagcggacaagtggagagcctacctggagggcacgtgcgtggaagtggctccgcagataccttggaagaacgggaaggagacgctgcagncgcggaaacacccaaagacacacgtgacccaccatccccgtctctgancatgaggccaccctgaggtgctngggccct

SEQ ID NO: 481314 - DNA, 365 bp, Homo sapiens
  misc_feature (1)..(1): n is a, c, g, or t
  misc_feature (14)..(14): n is a, c, g, or t
  misc_feature (38)..(38): n is a, c, g, or t
  misc_feature (47)..(47): n is a, c, g, or t
  misc_feature (52)..(52): n is a, c, g, or t
  misc_feature (82)..(82): n is a, c, g, or t
  misc_feature (188)..(188): n is a, c, g, or t
  misc_feature (364)..(365): n is a, c, g, or t
ngggactgcgatangaatcatgtctggtcgcggcaaangcggaaaangcttngggaaaggtggtgctaagcgccatcgtaangtgctccgggataacatccaggggcattacaaaaccggctatccgccgttttgctcggcgcgtggcgtcaagcgcatttccggtcttatctatgaagagactcgangtgtgctaaagtttctagagaacgttattcgagacgccgtcacctataacggagcaagccaagcgcaaaactgttcacagccatggatgtatatatgccctaaaaagtcaggggcgcatctgtatggcttcggcggctgaatctagataagcggtctcctgagaacttcaaaaccnn

SEQ ID NO: 481315 - DNA, 178 bp, Homo sapiens
caggaaaaaaaatagaaacctagcggttgctgaaactagagaggctactctcttgtcttccgtgcaggaattccccggttccccagcttgctggaaaaatttgttgaccttttcttttttgtagatttttcttaacagaatcaccagtaacatttccacatgtcccaatacttggtta

SEQ ID NO: 481316 - DNA, 324 bp, Homo sapiens
cccctcgatcacccatgttgacggacccactgagatctacaagttgacccgcacaggaggcccatggagtaggaggctgcagcagtctggctgggacggtcttctgcataaccgagaccctctaacttgagtggggagcatgccagaaagagctcaatgtaagacattaatgcctcatggctcttcatctgtcgttctcttggacctggcggcatgtccatttgtaggtgtgccttttgacggtggctgtcgcgagcgaagattcctgcagcccctaatgcagttgtgtattataacataaactctagtatgacacattttctg

SEQ ID NO: 481317 - DNA, 455 bp, Homo sapiens
agtgttagtgctactgtgtccaaacagacactcatgcataagctgtctgctgcgggattcttgctctcgtctcagagacttgagcctcagctgcaatgtcaggtggcatcacagctaacacactgtcctccatatcctctatgacaatacggcgcaggtctgagtgcagagtctggatgaaggtcacagtggtccataggggtgtctgagctggcgtactgtgctagtactctttgctcgtgctcagctctctgctgtgccagtaattgctcctgaatggctggaggcagggcagccagaaactcagggctcacttcagtcaccccaggattccccagcactgcaggcgctgagctatttgtggagggggcagaccgggttggtggacgaatgcctagctggttctgtagaacttcccgacggatgtcatcaggccgggcagcagaaaagagggg

SEQ ID NO: 481318 - DNA, 474 bp, Homo sapiens
gtgaaactaatttgcccctagtcttggctgctggtaggacttctgaggagcaatgggacatgagttccctgtatatgcgccacttgctcaagggaagcctcaggaaccagcacctggatgccaggattaccaagccctgggtgagcgagaggctggagaacacagtgagctcacccagtggcttgctgcccaaccatgtgccattgtgaactgacttccgtccgctgtatttgtatcataaggcgttgagacatctgatggacttggcttaggccctgctgggacatcccacttgtaatcccttacactccatcaggacaccaggactgtccttaggaaaatgtccttgagatgtgagcaggagtcaaatatgctgtgtgggtgtatcggaaagctgatgtgtactgcctcagcacaaagacccagtgtcttttgctcctcctgttcctgtgccactccagaacctcagcagat

SEQ ID NO: 481319 - DNA, 197 bp, Homo sapiens
taattttaattttggccattgtttggaaaaaataacccgtctgtgtaaatatgaaggatagttttttccataaaacagatgttttttttgttttaaaaaaaacccctggccttgttttaccccctttggaaacatgtggggatattaatgctaaactgtaaaattcaggaattaaaatgtggccctgtttttcccta

SEQ ID NO: 481320 - DNA, 267 bp, Homo sapiens
actcaacaagatgagaataaggaccctttatgatgagccacaaccacttaatgaagagtaaatgtatcttctcttgcttatgacttaacattttcttttctctaacttactttattgtaagaatatacagtataggctgggcacagtggctcacgcctgtaatcccagcactttaggaggctgaaatgggtgggttgtttgaacccttgagtttgagaccagccctggccaacgtaaggagaccccgtgtctattttcattaaaaaa

SEQ ID NO: 481321 - DNA, 297 bp, Homo sapiens
aagatccattcaaaaaaatataaatatttgcaaatgaagtaagtcaagggtacataggtagaattgcagtaattagcaggtagagcacagcaacccctatcgatacaggggccgtttggtgatcaaggtaggatcactagaataaagcgccttgagagcaagccgcatcgggtgtgtttgttttagtcttgggttaggtaggctagtgggttatcaaagggcgggcgggtatttagaatgcccttccttttaacaagcagccttctcctgctccaccagagctatgccaagtcgttg

SEQ ID NO: 481322 - DNA, 284 bp, Homo sapiens
acgtcatcctccgctccatctgcactggctgctattaaacaaagactctgagaggacaccgcagatatgactatctatgtttgtggacacatggacaatctgtgcacttccagcacaatatttgctgctgctcacctgattggttggtatgaccctaaagtaactcgagtcttccatgctggacttggtgtggtgctaggggaagacaagaaaaagtttcaaacacgttcgggtgacacagtgcgcctcatggctcttctgggagcaggactcaaacgatccat

SEQ ID NO: 481323 - DNA, 226 bp, Homo sapiens
ggtgatctgaggtatcccggctatcacatatcacccagcatgtgttcctaccgccacctatacagtttccttagatcaatgaggataagaaaaaacaaaagatccttatttaccttcatttttttccctctatcattattttcctttctttatgtagatctgatgttcaggtccgttggcaaatgaataaccttagtatttgtttgagaagataatgtgatagccg

SEQ ID NO: 481324 - DNA, 227 bp, Homo sapiens
agtatagtgtcgtcaccaccatcatcacaccaccttcaccactcactgtcgtcaccaccatcatcaccaccaccttcaccactcactgtcgtcagcaccatcatcaccatcaccttcaccactcactgtcgtcaccaccatcatcaccatcaccttcaccactcactgtcgtcaccaccatcaccgccaccttcaccactcactggcatcgccagcatcatcaaacc

SEQ ID NO: 481325 - DNA, 508 bp, Homo sapiens
cccaaaaagacacgcacccaacaacgaacgggggttaagggccaaaacccccccaaccacgagccgggaggagaaaagagacggccaacaggagaagggagaacaaagaccgggaaaaacccaccggaaaggaacaccaaaaggccgggcaaaaacggataaaccgaagaagcggaaaccgacaggaggggggaagaccaagccagcagggaaacggagcagagcagaaccagaaccaacaccagagaggcgggggctaaaaaaacccccaaccggataggaaccaccggacccgaaggccaaaggaaaaccccacaaacccgagggcaaggaaaggaaaaccaccaaggaggaaaacgggaagggaccaaacagggggcggaaaggaaaaagggccaagggcaaaaaaacggggaaaaccgcaaacggccgggaaaaaaagggggacggggggcaaaaacaaaggccggggaagaaaaacgggccgggggcggggacaggaggagcc

SEQ ID NO: 481326 - DNA, 583 bp, Homo sapiens
cccgtaccagacgagctacctaagaacagcttaaagagcacacccgtctatgtagccaaatagtgggaagatttataggtagagcggaccaacctaccgagcctggtgatactggttgtcccagatagaatcttagttccactttaaatttgccccccgaaccctcgtaaatcccccttgtaaatttaactgttagtcccaagaggaaccagctctttggacactaggaaaaaaccttgtagagagagtaaaaaatttaacacccctagtaggcctaaagcagccccccattaagaaagcgttcaagctcaacaccccctaccttaaaatccccaacatataactgaactcctcacaccccattggacccatctatcaccctatagaagaactaatgttagtataagtaacatgaaaacattctcctccgcataagcctgcgtcagattaaacactgaactgaccattacagccccatatctaccatcaacccacacagtcattattaccctcactgtcaaccccacacaggcatgctcataaggaaaggtttaaaaaagttaaaggaactcggccaatctta

SEQ ID NO: 481327 - DNA, 199 bp, Homo sapiens
cgggtgatctagagatcccacaagctgacctcttccaccaggtaatgatggtctggaacttcaagtatgatgggcaggtatgagatgtacgcacgggatctcggtggtaagctggtcaagtccaactacagccgctcaccatcgtgaaagagtagccggtttcagatgccatgtccttggggtgaggaagagacctctg

SEQ ID NO: 481328 - DNA, 82 bp, Homo sapiens
gccattggattgagaagaaatttgacgaagccctgaagctgagaggccggagctctcatgaacaactaggagggtgtacaag

SEQ ID NO: 481329 - DNA, 358 bp, Homo sapiens
  misc_feature (115)..(115): n is a, c, g, or t
ctgtgtgccgggaggggtgaggagcgcaaatccggcgcgatgtccgggtcttgagcggcccgcttgtggggcccctcgcgcagaggagactggtgggcctcgggtctccaaccgntcgtcgaggaagtgtaaccgggtcttgcgagcggggcactgggggcactcgagagggtggcgccacaagcaggtggtgctgaccccctgcgtttgaggtgcccatttgcaccgtgatggaaacgaaggttcccaagaccctttaggcgaccgccctcatggtctattcgaattaacgctgaaacccagaggtgcctcagacatcctctcccagtctgatcaaccccgtctgaaagcccgtaat

SEQ ID NO: 481330 - DNA, 884 bp, Homo sapiens
  misc_feature (296)..(296): n is a, c, g, or t
ctccctgcggcgcaccctggaccagcgccgggcctggtcatgcagctctttcaggaccatggcttcttcccgtcagcccaggccacagccgccttccaggcccgctatgcagacatctttccctccaaggtttgtctgcagttgaagatccgtgaggtgcgccagaagatcatgcaggctgccactcccacggagcagccccctggagctgaggctcctctccctgtaccgccccccactggcaccggctgctgcccctgcccccactcccagccccgcagggggccctgaccccnacctcacccagctcggactctggcacggcccaggtgccccgccaagtgctccacccccagagtcggggccttggacagcctgcttgggagggggctccccaaagctttcccaaccccaggttccctcacacagtttgccacaaggcgggttgaggcgaccccgtgagaagatgccagggactttataggtaccccctaaggactatggacaaggtattgtggggggcagggaagggttatctcctccgggtaaagccatttcgccctctcccagtgggggggcggaattgagggcctgctccctctgggtaaaataaccccttttcccctcgaaagctcccctcccgggtgacttggagggggcaagcttgacgggggctcgcagaggctcaggtcctccctcctttcgaaggcccctgtaccataaccctttgggagcgtgtgaaccttcaggagcttttcaacttttatgccaaaatggctccctgtgaggggcttgcaagtctagagggtaggtgcacggccttgggaccacaggggaggcgctgtggaattagggggagtcaatgacccctttttttccccgag

SEQ ID NO: 481331 - DNA, 135 bp, Homo sapiens
ggactgcctgcagtccttcgcgccctcctcgccctcctcaccgacatcatgctccagttcccgcttggattacactgggcaacgtggttggaatgtatctggctagactatgatataccaacctggctaaaaaac

SEQ ID NO: 481332 - DNA, 1260 bp, Homo sapiens
  misc_feature (361)..(361): n is a, c, g, or t
  misc_feature (690)..(690): n is a, c, g, or t
  misc_feature (702)..(702): n is a, c, g, or t
catcaaggacgagctaagagaacacgtgtgttcaagtcaatggacctgaaggagctactcatcttcaagaagcagtgaagtgccttctggggagtcgtgagatcttggaccgagtaggccgatggcatggtgattcggctgccctccttcgccgtggcgacggaatgctcggggatcgagctggttcttcgaagcagcagagtagcctattactgctagcatggggtacgtcaactgcgctggtacctagggtgctatggttcaagggactacagaacgagcccaagcacggcataggaagctgggctaaacgcccgatacaggaattcgcggatgagagagtcgtctctacacgtcaagnaaagttggaatggttaacagaagcagcgaccgatgatattcgcaccgcacgagcaagacgcgagcaggcctccggtaggcgggtccacggccgtccgacgccatgccacaagctcgtcagcgctccatgcgtggcgtggtggaacgtcgcgtctggtcttcaagcaaggatgaagcaccattatcacagacatgcatagatcctggacatctccgggcaacgcgtgtcccggggaacaacgcgatcggaagtcgcacaaggcctatgatgtgaagtaaagctccgcgtgcgcggaacgttgcacaggggcacgggccagagcatagggncgtgtcccatgntagcatcaggcaacctaataacaggtacggtgggagaaccgatgaagtacagaaggatggaggcaagtcaagggaagcctaaaatccgagttgtgtctgaggacttccgtccaggacgtcatccggctccaccaagagccttcagtgagtagtgcttagcgcacatcttggtgcccttggggggcagagggtgaaggcagagctgttgaagttgtgggcccagaggaagtccgggctggctttgcaaaaaaagcagggccaggtcacagacggaggggtcaccaatctggaagcacattgaattaagtctaaaagaggaagccacgttgtggggaccgggacccggagggggcaccacccttgggcatatccggagccacgggggacaacccgtcataggagcacaagagaggggggaccaggtcaaagagccagccacctaaaacgaacgagcgaatcgagaggcgaaaggacaccgatggatacaaccgaggacgcagaagagaacacaaacaaagggagagcacacacgacatgtgcccagaagaaagcagacca
